United States Patent Application Publication US 2005/0196754 A1 - sequence listing, part 16

SEQ ID NO: 33844 - protein, 213 aa, Homo sapiens
  misc_feature (1)...(213): Xaa = X or * as defined in Table 2
LRQNQHEVLKDPRTHTHGGQMGTSSPEQRSTASGAPGWRATSSCVLLASPHHVHHAHGSQEAASTPPVPWTQREYHGWPPGIYPFSSHLHKRLLPNPAREELXRRQQAPWKRHCWRDVTTPESTKNLVESSMVNGGLTSQTKENGLSTSQQVPAQRKKLLRAPTLAELDSSESEPRTAVHSSCTAHRCSAWCLAVSAVCPSRPCQSQRGLALS

SEQ ID NO: 33845 - protein, 122 aa, Homo sapiens
  misc_feature (1)...(122): Xaa = X or * as defined in Table 2
TQGGRIKRHLGTSASPTGIMKYPPYCTCPCFQSALHPVPGGLSGKEAESQXLSPHHPSSQAPGEDPTPSQPRLPKHSTLPALGFPATCGRSPSPKPALPPRGTAPAPPHRYCCYYFPNRSHE

SEQ ID NO: 33846 - protein, 265 aa, Homo sapiens
MAAPSGTVSDSESFNSISDAEELERCREAAMPAWGLEQLPHVAGKPRAGAANSQLSTSQPSLMHKVNEHEQDGNELQTTPEFRAHVAKKLGALLDSFITISKAAKEPAKAKVQKVALGGLMVSAFSSHLVPGRPFRRKSLPNPRRKRQPSSSSSEDSDEEWRRCREAAVSASDILQESAIHSPGTVEKEAKKKRKLKKKAKKVASVDSAVAATTPTSMATVQKQKSGELNGDQVSLGTKKKKKAKKASETSPFPPAKSATAIPAN

SEQ ID NO: 33847 - protein, 489 aa, Homo sapiens
MIDGGHTATGMTGTGFRNSSVLTPKPVVFLRENNTTARVCSEESLVVVTSNTSNLQINTQRPWRKGTTLEPAFSASEMRPRAPRASSPNLPADDMRHRPGDPGSGISRLHGRRTREDTPQCACATLSRPLKKAMWPLHQSESCFFPGPALFPDFRRLAGRKTTLNYRARRLPETSGGEAGGDPLCRYRGKRSLPSVLSTFSGDVGEAREEPLCSYQGKRSLPSVLSTFSGDVGEAREEPLCSYQGKRNLPSVLSTFSGDVGEAREEPLCSYQGKRNLPSVLSTFSGNRGEAGGDPLCRYRGKRSLPSVLSTFSGDVGEAREEPLCSYQGKRNLPSVLSTFSGDVGEAREEPLCSYQGKRNLPSVLSTFSGNRGEAGGDPLCRYRGKRSLPSVLSTFSGDVGEAREEPLCSYQGKRNLPSVLSTFSGDAGEARGTLFAAIEGRETSHLSFVLSLRTLDPSLDQATVISWKLSSLLTGLYTSCHWDVSLSH

SEQ ID NO: 33848 - protein, 201 aa, Homo sapiens
  misc_feature (1)...(201): Xaa = X or * as defined in Table 2
MAGEDETPVPLPICGTRPIDAAAAHMAPVPSHLRKHQRVEVHGFCQVQPSYGPGEDRGLADRGSTDEHNPGAAQPRAAALHAHPGGVSQLPAPAHXAGQPPPTEPQLPVSPAXSNPQVSAPSLSPKQLPSPGSXDPAVPGLAEXKXTNSCPRDYTAVAAVLGSAPAAPAQLHPACTLRAPSLRALQEAGAPQPPMGGSGQR

SEQ ID NO: 33849 - protein, 399 aa, Homo sapiens
  DOMAIN (63)..(248): Sec7 domain identified by PFam, accession name Sec7, E-value= 1e-108, PFam score of 374.6
MDEDGGGEGGGVPEDLSLEEREELLDIRRRKKELIDDIERLKYEIAEVMTEIDNLTSVEESKTTQRNKQIAMGRKKFNMDPKKGIQFLIENDLLQSSPEDVAQFLYKGEGLNKTVIGDYLGERDEFNIKVLQAFVELHEFADLNLVQALRQFLWSFRLPGEAQKIDRMMEAFASRYCLCNPGVFQSTDTCYVLSFAIIMLNTSLHNHNVRDKPTAERFIAMNRGINEGGDLPEELLRNLYESIKNEPFKIPEDDGNDLTHTFFNPDREGWLLKLGGRVKTWKRRWFILTDNCLYYFEYTTDKEPRGIIPLENLSIREVEDPRKPNCFELYNPSHKGQVIKACKTEADGRVVEGNHVVYRISAPSPEEKEEWMKSIKASISRDPFYDMLATRKRRIANKK

SEQ ID NO: 33850 - protein, 302 aa, Homo sapiens
  DOMAIN (228)..(248): VASOPRESSIN V2 RECEPTOR SIGNATURE domain identified by eMATRIX, accession number PR00898F, p-value=5.457e-09, raw score of 9.10
  misc_feature (1)...(302): Xaa = X or * as defined in Table 2
MTRQLSNCWVAAECCDPLRHVTQQVLQEAPIVSQAVGGPSRTNLATTPGSHRSTYCLSGAVSSRNLIEPAGEEAGATRARAEEPPGRLRAPSGGVPSPRPLCCRPPVAGCGSGLKMDEDGGGEGGGAVYCNLELKASGVILAVAAEKPSSGQAVLTNTEHSEPSHLKGKSSEKSYLHATPKEDIASFIAFLNVYKQQGPPXAPSYSTLPPPPSPPPSSSILRPLPQPATGGRQQRGRGLGTPPEGARRRPGGSSARARVAPASSPDGLDEVPRRDSSGETVSRTMAARGCGQVGPAGASYSL

SEQ ID NO: 33851 - protein, 78 aa, Homo sapiens
  misc_feature (1)...(78): Xaa = X or * as defined in Table 2
SPLEKSWPGTSHTWFPXSRPXNPGRPLPDPLPADPLRGVPPPNQRKGMSESSRALITPFHPPLTPAPLXNRPFLWSLF

SEQ ID NO: 33852 - protein, 253 aa, Homo sapiens
  misc_feature (1)...(253): Xaa = X or * as defined in Table 2
TPRAPLCRGAASAARSCKWAPWPSRPRPRHPXSCAEAREGSAAQIPPASKLKHGGPSPPAAPRRGHPRLLPAPPVVPLPATAPAAVPSAPGKPFPTPPGLPKADPGPIGGPLSAFSGSPPFPVHEPTVLGSPQSTRNLPRPPAAXPPVAWARDAPGSSPAAAAAKQTFASTQQTPKTTXEPRSPTGPAPALAKLFLTPGTCAPGQPSRKIKLPSRPVAPMGTIENIGYITKAFDWNVLFSDTTKGVRVDCMVQ

SEQ ID NO: 33853 - protein, 266 aa, Homo sapiens
  DOMAIN (192)..(216): HMW KININOGEN SIGNATURE domain identified by eMATRIX, accession number PR00334B, p-value=9.460e-10, raw score of 8.69
  misc_feature (1)...(266): Xaa = X or * as defined in Table 2
TLLMSHQKLLPLPQIKTPRSFHHSRHLHHQHRHHQKQHHKKHHHHFYYHHXNHHHHHHHCHTPSPHHHHRHHYYHHHHHHPHQHHQHHNINHHYHHYHHHHQHHQRHHHPSCTVCPQEEXHNEHRKRPHRCWKVQDPRNLGYLYIPTTHSELRLALSKHLPSFLXNKVSIYYRQSPDLCPHLNLNPHQYHHRYHHQYYHHHRRHKHYPHHHHHLHHHHHNHHHQNHHHHQETPLHRTLGLPQGPRRRSSAAQPPPPPPPPLLSRRH

SEQ ID NO: 33854 - protein, 75 aa, Homo sapiens
  DOMAIN (60)..(75): WILM'S TUMOUR PROTEIN SIGNATURE domain identified by eMATRIX, accession number PR00049D, p-value=7.500e-10, raw score of 0.00
WDPPPEFPGRRPRRESSGFPASILLVTEPGARSPPRPAAHSHPPSPLHRTLGLPPRHPDGAAAPRSSPPPPPPSP

SEQ ID NO: 33855 - protein, 419 aa, Homo sapiens
  DOMAIN (134)..(179): kw TRANSCRIPTASE REVERSE II ORF2 domain identified by eMATRIX, accession number DM01354N, p-value=1.000e-40, raw score of 13.17
  DOMAIN (74)..(306): Reverse transcriptase domain identified by PFam, accession name rvt, E-value=2e-06, PFam score of 21.5
MKAEIKMFFETNENKDTTYQNLWDTFKAVCRGKCIALNAHKRKQERSKIDTLTSQLKELEEQEQTPSKASRRQEITKIRAELKSWFFEKINKIDKLLARLIKKKREKNQIDAIKNDKGDITSDPTEIQTTIREYYKHLYANKLENLEEMVEFLDTYTLPRLSQEEVESLNRPITGSEIEAIINSLPTKKSPGPDGFTAKFYQMLEVLARAIRQEKEVKGIQLGKEEVQLSLFADDMIVYLENPIISAQNLLKLISNFSKVSGYKINVQKSQAFLYTNNKQTESQIISELPFTIASKRIKYLRIQLTRDVKDLSKENYKPLLNEVKEDTKKWKNIPCSWVGRINIEKMAILPKVIYRFNAIPIELPMTFFTELEKTTLKFIWNQQRARIAKSILSQKNKAGGITLPDFKLYYKATVTKIA

SEQ ID NO: 33856 - protein, 711 aa, Homo sapiens
  DOMAIN (197)..(238): kw TRANSCRIPTASE REVERSE II ORF2 domain identified by eMATRIX, accession number DM01354I, p-value=7.511e-34, raw score of 15.55
  DOMAIN (1)..(184): AP endonuclease family 1 domain identified by PFam, accession name AP_endonucleas1, E-value=2.2e-27, PFam score of 104.4
  misc_feature (1)...(711): Xaa = X or * as defined in Table 2
WRRIYQANGKXKNKQKKAGVVILVSDKTDFKPTKIKRDKEGHYIMVKGSIQQEELTVLNIYAPNTGAPRFMKQVLRDLQRDLDPHTTIMGDFNTPLSTLDRSARQKVNKDIQELNSALHQADLINIYRILHPKSTEYTFISAPHRTYSKIDHIVGRKALLRKYKRTEIITDCLSDHSAIKLELRIKKLTQNSSTTWKLNNLLLNDYWIHNKTKAEIKMCFETSENKDTTYQNLWDTCKAVCREKFIALNAHKRKQERSKIDTLTSQLKELEKQEQTHSKASRRKSRRNGXIPGHIHPPKTKPGRIXVPEXTNNRVXNXGNNXXLTNQKKFRTRRIHSQILPEHSAGSSGQGNQAGERNKGYSIRKRGSQIVPVCRXHDCIFRKPHHLSPKSPXAVKQLQQSLRIQNQRAKITSSPIHQXQTNREPNHEXTFIHNCFKENKIPRNPTYKGCEGPIQGELQTTAQQNKRGHKQMEEHSMLMDRKNQYHENGHSAQGNLXIQCHPHQATNDFLHRIGKNYFKVHMEPKKSPHCQVNPKPKEQSWRHHATXLQTILQGYSNQNSMVLVPKQTYRPMEKNRGLRNNTTHLRPSSLXQTXQKQEMGKGFPIXXMVLGKLASHMXKAETGSLPYTLYKNXFKMDXRLKCXTXNHKNLRRKPRQYHSGHRHEQGLYVXNTKSNGNKSQNXQMGSNXTKELLHSKRNYHQSEQATYRMGV

SEQ ID NO: 33857 - protein, 632 aa, Homo sapiens
  DOMAIN (312)..(359): kw TRANSCRIPTASE REVERSE II ORF2 domain identified by eMATRIX, accession number DM01354V, p-value=1.000e-40, raw score of 12.97
  DOMAIN (93)..(325): Reverse transcriptase domain identified by PFam, accession name rvt, E-value=0.00021, PFam score of -7.1
MGDFNTPLSTLDRSTRQKVNKDIQELNSALHQADLIDIYRTLHPKSTEYTFFSAPHHTYSKIDHILGSKALLSKCKRTEIITNCLSDHSAIKLELRIKKLTQNCSTTWKLNNMLLNDYWEHNKMKAEIKMFFETNKNKDTTYQNLWDTLKAVCRGKFKALNAHKRKKERSQIDTLTSQLKELEKQEQTHSKASRRQEITKIRAELKETETQKTLQRLMNPGAVLEVLARAIRQEKEIKGIQLGKEEVKLSLFADDMIVYLENPIVSAQNLLKLISNFSKVSGYKINIQKSPAFLYTNKRQTESQIVSELPFTIASVRIKYLGIQLTRDVKELFKENYKPLLNEIKQDTNKWKNIPCSWVGRINIVKMAILPKGIYRFNAIPIKLPMTFFTELEKTTLKFIWNQKRAHIAKSILSQKNKAGGITLPDFKLYYKATVTKTAWYWYQNRDIDQRNRTEPSEIMLCIYNHLIFDKPDKNKQWEKDSLFNKWCWENWLAICRKLKLDPFLTPYTKINSRWIKDLHIRPKTIKTLEGNLGNTIQDIGMGKDFKSKTPKAMATKAKIDKWDLIKLKNFCTAKETTIRVNRQPTEWEKIFATYSSDKRLISRIYNELKQIYKKKTPNHIKKWVKDMNRHF

SEQ ID NO: 33858 - protein, 431 aa, Homo sapiens
  DOMAIN (210)..(255): kw TRANSCRIPTASE REVERSE II ORF2 domain identified by eMATRIX, accession number DM01354N, p-value=1.000e-40, raw score of 13.17
MRKKQCENSGNLNGQSVLCSPNDHTSSSTRVLNQAELAGMTEIEFRIWTGTKIIEIQENSKTQSKENKNHNKVILELKDKIASIKMNLTVCRGKFIALNAHKRKQERSKTDTLTSQLKELEKQEQTHSKASRRQEITKIRAELKEIETQKTLQKIDESRSWFFEKINIIDRLLARLKKKKREKNQIDTIKNDKGDITTDPTEIQTTIREYYKYLYANKLENLEETDKFLDTYTLPKLNQEEVESLNRPITGSEIVAIIHSLPTKRSPGPDGFTAEFYQRYKEELTNSQIMSELPLTIASKRIKYLGIQLTRDVKDLFKENYKPLLNEIKEDTNKWKNIPCSWVGRINIVKMAILPKVIYRFNAIPIKLPMPFFTELEKTTLKFIWNQKRAHIAKTILSQKNKAGGIMLPDFKLYYKATVTKQHGTGTKTEM

SEQ ID NO: 33859 - protein, 365 aa, Homo sapiens
  DOMAIN (57)..(100): kw TRANSCRIPTASE REVERSE II ORF2 domain identified by eMATRIX, accession number DM01354T, p-value=1.000e-40, raw score of 9.48
  DOMAIN (1)..(179): Reverse transcriptase domain identified by PFam, accession name rvt, E-value=3.7e-14, PFam score of 60.5
MIISIDAEKAFDKIQQHFMLKTLNKFGIDGTYLKIIRAIYDKPTANIILNGQKLEAFPLKTGTRQGCPLSLLLFNIVLEVLARAIRQENEIKGIQLGKEEVKLSLFADDMTVYLENPIVSAQNLLKLISNFSKVSGYKINVQKSQAFLYTNNRQTESQIMSELTFTIASKRIKYLGIQLTRDVKDLFKEDYKPLLNEIKEDTNKWKNIPCSWVGRINTVKMAILPKVIYRFNAIPIKLPMTFFTELEKTTSKFIWNQKGAHIAKSILSQKNKAGGIMLPDFKLYYKATVTKTAWYWYQNRDIDQWNRTEPSEITPHIYNHLIFDKPEKNKQWGKDSLFNKWCWENWLAICRKLKQNHNEIPSHTS

SEQ ID NO: 33860 - protein, 470 aa, Homo sapiens
  DOMAIN (143)..(188): kw TRANSCRIPTASE REVERSE II ORF2 domain identified by eMATRIX, accession number DM01354N, p-value=1.000e-40, raw score of 13.17
MFFETSENKDTTYQNLWDTLKAVCRGKFIELNAHKRKKERSKIDTLTSQLKELEKQEQTHSKATRRQEITKIRAELKEIETQKTLQNINESRTWFFEKINKIDRQLARLIKKKRLKNQIDAIKNDKGDITTDPTEIQTTIREYYKHLYTNNLENLEEMDKFLDTYTLPRLNQEEVKSLNRPITGSEIEAIINSPPTEKTPGPDGFIAEFYQSFKENKIPKIQLTRDVKDLFKENYKPLLNEIKEDTNKWKNIPCSWMGRINIMKMAILPKVIYRFNAIPIKLPMTFFTELEKTTLKFIWNQKRAHIAKSILSQKNKAGGITLPDFKLYYKATVTQTAWYWYQNRDIDQWNRTEPSEIIPHIYNLDKRDKKKKWGNDSLFNKWCWENWLAICRKLKLDPFLTPYTKINSRWIKDLNVRPKTIKTLEENLGNTIQAIGMGKDFMTKSPKTMATKAKIDKWDLIKQQKKLPSE

SEQ ID NO: 33861 - protein, 513 aa, Homo sapiens
  DOMAIN (237)..(284): kw TRANSCRIPTASE REVERSE II ORF2 domain identified by eMATRIX, accession number DM01354V, p-value=1.000e-40, raw score of 12.97
  DOMAIN (35)..(250): Reverse transcriptase domain identified by PFam, accession name rvt, E-value=1.5e-05, PFam score of 9.0
MELKAKAQELCEECRSLRSRHDQLEERVSVMEDQMNEMKQEEKFREKRIKRNKQSLQEIWDYVKRPNLCLIGVPQSDRENGTKLENTLQDIIQENFPNLARQATIQIQEIQRTPQRYFSRRATPRHIIVRFTKVEMKEKMLRAAREKVLEFLARAIRQEKEIKVIQLGKEEVKLSLFADDMIVYLENPIVSAQNLLKLISNYSKVSGYKISVQKSAAFLYMNNRQTESQIMSELPFTIASKRIKYLGIQLTRDVKDLFKENYKPLLNEIKEDTNKWKNITCSWVGRINIMKMAILPKVIYRFNAIPIKLPMTFFTELEKTTLKFIWNQKRARIAKSILSQKNKAGGIMLPDLKLYYKATVTKTAWYWYQNRDIDQWNRTEPSEIMPHIYNYLIFDKPDKNKQWGKDSLFNKWCWENWLAICRKLKLDPFLTPYTKINSRWIKDLNVRPKTIKTLEENLGNTIQDIGMGKDFMSQTPKAMATKAKTDKWDLIKLKSFCTAKETTIRVNRQPTKW

SEQ ID NO: 33862 - protein, 389 aa, Homo sapiens
  DOMAIN (224)..(271): kw TRANSCRIPTASE REVERSE II ORF2 domain identified by eMATRIX, accession number DM01354V, p-value=1.000e-40, raw score of 12.97
  DOMAIN (1)..(237): Reverse transcriptase domain identified by PFam, accession name rvt, E-value=5.2e-07, PFam score of 29.8
MGDFNTPLSTLDRSTIQKVNKDIRELNSALHQVDPIDIYRTLHPKSTEYTFFSAPHHSYSKIDHIVGSKALLSKCKRTEIITNCLPDHSAIKLELRIKKLTQNHSTTWKLNNLLLSDYSVHNEMKAEIKMFFETMLEVLARAIRQEKEIKGIQLGKEEVKLSLFADDMIVYLENPIVSAQNLLKLISNFSEVSGYKINVQKSQAFLYTNNRQTESQIMSELPFTIASKRIKYLGIQLTRDVKDLFKENYKPLLNEIKEDTNKWKNIPCSWVGRINIVKMAILSRVIYRFNAVPIKLPMTFFTKLEKTTLKVIWNQKRAHIAKSILSQKNKAGGIMLPDFKLYYKATVTKTAWYWYQNRDLDQWNKTEPSEIIPHIYKHLIFDKPDKNKQ

SEQ ID NO: 33863 - protein, 525 aa, Homo sapiens
  DOMAIN (42)..(87): kw TRANSCRIPTASE REVERSE II ORF2 domain identified by eMATRIX, accession number DM01354N, p-value=1.000e-40, raw score of 13.17
  DOMAIN (126)..(373): Reverse transcriptase domain identified by PFam, accession name rvt, E-value=3.2e-62, PFam score of 220.1
MLTETFPSQKKNSSGHQHNQKQLLFAKICRMFKDIQTTIREYYKNLYANKRENLEEMDRFLDTYTLPRLNQEEVESLNRPITGSEIVAIINSIPTKKSPGPDGFTAEFYQRYKEELVPFLLKLFQSIEKEGNLPNSFYEASIVQIPKPGRDTTKKENFRPISLTNIDAKILSKILANRIQQHIKKFIHQNQVGFIPGMQGWFKIHKSINVIQHINRTKDKNHMIISIDAEKAFDKIQQCFMLKTLNKLGINGTYLKIIRTIYDKPTANIILNGQKLEAFPLKTGTRQGCPLSPLLFNIVLEVLARAIRQEKEIKAQNLLKLISNLSKISGYKINAQKSQAFLYTSNRQTESQIMSELPFTIASKRIKYLGIQLTRDVKDLFKENYKPLLSEIKEDANKWKNIPCSWVGRINILKMALLPKIIYGFNAIPIKLPMTFFTELEKITLKFIWNQKRAHIAKSILSQKNKAGGIMLPDFKLYYKATVTKTAWYWYQNRDIDQWNTTEPSEIMPHIYNYLIFDKPDKNKK

SEQ ID NO: 33864 - protein, 550 aa, Homo sapiens
  DOMAIN (100)..(147): kw TRANSCRIPTASE REVERSE II ORF2 domain identified by eMATRIX, accession number DM01354V, p-value=1.000e-40, raw score of 12.97
MPSLTNPIQHSVGSSGQGNEAGERNKGYSIRKRGSQIALFADDMIVYLENPTVSAQNLLKLIGNFSKVSGYKINVQKPQAFLYTNNRQTQSQIISELPFTIASKRIKYPGIQLTKDVKDLFKENYKPLLKEIKEDTNKWKNIPCSWIGRINIVKMAILPKVIYRFNAISIKLPMTFFTELEKTTLKFIWNQKRACIAKSILSQKNKAGGIMLPDFKLYYKATVTKTAQYWNQNRDRDQWNRTEPSEIMPHIYDHLIFDKPDKNKKWGNNSLFNKWCWENWLAIWRKLKLDPFLTPYTKINSRWIKDLHVRPKIIKTLEENLGNTIQDIVMGKDFMSKTPKAMATKAKIDKWDLIKLKSFCTAKETTIRVNRQPTKWEKIFGIYSSDKGLISRIYNELQQIYKKKTNNPIKKWVKDMNRYFSKEDIYAAKRHMKKCSSSLAIREMQIKTTMRYYLTPLRMAIIKKFGNNRQETVREMACLLSGTMDFRHRACFVLSKPDFSTRWPGADAQRPPVLVVVALDSSLPFPQASGQRPPSLEDVDGGAGALVAPC

SEQ ID NO: 33865 - protein, 643 aa, Homo sapiens
  DOMAIN (312)..(359): kw TRANSCRIPTASE REVERSE II ORF2 domain identified by eMATRIX, accession number DM01354V, p-value=1.000e-40, raw score of 12.97
MQVMVLRRNMDIQVQGSEVNTSESIRSSNPMASIASENKRRNQGLRVKGHTKHGQRLGQSDGGHCGVEMRANGPYEGCDHEFTMILLCPVVWLSPSSPHCSDTDMEKSEMRLGFCHINVKKKANKEAAIPITREPSTLTAVSPGFNNLPNGSSGPRAVSPLSYGQKALVTIKSTNRNVKEDKHRGKVTSLSWLPKTCPVFMLKSSNSGQLETPGHPIWGSKSNAYKEISTEALCEEATQSQGKNHLKELEGQCPEFTQTLEFCLFPIATVQTFISNFSKVSGYKINVQKSQAFLYTNNRQTESQIMSELPFTIASKRIKYLGIQLTRDMKDFFKENYKPLLSEIKEDTNKWKSIPCSWVGRINIVKMAILPKVIYRFNAIPIKLPMTLFTELEKTTLKFIWNQKRAHIAKSILSQKNKAGGITLPDFKLYYKATVTKTAWYWYQNRDINQWNRTEPSKITPHIYNYLIFDKPEKNKQWGKDSLFNKWCWENWLAICRKLKLDPFLTPYTKINSRWIKDLNVRPKTIKTLEENVGITIQDIGMGKDFMSKTPKAMATKAKIDKWDLIKLKSFCTAKETTIRVNRQPTKWEKIFTTYSSDKGLIFRIYNELKQIYKKKTNNPIKNWSNIFEALKEIIVNLKAFIL

SEQ ID NO: 33866 - protein, 816 aa, Homo sapiens
  DOMAIN (57)..(104): kw TRANSCRIPTASE REVERSE II ORF2 domain identified by eMATRIX, accession number DM01354V, p-value=1.000e-40, raw score of 12.97
  DOMAIN (496)..(778): Kelch motif domain identified by PFam, accession name Kelch, E-value=1.2e-100, PFam score of 347.8
MIVCLENPIISAPNLLKLISNFSKVSGYKISVQKSQGFLYTNNRQTESQIMSELPFTIATKRIKYLGIQLTRDVKDLFKENYKPLLNEIKEDTNKWKNIPCSWVGRINIMKMAILPKVIYRFSAIPIKLPMTFFTELEKTTLKFIWNQKRARIAKSILSQKNKAGGIMLPDFKLYYKATVTKTAWCTNIRPGETGMDVTSRCTLGDPNKLPEGVPQPARMPYISDKHPRQTLEVINLLRKHRELCDVVLVVGAKKIYAHRVILSACSPYFRAMFTGELAESRQTEVVIRDIDERAMELLIDFAYTSQITVEEGNVQTLLPAACLLQLAEIQEACCEFLKRQLDPSNCLGIRAFADTHSCRELLRIADKFTQHNFQEVMESEEFMLLPANQLIDIISSDELNVRSEEQVFNAVMAWVKYSIQERRPQLPQVLQHVRLPLLSPKFLVGTVGSDPLIKSDEECRDLVDEAKNYLLLPQERPLMQGPRTRPRKPIRCGEVLFAVGGWCSGDAISSVERYDPQTNEWRMVASMSKRRCGVGVSVLDDLLYAVGGHDGSSYLNSVERYDPKTNQWSSDVAPTSTCRTSVGVAVLGGFLYAVGGQDGVSCLNIVERYDPKENKWTRVASMSTRRLGVAVAVLGGFLYAVGGSDGTSPLNTVERYNPQENRWHTIAPMGTRRKHLGCAVYQDMIYAVGGRDDTTELSSAERYNPRTNQWSPVVAMTSRRSGVGLAVVNGQLMAVGGFDGTTYLKTIEVFDPDANTWRTCSSTPRPKRIAIVLVIISMFQAAKLEEGKKLLHPLDVLRKKCPDFEGYRVQTKEIQ

SEQ ID NO: 33867 - protein, 834 aa, Homo sapiens
  DOMAIN (308)..(353): kw TRANSCRIPTASE REVERSE II ORF2 domain identified by eMATRIX, accession number DM01354N, p-value=1.000e-40, raw score of 13.17
  DOMAIN (376)..(651): Reverse transcriptase domain identified by PFam, accession name rvt, E-value=2.1e-78, PFam score of 273.9
MTELTGIQQPQIVLFEHKGHKLVQGSSSDAGKVNRIYQHYEASDKFNYTTGLAWKTAPEQTGKTVRKQQIKLNVKKMESRSKMQEHSSSPPMEQSWRENDFDELREEAFRRSNYSELQEEIQTKGQEVKNFEKTLDEYITRITNTEKCLKELMELKAKARELREECRSLRSRCDQLEERVSVMEDEMNEMKREGKFREKRIKRNEQSLQEKWDYVKTPNLRLIGVPESDGENGTKLENTLQDIIQENLPNLVRQANIQIQEIQRTPQRYSSRRATPRHIIVRFTKVEMKEKMLRAAREKEIQTTIREYYKHLYANKLENLEEMDKFLDTYTLPRLNQEEVESLNRPITGSEIVAIINSLPTKKSPGPVGFTAEFCQRKEGILSISFCEASIILIPKLGRDTTKKENFRPISLMTIDTKIFNKILANQIQQHIKKLIHHDQVGFIPGMQGWFNICKSINVIQHINRTKDKNHMIISIDAEKAFDKIQQLFMLKTLNKLGIDGTYFKIIRAIYDKPTANIILNGQKLEAFPLKTGTRQGCPLSPLLFNIVLEVLAGAIRQEKEIKGVQLGKEEVKLSLFADDMIVYLENHIVSAQNLLKLISNFSKVSGYKINVQKSLAFLYTNNRQTESQIMSELPFTIASKRIKYLGIQLTRDVKDLFKENYKPLLNEIKEDTNKWKNIPCSWVGRINIVKMAILSKVIYRFNAIPINLPITVFTELEKTTLKFTWNQKRAHIAKSILSQKNKAGGITLPDFKLYYKATVTKTGWYWYQNRDIDQWNRTEPSEITTHIYNYLIFDKPEKNKQRGKDSLFNKWCWENWLAICRKQCVFIVPPTEG

SEQ ID NO: 33868 - protein, 732 aa, Homo sapiens
  DOMAIN (447)..(487): kw TRANSCRIPTASE REVERSE II ORF2 domain identified by eMATRIX, accession number DM01354Y, p-value=3.250e-40, raw score of 10.69
  DOMAIN (173)..(345): Reverse transcriptase domain identified by PFam, accession name rvt, E-value=0.00047, PFam score of -12.0
MNNAKENFLGRFQDGRIGTAPVYSPQHQRRRRRVISALPTEPPLVIPRQTGFGVDLQQTPTDLQLRVLTVRRKTTKQEGHSTKTPSVRYHHQRPKEDKTTKMGRNQSRKAENSKNESASSPPKECSSSPATEQSWMENDFDKYTEVGFRQLVITNFSELKEDVQTHHKEAKNLEKRLDEWLTRINSIENTLIDLMELKTMARELRDSCTSFSRQFDQVEERVSVIEDQMNEMKREEKFREKKMLEVLPRAIRQEKEIKGIQLGKEEVKLSLFADNMTVYLENPIISAQNLPKLISNFSKVSGYKINVQKSQAFLYTNNRQTESQIMSELSFTIASKRIKYLGIQLKRDVKELFKNYKPLLKEIKEDTNKWKNIPCSWVGRTNIVKMAILPKIIYRFNAIPIKPPMTFFTELEKTTLKFIRNQKRAHIAKTILSKKNKAGGIMLPDFKLYYKATVTKTAWYWYQNRDIDQWYRAEASEIMPHIYNYLIFDKPEKNKQWGKDSLFNKWCWENCLAICGKLKLDPFLTPYTKINSRWIKDLNVRPKAIKILEENLGNTIQDTGMGKDFMSKTPKAMATKAKIDKWDLIKLKSFCTAKETTIRVNRQPTKWEKIFATYSSDKGLISRIYNELKQIYKKKTNNSINKRAKDMNRHFSKEDIYAAKRHMKKCSSSLAIREMQIKTTMRYHLTPPEVEVVLETLNHRSWRWWSWRKLQLSWWLWWQSWWWWLWWRWGWL

SEQ ID NO: 33869 - protein, 1110 aa, Homo sapiens
  DOMAIN (624)..(669): kw TRANSCRIPTASE REVERSE II ORF2 domain identified by eMATRIX, accession number DM01354N, p-value=1.000e-40, raw score of 13.17
  DOMAIN (5)..(163): Reverse transcriptase domain identified by PFam, accession name rvt, E-value=0.005, PFam score of -26.6
  misc_feature (1)...(1110): Xaa = X or * as defined in Table 2
NLEEMDKYLDTYTLPRLNQEEFESLNRPITGSEIEAIINSLPTKKSSGPDGFTAKFYQSIVLEVLARAIRQEKEIKGIQLGKEEVKLSLFADDMIVYLENPIISAQNLLKLLSNFSKVSGYKINVQKSQAVLYTNNKQTESQIMSEPSFTIASKRIKYLGIQRTRDVKDLFKENYKPLLNKIKEDTNKWKNTPCSWIGRINIMKMAIVPKVIYRFNAIPIKLPMTFFTELEKTTLKFIWNQKRARIAKSILSQKNKAGGITLPDFKLYYKATVTKTAWYWYQNRHIDQWKRTEASEIIPHIYDHLVFDKPDKNKKWGKDSLFNKWCWENWLAICRKLKLDPFLTPYTKINSRWIKDLNVRPKTIKTLEENLGNTIQDIGMSKDFMSKTPKAMATKAKIDKWDLIKLKSFCTAKETTIRVNRQPTEWETIFAIYSSDKGLISRIHKELKIIYKRKTNNPIKKQTGSGMDIQQTAADLQQRSLTVRRKTNKQKGIASTSTKRTSTPKPHPKVINIKDQRKQERSKIDTLTSQLKELEKQEQTHSKASRRQEITKITAELMETETQKTLPKINESKNWFFEKINKIDRPAARLIKKKREKNQIDAIKNDKGDITTNPTEIQTTIREYYKQLYANKLENLEEMDKFLNAYILPRLNQEEVESLNRPITGSEVEAIINSLPTKKSSGPDGFTAEFYQRYKEELADKQLQQSFRIQNQCAKITSILIHQXQTNREPNHEXTPIHNCFKENKIPRNPTYKECEGPLQGELQTTAQRNXRGHKQMEEHSMLMDRKNQYCENGHTAQGNVWIQCHPHQATNDFLHRIGKNYFKVHMEPKESPHCQVNPKPKEQSWRHHATXLQTILQGYIIQNSMAVVPKQRYRPMEQNRALRNNAAXLQPSDLXQTXQKQAMGKGFPIXXMVLGKLASHMXKAEAGSLPYTLYKNXFKMDXRLKRXTXNHKNPRRKPRQYHSGHKHGQGLHVXNTKSNGNKSQNXQMGSNXTKELLHSKRNYHQSEQATYKMGENFRNLLIXQRANIQNLQXTQTNLQEKNKQPHQKVGEGYEQTLLKRRHLCSQKTHEKMVIITGHQRNANQNHNEMPSHTSXNGDHXKVRKQRVFN

SEQ ID NO: 33870 - protein, 983 aa, Homo sapiens
  DOMAIN (204)..(250): kw TRANSCRIPTASE REVERSE II ORF2 domain identified by eMATRIX, accession number DM01354O, p-value=1.000e-40, raw score of 8.73
  DOMAIN (237)..(512): Reverse transcriptase domain identified by PFam, accession name rvt, E-value=5.3e-86, PFam score of 299.1
KPRLENYMKNAEASRADAINWKKGYLVMEDKMNEMKREGKFREKRIKRNKQSLQEIWDYVKRPNLRLISVPESDRENGTKLENTLQDIIQENFPNLARQANIQIQEIQRTPQRYSSRRATPRHIIVRFSKVEMKEKMLRAAREKEIQTNIREYYKHRYANKLENLEEMDKFLNIYTLRRLNQEEVESLNRPIRGSEIVAIINSLPTKKSPGPDGFTAEYYQRYKEELVPFLLKLFQSIEKEGILPNSFYEASIILIPKPGRDTTKKENFRTISLMNIDAKILNKILANRIQQHIKKLIHHDQVGFIPGMQGWFNIRKSINVIQHINRTKDKNHVIISIDAEKAFDKIQQLFLLKTLNKLGIDGTYLKIKRAIYDKPTANIILNGQKLEAFPLKTGTRQGCPLSPLLFNIVLEVLARAIRQEKEIKGIQLGKEEVKLSLFADDMIVYLENPIVSAQNLLKLISNFSKVSGYKINVQKSQAFLYTNNRQTETQIMSELPFTIASKRIKYLGIQLTRDVKDLFKERSYEPLLNEIKEDTNKWKNIPCSWVGRINIVKMAILPKVIYRFNAIPIKLPMTFFTELEKTTLKFIWNQKRALIAKSILSQKNKAGGITLPDFKLYYKATVTKTAWYWYQNRDIDQWNRTEPSEITLHIYNYLIFDKPEKNKQWGKDSLFNKWCWENWLAICRKLKLDPFLTPYTKINSRWIKDLNVRPKTIKTLEENLGITIQDIGMGKDYMSKTPKAMATKAKIDKWDLIKLKSFCTAKETTIRVNRQPTKWEKIFATYSSDKGLISRIYNELKQIYKKKTNNPIKKWVKDMNRHFSKEDIYAAKKHMKKCSPSLAIREVQIKTTMRYHFTPVRMAIIKKSGNNRCWRGCGEIGTLLHCWWDCKLVQPLWKSVWRFLRDLELEIPFDPAIPLLGVYPKDYKSCCYKDTCTRSSDEPRSVRCRFLNHGIRSRNACIPLPERMPFCSWNRYAIPFLGSAMP

SEQ ID NO: 33871 - protein, 520 aa, Homo sapiens
  DOMAIN (154)..(195): kw TRANSCRIPTASE REVERSE II ORF2 domain identified by eMATRIX, accession number DM01354I, p-value=1.000e-40, raw score of 15.55
  DOMAIN (1)..(140): AP endonuclease family 1 domain identified by PFam, accession name AP_endonucleas1, E-value=1.9e-08, PFam score of 12.3
MVKGSIQQEELTILNIYAPNTGAPRFIKQDLSDLQRDLDSHTLIMGDFNTPLSTLDRSTRQKVNKDTQELNSALHQADLIDIYRTLHPKSTEYTFFSAPHHTYSKIDHILGSKALLSKCKRTEIITNYLSDHSAIKLELRIKNLTQSRSTTWKLNNLLLNDYWVHNEMKAEIKMFFETNKNKDTTYQNLWDTFKAVCRGKFTALNAYKRKQERSKIDTLTSQLKELEKQEQTHSKASRRQEITKIRAELKEIETQKTLQKINESRSWFFERINKIDRPLARLIKKKREKNQIDTIKNDKGDITTDPTEIQTTIREYYKHLYANKLENLEEMDKFLHTYTLPRVNQEEVESLNRPITGSEIVAIINSLPTKKSPGPDGFTDEFYQRYKEELVPFLLKLFQSIEKEGILPNSFYEASIILIPKPGRDTTKKENFRPISLMNIDAKILNKILANQIQQHIKKLIHHDQVGFIPGMQGWFNMCKSINVIQHINRAKDKNHMIISIDAEKALDKIQRVLHAKNSQ

SEQ ID NO: 33872 - protein, 132 aa, Homo sapiens
  DOMAIN (7)..(111): CUB domain identified by PFam, accession name CUB, E-value= 3.2e-27, PFam score of 103.9
RRSGTPCGYNVTSQNGTIYSPGFPDEYPILKDCIWLITVPPGHGVYINFTLLQTEAVNDYIAVWDGPDQNSPQLGVFSGNTALETAYSSTNQVLLKFHSDFSNGGFFVLNFHAFQLKKCQPPPAVPQAEMVN

SEQ ID NO: 33873 - protein, 190 aa, Homo sapiens
  DOMAIN (73)..(85): Sushi domain proteins (SCR repeat proteins domain identified by eMATRIX, accession number PF00084B, p-value=7.188e-10, raw score of 9.45
  DOMAIN (56)..(113): Sushi domain (SCR repeat) domain identified by PFam, accession name sushi, E-value=2.6e-07, PFam score of 37.7
  misc_feature (1)...(190): Xaa = X or * as defined in Table 2
PTIVGVVIKFSVCISSPWSHLKPTFHATSWLADGDTDGCVLYFASSCSSYQXHPCSSVPEPRYGRRIGSEFSAGSIVRFECNPGYLLQGSTALHCQSVPNALAQWNDTIPSCVAPELREECRSLRSRCDQLEEMVSVMEDEMNEMKREGKFREKRIKRNEQSLQEIWDYVKRLNLRLIVVPERDRDNGTK

SEQ ID NO: 33874 - protein, 373 aa, Homo sapiens
  DOMAIN (55)..(67): Sushi domain proteins (SCR repeat proteins domain identified by eMATRIX, accession number PF00084B, p-value=7.188e-10, raw score of 9.45
  DOMAIN (37)..(326): Sushi domain (SCR repeat) domain identified by PFam, accession name sushi, E-value=1.7e-07, PFam score of 38.4
  misc_feature (1)...(373): Xaa = X or * as defined in Table 2
MMARGAGVLIRKIYPLNYKHSAVEQVSRAYSFYTQRPVVPEPRYGRRIGSEFSAGSIVRFECNPGYLLQGSTALHCQSVPNALAQWNDTIPSCVVPCSGNFTQRRGTILSPGYPEPYGNNLNCIWKIIVTEGSGIQIQVISFATEQNWDSLEIHDGGDVTAPRLGSFSGLTPHWKLSRCMACDPSERGLSCTWALVIHKMEPEQPVCGKQHPEDSQGRKGPGPGPQNHLLLPGFXVSDGRGRSRSELTPAGSFQWQHSPRNGVXLHQPSPAQVPQRLFKWRLLCPQFPGDFVKYQCHPGYTLVGTDILTCKLSSQLQFEGSLPTCEATPSSQCVWVSPHRPEARLPAHGPAPKRHVCQKASLLICGKEGMQLV

SEQ ID NO: 33875 - protein, 226 aa, Homo sapiens
  misc_feature (1)...(226): Xaa = X or * as defined in Table 2
RHLLGAQCLSRAPWCWNNQASFPFPRCPRAKGQGTARASFSWLGCRIQHEGPIRVQGRRRPHRREPAWAHLHPPMPCRQPNLRPPGSLRVWPCXKSLCXPSPRPARTHPPGQRCHPYRVPSPPSPSPRPPSXFSRTFQPPGGPRTLTSGPRTQETLSPENVPGPGAPPAPRHRSSGPKADVALRMRGLSRAPPSAARKERGSPESERPLNLSDGSGCCKHFTTVRA

SEQ ID NO: 33876 - protein, 138 aa, Homo sapiens
  misc_feature (1)...(138): Xaa = X or * as defined in Table 2
RGREARNAAAVGAAQACTXFHRTQGPSRLGGVRGQLALPLRAGLGDCIFPVXAKSEFSHSPLHAPASLCWGPPPHPVLWATHRRQDCGTLILQGSPAVSNXDSAPPALACRLSCGGGQGERTAPPSRCGEKTPWEVPG

SEQ ID NO: 33877 - protein, 147 aa, Homo sapiens
  misc_feature (1)...(147): Xaa = X or * as defined in Table 2
TFQMNSLTECCPSLRGWGAPQSLPMPALQTPGSAHLRCQGLLSVETEVLWCHPTVIQSAVALKLHXAISPCFXLPPNYPLSGSSLPTPHACLSLPNLQCASPLXQPPPCPREVAPLSLEIPESFVYGILGTHITGCLCISLVLPLSP

SEQ ID NO: 33878 - protein, 257 aa, Homo sapiens
  misc_feature (1)...(257): Xaa = X or * as defined in Table 2
VGGCLAGPQDPDGVFQTSLRKGVNRAQQQRRQLLPGPTPSKAKDSHPXEGGXGASPNAALLSGAGELPRACQCRLSRHLALPTCAARVCXNPVKPRKGRSEPRSGWASQLPGGDSRLPLRPGTSQGVFSPHRLGEGGKLVLGVLSLSLKQRGFPGEWGAAVLSPVRGPRTGWGEDLPRALPDQSDGSGRMRKSAAEAETGPGARSAAGRSDSDSGGRPDSCQTVPAARSPPCLRRQKLPRERLPRAPNPXGPRPLGR

SEQ ID NO: 33879 - protein, 445 aa, Homo sapiens
  DOMAIN (298)..(318): PHTHALATE DIOXYGENASE REDUCTASE FAMILY SIGNATURE domain identified by eMATRIX, accession number PR00409F, p-value=5.553e- 10, raw score of 12.70
  DOMAIN (37)..(444): Ferric reductase like transmembrane com domain identified by PFam, accession name Ferric_reduct, E-value=9.2e-08, PFam score of -55.2
MESGAWGGAEVLPADGSARERRDLVPSLITPPGALRVRFHGGRREAQAATHALFGRGEALPPLHHLTKMATLGHTFPFYAGPKPTFPMDTTLASIIMIFLTALATFIVILPGIRGKTRLFWLLRVVTSLFIGAAILGTPVQQLNETINYNEEFTWRLGENYAEEYAKALEKGLPDPVLYLAEKFTPRSPCGLYRQYRLAGHYTSAMLWMQPHRLKAFFNQSVDEDPMLEWSPEEGLTGVVLLLILAIMYVFASHHFRRRSFRGFWLTHHLYILLYVLLYLDGPFGEGHQEWHKFEVSVLVGGGIGVTPFASILKDLVFKSSVSCQVFCKKIYFIWVTRTQRQFEWLADIIREVEENDHQDLAYICERHFQKVLNRSLFTGLRSITHFGRPPFEPFFNSLQEVHPQVRKIGVFSCGPPGMTKNVEKACQLINRQDRTHFSHHYENF

SEQ ID NO: 33880 - protein, 300 aa, Homo sapiens
MPAGYHVLSDVVSVETPGCPAEFLNIRIPPGDPVFDPDQRGDVPEPPRRVPPPAARRPIPSTTQGLRSVGARCGTGKQLHLQPQCEIHWVKPAGLLSLVGTWRTFMSSSELVNIPIGTRYLAQAVTLTVKVCSFTAEASETTSPPGGTNNSRRAALRAVTLTAKVCSFTPEPARPRTHQKEETPNTSEHQKEQTPDTSAFKNCNTHGEGLQLHSLSPGRPPTPPGRPNNWRNPGLKSWNTYPGKVRNFHWLFSKKEIEDIRNTTLRDVLVAVINIDPSALQPNVFVWHKGGFLPCPQFFP

SEQ ID NO: 33881 - protein, 264 aa, Homo sapiens
ATRFGGNLVLVGLGFEMTTVPILHAAIREVDIKGVFRYCNTTVTLTAKVYSFTPEARETTNPPGGTNNCRNAGLRAVTLTAKVRSFTAEPARPRTHQKEETPNTSEHQNEQTPDTPPLGTVTLNARVRSFIVEVNSQNPLLMWAAPDPAPGQNGPRGLYAFGAERGNREPFLQALGLVLVRLHNLWGQRLARQDPDWEDEELFQQPRQRVIATYQITSPHTCTYSRTRCFPVKEIDKEQSLTSHHYLSCSHCFGHEQSDHPDWP

SEQ ID NO: 33882 - protein, 1323 aa, Homo sapiens
  DOMAIN (1141)..(1162): CYTOCHROME B-245 HEAVY CHAIN SIGNATURE domain identified by eMATRIX, accession number PR00466C, p-value=2.200e-11, raw score of 10.17
  DOMAIN (872)..(936): EF hand domain identified by PFam, accession name efhand, E- value=1.1e-06, PFam score of 35.6
  misc_feature (1)...(1323): Xaa = X or * as defined in Table 2
HGHFWLGHGPLWLSAPSWTLILENTTGSRGGIVWGTRCPRKRAKSSTSPVQSLELRTPFRGRCSDLMGGTTTSWSTDGCSKGYHVLSDLVSVETPGCPAEFLNIRIPPGDPMFDPDQRGDVVLPFQRSRWDPETGRSPSNPRDPANQVTGWLDGSAIYGSSHSWSDALRSFSGGQLASGPDPAFPRDSQNPLLITGPGGCTQRGNREPFLQALGLLWFRYHNLWAQRLARQHPDWEDEELFQHARKRVIATYQVSRYRPFLDPSISSEFVAASEQFLSTMVPPGVYMRNASCHFQGVINRNSSVSRALRVCNSYWSREVLEATAALYNQDLSWLELLPGGLLESHRDPGPLFSTIVLEQFVRLRAWLFSKKEIEEIRNTTLQDVLVAVINIDPSALQPNVFVWHKELQEVLSEGRTETQRELNIAVYEWLPSFLQKTLPEYTGYRPFLDPSISPEFVVASEQFFSTMVPPGVYMRNASCHFRKVLNKGFQSSQALRVCNNYWIRENPNLNSTQEVNELLLGMASQISELEDNIVVEDLRAALYNQDLSQLELLLGGLLESHGDPGPLFSAIVLDQFVRLRDGDRYWLFSKKEIEDIRNTTLRDVLVAVINIDPSAPCPQPKQLTTDGLPQCAPLTVLDFFEGSSPGFAITIIALCCLPLVSLLLSGVVAYFRGREHKKLQKKLKESVKKEAAKDGVPAMEWPGPKERSSPIIIQLLSDRCLQVLNRHLTVLRVVQLQPLQQVNLILSNNRGCRTLLLKIPKEYDLVLLFSSEEERGAFVQQLWDFCVRWALGLHVAEMSEKELFRKAVTKQQRERILEIFFRHLFAQVLDINQADAGTLPLDSSQKVREALTCELSRAEFAESLGLKPQDMFVESMFSLADKDGNGYLSFREFLDILVVFMKGSPEDKSRLMFTMYDLDENGFLSKDEFFTMMRYGVCLSESXDFLLCVKGGGGGGNSYXRYLXTKHQLSSLVHHSDTWGAGSSAHSPAVHRGAAREDAARLPSPKAAAVQAFVENYRRHIVCVAIFSAICVGVFADRAYYYGFALPPSDIAQTTLVGIILSRGTAASVSFMFSYILLTMCRNLITFLRETFLNRYVPFDAAVDFHRWIAMAAVVLASMTGVLLLLVLAIMYVFASHHFRRRSFRGFWLTHHLYILLYALLIIHGSYALIQLPTFHIYFLVPAIIYGGDKLVSLSRKKVEISVVKAELLPSASILKDLVFKSSLGRQMLCKKYICERHFQKVLNRSLFTGLRSITHFGRPPFEPFFNSLQEVHPQVRKIGVFSCGPPGMTKNVEKACQLKIENDNEILDADTAQALAKVNKQL

SEQ ID NO: 33883 - protein, 221 aa, Homo sapiens
  DOMAIN (107)..(126): PROTEIN TYROSINE PHOSPHATASE SIGNATURE domain identified by eMATRIX, accession number PR00700D, p-value=4.462e-11, raw score of 12.47
  DOMAIN (26)..(165): Dual specificity phosphatase, catalytic doma domain identified by PFam, accession name DSPc, E-value=2.5e-42, PFam score of 154.1
VLLDERSAALDGAKRDGTLALAAGALCREARAAQVFFLKGGYEAFSASCPELCSKQINVSANCPNHFEGHYQYKSILCGMTTHKADISSWFNEAIDFIDSIKNAGGRVFVHCQAGISRSATICLAYLMRTNRVKLDEAFEFVKQRRSIISPNFSFMGQLLQLESQVLAPHCSAEAGSPAMAVLDRGTSTTTVFNFPVSIPDHSTNSALSYLQSLITTSSHC

SEQ ID NO: 33884 - protein, 221 aa, Homo sapiens
  misc_feature (1)...(221): Xaa = X or * as defined in Table 2
GYEAFSASCPELCSKQSTPMGLSLPLSTSVPDSAESGCSSCSTPLYDQVSRCPCHREEVRTGKGMEEXCQGGIXKVTCSIIYNGGDTGIXFIPQLSGLTEPSLQLXALRKXTCWSCPGKWAXFPIYLSSSNRTEFTRYLKLTFPAESFCGYGHWPWLXASLMNVGYFWISGGPVEILPFLYLGSAYHASRKDMLDALGITALINVSANCPNHFEGHYQYKS

SEQ ID NO: 33885 - protein, 452 aa, Homo sapiens
  DOMAIN (335)..(354): PROTEIN TYROSINE PHOSPHATASE SIGNATURE domain identified by eMATRIX, accession number PR00700D, p-value=4.462e-11, raw score of 12.47
  DOMAIN (261)..(414): Dual specificity phosphatase, catalytic dom domain identified by PFam, accession name DSPc, E-value=7.4e-29, PFam score of 109.3
WAVCATRVGGAVGGTAKKPRSPEPRVTLLSQSKSGFWFGAERPGGLAFPRKAPPCPWPREQTKSTAGPITLGALRPAMVMEVGTLDAGGLRALLGERAAQCLLLDCRSFFAFNAGHIAGSVNVRFSTIVRRRAKGAMGLEHIVPNAELRGRLLAGAYHAVVLLDERSAGLDGAKRDGTLALAAGRALCREARAAQALLPSKGGYEAFSASCPELCSKKSTPMGLSLSLSTSVPDSAESGCASSCSTPLYDQGGPVEILPFLYLGSAYHASRKDMLDALGITALDPNVLSQIVPNHFEGHFQYKSIPVEDNPKADISSWFNEAIDFIDSIKNAGRRVFVHCQAGISRSATICLAYLMRTNRVKLDEAFEFVKQRRSILSLPNFSFHGASLLQFESQVLAPHCSGRGWGAPANAGLDRGTSTTTVFNFPVSIPVHSTNSALSYLQSPITTSPSC

SEQ ID NO: 33886 - protein, 89 aa, Homo sapiens
GEGEATEKGPRAEAQASPLSEEAGAGRCPGCPGWGRSLFFCEVHMSLQLYPVLRGGCTGQYCAIGPAACPHHPAAKQAGGPCPWRNRFV

SEQ ID NO: 33887 - protein, 89 aa, Homo sapiens; identical to SEQ ID NO: 33886

SEQ ID NO: 33888 - protein, 245 aa, Homo sapiens
  misc_feature (1)...(245): Xaa = X or * as defined in Table 2
WCKGEGEATEKGPRAEAQASPLSEEAGAGRCPGCPYRDAQPLLGSGHTLKRAIQDICYGPGHYQARAAREVHPPGRKIGKQSLRRPCKLETDDHLSRSLRELDSWXFGRKCAGAGLTERTQGRLRRKRTLSSEGALPQVLELSAEASKRGSLGKPRKFGKKNPGHGAPQPVVFQSRQCLQRILGEHPRTRPCLRNDNPGASSAPAQATFISPSEDFSSSSQARSPALSLSFREGLVMTHGYIQDT

SEQ ID NO: 33889 - protein, 599 aa, Homo sapiens
  DOMAIN (528)..(543): WILM'S TUMOUR PROTEIN SIGNATURE domain identified by eMATRIX, accession number PR00049D, p-value=1.929e-10, raw score of 0.00
  misc_feature (1)...(599): Xaa = X or * as defined in Table 2
KDSAGPGPPVALLLPGAACLSPAPGCRRAAPRWSSPGPRTAAGXRRMWCASASLAXSPCRPPRSRWWRDAGSGWTPHCPASAAWGAEQEPVRSWGPRASQSHCPGGLRAPPPGSVRCSTQXDCSSVRPAWSRSXGACXQVXPRCPCRTPATGWAPPPQGRCGPTTAPGSTGPAGRASLCCPRRAHLPGXWPQKLICAHPGAKSLGLACQPHRGKGTPIEGPACGTXGGRRGSGCPGRPHTRRRCXPPAPCGRRSAGSAHPARPWPHGPGGQQRDPGPAYRGGQGGRSPASPSGRRLPASRAGRSRAARGTPGRPEPRSPQRRTGTVQPARCPWPPHRAAAGPPRRGSGAPAPLGRTRSFGTAGKAHPWPRRRPGHWXSAAAAPATGVPACRAGSWVSAAPPAEGRPARARRHPGRCPEASGPRGRRSAAHGHGARAGSPQPGAPPCHLPGIPARQPLGLPRRTRCFGGIAQRGRAARHCLLSRPSAKAKRNSSYREPGMGGWRSPQALGEYGKGSQAGSARLSGAASQGRRARHLRGKAPAWNPAPPPSPPPPALGLPLRTQREATRKPRREEARRPRPRPLRPGGANGSPGPPRAARA

SEQ ID NO: 33890 - protein, 144 aa, Homo sapiens
  misc_feature (1)...(144): Xaa = X or * as defined in Table 2
PFVYTSSLGRPPSISXQPFVSGSGCSCPXRSRPSGAWRARSASSPAPPPKAPSPRPGPRATAGASRRTAGPALCGRPRXGSRGRHLFSRPGGTRRRRRAARSAGLPAPGGSEPPKSGSGFPSSPYASSSGLIPGNRSPAAAGEL

SEQ ID NO: 33891 - protein, 268 aa, Homo sapiens
  misc_feature (1)...(268): Xaa = X or * as defined in Table 2
ALAESRGDLEAGPSSNTWEFWELAGFSVLFLGNRRAALGLCELPSLRAGVEFTAVQRLWSSAGATWWSKLAVPLAGSAGRENPGSLLDGLLFTLENNLSRGQGAPSTPPAARRAARXDGGQSASSSPALESPPERHRRLALVSEQKPQEPARSSRRSCGTRLPRLVFCSKVCRRAEPGGSVTRREGGAEREAEERKRGRXGEARRRQGGRKSTRRKKQAIKGKRESQKRRGGRQGRGRAASPPLXEPRARQPRGSAAPSLLRGLSGCL

SEQ ID NO: 33892 - protein, 900 aa, Homo sapiens
  DOMAIN (515)..(551): Synapsins proteins domain identified by eMATRIX, accession number BL00415Q, p-value=4.345e-09, raw score of 2.23
  misc_feature (1)...(900): Xaa = X or * as defined in Table 2
TGLWCRCPRSARRSVGRRPGTAPAARPPRPAAQKQALGSRERVGTGPGRILRPGGWGCFPGPRGTEDADQRAARGPVGAGTQQHGRAVPRGPQNEPDETLLPGGPSPRGGELRGRSGARGLPXSLTGPAPGPQRGGGXSPSPGRASSKAGPWKRPGASRASLQRASSMPASQVDWGGPGGSPRCNRCRERKPGTGPGWPPRLRSPGNLRPGVGGLGLALPARTAAAAPRPRERWRSPGAPCLGAQXPSLPAAAEPRGPGTSGRAWPSSAAAREDCRAPGRGPAAPTGARRPPRPGAGLAGRPTRARALPGRIGRRSPGRAAPHSPAGLRSAARRCPPPGPCAPRGQPGLPRGGGAAPLRHGGGAQKTRPSQGRPGPPPPPAPAGERQPQPGKESGEKGVQPARGEPQGPQRAMRGAPAGRRRPPAPAPGAAAQPGRWGTAAGAAGPAAGRPAPGRQPSRAAEGPAAAPGERGQSIPVPIGVVEEREGPRGPGPTAAAGPAAPGRGRRAGSARARGPEPAAPARQPGRRARLPRTRGPPRPAPSEPWPLPSRPPGSGKRGASAPPGGCPSRSGNSPTLQDPGPHSGCPEGFPRLAGGERSSGPEMGTVGSNDVVGNRGKTXGSSWVQRTWAGELPPPGSMGAGTEWYQGTPENPKPRGRACGCSFTWGAQAGEVPEWGQSSAKESKGSQAPSNLCQAGPQAGQQGQRSMPKRGGCTCSQCHVKLQLQLALVGPGSTGWKCCHHQSSVPGHSAPPGLIGGSGPIAGPRAPGCGLRKQGGGPGLXATFGGAPLSERVPXGSPPAIPKGGHPQPTGPSSPGSWPGPRESGWVSVTGLPQTAAGPRRWNLKLSPRLRDSIEASLXGTGVKVVAGAPGMEGVGWGPTVAANRTQQNSPSPRQPCLA

SEQ ID NO: 33893 - protein, 301 aa, Homo sapiens
  misc_feature (1)...(301): Xaa = X or * as defined in Table 2
HEGFFFFILGCPFPNFIPPNLVSVRKLGVKPAWGAARPRLPLAPMPSREGAARSREMRRPRGIRRSPKEGLFHPEGSQGKSQNGADPQRMXREPGSSKSSEPLPRLLGVHQTAXRWETGETGPAIGGPAELDAVHVGLXCNRGFPSSKQRARRRARVWPGPKKRPPARAARMARLASDQRDFSVSRKAGDGRFPVIGIRSGGGAATGSSSRLSVSSSAVLRKPGRTTGAVPAGGSARKGPSLAPMLGPGSVRSASSPSPGHNPGAGSXERAGLGERPRQKPLAVPAAAIDFPQSPASRSNI

SEQ ID NO: 33894 - protein, 44 aa, Homo sapiens
DIEDLDHYEMKAEPISGKKLEDEGIEKENLAILEKLGRLKDKSI

SEQ ID NO: 33895 - protein, 61 aa, Homo sapiens
  misc_feature (1)...(61): Xaa = X or * as defined in Table 2
AGILFLSSSQXSNARRPTHGALLGDWGPRCSPSPYANRSPSSSLARQCRTRGSTRDLRVRT

SEQ ID NO: 33896 - protein, 600 aa, Homo sapiens
  DOMAIN (167)..(213): kw TRANSCRIPTASE REVERSE II ORF2 domain identified by eMATRIX, accession number DM01354O, p-value=1.000e-40, raw score of 8.73
  DOMAIN (200)..(425): Reverse transcriptase domain identified by PFam, accession name rvt, E-value=9.1e-45, PFam score of 162.1
  misc_feature (1)...(600): Xaa = X or * as defined in Table 2
MDPQLERQMETTQNLVDSYAAIVNKTVWDLMVGVTPKTIMHVMINNRHAPPHGSRGLLWHWGCRWPCWPGGDAGQPYGTSILIEKKREKNQIDTIKNDKGDITTNPTEIQTTIREYYKHLYANKVENLKEIDKFLDTYTLPRLNQEEVESLNRSITGSKIEAIVNSLPTKKSPGPEGFTVEFYQRYKEELVLFLLKLFQSIEKEGILPKSFYKASIILIPKPGRDTTKKENFRPISLMNIDAKILNKILANQIQQHIKKLIHHDRVGFIPGMQGWFNTRKSINVIQHRNRTKDKNHMIISIDAEKAFDKIQQPFMLKTLHKLGIDGTYLKIIRAIYDKPTANIMLNEQKLEAFPLKTGTRQGCPLSPLLFNIVLEVLARAIRQEKKIKGSLQRVLSFLTTQRGLRRSLQPSIPFSFIILVRAMFLLSGLVAVTLGSPSAGNQSTVLSSWSLVAQQEKAVPTLPLQSARPPHGSAVQAAVWPDTLYQSCCPLAENQTHFWMTGKCVLCWLCSLWSSGEGKGQAISRVLFGGVKRPYPFQGTLFLESPWNLAGSCPVKPALATRGQGXSSAYSTEPVIVQRNATXLKGKARVQLGAKKESGK

SEQ ID NO: 33897 - protein, 59 aa, Homo sapiens
  misc_feature (1)...(59): Xaa = X or * as defined in Table 2
IRYVLCGGALRMELLTKQGXSSAYSTEPVIVPRNATXLKGKARVQLGAKKMMSQSVTPD

SEQ ID NO: 33898 - protein, 309 aa, Homo sapiens
ARQVPKKCRINWARTWSQISLLNVQSRICTKREEQYRSSIPHSGVERHESPDIEDFSFKEPQKMCMILSVNGEMTQEIQGSAYGPERRKSNNHLMKKNDQKFKTCHRWPVIPSIIRLRGPRSQEPTGAAEETHGAATLPAEQEESRVKCKNCGALGTQPGTRPAPLRGGVGPSSAGPGLTQGEGEPKPAKAQLPFTTPGPFTRMTEKRSEVQGCDWLPHVNVAWVRYWNRLVNWYARTCVRDVGRSWDDPRLSSPYYASGYLYPCMSVMSGCSDGVVVGMWWRQDEHLSTSGITMLMDTWMYQIAELQG

SEQ ID NO: 33899 - protein, 126 aa, Homo sapiens
  DOMAIN (97)..(113): w SPAC8A404C RESISTANCE SPAC8A4.05C DAUNORUBICIN. domain identified by eMATRIX, accession number DM00191C, p-value=7.955e- 10, raw score of 10.57
  misc_feature (1)...(126): Xaa = X or * as defined in Table 2
TSAHPGGEAVPSLTTSTTWSRSSSLVTFTLMPPRGCSTGPPVTSPLCRMPRTTTMPASPVGSSIGQTSTTLPSCPQRQTXPSACTGSGXASAVRCAPKSSSSPATSSSMTTTTPGRATTTTTQTRC

SEQ ID NO: 33900 - protein, 132 aa, Homo sapiens
  DOMAIN (40)..(86): kw TRANSCRIPTASE REVERSE II ORF2 domain identified by eMATRIX, accession number DM01354O, p-value=3.130e-11, raw score of 8.73
  misc_feature (1)...(132): Xaa = X or * as defined in Table 2
TRKSRRNGXIPRHIHSPKTKPGRSXISEXANNRTEIVAIINSLPTKKSPGPDGFTAEFYQSTRRSXTTTMPASPVGSSIGQTSTTLPSLAPRQTXPSACTGSGNHKSLTVKSFSQGCAGLPASLTGPLWWRC

SEQ ID NO: 33901 - protein, 477 aa, Homo sapiens
  misc_feature (1)...(477): Xaa = X or * as defined in Table 2
MENAGEREDPTVGNEGEVRLAGPVLRTQDELSWEEDEANPTSYPKGADSYCHSDCQTIMDFSNFNAFSTPNTFALMNTYSCPQHPNSKQFQLPTFVKMGEAVSVFFIGLPHATPIVEHQNDLIAGSVRMQNQPKGSTLQCIILMPQRPPGQTLEDMDYYYSCFSDEKNLGTKKLSSFPWSHSKEVKATFKGRYPGSHALNRHTTLPGTAWILLLGGELAFLTVKDGSPLALPSRPADGMRGRNKARVLSSLNLTASWGXQAQSSELRTSSPGKRMKQTQLLIQKEQILIVTRIARPXWIFPTSMHFLPQTHLLSXTHTAVPQHPNSKQFQLPTFVKMGEAVSVFFIGLPHATPIVEHQNDLIAGSVRMQNQPKGSTLQCIILMPQRPPGQTLEDMDYYYSCFSDEKNLGTKKLSSFPWSHSKEVKATFKGRYPGSQPLTATPHYLALPGFSFXVGNLHSSQXRMEALWPCPPAQLMG

SEQ ID NO: 33902 - protein, 307 aa, Homo sapiens
  DOMAIN (70)..(86): w SPAC8A404C RESISTANCE SPAC8A4.05C DAUNORUBICIN. domain identified by eMATRIX, accession number DM00191C, p-value=7.955e- 10, raw score of 10.57
  misc_feature (1)...(307): Xaa = X or * as defined in Table 2
IQKRACSVSARRGLRTGRCGCTAGTTTMPASPVGSSIGQTSTTLPSCPQRQTXPSACTGSGXASAVRCAPKSSSSPATSSSMTTTTPGRATTTTTQTRCASTPPSPSTPGAATAAGGPLVQGHGRHRVRVQSESHEGHPHGMRPQPHCSTSSTGMSAGPRVPGQVASSRMLTHTNGLRGPGGFKLPSHGVLDLQNGTGMPGGAVCCSTVRGPATGPAQTGQRREPRPTRCPWSSVPPLRRGKKDLARRQVESKPVWPGPWEGTPWSLLLGCNLPALSLCCIGTSADRSFRKFYFFQTRIPLLLTDVL

SEQ ID NO: 33903 - protein, 311 aa, Homo sapiens
  misc_feature (1)...(311): Xaa = X or * as defined in Table 2
MPEPPPPPWAPARPKPPRRAPPPAPRRPVPSTTQGLRSAGTPARDWQAAPPAALSSPEPHFNLIASVQTVMCPVGAPAGMQGSGPKPSGCRLVLWTPGXXKGSIWGTAASMTRRRWTMRSRTAMSPGPQRVPSAPKPSSAPCAXMEGKRSLLPATVPGCKKRYKVTWVAVGGPDPTREASLCQPSLLGTDQDLQSSPFHWHLRIRQKMRYRTPRPHAEQGMGEGSHCLMSEHHFEKTQRQFSPDYYPNPSSQLNVNGIKYHAKNGHRTQIRVRKPFKCRCGKSYKTAQGLRHHTINFHPPVSAEIIRKMQQ

SEQ ID NO: 33904 - protein, 104 aa, Homo sapiens
  misc_feature (1)...(104): Xaa = X or * as defined in Table 2
CLSLPTPPWTPVRPEPPRRAPPPALRRPVPSTTQGLKSAGARRGTGRQPPPAAPDCVAQSSTVHLAARATKXPSAHSVVSSSPMGVLFLHGLDFPRMTRSQGLR

SEQ ID NO: 33905 - protein, 358 aa, Homo sapiens
  misc_feature (1)...(358): Xaa = X or * as defined in Table 2
SLPPPPWAPVRPQPPLXVPPPAPRCPVPSTTQGLRSAGAPARDWQAAPPAAQVFTLLKNIKMLPCLEKPGKFGSLVIMREFNNHMWQVELKMPVPSDLPKGTGKTLILPECIQAPCMKSNNAPSSSSAPSPWMLXAXAWLCRYCRASCGISSIPTASPVTMACCXRYMRWGILPISEPPQTGFSPAGANQRGPLAATLSGPGGEGQSAVARLTGEKKNHPGAQYANRLSPRVGRFINAAGTTGFPTGKRAGHKKEPIPQSFITRAARRSRXPSKASELGRKQRRPVPVRXLLRSAQEEISAVGKTPGFCQGGNTGYQSQRRKKXPANRPVKRLPXGGIXSLPGSKTYAVSVRCPDQKI

SEQ ID NO: 33906 - protein, 323 aa, Homo sapiens
  misc_feature (1)...(323): Xaa = X or * as defined in Table 2
VSTWETPQYRRPPSPSXRGSREQPCSFSSPRDTPGENHWLSLPQRDXAGPPVRRALGASXPHATRRPNRGGASXPDLQPNHTRPFRPFPSKNPCFRFPEPLRAPTLVPGPCKPHSPAASGRVPPTHPGRGLGKSEGSKEKPMRRTAAPTPIRFPKITGTPSTQTAADHALLGMRDQSLSGQSPGPKSPDADDQLQNRDHTETEQRISSGRSSALAPESQLQQGCAGIHFRGRFCKAPPLVCERLRGWPRGKRKGVCESAAQASPMSAAPCSTVPSPINHPRAEECGRTARDWQAAPLAALVRDPLDEASWAPESGGDVENLYV

SEQ ID NO: 33907 - protein, 147 aa, Homo sapiens
  misc_feature (1)...(147): Xaa = X or * as defined in Table 2
MAAKRNSINIAESWKDLEVGGPATKEXLRSPAGFTQWIRTGAAGGAACQFRAVRPALLSPWVVDGTGRRGAGGGAYRGGSGRTGAHGTGGGSGMAGCRSRAVPRRKAAKTRPCEVQKRQHNVNYLFPVVETKAQTVKWFVLAVKTIS

SEQ ID NO: 33908 - protein, 640 aa, Homo sapiens
  misc_feature (1)...(640): Xaa = X or * as defined in Table 2
FCPVATSASVTPVQTRCATRPTTAPSADCVSPRAAGGLPSGHCFRSEPXGKNWAPCPQPALTPSSPSQTSDSEEHPSSENIPPGYEVVSLLEALNGPLTPSPAVPPLHVLERWPPLRNAPFIWQXWPPAPRQDDLASXPPVXPAAVRDSNSKRVSPNPLPKTLPCCMKRKMSIPAASTETQLSQRPSVQHLGEECGVTPESENLTLSSSGAIDQSSCTGTPLSSTIPPQKALPAAAWPSLSCPWHPPRSALTPSPPCLAPTSPLALKRRERLSLPPSLPAGPPQKKREGLPAESPDSNFAGLPAGEQDAEAALSSHYQPISHASKGDCKSGMEQQGVCEREWGPATVQSDTPAAAVGLAAPGRQAVEGLSVCSLRPPCSSRCDGSGCSGQPTTVINISLRRPTSPRTREDSEKPGQYPKGHTEARQMPGQKDKVAKRSRKVXEEKENGKGPIRRQXKQAAPRQLGQAGLTHSLKARVRGGTGGAAGVLGGAWAWRAPHQWPGLIALPARGNEGLSTRASGCGGCTGSPSSASPPALRSISRRALAAFPRGRARDLQPAMPEPPTPSVGSCAAPASPMSAAPCSTALQSHRPPKGXGVRAHGAGLAGSSTCSPSAGSTGXSXLGSXVWWGRGEPLCPAQGL

SEQ ID NO: 33909 - protein, 371 aa, Homo sapiens
  misc_feature (1)...(371): Xaa = X or * as defined in Table 2
VLQLLRWRVWSLFFLMFRCVRSFFLLTQKPSWLHPVDPAPGLQVELPASPAPCARTPQPLGGRWDWAPWSRGRRSSGRLGLHRNLRRPGAQAWRAAGPGPCPAGRQLRPGEKSSAAPVGWHCWGTEYTFPSSRWPGCXAPHCPGLAGPAGSPSAGPAKPTPTWNSSWPASAARSPGSYSPPLPPYPLQAEGAGSGLGQPRKGLLHLXDVPAEPVLAGPLASGSIPLAAPPAGRGLLAPGPCPGLDLRLLXQLPPPSVFPTTPKTELVLGTPGHGQPHRGGHESSDSAGGAPTPRALRSGWDPSPPSSVCATPTSSGLSSTPQLPLHQRTSSSTASWSPGWGMGSCXVLVTSGAATVGCXRLPSISTSXSPI

SEQ ID NO: 33910 - protein, 395 aa, Homo sapiens
  DOMAIN (329)..(362): ESICULAR LUMEN DOMAIN domain identified by eMATRIX, accession number DM01292C, p-value=4.672e-09, raw score of 12.45
MVFSNLKGHWLQPIRLDSGSRNTAIGCDNQYKPTGVKLQTFAVSVTALKAARLGLFVPPGGLVVSLGSGVKLQIFASQVVCFDRALIGAFTIPELDTKVLHVPIRLVRYRVWTQRFSKAPPDSGAQLASPSESHTRAAALGWSMGLGAVEQGAALIGEARAAQEPTEWVGDSGIAGCRSRALPHRKAAKARREIERSAGTWMELEVIILSKLMQERKTKYHMFSLSCRPTISIIRERSKGQPYSRDDVVVVNSKNAGSAHSVPPLPLCDLSCQFDGIKGYIDSCQAPCMKSNNALIVILGTVTLDAVGIGLVMPVLPGLLRDIVHSDSIASHYGVLLALYALMQFLCAPVLGALSDRFGRRPVLLASLLGATIDYAIMATTPVLWIYPLVNSPSC

SEQ ID NO: 33911 - protein, 140 aa, Homo sapiens
VLQLIKAVWTQGVSSSKIYCKERKNKPSTLWKGTGAGPRQTQEPSWLHPVDPAPGLQVELPASPAPCARTLQPLGGLWDWAPWSRGRCSSGRLGPHMSPWSGWEAQAWRAAGPEPCPARRQLRPGEKPRAAPLYQAGFLE

SEQ ID NO: 33912 - protein, 506 aa, Homo sapiens
  misc_feature (1)...(506): Xaa = X or * as defined in Table 2
CLSLPSPPRPPHPWAPVQPEPPRRAPPPAPRCPVPSTTPGAEERGRTARDWQAAPPAAPKEETPNASEYQKEQTPDTPPLRTVTLTVTVHGFILEVSETKNPPIPDTGLQVVPKPLPRHTRGRVASSSIHHIRFPVSPSARAGAPPGHTPCQGTWQIQSSPAQGGGAPNPLYSAGSALVSSLVLVLQFVDPFVRSPEHSVIARPSPARPGTWELGRRRTRPSQDPPRGPSGGPWPGRGRGPWRSKTDAAPGKAARSPAPGASCELARRGASPGREGLAVGRAAGRGVASGAPSPAEGPQAALGAPPGTHRSSSPSAQVPSSGARTESPWXPXLLASAGRPRPQPGYHAQEWRKRPRRPVRTRRRFPTKAPARSAGSFETSTFSAHDPGSRGHPWGPKPLPAGGDRTAPPGAQGRGSASKAPARIHEPALRGHSGSRGGTPGGSSALLCAKNCAPGDPGTAGVGRXSGTQLPPRAPLEPLSAPRRVRPVGSGRRREKVPRPGRPRAF

SEQ ID NO: 33913 - protein, 1113 aa, Homo sapiens
  DOMAIN (318)..(362): Synapsins proteins domain identified by eMATRIX, accession number BL00415N, p-value=7.766e-09, raw score of 4.29
  DOMAIN (598)..(843): Zinc finger, C2H2 type domain identified by PFam, accession name zf-C2H2, E-value=8.3e-10, PFam score of 46.0
  misc_feature (1)...(1113): Xaa = X or * as defined in Table 2
MSVRKDVEKLEPSDIVCGNVQCYSCMETNLTVSQKVKHEVTVGPREGATKPNRMKGKEGRSGSLLGEGDFFKDESVMSSQGSSKDGEKRRGKAQRWKWPMQGICRQLGVAKSMEGYQSRRDQGGRGVSDKWPQVCAKKPEFYPTAQVWANFSVTSCQSVTITQLCHGLRRLEISPARSNAMHLNPDPPGQKQNLSPKVNDIITDIESSSGSGAGKFQVISKSDISEVLLQQMDAGHSSKDDPNEYGGWKSPRPRCQQIQCLVRACFLVHRCSFLLCPHVVEGGVLTIRVVLKREWEGIPGIPGIPEPGGIHKGKGRAQDLQPAMPEPPCPSGAPVLPEPPRGAPPPAPRRPVPSTTQGLRSAGARRGTGRQPPPAAPVRDPLGEASWAPESGSAPAILKVRIKTIKMSSGEIKRTVTRVLPEVDLDSGKKSSEQTASVMASVTFLLSSPASAAILSSLLRAPLQSTVMTNAVSPAELTPKQSASSAIIKAANAIQQQTVAGAGTQPGQRQTRAKDCAPCQHXPFASGSATNKAGNNQCSSLATPQKGVSSPGGVVLAEFCGGSFQQGASSVNPVPVYIPNLSPPTNAGITLPTRGYKCLECGDSFAVEKSLTQHYDRQSMRIEAADTRGQKTCTICQMLLPNQCSYASHQRIHQHKSLYTCPECGAICRSVHFQTHVTKNCLHYMRRVGFRCVHCNVVYSDVAALQSHIQGSHCEVFYKCPICPMASNQNKEDTKSMNGKEKLEKKSPSPVKKSVETKKVASPGWTCWECDRLFIQRDVYISHVRKEQGKQMKKHPCRHLCQHNRIKHKGIRKVYACSHCPDSRRTFTKRLMLEKHVQLMHSLKDPDLKEMTDATNEEETEIKEDTKFPSPKHLFIVHKLKEPQPVSKQNGAGEDNQQENKPSHEDESPNGTVSDRKCKVDTDEAAFEPDYNESDSGSYVSVKDEETSGNTSKVLKDKIMEKAGESKRKPGHSWPGDQHPTRAFVQPSSSPSCQPTTLIPPVDFGVLSNQSKHGNILRACPGDTSGNMHSSQRGAECLFDKHNVTKPRMGKGMKQERRPSSFSGKPGLAGSGAASPTADTIVYVPLSCVQGRVQSGAAGMTDFRGKQIRHKNC

SEQ ID NO: 33914 - protein, 168 aa, Homo sapiens
  misc_feature (1)...(168): Xaa = X or * as defined in Table 2
MPEPPRHSVGSCAARASPMSAASCSTAPSPIDHPRAEECRHTARDWQAAPPAAPVGDPLGEASWAPGSVCSFTPEARETTNPSGGTNNSRRAALSAVTLTAKVCSFTPEPAKPQTHQKEETPNTSEHQKEQTANTPPLRTVTLTARVHGFILEVSKTKNPPIPDTLGX

SEQ ID NO: 33915 - protein, 262 aa, Homo sapiens
  DOMAIN (209)..(235): Nuclear transition protein 2 proteins domain identified by eMATRIX, accession number BL00970B, p-value=7.527e-09, raw score of 10.09
  misc_feature (1)...(262): Xaa = X or * as defined in Table 2
MIKWVSYQGCRDGLTYGWSCSVETVRWLPEVHAADTSCLKISACLSSFSSSYKAPSVVAQAAPPSSPHKTSSLCTTSAPSRPSMRTTSAPPXSSAARPSIXNISSSPESSAATIXNXNMSSSPGLQLHDTQTRTSAPPRVLNSATSQTTTSAPPRARTPVPPGSPAPRPSQKNSHTGSFVVFSSTTXDISGSTGSSHGPPAQRLSXTXKAAPAPPQGSISTTPDLNSGSTTSSSRSSAPRPSLNNPFSXNSAVKKSAAEVNE

SEQ ID NO: 33916 - protein, 425 aa, Homo sapiens
  DOMAIN (124)..(139): WILM'S TUMOUR PROTEIN SIGNATURE domain identified by eMATRIX, accession number PR00049D, p-value=6.949e-09, raw score of 0.00
  misc_feature (1)...(425): Xaa = X or * as defined in Table 2
THPQERGTWGNRQLFAVLPLPFYTSLETMSMGCGAVVAGQYQKCPFFTIPSANFPWQKQEGMSGNPPRVRRHISLSRSCLTLAVPMTIRRSWEGAPFVGAQDGCRPLLPGRRALLLHLGLAPLLGPPPPPVSPPWPPCKATWVSAGGRCLYGCPSAPAPRAPPEFPAPPGFPAPPAASSPSTRCSRGTXSCGPGRPGPLGPAWSAGQRGQLAVPEPLQAVLGALGLLRPLGERRPAQAGTFSPTAPGRGAPGASAXGGRISGHSSGDIPRRGPSRGHPPLLAQGSDAIRSTLHERLSTRTRPSFKIKTPSPHQRPQQPHASWTPSSGTLSKPSTPCSSSSCAPRSGDGGGEGHAGLPSQPAAGSQPAAPCQRPEAWAGGRGNRPGKPGAPQGPCFSLPRPQRSRXLPPPARQKPPFFTLLSLFSF

SEQ ID NO: 33917 - protein, 638 aa, Homo sapiens
  DOMAIN (573)..(622): kw TRANSCRIPTASE REVERSE II ORF2 domain identified by eMATRIX, accession number DM01354Z, p-value=2.191e-27, raw score of 9.06
  misc_feature (1)...(638): Xaa = X or * as defined in Table 2
TIYAVNLFPILPQGDLXPFTMVTMHWGEGNGQIFRGLLDTGSELMLIPGDPKCHCGPPVKVGAYESQVINGVLAQVQLTVVPEGPQTHPVVISPVLECIIGIDILGSWQNPHVGSLTGKVRATMVEKAKWKPLEQPLPRKIVSQQQYRIRGEIAEISAKIKDLKYAGVVIPTTSPFKSPIWPVQKTDGSTKIPGTSTSVKFLGVQXCGTCQDIPSKVKDKLLHLAPPTIKKEAQRLVGLFGFWSQHIPHLGELLRPIYRVTRKAASFEWGPEHEKALQQVQAALQAALPLGPYDPADQATVQLKLPVINWVLSDPSSHKVVMHKLREEVGQMTMVFTPATLSSLPQHAMMVSWGVSYDQLTEEEKTRAWLTDRSARYAGTTRKWWTPHQSLSPATPVISQWAHGHGGRGGGYAWAQQHGLALINADLATASAECPICQQQRPKMSTRYGTIPGKVLQKAVCDLNQHPIYGTLSPIARIHRSRNQGVEVEVAALTITPSDPLAKFLLPVPTTLRSTGLEVLVPEGGKLPPGDTTTIPLNRKSRLPPGHFGPLLPLSQQAKKGVYPPKKKSLYQKHALSYMSLFTAVPFTIAKTWNQPRFPSMVNWIENMWYIYTMEHYTAIKMSEIESFAAIWMQLEAI

SEQ ID NO: 33918 - protein, 88 aa, Homo sapiens; identical to SEQ ID NO: 33319

SEQ ID NO: 33919 - protein, 102 aa, Homo sapiens
  misc_feature (1)...(102): Xaa = X or * as defined in Table 2
MTLISSRNCXGIPRLLAPVQRGAASRTDYPGFRIDGRVTRGPVPTSFGPLRHLCRPLPVRRKRAKRRREKEKKMKKPSLICWGKWLCWPQMAALLDAMKQGT

SEQ ID NO: 33920 - protein, 85 aa, Homo sapiens
MAMVPEISPKFVTVHQIPTYQAGFLHLLFFSSYLCSFSSYRQRPGEMPQGTQTRGYGATGHPPVYPVSRVVSTGGCPSLHRRHSC

SEQ ID NO: 33921 - protein, 65 aa, Homo sapiens
KDHCRVHVYRFPYPFQWLWFLKFHQSLLLFHQIPTISSWVSSSSSLFLFFSLLFFFLLPFILASS

SEQ ID NO: 33922 - protein, 572 aa, Homo sapiens
  misc_feature (1)...(572): Xaa = X or * as defined in Table 2
NVCQSHRIPEHCYDSLNVCSSXGIPEYSCCDLNICPSHWTPEHCYEGLNDCPSSNIPEHCCWGLNDCSSRSIPQHCFWGLHVCPLHRIPEHCSWVLSVSPSQRILEHCDENLNVCLXHRIPEHSRCCLNVCPSHRIPEHCCLESESLSLTQDSRTLLRLXGSECLSETXNSIILPPLFECLSHTXYSKTLHLGSECLSLTXDSRTSLLWSECSSYDVENTTAEGLSICPSHRVPEHCYEGLNDCPSRRIPEHYRWGKNVFLSQRIPEHCYEGLHVRFSRGIPEHSCCRLNVCPSHRIPEYYYECLNICPSKRIPEYCCLVPSVYSSHRIPEHCYXVLNVSPSQRIPEHSCGGLNFCPSHWIPEHRYEGLNVCLSHRIPEHCYEGLYDCPSHRIPEHSCCGLKVCPSHSIQEYCCWVLSVCPSHRIPEHCYHCLNVCPSHRIPEHXEDSRTLLLLSECPSQRISEHCYEGLNVFPSHRIPEHCYEGLNDSPTHRIPEHCYEFLNDCHSHRIAEHCFSGLNLCLSHRILEHFRWGLHVCPSHGILEHCCWDLSVSHSHSNSRSLXRVSESLSII

SEQ ID NO: 33923 - protein, 62 aa, Homo sapiens
HVLRGVRAPDRQEAGALPEGLRMVPEHRAFGSPFGLEEPQWVPDKEEPPSSSRLETQRNLKL

SEQ ID NO: 33924 - protein, 71 aa, Homo sapiens
EISRPNSPSEGEGESSDSRSVNDEGSSDPKDIDQDNRSTSPSIPSPQDNESDSDSSAQQQMLQAQAQPVRL

SEQ ID NO: 33925 - protein, 116 aa, Homo sapiens
  misc_feature (1)...(116): Xaa = X or * as defined in Table 2
AIQSWCHHVLQAQPHVELLVPRFIEELGSLVHGHXPRHRLPPAHSHVLHHCQLQLGHTLRPRHCILQEHACGRVRCLLQRQAGSPGGWCKRECLFLQEVKPSVRICTVEMCTISIS

SEQ ID NO: 33926 - protein, 166 aa, Homo sapiens
  DOMAIN (71)..(84): 0 kw ZK63212 YDR313C ENDOSOMAL III. domain identified by eMATRIX, accession number DM01970B, p-value=3.593e-15, raw score of 8.60
  DOMAIN (48)..(96): FYVE zinc finger domain identified by PFam, accession name FYVE, E-value=2.8e-14, PFam score of 55.6
  misc_feature (1)...(166): Xaa = X or * as defined in Table 2
NHFVAEAASCPPRCPFRLDAKKLVRSPSGLRMVPEHRAFGSPFGLEEPQWVPDKECRRCMQCDAKFDFLTRKHHCRRCGKCFCDRCCSQKVPLRRMCFVGPRAAVRGSAPWVFPQGGGVFTDNSSKCSXAEPPSSSQFGNSEKPETMTVSSFQXPEILVSGWRQPL

SEQ ID NO: 33927 - protein, 172 aa, Homo sapiens
  misc_feature (1)...(172): Xaa = X or * as defined in Table 2
PVFWIRNLXSMASRGLRRDXEHLKEAILAHSLKAKRGGEAAEEESEASRGWLVRFKGRRCLRNIEVQGETASAAGEAAAGHPGDLAKITGAGGYYTQQIFSVDETTLHWKKMPCRTFTATEEKISAYFKASKDGLNLLLGVNAPGTYVLRSNISVFLSEEMSSDKRLTEMGY

SEQ ID NO: 33928 - protein, 819 aa, Homo sapiens
  DOMAIN (541)..(590): Eukaryotic RNA polymerase II heptapeptide repeat proteins domain identified by eMATRIX, accession number BL00115Z, p-value= 5.884e-10, raw score of 3.12
  misc_feature (1)...(819): Xaa = X or * as defined in Table 2
RERWAAGPVTCQVTTWPGAATTRVTWPMTRPATPCAVHGCSCPRSHWSQKCGQPASRAVSPHPPSTCGSSAAPGPTPKQEAPSALWPLSGFPNXEPGPGQPGDVVEKATERMAAMKTEAGVPLVEVQDPVEVPSGRPAGTCPAQPQHRTPAPCTADPPALDTPTTTHPAPAPCPTAIAASWPAVWLPQPGQXPRCPRLIATCEGQTPAGEEPQAAATAGEGRVKASVSPAPRGTPCCGIRWVARPAFSGHRSSPCPGSQGCWAPSSGVPEASEPRPGEQEPIFRKREFNKEIKSLPEPAGVPRPAWLLSAPXAPSHAELPGXPPPLPCPAKRGQPGCGXAPWRPLPRRPSSVPPPAWSPPQDLPPLGSEPAKPTNGGPALCFPPPHSLQPQDASEKTQGPEEAPPPCLVPRWPPDSNSRXHPRRSPMSPAPHSTPGRRHLTQIPNYKTHLFPXAPARGPSPGRACTSPCPRQGLWWRWPAARATSGALSHLHFPPPTPALPATFSLSSLQLPLHLPPHCVQRAPAAAAGSRRRSRCPPSRRSPACLTSPTAFMRSSPTSXPSRQPPWSSASTSSKRTSVSSWASSPSPSPTCSGTFPWAXRRXKAPASTCPRRPTGAACCVNWRSPKGPGRPPGSAPPTAAQRHPLCSRNQPPTLPRTRPQSPAAPSTPTCQPAGSSALWSPSSTCLPAPAWVPVPPSPRTWTMRAVIKPRLKMKMRMSSRMKTRMRTRMRMESRASQSLERRPRSATPWTWATVTHHEVPTSHSIPCSVRVAAHHTSPCQEQESPQAECPRGALLRLSREPVKEIEIKPVLLGHKKKK

SEQ ID NO: 33929 - protein, 195 aa, Homo sapiens
MAQCSLDALDQPLLRLGHGRCLQGITVPWPHPPVSAPPTALAPPTEFSPMRKGDPEWRFQTLGAVPAVQGSTPTCPMAPISCLWLTSFSPDPAPEPTGVADAETSGRTFQNVPSTGRKLPEHAFHSMETSGTWLPWDGTFRNVPSMGQNLLECAFHGTLSCPCTTAPFSCVTEEDVGSEPLSDLLGAGLALAVPA

SEQ ID NO: 33930 - protein, 344 aa, Homo sapiens
  misc_feature (1)...(344): Xaa = X or * as defined in Table 2
FLPLGELYAEGSRMIWSDGFWAGHLHSCSHPRSSSFSPTCTYPLPPPPPWVERQGTRGSGPXPGKRTSSPFRVSPGSNTRECTPSGLLDCIPSCISLSEKPQNDSSSESAXKIPASSLVTSGLGFCKNPQWSNTSCTSLSCDACPPWNDCCQMPVPCSWTFQPPEPXAKXTSVPYKLPSLWYSVSQRGKDSPSPAPPGPGRRAQPASRAAAAPPAVGPSDRAADPLSPLQAPIWAPRHQHGRSPRVRXGLRWLHGALRVVVILEGGRAQXPPWNDFVRCQCHALGLSSLQNHEPNKLLFLINYPVCGILCPNAGKTARAPPLRARVGAPSLPAALLLLLLLWDR

SEQ ID NO: 33931 - protein, 200 aa, Homo sapiens
  misc_feature (1)...(200): Xaa = X or * as defined in Table 2
KPQVNKSASCAQLAGPVSQRGKDSPSPAPPGPGRRCPACQPRCCCSSCCGTADRAAAPLSPLQAPIWAPATSMDARRVPVRVFALTEARTXGRAPWAFPGDVNPSLAPIPXTCSYTELIPPVSFSFPPSTSGNSPTACLDSGVQLASPSGSRTGATGGAAHSPARAPAPPQPLGSRWDQGLRWLHGALRVVVILEGGRAQ

SEQ ID NO: 33932 - protein, 222 aa, Homo sapiens
  misc_feature (1)...(222): Xaa = X or * as defined in Table 2
FCKHEAAVSSGKAVGTRSQCRHSGPLRVAMKFPARSTRGATNKKAESRQPSENSVTDSNSDSEDESGMNFLEKRALNIKQNKAMLAKLMSELESFPGSFRGRXPRGCSAAPRSKRRSGHPPPAWTCSPRAAERSPEXRRTXRNSDMXSXFPARSTRGATNKKAESRQPSENSVTDSNSDSEDESGMNFLEKRALNIKQNKAMLAKLMSELESFPGSFRGRHP

SEQ ID NO: 33933 - protein, 48 aa, Homo sapiens
MCVWRNSIQSQVSLLNTLGPSFPKGSRTPPPSLGRRWLETSRSFPPET

SEQ ID NO: 33934 - protein, 1063 aa, Homo sapiens
  DOMAIN (178)..(218): G-protein coupled receptors proteins domain identified by eMATRIX, accession number BL00237A, p-value=2.909e-14, raw score of 27.68
  DOMAIN (500)..(657): Gag P30 core shell protein domain identified by PFam, accession name Gag_p30, E-value=4.3e-36, PFam score of 130.0
MEEGWIRLPDGRLAVPQLLGAAVVLAVQETTHRDQESLEKLLGWYFYISLLSALAKTISTALRIGSDNGPVFLAALVQKTAKVSKTQRATESHRCLRIPPPGTLRGSRTAAVLALLSLSLSMYLVTVLRNLLSILAVRSDSPLHTPIYFFLSNLCWADIGFTSATVPKMIVDMQSHSRVISHAGCLTQMSFLVLFACIEGMLLTVMAYDCFVAICHPLHYPVIVNPHLCVFFVLVSFFLSLLDSQLHSWIVLQFTIIKNVEISNFVCDPSQLLKFACSDSIINSIFIYFHKDPELQPVVAGLFLSMCLVTVLGNLLIILAVSPDSHLPTPMYFFLSNLSLPDIGFTSTTVPKMSVDIQSHSRVISYAGCLTQMSLFAIFGGMEKRHAPEILRSKWQGGEAPPAIRGVIPPASPPAYIKIQMAGRRGAPRDAGNYIRINITGCVYTYCDIERSIMLSPSLEIRSNITARLRPKTGTQMPLRVQRYTGIDEDGHVVERRVFGEERRRVLQAGTKWLEEHALADYQNPQEYGRTQLPGTDPQLDPHEREEMQRLNRDREALLEGLMRGAQKATNVNKLSEVIQGKEESPAQFYERLCEAYRMYTPFDPDSPENQHMIHMALVRQSAEDMRRKLQKQAGLAGMNPSQLLEIASQVFINRDAVSPKENGKENGGWPPCLRALAATALLVQEANKLTLGQNLNIKASRAVVTLMNTKGHHWLTDARLTKYQTLLCENPRITTEVCNTLHPATLLPVSESPVEPDCVEVLDSVDSSRPDLRDQAWASVDWELYVDGSSFFNPQGERGAGYAVVTLDTVVEARSLPQATSAQKAELVAFIRALELSEVETVNIYTDSRGHQRASTLLGLGNSRADSEARKAASAPFWASVLPQAPDLGPTSSKEEKDLLQISTALRIGSDNGPVFLAALVQKTAKILGKNVTGDVNSPAILRVVSSPPPLHIGKQHHSKKECSRSQGDNKEKVSNEHVSNRIYVIMKFTGRFYDWTCTNLLSWNQRLETVGTHPNPHLRDKVVLISSGPPWWGNHVALTLERVVVFLFQYELVCGPAVPPL

SEQ ID NO: 33935 - protein, 606 aa, Homo sapiens
  DOMAIN (457)..(468): RNase H domain identified by eMATRIX, accession number PF00075B, p-value=6.276e-12, raw score of 12.56
  DOMAIN (210)..(366): Gag P30 core shell protein domain identified by PFam, accession name Gag_p30, E-value=1.7e-51, PFam score of 184.1
MLKNFKKGFNGDYGVTMTPGKLRTLCEIDWPTLEVGWPSEGSLDRSLVSKVWHKVTGKSGHSDQFPYIDTWLPQWVRGQAAAVLVAKGQIVKEGSRSTHRGKSTPEVLFDPTSDDPLQEMAKVIPVVPSPYQGERLPTFESTVLVPPQDKHIPRPPRVDKRGGEASGETPPLAARLRPKTGIQMPLREQRYTGIDEDGHMAERRVFVCQPFTSADLLNWKNNTPSCTEKPQALIDLLQTIIQTHNPTWADCHQLLMFLFNTDERRRVLQAATKWLGEHAPADYQNPQEYGKEESPAQFYERLCEAYHMYTPFDPDSPENQRMINMALVSQSAEDIRRKLQKQAGFAGMNTSQLLEIANQVFVNRDAVSHTGAEHSVVTGPVAPLSKKTIDIIGAMGVSAKQAFCLPRTCTPGTKDYRLVQDLRLVNQATVTLHPTVPNPYILLGLLPAEDSWFTCLDLKDAFFSIRLAPERQKLFAFQWEDPESGVTTQYTWTWLPQGFKNSPTIFGEALARDLQKFPTRDLGCVLLQYVDDLLLGHPTAVGCAKRTDALLRHLEDCGYKVSKKKAQICQQQVRYLGFTIRRGVRLGSERKQVICNLPEPKTRRQV

SEQ ID NO: 33936 - protein, 399 aa, Homo sapiens
  DOMAIN (326)..(341): OLFACTORY RECEPTOR SIGNATURE domain identified by eMATRIX, accession number PR00245B, p-value=2.286e-14, raw score of 10.38
  DOMAIN (191)..(399): 7 transmembrane receptor (rhodopsin family) domain identified by PFam, accession name 7tm_1, E-value=5.3e-17, PFam score of 56.2
  misc_feature (1)...(399): Xaa = X or * as defined in Table 2
GVQEESSDLPTAVDSSRPDIRDQAWASVHWELYVHGSSFINTXGERGAGYAVITWTHVVEARSMPQGTSAQKAELIAFIRALELSEALAKTVRQRCVSCRQHHARQGPAVPPGIQAYGAAPFEDLQVDFTEMPKCGDIRKIVTGDVNTPAILGVVSSSPPSHIGNNITEDPELQPILAGLSLSMYLVTVLRNLLIILAVSSDPHLHTPMCFFLSNLCWADIGFTLATVPKMIVDMQSHTRVISYEGCLTRISFLVLFACIEDMLLTVMAYDCFVAICRPLHYPVIVNPHLCVFFLLVYFFLSLLDSQLHSWIVLQFTIIKNVEISNFVCDPSQLLKLACSDSVINSIFMYFHSTMFGFLPISGILLSYYKIVPSILRISSSDGKYKAFSTCGSHLAVVC

SEQ ID NO: 33937 - protein, 609 aa, Homo sapiens
  DOMAIN (87)..(109): OLFACTORY RECEPTOR SIGNATURE domain identified by eMATRIX, accession number PR00245A, p-value=7.612e-16, raw score of 18.03
  DOMAIN (186)..(560): Gag P30 core shell protein domain identified by PFam, accession name Gag_p30, E-value=5.1e-31, PFam score of 112.2
MVLEKLDFHMQKNEGGPYVTPGKRCPNSTDPQNVTDVSRFLLLKLSEDPELQPVLAGLFLSMCLVTVLGNLLIILAVSPDSHLHTSMYFFLSNLSLPDIGFPSPTVPKMVVDIQSHSNYILINITGWVYTYCDIERNIMLSPSLDIRSNNTARLRPKTGTQMPLREQRYTGIDKDGHLVERRAFGYQPITCVNLLNWKNNTQNYTEKPQALIDFLQAVIQTHNPTLADWHQLLMFLFNSEERRRVLQAVTKWLEEHAPADYQNPQEYGRTQESVDWELYVDGSSFFNPQGERGAGYAVITLDTVDEDRSLPQATSAQKAELIAFIRALELSEGETVNIYTDSRGHQQASTLVGLGNSRADSEARKAASAPFGASVLPQAPDLGPTSSKEEKDFLQILGKNVPGDVNSPAILRVVSSSPLAYWEKYHRLYLDQYHRWVYTYCDIERNIMLSLSLDIRSNITARLRRKTGTQMPLREQRYTGIDEDGHVVERRAFGYQPFTCVDLLNWKNNTPPYTEKPQALIDFLQAVIQTHSPTLADWHQLLVFLFNSEERRRVLQAATKWLEEHAPADYQNPQEHGRTQLPGTDPHLDPHEREDMQRLNETGKLSWKD

SEQ ID NO: 33938 - protein, 152 aa, Homo sapiens
MEEGWRVAAPQLLGAAVVLAVQETTYRGQESLEKLLGRYFYISRFSALAKTVRQRCVTCRQHKARQGPAVPPGIQAYGAAPLEDLQVDFTEMPKCGEDGKGIGDHTEIACCLPASEFRKGGGDESDYQNSIIVFRDGYVKQHHEGRQTTCYI

SEQ ID NO: 33939 - protein, 137 aa, Homo sapiens
  DOMAIN (105)..(116): RNase H domain identified by eMATRIX, accession number PF00075D, p-value=5.688e-09, raw score of 10.71
  DOMAIN (25)..(90): Gag P30 core shell protein domain identified by PFam, accession name Gag_p30, E-value=2.3e-20, PFam score of 74.8
MSPREQRYTGIDEDGHVVERRVFGYQPFTSVDLLNWKSNTPPYTEKPQALIDLLQTVIQTHNHTWADWHQLLMFLFNSEERRRVLQAATKWLEEHAPADYQNPQEYVDDLLLGHPTAVGCTKGTDALHRHLEDCGYK

SEQ ID NO: 33940 - protein, 93 aa, Homo sapiens
PWASVDWELYVDGNSFFNPQGERGAGCAVVTLDTVVEARSLPQATAAQKAELIAFIGALELSEDLIPRFRLPLRIGSHNGPAFLAAMVQKTAK

SEQ ID NO: 33941 - protein, 166 aa, Homo sapiens
  DOMAIN (70)..(118): Gag P30 core shell protein domain identified by PFam, accession name Gag_p30, E-value=3.4e-11, PFam score of 42.6
PTTPPGLIATGCSYSSLREMKGERRRGLHVATKWLEEHAPADYQNPQECGRTQSPGTHFQLDPHEREDMQRLNRDREALLEGFKRGARKATNVNKVSEVIQGKEESPAQFYQRLCEAYESPVQADCVEVLDSIDSSRPDLQDQPWASVDWELYVDGSSFFNAQGKR

SEQ ID NO: 33942 - protein, 45 aa, Homo sapiens
  misc_feature (1)...(45): Xaa = X or * as defined in Table 2
GHACGAERDHLQPHSPAHLLLLLLSVXAVWXPRYTVKMATACHQW

SEQ ID NO: 33943 - protein, 259 aa, Homo sapiens
MEEGWIRLPDGRVAAPQLLGAAVVLAVQETTHRGQESLEKLLGRYFYISPLSALAKTVRQRDFADFGTTIKQDFRLLGQTSVDRLLQLSQGQAVKGNQLLPVSLTSQCQVYKCVWNWWVLGLTDFKNEATDPPGVKLQTFLVSVTTHKGSVDPNSEKQQDLLQRAKEQSFHSVEGDPSRDFADFGTTIKQDFRLLGQTSVDRLLQLSQGQAVKGNQLLPVSLVKRKTTLAPNTQTASPRALADSLMQLARQVSRLESGQ

SEQ ID NO: 33944 - protein, 204 aa, Homo sapiens
  DOMAIN (4)..(95): Gag P30 core shell protein domain identified by PFam, accession name Gag_p30, E-value=1.4e-27, PFam score of 100.2
  misc_feature (1)...(204): Xaa = X or * as defined in Table 2
MRGAQKATNVNKLSEVIQGKEESPAQFYQRLCEVYRMYTPCDPDSPENQHMIHMALVRQSPEDMRRKLQKQAGLAGMNPSQLLEIASQVFVNRDAVSRKENGKENGGQARRYADLFSPVEPDCVEVLDSIHSSRPDLRDQPWPSGDWELYVDGSSFFNPQGERGAGYAVITLDTVVEATSLPQATSGQKAELIAFIGALELSEX

SEQ ID NO: 33945 - protein, 632 aa, Homo sapiens
  DOMAIN (541)..(563): OLFACTORY RECEPTOR SIGNATURE domain identified by eMATRIX, accession number PR00245A, p-value=7.612e-16, raw score of 18.03
  DOMAIN (149)..(209): Gag P30 core shell protein domain identified by PFam, accession name Gag_p30, E-value=3.7e-13, PFam score of 49.5
MQAISAFGEGRVKSHFYWEKEIYISCLETEFIGSRGRSQSCRQCFGGDASAGRMFFRERLICVAAVLQNVEWIMGTISLGDYILINITGWVYTYCDIERNIMLSPSLDIRSNNTARLRPKTGTQMPLREQRYTGIDKDGHLVERRAFGYQPITCVNLLNWKNNTQNYTEKPQALIDFLQAVIQTHNPTLADWHQLLMFLFNSEERRRVLQAVTKWLEEHAPADYQNPQEYGRTQESVDWELYVDGSSFFNPQGERGAGYAVITLDTVDEDRSLPQATSAQKAELIAFIRALELSEGETVNIYTDSRGHQQASTLVGLGNSRADSEARKAASAPFGASVLPQAPDLGPTSSKEEKDFLQPQKVQARSWLLAASAPVSSEAFGWGDDYKNHVKCISEDQKYGGKGYEGKTHKGDIKQQAWIQNWMKNSLKVHNESILDQVWNIFSEASNSPLSCCLEDSPPFFAVKEEHEQLVPISQGKRCPNSTDPQNVTDVSRFLLLKLSEDPELQPVLAGLFLSMCLVTVLGNLLIILAVSPDSHLHTSMYFFLSNLSLPDIGFPSPTVPKMGVIVFRAFPLALDLCAIGFEVPTVIHAVVNGGASHDSESQNCIIVKSLHGIRNLAIIGSSLCAFVTYLL

SEQ ID NO: 33946 - protein, 472 aa, Homo sapiens
  DOMAIN (32)..(157): Gag P30 core shell protein domain identified by PFam, accession name Gag_p30, E-value=6e-37, PFam score of 133.1
EERRRVLQAGTKWLEEHALADYQNPQEYGRTQLPGTDPQLDPHEREEMQRLNRDREALLEGLMRGAQKATNVNKLSEVIQGKEESPAQFYERLCEAYRMYTPFDPDSPENQHMIHMALVRQSAEDMRRKLQKQAGLAGMNPSQLLEIASQVFINRDAVSPKENGKENGGWPPCLRALAATALLVQEANKLTLGQNLNIKASRAVVTLMNTKGHHWLTDARLTKYQTLLCENPRITTEVCNTLHPATLLPVSESPVEPDCVEVLDSVDSSRPDLRDQAWASVDWELYVDGSSFFNPQGERGCSKNRGTISNHLFPQRCDESKSQVSSCIQRKNIKSYPRRLQLELWRRQLSLGLARGVDLGTPQKGPRGRLTERRRKAHRMLKLYNGLSEGEAVRLLAGTDPLDPTDLNGAHFNPEVYLDKLPRECPLAQLMDSETDMVQQIRALDSDMQTLVYENYDKFIPATEIDKQHKTV

SEQ ID NO: 33947 - protein, 136 aa, Homo sapiens
  misc_feature (1)...(136): Xaa = X or * as defined in Table 2
GVQEESSDLPTAVDSSRPDIRDQAWASVHWELYVHGSSFINTXGERGAGYAVITWTHVVEARSMPQGTSAQKAELIAFIRALELSEALAKTVRQRCVSCRQHHARQGPAVPPGIQAYGAAPFEDLQVDFTEMPKCG

SEQ ID NO: 33948 - protein, 343 aa, Homo sapiens
  DOMAIN (68)..(101): RECEPTOR INTERLEUKIN-1 PRECURSOR domain identified by eMATRIX, accession number PD02870B, p-value=7.319e-09, raw score of 18.83
  DOMAIN (232)..(316): Integrase core domain identified by PFam, accession name rve, E-value=4.6e-09, PFam score of 35.3
MGSCMARASPMGATPCFAAVGPIDCQAEECRHTVWDWWVALPTAAVGDPIGQPIQYARSTCEAGVGELHIQDALPEDHGTYTCLAENALGQVSCSARVTVREGTSPGPKGKTGHCGLGSVSPLGMKELALMENVAEPGSVKLSARTVQVQPSLALSVAPGHGGEHGCGASGLGVDDLLLGHPTAVGCATGTDAPHRHLEDCGYKVSKKKAQICQQQHDARQGPAVPPGIQAYGAAPFEDLQVDFREMPKCGGNKYVLVLGRTYSGWVEAYPTRTEKTREVTPVLLRDLIRRFRPPLWIGSDNGPAFLAALVQKTAKGIQNNITGGVYTLCDIDSHIILFRSGY

SEQ ID NO: 33949 - protein, 187 aa, Homo sapiens
  DOMAIN (57)..(160): Integrase core domain identified by PFam, accession name rve, E-value=6.9e-12, PFam score of 45.1
KTLSFLSDQPLRARSCLPFSGKIRSRALAKTVRQRCVSCRQHHARQGPAVPPGIQAYGAAAFEDLQVDFTEMPECGGNKYLPVLGRTYSGWVETYPTRAEKAREVTRVLLRDLIPRLELPFRIGSDNGPAFVADLLQKTATVLGITRKLHAASRPQSSGKGIQNNRTGGVYTPCDIESHVILFRSGY

SEQ ID NO: 33950 - protein, 111 aa, Homo sapiens
MNSVTGWESSCATAARSCSCTGCARNHPSRSGVTGKVVRLVFLHLTSVSPCQNDFDRLTDRLRQRACVFGCLGTEDSKDIRKKCHWGCEQPCDIESSIIPSPLAYWETTSQ

SEQ ID NO: 33951 - protein, 245 aa, Homo sapiens
  DOMAIN (27)..(38): RNase H domain identified by eMATRIX, accession number PF00075B, p-value=3.415e-10, raw score of 12.56
LSIQQYLTRPPLLGFPPAEDSWFTCLDLKDAFFPIRLAPERQKLFAFQWEDPESGWPPCWRALAATALLVQEANKLTLGQKLNIKASRAVVTLMNTKGHHWLTNATLTDYQTLLCENPRITIEVCNTLHPATLLPVSKSPVKPGCVEVLDSIDSSRPDLWDQPWASVDWELYLDGSSFLQPPRRGGGYAVGDTSELPPCWVCGIPALTQRLEKQHLPPSGHQGSLKHLIWDLLLLTKKRTFSSMI

SEQ ID NO: 33952 - protein, 482 aa, Homo sapiens
  DOMAIN (288)..(328): G-protein coupled receptors proteins domain identified by eMATRIX, accession number BL00237A, p-value=8.457e-13, raw score of 27.68
  DOMAIN (239)..(482): 7 transmembrane receptor (rhodopsin family) domain identified by PFam, accession name 7tm_1, E-value=5.3e-10, PFam score of 33.9
PSAGTPHGSRVCQGNSCPTLAPGGLWVSVVQEESSDLPTADWVSKGWPPCWRALAATALPVQEANKLTLGRNLNIKASRAVVMNTKGRHWLTNARLTKYQTLVCENPRITIEVCNTLHPATLLPVSGSPVEPDCVEVLDSIDSSRPELRDQTWASVDWEPHVDGSSFFNPQGERGAGYAVITLDTVVETRSLPQATSAQKAELNAFIWALELSEEDPELQPALALLSLSLSMYLVTVLRNLFSILAVSSDCPLHTPMYFFLSNLCWPDIGFTSAMVPKMIVDTQSHSRVISHAGCLTQMSFLLLVACIEGMLLTVMAYDCFVAICRPLHYPVIVNPHLCVFFVLVSFFLSLLDSQLHSWIVLQLTIIKNVEISNLVCDPSQLLKLACSDSVINNIFIYFDSTMFGFLPISGIFLSYYKIVPSILRISSSDGKYKAFSTCGCHLAVVCWFYGTGIGMYLTSAVSPPPRNGVVASVMYAVVTPC

SEQ ID NO: 33953 - protein, 372 aa, Homo sapiens
  DOMAIN (209)..(226): RNase H domain identified by eMATRIX, accession number PF00075A, p-value=2.620e-12, raw score of 14.44
  DOMAIN (190)..(368): Reverse transcriptase domain identified by PFam, accession name rvt, E-value=8e-37, PFam score of 135.8
  misc_feature (1)...(372): Xaa = X or * as defined in Table 2
MTVGGKDIDFLVDTSAEHSVVTASVAPLSKKTIDIIGAMGVSAKQAFCLPQTCTIGGHKVIHQFLYMPDCPLPLLGRDLLSKLRATISFTEHGSLLLKLPGTGVIMTLMLPREEEWRLFLTEPGQEIRPALAKRWPRVWAEDNPPGLAVNQAPVLIEVKPGVQPVRQKQYPVLREALEGIQVHLKCLRTFRIIVPCQSPWNTPLLPVPKPGTKDYRPVQDLRLVNQATVTLHPTVPNLYTLLGLLPAEDSWFTCLDLKDAFFSIRLAPERQKLFAFQWEDPESGVTTQYTWTQLPQRFKNSPTIFGEALARDLQKFPTRDLGCVLLQYVDDLLLGHPTAVGCAKGTDALLRHLEDCGYKVSKKKSSDLPTAX

SEQ ID NO: 33954 - protein, 620 aa, Homo sapiens
  DOMAIN (433)..(473): G-protein coupled receptors proteins domain identified by eMATRIX, accession number BL00237A, p-value=7.171e-13, raw score of 27.68
  DOMAIN (39)..(228): Gag P30 core shell protein domain identified by PFam, accession name Gag_p30, E-value=2e-47, PFam score of 169.9
MGQGVKRGWQYRKNPRKNRGAISLPTTRLRYDEAHRRGPFTCVDLLNWKNNTPPYTEKPQSLIDLLQAVIQTHNHTWADWHQLLMFLFNCEERRRVLQAATKWLEEHAPTEYQNPQDYGRTQLPGTDPQLDPHGREDMPRLNRDREALLEGLMRGAQKATNVNKLSEVIQGEEESPAQFYERLWEAYRMYTPFDPDSPENQRMIPMALVRQTPEEITGKLQKQAGLAGMNPSPITTNSWPEAYGAAPFEGLQVDFTEMPKCGGNKCVLVLGRTYSGWVEAYPTRTEKAREVTPVLLRDVIPRFQPPLQIGSENGPAFLAALVQKTAKILGKNVTGDVNSPAILRVVSSSPPLHIGNNITEDPELQSVLALLSLSLSLNLVTVLRNLLSILAVSSDSPLHTPMYFFLSNLCWADIGLTSATVPKVILDMQSHSRVISHVGCLTQMSFLVLFACIEGMLLTVMAYGCFVAICRPLHYPVIVNPHLCVFFVLVSFFLNLLDSQLHSWIVLQFTIIKNVEISNFFCDPSQLLNLACSDSVINSIFIYFDSTMFGFLPISGILLSYYKIVPSILRMSSSDGKYKAFSTYGSHLGVVCWFYGTVIGMYLASAVSPPPRNGVVASVM

SEQ ID NO: 33955 - protein, 684 aa, Homo sapiens
  DOMAIN (118)..(130): RNase H domain identified by eMATRIX, accession number PF00075C, p-value=1.321e-13, raw score of 11.58
  DOMAIN (17)..(207): Reverse transcriptase domain identified by PFam, accession name rvt, E-value=1.8e-22, PFam score of 88.1
  misc_feature (1)...(684): Xaa = X or * as defined in Table 2
REALQGIQVRLKHLRTFGIIVPCQSPCNTLLLPFPKPRTKDYSQVQDLRLLHQATLTFHPTVPNPTTLLGLLPAKDSGFTCLDPKDAFFPIRLAPERQKLFAFQWEDPESGVTTQYTWTGLPQGFKNSPTIFGEAWARDLQKFPSRDLGCVLLQXVDDLLLGHPTAVGCAKGTDALHRHLEDCGCKVSKKKAQICRQQALAATALRVQEANKLTLEQNLNIKASRAVVTLMNTKGHHWLTNARLTQYQTWLCENPRITIEVCNSLHPATLLPVSESPVEPRCVEVLDTIDSSRPDLRGQPWASVDWELYVDGSSFFNPQGERGAGCAVITLDTVVEARSLSQATSAQKAELIAFIRALELSEGRKGLSPGRGKDKXWRKDGFGYRMGEYCATAARSCSCTGCARNHPSTSGVTGKVVRPVFLHLAFVSFAKTVRQRCVTCRQHDARQGPAVLPGIGAYGAAPFEGLQVDFTEMPKCGGNKYVLVLVCTYSGWVEAYPTLTEKAREVTRVLLRDLIPRFRPPLRIGSDKGPAFLAALLQKTAKMGTRSDTQLAHIGTVLRDIHVSVCSDGPNLRTGLNVILGGVEWQSTPGNLVRRQGETGLHLHIYHWWQAVAIFPVYLGSSLHMKVGGRSFEQEEDTEHIPVSYDREGQECDTELKGQEGDELEAGSVVPASDAGDSHDDVDV

SEQ ID NO: 33956 - protein, 158 aa, Homo sapiens
  misc_feature (1)...(158): Xaa = X or * as defined in Table 2
RIQLCCRTRGTGAQKKRMKVSSRCTPAPATRGTGAWQPQAQQAPGVRATEAPRLXAHDEVSQPAPAPPSTRHSPRRXPVAGKEHLEAAVDKERHEVAQAVVTHVLEGQLEDVAPAHAAQIGSPPWAGKRLRTNPAPRPCHPIQTLSRRLGPQNHTLLH

SEQ ID NO: 33957 - protein, 73 aa, Homo sapiens
  DOMAIN (19)..(55): Synapsins proteins domain identified by eMATRIX, accession number BL00415P, p-value=5.034e-09, raw score of 2.37
  misc_feature (1)...(73): Xaa = X or * as defined in Table 2
NVGLKGTAGERGGSGPPSXPPAGRNSGPAGRRPPAARAPTPGSAARXPAPPGPPRPPAGRGAAAAAGPAGGGA

SEQ ID NO: 33958 - protein, 141 aa, Homo sapiens
  misc_feature (1)...(141): Xaa = X or * as defined in Table 2
GEWEAPPLLRHTRPGPAPAPPAPSGASCAPCGGQTCRPRPLRQAPPSPITTGHARIWLGQPRPRSSSATPPKELPXGPTEPHTGELWVASGSCPSGTKLPEEGSGSNTYFSAVSAGDTQSNIIWNGPPANSNRPAAEGPDC

SEQ ID NO: 33959 - protein, 141 aa, Homo sapiens
  DOMAIN (87)..(136): Eukaryotic RNA polymerase II heptapeptide repeat proteins domain identified by eMATRIX, accession number BL00115Z, p-value= 3.163e-10, raw score of 3.12
  misc_feature (1)...(141): Xaa = X or * as defined in Table 2
YLASAAIFRNMSSVVCLVCFFFTSQICLQTDNAPYTVLSINENLSVLGSMFSNFLRSFLRSTKASAKPFIVTLLRSSFFSVSSSLASSSAMHSCSSSNSSSFFNSSRTTSKSSSTSSSFTPSSESFSSXVSSSRFHSYTPW

SEQ ID NO: 33960 - protein, 171 aa, Homo sapiens
  misc_feature (1)...(171): Xaa = X or * as defined in Table 2
LPAGFGPCGAWNQNQREKRPQSPGAESAAXSGGGQQRGGRAGAGGHGACASLGSEPQGREPALGAGGETALPSGSGSGRPPRPQRPRDSGPEALPSAAFWKRRRXASASAPALTPVPDSVRGAQPGGGGAEPEGKAVRMRGASRPALSQLSGREIGPCPQGRVVAPSGTAC

SEQ ID NO: 33961 - protein, 156 aa, Homo sapiens
  DOMAIN (127)..(142): WILM'S TUMOUR PROTEIN SIGNATURE domain identified by eMATRIX, accession number PR00049D, p-value=2.500e-10, raw score of 0.00
  misc_feature (1)...(156): Xaa = X or * as defined in Table 2
PMVWSCASAARLPEPGNGALLRTSSPRCSPCPSAAXLTRLPPTPPGDPSAAPSPGQRPAGLAGAGGAERSGAVEVGPREPGRDGAGSXSWIAGPPGRLEAGSAGVLRSPVAGWRPGTCAGRPGKAGDLGPSAPPQAPHPPPPSWSPLSPLASPPTK

SEQ ID NO: 33962 - protein, 355 aa, Homo sapiens
MHSGTFNPQDFAWQGLTLTPAAGIHIRELVAKQPGMVGVRLGVNQTGLRGLWLCARSVNEPGKEIRHACRSKVVANDPTAVRKLEYYWSRDIFSDREASYMSHENHFGYAAWPPFARTRTGSHSAPRDNHQPALVIQSSKTKSCLHSKKHAMNTGVRCYNADGIAATTGSRSDAVVKYLTPVSAEELFFGHGQTGNDGTERKPKGKGREKVRFLDLERGKEGKVVDLPERERGAETEGRSPGGAESRGIEQAGVNGMGRKSKKWGKKVSRYEGKVRLKKVPAKKLVPAWKEKVWGEETTKGEERSRGEETVFIEKGQGEEEGRYQRAGRGDGPAREEPIAENPGKERVHKDQVEE

SEQ ID NO: 33963 - protein, 327 aa, Homo sapiens
  misc_feature (1)...(327): Xaa = X or * as defined in Table 2
LALTARSSHPQRATVPKASVVAAASPTKFRHSGAALQWRNLGPVRAQGRRLSTAAPAAPSRRLFPPPPFRGGRGGGWSGSRGRRGAEPGRSHGAGGPGDDGRCGWGEGAGTSTPARPSRGPGXRPEIWTRGGGGSAKSQGPAGAPGCAGPRGASSFGRQRAPAVLGPGSSTAVCPLPRRTWNLRAPGGAPSYAQVAAAHQAPPGRPPWSPRGARGSGRSRTFAPSTPAVVAGAASAVAPPRLRPSPPPAPAPAAAATAAERRGREEAPGRGCGSGRAEPPPLGPDGTQVSPLQRSSRVTEFCGGSGGHYARFWHSSPLRVGASRSQS

SEQ ID NO: 33964 - protein, 242 aa, Homo sapiens
  misc_feature (1)...(242): Xaa = X or * as defined in Table 2
HGLVLDVRGPLSHAAPYWAPYPAATAAAARTAPLPPRSAIVXSGPQPDFQELRKTWPSQCGMARREPLLPITAIPRVVVETTPXGFAKQEPSVAGLRCRGSEAPAXLLHGVHRNVSETPGPEMGRPGXGNHRQRPGKQRGIPSSGLPGRCSGSRGPHSSPGQKPHGSTLSGRRGADPRPRRRVYLSTPLLCEKKPHHDTILKRKPGMGDGNNPCPWNAGLYGQATRFAPLPLCPRRRHGAVS

SEQ ID NO: 33965 - protein, 112 aa, Homo sapiens
  misc_feature (1)...(112): Xaa = X or * as defined in Table 2
WPCGWTGRGGCRQRGRERRLGSGVRFGDVSFRGRGRGRARASWKPPHQGPGEPKSGTRNRPPXGGGAPAGIRGPELGTGNMKKLLLSLPIYYHLAGEKGQVAKIVRIPSADV

SEQ ID NO: 33966 - protein, 136 aa, Homo sapiens
MVTDVVTRGGELGQRHVPPGESSGLFCGQCGERETRDPSYRGWSRRFRFRALKNGAHWSPRLAVFGDLGADNPKAVPRLRRDTQQGMYDAVLHVGNFSNYKARFSMPGDNEGLWYSWDLGPAHIISFSTEVHFFLH

SEQ ID NO: 33967 - protein, 141 aa, Homo sapiens
  misc_feature (1)...(141): Xaa = X or * as defined in Table 2
LRRDTQQGMYDAVLHVGDFAYNLDQDNARVGDRFMRLIEPVAASLPYMTCPGNHEERYNFSNYKARFSMPGDNEGLWYSWDMGPAHIISFSTEVYFFLHYGRHLVQRQFRWLESDLQQSQXEPGSPAVDHHYGAPAHVLTK

SEQ ID NO: 33968 - protein, 106 aa, Homo sapiens
  misc_feature (1)...(106): Xaa = X or * as defined in Table 2
FRREPPRGAAAAAALPRRNRENKRSKNRPCCEGPRGSARMKELEXPRPLQVLCLLPEMCSPRLADSYSPVSVRPISAPVRFLHRCCPPPFAEFPACRLLQHSRVPL

SEQ ID NO: 33969 - protein, 49 aa, Homo sapiens
MCSPRLADSYSPVSVRPISAPVRFLHRCCPPPFAEFPACRLLQHSRVPL

SEQ ID NO: 33970 - protein, 1130 aa, Homo sapiens
  DOMAIN (999)..(1043): Anion exchangers family proteins domain identified by eMATRIX, accession number BL00219N, p-value=5.944e-25, raw score of 10.66
  DOMAIN (231)..(1044): HCO3- transporter family domain identified by PFam, accession name HCO3_cotransp, E-value=0, PFam score of 1839.8
VLPREELQATATSRERRQEGPAWPSPFILLSGVVRRKRKRRRLAEEEDNYIESVVKFRSMFNKNNSNKLRSTPRYRRGDPGYLNFTELGPLKPEQKDQWSQHRPDEEAVVDQGGTSTILNIHYEKEELEGHRTLYVGVRMPLGRQSHRHHRTHGQKHRRRGRGKGASQGEEGLEALAHDTPSQRVQFILGTEEDEEHVPHELFTELDEICMKEGEDAEWKETARWLKFEEDVEDGGERWSKPYVATLSLHSLFELRSCLINGTVLLDMHANSIEEISDLILDQQELSSDLNDSMRVKVREALLKKHHHQNEKKRNNLIPIVRSFAEVGKKQSDPHLMDKHGQTVSPQSVPTTNLEVKNGVNCEHSPVDLSKVDLHFMKKIPTGAEASNVLVGEVDILDRPIVAFVRLSPAVLLSGLTEVPIPTRFLFILLGPVGKGQQYHEIGRSMATIMTDEIFHDVAYKAKERDDLLAGIDEFLDQVTVLPPGEWDPSIRIEPPKNVPSQEKRKMPGVPNGNVCHIEQEPHGGHSGPELQRTGRLFGGLVLDIKRKAPWYWSDYRDALSLQCLASFLFLYCACMSPVITFGGLLGEATEGRISAIESLFGASMTGIAYSLFAGQALTILGSTGPVLVFEKILFKFCKDYALSYLSLRACIGLWTAFLCIVLVATDASSLVCYITRFTEEAFASLICIIFIYEAIEKLIHLAETYPIHMHSQLDHLSLYYCRCTLPENPNNHTLQYWKDHNIVTAEVHWANLTVSECQEMHGEFMGSACGHHGPYTPDVLFWSCILFFTTFILSSTLKTFKTSRYFPTRVRSMVSDFAVFLTIFTMVIIDFLIGVPSPKLQVPSVFKPTRDDRGWIINPIGPNPWWTVIAAIIPALLCTILIFMDQQITAVIINRKEHKLKKGCGYHLDLLMVAIMLGVCSIMGLPWFVAATVLSITHVNSLKLESECSAPGEQPKFLGIREQRVTGLMIFVLMGCSVFMTAILKFIPMPVLYGVFLYMGVSSLQGIQFFDRLKLFGMPAKHQPDFIYLRHVPLRKVHLFTLIQLTCLVLLWVIKASPAAIVFPMMVLALVFVRKVMDLCFSKRELSWLDDLMPESKKKKLDDAKKKAKEEEVIVLAPTVYLGASNYRT

SEQ ID NO: 33971 - protein, 123 aa, Homo sapiens
  misc_feature (1)...(123): Xaa = X or * as defined in Table 2
ERGLGRSEIPRKEVEHFMQLGSAVAGPXLLPLVGPAGECFHGWLEPLLARIAEDKTVVVSPDIVTIDLNTFEFAKPVQRGRVHSRGNFDWSLTFGWETLPPHEKQRRKDETYPIKQPVGVIGD

SEQ ID NO: 33972 - protein, 228 aa, Homo sapiens
  misc_feature (1)...(228): Xaa = X or * as defined in Table 2
VGPEHCAGAARWVTSPPRSWPDAGQSVNXPDLPXREKHPEGGXKLQGQGAKTAGNAVVWKPLSKPQGSSALSGGHWDRLPAPDPGKMPNCDRAPPKIASRVSPQACFPRPSPPVPSAGPLRASTPADQARRPARAARPPDALSKRGPCRISAKLHSGGGGGGGCREKAQEEPEGRTARSLTPPLPLAPRPGPAGRRLPPAHTTQPPGRTGCPSPAGRDTSQLPYFLLK

SEQ ID NO: 33973 - protein, 141 aa, Homo sapiens
  DOMAIN (40)..(74): Amyloidogenic glycoprotein extracellular domain proteins domain identified by eMATRIX, accession number BL00319C, p-value= 8.875e-10, raw score of 17.12
  misc_feature (1)...(141): Xaa = X or * as defined in Table 2
RNKVGSRGRAKQLKFSGQSTRVHRSESREEEEEKEEDEEEEEEEEEEYEKEEEKEEEEEEEERDLEFSKGPFLSSXSSQGKGTRVHRSESREEEEEKEEDEEEEEEEEEEYEKEEEKEEEEEEEERDLEFSKGPFLSSVES

SEQ ID NO: 33974 - protein, 443 aa, Homo sapiens
  DOMAIN (205)..(249): Synapsins proteins domain identified by eMATRIX, accession number BL00415N, p-value=4.416e-09, raw score of 4.29
  misc_feature (1)...(443): Xaa = X or * as defined in Table 2
PLGPRRQQSECGAPTLTWPPGSNGLPGQQGASPLSASPGAGAGSGRGPAAGGSGASCTPSPRGPASWSRSAAQVPRSSRWRAGSASSXNAGSPTPPTSQPPRAPALCAAAGTLAPVEKGVEVPAGRGLSGAPSXXGKCPLPEAPSGGSAPLSXGGTESGAGAPEPRKATGRPGPRVPGGAGAARGLPAPTSGCAAPFPPRPCPGLCVLRARPAGAAHPCPGPGWPGPGPGAHQTLRAALREPSPLASPLVSGRPGPRLVFNRVNGAAGPLHVPILRGDPGDLHSGPRGECPLCVRSLAAGATAADGGPAGEGRPRPVYTMERTANPRLQNFVPHXPRPSGGRKQFLARITSFPSGCWEGGAATRPTCRQEKGMAALPTHCAWLGAGHTXKCQHLDFCTFFFPGPGCGDGRCHVQGPNPSDLSPAHCAQGPATSPWGWQGGAPG

SEQ ID NO: 33975 - protein, 228 aa, Homo sapiens
  misc_feature (1)...(228): Xaa = X or * as defined in Table 2
GHCGGGTQCSWPAPWCQNLLPPSASPTLSTQRQLWHAWPGAHRNPVXQVPSLDSXARAQLSVPAQGSLPLCASLTASPWCSCSSLAVLLFGKXPFCVNLFXRASLMKSSSRARVLPSLRPVRWPAVGRGWQGMERGQGAWPWLCGAVCSRAXSVHMTTLPSGPALCGIQRRLQSSTQRRPESLHPLQLGWEAAQAGEGLPHPAVVHLPASPRLQLSQLHQSRPRLPPG

SEQ ID NO: 33976 - protein, 398 aa, Homo sapiens
  DOMAIN (198)..(247): Eukaryotic RNA polymerase II heptapeptide repeat proteins domain identified by eMATRIX, accession number BL00115Z, p-value= 9.801e-09, raw score of 3.12
  misc_feature (1)...(398): Xaa = X or * as defined in Table 2
TNCSCLRDRPLDSSHVPWVEEAQSAHNNKEIVPQKGPWSSKHNQARGPPRSESNTNKAVNCAGRSTKTQTPRGTSGTTEGNTXVHTRHTKMSTTNTNTSSLDAPPTTQQMRSTRERGTSPAPPSSALKNTYTLPLPTSSNDTTIYQLTVVPGPGPRTGELPRCHARVTPRVSGEEALPPPPRSPENSNTHLRTPSQTRTPTRARPPLPETSPQQPWPDPRVGFFLRSSPVWAPSSQQYPWWSPSLSTNMTIPPESSSLLPTLAYYTSLTSHHGQRMPAPADHAXAQSTPSAHRHRPQYVQWTTDPPSTHGTFEESSGRYPQTHTVAVKKKTIGTPARDSHSFPTTPTTRMVKSLKTSTGTSTDLSSSRSILKSPTSSIFTSLTIFSIWRDPDSMDLCV

SEQ ID NO: 33977 - protein, 591 aa, Homo sapiens
  DOMAIN (547)..(580): PROLINE-RICH PROTEIN 3 domain identified by eMATRIX, accession number DM00215, p-value=4.529e-11, raw score of 19.43
  misc_feature (1)...(591): Xaa = X or * as defined in Table 2
NVAGNPARSMAETQSRAGTAGPGPRTKQTPGTWGSGQAGAPAHPPCYIQESRSGFSAPGRARNAPGAANPLCMAPGGAEGSGVIQREVEGRPRSHSAPMLSLWSERPPSCVCLGPDGAADFPRRGRGPRPPLQDSPASPSAPRCSPARCSRLPLXPRPRDKDAPGTGGRPGPPGTLPDSRLECSASRPCGEGCETLVQFPDRRGPGCGPLQGPGRGNPARPQPRLTRAAPGPTAPAALVSSGGAAVPPRRTRXPLLAGAVEVASPRPGSVQSLVPEHPGPFKELRNIVLSNSPEASYSAPANXRPPPAEIRRREWQELRGGVLGGGLVFSFPPHSCVGSTGAWGLPTWRGVGSGIQGFFSVPPSGRETSRGGRTATAPWSSTPDCPSHWREPSAGSLRRGXGRRDAAPGARXSRAPPTRPGSRASPGGAGEAGVEGELLGPRGQVVTGPGRPTAPGIYRPGGRRKASAAGSRCATGGSRSSCPRRGSRSPGWRWTRWGVPGRRGTLARPAPGPGCPYRRRPGGAPRGAGGRPSTGCGSRSRQWLAGQLLPRPSMLGALPGLAPLQPPPAPPVPPPPPPPPPPMPLSAALSS

SEQ ID NO: 33978 - protein, 306 aa, Homo sapiens
  DOMAIN (253)..(263): NITRATE REDUCTASE ASSIMILATION FL domain identified by eMATRIX, accession number PD02294C, p-value=9.449e-10, raw score of 3.94
  misc_feature (1)...(306): Xaa = X or * as defined in Table 2
NVAGNPARSMAETQSRAGTAGPGPRTKQTPGTWGSGQAGAPAHPPCYIQESRSGFSAPGPRETHSGAANPLCMAPGGAEGSGVIQREGKAGPDPTARLCSAFGPSGRPPACRLGPDGAADFPRRGRGPRPPLQDSPASPSAPRCSPARCSRLPLXPRPRDKDAPGTGGRPGRLGHSLTRAWSAQHPGPAGEGCETLVQFPDRRGPGCGPLQGPGRGNPARPQPRLTRAAPAPDSAGSSGAPPEGCCAPAKDEMTPAGRSCGGCLAETRICPVARPXAPLEKSFPNVVNPGKKKAQPTLSPSNMTAP

SEQ ID NO: 33979 - protein, 180 aa, Homo sapiens
  misc_feature (1)...(180): Xaa = X or * as defined in Table 2
LPGAGHRRVLDAGGPRGAGLQPQLPARQVGAVAELHVSGPPGAGLAGSGSGASGVGLGAAGWGSGPRGVRAEGEGAYSGPGQVFPVQGNVGNADAGTTGVGVPAGWWPPLPTRLQTLSVASPWLCPXAAASARSPPSGLSGEXTLFYTFSFLPPVVIAASPPAGLASEARPCFPRFHSYP

SEQ ID NO: 33980 - protein, 1022 aa, Homo sapiens
  DOMAIN (986)..(1003): Zinc finger C2H2 type, domain proteins. domain identified by eMATRIX, accession number BL00028, p-value=8.714e-09, raw score of 16.07
  DOMAIN (472)..(1007): Zinc finger, C2H2 type domain identified by PFam, accession name zf-C2H2, E-value=4.2e-28, PFam score of 106.8
  misc_feature (1)...(1022): Xaa = X or * as defined in Table 2
MSLEVDRSVETMCSGDEILLPDLPKADVADPLWGPFPVQNCLSLARSDSREQGLVLVMESRNREVVPPGVSYSKDGAKSLKGDVPASEVTSKDSTFSQFSPISSAEECGDDEKIKVDDPLTRRTCNQASGSAPQQDYDKLKAFGGENSSKTGLSPSGNMEKNKVVKREAEANSINLSVYEPFKVRKAEDKLKENSDNVLENRVLDGKLSSEKNDTCLPGTAPSKTKSSSKLSSCSSAIMALSAKKAASDSCKEPVANSRESSPLPKEVNDSQARAPLQSTVMTNAVSPAELTPKQVTIKPVATAFLPVSAVNEMKTAGSRVINLKLANNTTVKATVISAASVQSASSAIIKAANAIQQQTVVVPAPSRANAKLVPKTVHLANINLLPQGAQATSELRQVLTKAQQQIKQAIINAAASQPPKKVSRVQVVSSLQSSVVEAFNKVLSSVNPVPVYIPNLSPPTNAGITLPTRGYKCLECGDSFAVEKSLTQHYDRQSMRIEVTCNHGTKNLIFYNKCSLLSHARGHKEKGVAADTRGQKTCTICQMLLPNQCSYASHQRIHQHKSLYTCPECGAICRSVHFQTHVTKNCLHYMRRVGFRCVHCNVVYSDVAALQSHIQGSHCEVFYKCPICPMACKSAPSTHSHTYTQHPGIKIGEPEIIYKCSMCDTVFTLQTLLYRHFDQHIENQKLSVFKCPDCYLLYAQKQLMMDHIKSMHGTLKSIEGPPNLGINLPLSIKPATQNSANQNKEDTKSMNGKEKLEKKSPSPVKKSVETKKVASPGWTCWECDRLFIQRDVYISHVRKEQGKQMKKHPCRHLCQHNRIKHKGIRKVYACSHCPDSRRTFTKRLMLEKHVQLMHSLKDPDLKETDRCHQXGGNRNKRRHLSSPVPSGSWKNQFSRCAMCGFTTENLLQFHEHIPQHKSDSSSYQCQECGLWYTSHVSLSRHLFIVHKLKEPQPVSKQNGAGEDNQQENKPSHEDESPNGTVSDRKCKVCVKTFETEAALNTHMRIHGMAFIKSKRMSSAKK

SEQ ID NO: 33981 - protein, 282 aa, Homo sapiens
  DOMAIN (40)..(54): C2H2-TYPE ZINC FINGER SIGNATURE domain identified by eMATRIX, accession number PR00048A, p-value=4.960e-09, raw score of 10.52
  DOMAIN (11)..(267): Zinc finger, C2H2 type domain identified by PFam, accession name zf-C2H2, E-value=3.5e-12, PFam score of 53.9
  misc_feature (1)...(282): Xaa = X or * as defined in Table 2
MENKKVASPGWTCWECDRLFMQRDVYISHMRNEHGKQMKKHPCRQCDKSFSLSHSLCWHNRIKHKGIRQGPDSRRTFTKRLMLEKHVQLMHGIKDPDLKETDRCHPXGGNRNKRRQPRSPVPSRSWKNQFWSSGLPKEQSLNHXKSXKSMFLRFTSALVRGFTTENLLQFHEHIPQHKSDGSSYQCRECGLCYTSHVSLYMHLFIVHKLKEPQTVFKQNGAGEDNQQENKPSHEDDSPDGTVSDRKCKVCAKTFETEAASNTHMRIHGMAFIKSKRMSSAEK

SEQ ID NO: 33982 - protein, 719 aa, Homo sapiens
  DOMAIN (48)..(68): kw TRANSCRIPTASE REVERSE II ORF2 domain identified by eMATRIX, accession number DM01354W, p-value=7.500e-11, raw score of 12.64
  DOMAIN (177)..(684): Spectrin repeat domain identified by PFam, accession name spectrin, E-value=9.8e-32, PFam score of 118.9
  misc_feature (1)...(719): Xaa = X or * as defined in Table 2
VNSHSQLLQREXNTXESNLQGMXRTSSRRTTNHCSMKXKRIQTNGRTFHAHGXERVNIVKMAILPKKIQSDLTSHEISLEEMKKHNQGKEAAQRVLSQIDVAQKKLQDVSMKFRLFQKPANFEQRLQESKMILDEVKMHLPALETKSVEQEVVQSQLNHCVNLYKSLSEVKSEVEMVIKTGRQIVQKKQTENPKELDERVTALKLHYNELGAKVTERKQQLEKCLKLSRKMRKEMNVLTEWLAATDMELTKRSAVEGMPSNLDSEVAWGKATQKEIEKQKVHLKSITEVGEALKTVLGKKETLVEDKLSLLNSNWIAVTSRAEEWLNLLLEYQKHMETFDQNVDHITKWIIQADTLLDESEKKKPQQKEDVLKRLKAELNDIRPKVDSTRDQAANLMANRGDHCRKLVEPQISELNHRFAAISHRIKTGKKPSWRRGVSNLGEMLVEVYLKALMSEDLRKGINQDEFSPTIYYFPITVFGSEGDLLLGKIRWIQGAYCLMIGQDVFMDTRLRVSACFLKTKMKTVLVVFDQNEDNEGTVKELLQRGDNLQQRITDERKREEIKIKQQLLQTKHNALKDLRSQRRKKALEISHQWYQYKRQADDLLKCLDDIEKKLASLPEPRDERKIKEIDRELQKKKEELNAVRRQAEGLSEDGAAMAVEPTQIQLSKRWREIESKFAQFRRLNFAQIVYEIVVHISKKNRMQGNSQTCYLELGQIIL

SEQ ID NO: 33983 - protein, 303 aa, Homo sapiens
  misc_feature (1)...(303): Xaa = X or * as defined in Table 2
GVHNGVEELILVRRMQKSPGPGEMESGSLEKEPLGTQTGPVPSEEYGIGLSQSISTKHPETSPKDSRIRENDVTADGRTTEDHITADPGTTEDSVTADPGTTEDNVTVDPGTTEGSVTADPATTKDYVSADPGTTKDSVTADPGTTENFVTADPGTTKDSITADPRTTENFVTADPGTTKHSITVDPGTTEDSVTADPGTTKHSITADPGTTEDSVTADPGTTEDETTKHGDTHLLXTTSVTAVKPTRLLTPMGIILISLAATTVTVVLFVGLGFIVKECFLPPLNPSTRVIYHPHVMDYSTP

SEQ ID NO: 33984 - protein, 114 aa, Homo sapiens
  DOMAIN (38)..(51): w SPAC8A404C RESISTANCE SPAC8A4.05C DAUNORUBICIN. domain identified by eMATRIX, accession number DM00191A, p-value=1.720e- 09, raw score of 8.16
CSPPSTRPGPGPSGTAWPGPRGTKRSSPSSSSSSPSTTSTTTSSSSSSSSSSSSSAPPRGFSSTRPSPLRRLLPPSSSSPSSSSSSPSTTSTTTSSSSSSSSASAGGRRAGTRG

SEQ ID NO: 33985 - protein, 241 aa, Homo sapiens
  DOMAIN (107)..(120): w SPAC8A404C RESISTANCE SPAC8A4.05C DAUNORUBICIN. domain identified by eMATRIX, accession number DM00191A, p-value=1.720e- 09, raw score of 8.16
  misc_feature (1)...(241): Xaa = X or * as defined in Table 2
EIDKKHRFLVSISLNSPSKXGEGDTPSRPHRARTGASVVPSPKFPTSLGRSALSRHPHQTTNPTRPLRKAGAAAFNAPRAGPLGTAWPGPRGTKRSSPSSSSSSPSTTSTTTSSSSSSSSSSSSSAPPRGFSSTRPSPLRRLLPPSSSSSSSPRSSSTGDEAAAAAPVASRGAGPGASAAAAAAAASSSPGSGAGAGPGTGGGSPGRAASLAGAGAGPAGCSAAPPRRLPRLERLARRRAC

SEQ ID NO: 33986 - protein, 50 aa, Homo sapiens
HCLPSALGPVVQRAFLVFPGITACCTPCAGGLAVCSTEIPKPSSSPCARA

SEQ ID NO: 33987 - protein, 170 aa, Homo sapiens
  DOMAIN (56)..(70): 499 kw TRYPSIN KINASE KUNITZ PANCREATIC domain identified by eMATRIX, accession number DM00522B, p-value=7.049e-09, raw score of 9.43
  misc_feature (1)...(170): Xaa = X or * as defined in Table 2
IPAALSCCCPEWQALVXQILQDSSCCQSPRVPGHSCGKGTTLCVFSREWSLVSGSRCSDGETSCTGRCCNAFLCYDLRFSWLFCTLDVRRGVAGQGGRLGLDLGLSAVCIHQVWVMGSRCGXQLLAPGRVSRPRGRERGTHWSCWCRSPWMGSGWEAHSGAACLSGVFVP

SEQ ID NO: 33988 - protein, 153 aa, Homo sapiens
LVCRSPRAQPPDFAAAWSRLAATSAARRPPGSPVYGNSHESAQSRRVVISHNMDKALKEVFDYSYRDYILSWYGNLSRDEGQLYHLLLEDFWEIARQLHHRLSHVDVVKVVCNDVVRTLLTHFCDLKAANARHEEQPRPFVLHACLRNSDDES

SEQ ID NO: 33989 - protein, 253 aa, Homo sapiens
  DOMAIN (30)..(198): Domain associated with PX domains domain identified by PFam, accession name PXA, E-value=4.4e-05, PFam score of 12.7
  misc_feature (1)...(253): Xaa = X or * as defined in Table 2
SGLREPKQLQMLELXRKMSQLSLEGXXSSHNMVXRLXKKCSDYSYRDYILSWYGNLSRDEGRTLPSALGRFWEIARQLHDRLSHVDVVRSCLQGCCEDLYSLISVTXKLPMPDMKNSQDLLCCTPCLRNSDDEVRFLQTCSRVLVFCLLPSKDVQSLSLRIMLAEILTTKVLKPVVELLSNPDYINQMLLAQLAYREQMNEHHKRAYTYGPSYEDFIKLINSNSDVEFLKQLRSVEGTVEKSGRRCVLVVFNN

SEQ ID NO: 33990 - protein, 1438 aa, Homo sapiens
  DOMAIN (1072)..(1121): PRECURSOR GLYCOPROTEIN SIGNAL CELL domain identified by eMATRIX, accession number PD02576A, p-value=5.826e-23, raw score of 27.60
  DOMAIN (787)..(1165): von Willebrand factor type D domain identified by PFam, accession name vwd, E-value=1.1e-41, PFam score of 149.4
MQSMTKMYCGPLDQPASPCSNVDDIEVKLEIMLLTERDDGKEVLDVGEERRYEIEEYDSKWTRKYNCLAVLRVHSGSQITTMKLILWYLVVALWCFFKDGKIAASRSGGFSYGSSSSGDLDRKKPLFSLEFGSPGETEDKSRQRQDAGSPKSEDTPAGGFFNSSSSSGDSDRTKPFFSLGLGAPGKAEDKSGDSQDAGGSKSEDTPPGGFFYGSSSSGDSDKKKPLFSFEFGATGEDEDKSRERWDAGNSRSEDSPADSTNTRYGAGFSSSGASLDVGFGWGISDEKGLEVSKADGRETRGSGSAGGETIVFGPDAVGTGSSGLKLGAGKGDAAFGFEVSDSNSFGDTGISSKTVEGNQTSSSGGSVSIDLGDTSFRSENQFVGGGSLNSISNLWDSGQEGFGINEIGGNGMSGSVSAEAGFKGFGSDSSSSVGMLESLEFGLGGKKVGAGFDFKYSGSRKFGGNELSENGIKVTRESSSSDLGDSSARNGFENSSGISEDSGVILGSSDQHEVELSRTGGNRKRSSDPDEAGNLSPGSDVSDSGGNTWSSDSGSGGGGKSADELGVGASGLNEFGETGLSGSGQDINEHIANSKIPGDCPNAVGKSYEVCEDGIQHCNKIIGTYFEKCGKVAALSNDYKMICIDEYCQTRDKTSTCDTYSELSRLCASDGPGTFESWRSDSDVVCGTQRCPEQHIYKECGPSNPATCSNVAPFQDSECVSGCTCPEGYLLDDIGEKGKCVLKAECPCESSGTVYQPGEVREGPCGSQCTCQDAKWSCTEALCPGRCKVEGSSLTTFDGVKYNFPGNCHFLAVHSVPVDKYVFNSDGTVTNDKIRNQGYYYSDKIQIFNASSSYLQVETYFHVKLQIQIVPVMQLYVSMPPNQFTDTVGLCGSYNNKAEDDFMSSQNILEKTSQAFANSWEMMSCPKGNPSSCISIEKEKFAERHCGILLDSSGPLASCHPIVNPKPYHEECKKYTCTCENSQDCLCTILGNYVKACAEKETYIVGWRTGLCEHSCPSGLVFKYNVKACNSSCRSLSERDRSCDVEDVPVDGCTCPDAMYQNNEGNCVLKSQCDCYINDEVMQPGKLIHIDDNKCTCIKGSWSCTQNECQTICHIYGEGHVRTFDGKSYSFDGLCQYSFLEGKVCGLCGNNNGDLKDDFTTRYSSVASGALEFGNSWKTSQECSDTVAQTFPCDSNPYCKAWAVRKCEILRDSTFRDCHNKVDPSAYHDVCIEEACACDMEGKYLGFCTAVAMYAEACSAVGVCVSWRKPNLCPVYCDYYNAPGECRWHYEPCGTVTAKTCKDQLVGQKFSSLLEVSTTTATTILSTGAAITLVTGGPSTGTTLGPLTEPFTTGITETSVPIISTSGNAGMTGVVSPTVTGASGMADVKHFQPSLHLAHLPPNTMVFKVWFLDQQHQHLLGIPYHIMAILYVGDKFLI

SEQ ID NO: 33991 - protein, 164 aa, Homo sapiens
  misc_feature (1)...(164): Xaa = X or * as defined in Table 2
ISAGVTGTSGLSAEATGIPGLSAGVTGKTGLSAGVTETIGLSAGLSARVTESTGLSAGVTGTIEXSAVVTETTRLSSGVTGTIGPSAEETGATGLSAEVTGTTGSLAEVTGTTGLSAGVTGTIGSSAAGLSSAPXIPSIPAFSGLVFILSCSTKFKAKEWLFFV

SEQ ID NO: 33992 - protein, 320 aa, Homo sapiens
  misc_feature (1)...(320): Xaa = X or * as defined in Table 2
AGLSLMGSIXACHTGLESSLPVWILSAPSFPPHPVTSSPPISFHLCKLSLSHCTXLGTVGALLPASSATHVHQAWPQWPATLMSHWNCYPREGEEIGYLPTSHPTPHYIPVLTTSAHSAAPSHFGQSQAPIRLPPPPGAPSISLSPLPQNLCKGYERDPLPSRPPLRAVRSKKQKLGWRLAGPLSKSPDGINLPFLTSPLGCLDLSLPPGPGPTVLFSVSLWHSTKLCQHQSLTGLGGQPGQQGSSSPSAVFRGSRDVSGVIAQRQTSQEKELESGLCVLTSGAPSPSSPHPPYRGTSLFLFYLCILEKGKMVNKRDLCC

SEQ ID NO: 33993 - protein, 728 aa, Homo sapiens
  misc_feature (1)...(728): Xaa = X or * as defined in Table 2
CPQSLIAVEQRKPPPTGSQVLLQPRAAQGTPLPTATPHGTSGDAQKHLLQTWXNTWPXKKPGPSPTVRRTQDTDQTTAQHPEGAKVQGHDQFPGGSVHFGCRPAPSPPRRQGPLAWHGAGADGFPHGSPFPSSLTRRCTATPSVLKTSPYRKPLLHSCPSNXMYPXPTRPPPSPTSPTQLSLRTANVATCPPLWPLPLRRHLSQWVPPNWEPGAASGSSREHGGIPAMPQPQCSAPSYPPTEACLQSADGDQALSKHSADTNASRPKPRGSWCPPVTDEDAESDRGSGQQQSQRTPAEVLGKPQVLERFLLPTQTKQEGSHDEETRHVHNCREGSTEKQGRHPLPARPSPASSKRLLTPGPSPPAAKRLLRQGLLRPAATPCSASGGYLGTRQRALGAGALGGCEPTPATGEESRPCHLRXPLSPSDSSSLCPLGFAKPHQARNAGLLGASTGMKATKWAGACRQRTAKTEAWASSWQRVSDTKPGSTRQKNKDSGSHPQYQAFDLRLTITAGFSAAEASELEGSCAAATQISSLQVACHGTSRPHNHVVDDIMNSTAGPPSGVCGELENVMSGKPTQLVSEMLQVRPSPSGASFQQSLRMTXVSVNWTPPRPCIXNRPAAPAETSPAPRTASTPNASPQGPSARGFVEKWNGSHAARHPRYKPGTQXPSGAASTGSPGTPPSPALPPCRASSLVGKQPAMDKPQARKCTAGPVVTPGRRSRGRLELF

SEQ ID NO: 33994 - protein, 141 aa, Homo sapiens
  DOMAIN (101)..(118): RNase H domain identified by eMATRIX, accession number PF00075A, p-value=8.000e-09, raw score of 14.44
DSCSKLEQHSTLSRAILLIYKGFCRFRNHHQTGFSPAGANQRGPLAATLSGPGGEGQSAVARLTGEKKNHPGAQYANRLSPRVGRFINAAGTTGFPTGKRAKTDGSWRMTVDYRKLNQVVSPVAAAVPDVVVLLEQINTSP

SEQ ID NO: 33995 - protein, 88 aa, Homo sapiens
  DOMAIN (25)..(41): AUXIN BINDING PROTEIN SIGNATURE domain identified by eMATRIX, accession number PR00655E, p-value=7.333e-09, raw score of 8.06
AVPDMVSLLEQMNSSPGTWYAAIDLANAFFSIPVHKPHQKQFAFSCHSCHRPMGPEQSGHGGRDGGYTWAQQHGLAFTNTDLATVNAK

SEQ ID NO: 33996 - protein, 418 aa, Homo sapiens
  DOMAIN (112)..(280): Reverse transcriptase domain identified by PFam, accession name rvt, E-value=0.00062, PFam score of -13.7
CHCGPPVKVEAYGSQVLKGVLAQVQLTVGPVGPRTHPVVIFPVPECIIGIDMLSSRQNPHTGSLTGRVWTIMVRKAKWKPLELPLPRKIVNQKQYHIPEGIVEISATIKDLKDAGVVIPTTSPFNSPIWPVQKTDGSWRMTVGYCKLNQVVTPIAAAVPDVVSLLEQINTPPGTWYAAIDLANDFFPIPVHKAHQKQFAFRWQGRQYTFTVLPQGRWEINMTKIQGPSTSVKFLGVQWCGACQDIPSKVKDKLLHLVPPTTKKEAQCLSGFRREHIPHLPIYRVSRKAANFEWSPEQEKALQQVQAAVQAAWPLGPYDPADPMVLEVSVADRDADWSCWQASIGHKVGHAQQHSIIKWKWYIRDWARADPEGTTKGQGQRRWWQLAERQDSRDREAAIGERQETAVGKTARDGEAVCD

SEQ ID NO: 33997 - protein, 124 aa, Homo sapiens
  misc_feature (1)...(124): Xaa = X or * as defined in Table 2
AGPEGTTTAECPICQQQRPILSLRYGTISWGDQSATWWQVDYIRTLLSWKWQSASAKTTIHGLTKCLIHHDIPHSIASDXGTCFMAKEVWQWYCFSHSQDSRVQESRGGIGSCTTHHHPCSFPN

SEQ ID NO: 33998 - protein, 98 aa, Homo sapiens
LPPNCFPYQFLKFLLMIPAGFLIEIKIFFQLLDFIFICFESFHNAFSILFKADLATATAECPICQQQRPTLSPQYGTIPQGHQRATWWQVDYIGPHHP

SEQ ID NO: 33999 - protein, 457 aa, Homo sapiens
MCPAVTCIERFCKCIALRTPQGLPVDPLTGLQDAGLDVTQNATMRALSELAIKKFSDLLCLKVDHKTLIPEVLPYTQGKGMPHREAKKNLKDSEQRGRATEKKESREKSLDVDGRDEGTHTAHGKLPSKSSVLVPYWEWSWRSPAAVAVSWPHQVSTVRMRALIGKEWDPATWNGDMWEDPDEAGDTELINSDEHFWPEVTASPSPVVATSSPPPMLLSAFPPLSEEINPALPEAVARQNNVDSPQKPPPTPLFASRPITRLKAWWAPRVSECIIGIDIFSSWQNPCIGSLTGRVRATVVGKAKWKPLELPSPRKIANQKEYHIPGGIVEITATIKDLKDAGVAIPTTSSFSSPIWPVQKTDGAWRMTVDYCKLNQVVTPITAAVPDVVSLLDFEWGPEQQKALQQVQAAVQAALPLGPYDPSDPVVLEVLAFGKLHRRITVEASRILDQGPVISCR

SEQ ID NO: 34000 - protein, 314 aa, Homo sapiens
  DOMAIN (110)..(126): AUXIN BINDING PROTEIN SIGNATURE domain identified by eMATRIX, accession number PR00655E, p-value=7.889e-09, raw score of 8.06
  DOMAIN (41)..(221): Reverse transcriptase domain identified by PFam, accession name rvt, E-value=4.2e-10, PFam score of 47.0
  misc_feature (1)...(314): Xaa = X or * as defined in Table 2
MVGKAKWKPLELPLPRKIVNQKQHHIPEGIAEIAATIKDLKDAGVVIPTTSPFNSPIWPVQKTDGSWRMTVDYCKLNQVVTPIAAAVPDVVSFLEEINTSLGTWYAAIDLANAFFSIPVHKVHQKPFAFSWQGQQYTFTVLPQDYINSLALXHNLIWRDLDYFLLLQDITLVHYIDDIMLIGSNDHKVGGAQQHSIIKWKLYIHDQAQTGPEGTTTSVIAQWAHEQSGPGSRDGGYAWAQQHGLPLTKADLATTTAECPVCQQQRPTLSPRYGTIPSLPLTKALTLQLKKCSSGPMLMEFTGLAMFPIILKQLD

SEQ ID NO: 34001 - protein, 423 aa, Homo sapiens
  DOMAIN (257)..(268): RNase H domain identified by eMATRIX, accession number PF00075B, p-value=8.615e-09, raw score of 12.56
  DOMAIN (183)..(363): Reverse transcriptase domain identified by PFam, accession name rvt, E-value=0.044, PFam score of -40.0
MGDPSRRRTCRAMQAKYPLVFKGCGVCWGSLDPRCRVASQVWPIPKRLSRGWPFHNAVGRQVSDWKSGQDFADFGTTHQTGFSPAGANQRGPLAATLSGPGGEGQSAVARLTGEKKNHPGAQYANRLSPRVGRFINAAGTTGFPTGKRAVSATQLMILCLLPGYLCNGKRKLSAIQGLLDNGSELSLFPENPKRHCGLPVKVGAYGGQKTDRSWRKTVDYCKLNQVVAPIVAAVPDVVVSLLEQINTSPGTWYAAIDLTNAFFSIPVHKAHQKQFAFSWQGQQYTFTVLPQGRWEINMTKIQGPSTSVKFLGVQWCGACQDIPSKVKDKLLHLVPPTTKKEAQHLTGLFGFRRKYIPYLGVLLCPIYQVTRKAASFQWRPEQEKALQQVQAAMQAALPLGPYDPAGPMVLEIAVADTEAVWGH

SEQ ID NO: 34002 - protein, 658 aa, Homo sapiens
  DOMAIN (520)..(599): Integrase core domain identified by PFam, accession name rve, E-value=3.5e-11, PFam score of 42.7
  misc_feature (1)...(658): Xaa = X or * as defined in Table 2
LTIYAVNLSLILPQGDLWPFTRVTVHXGKGNDQTFQELLDTGSELTLIPGYPKRHCCPPVKVRVYGGQVINGVLAQVXLTVGPVGPRTHPVVISPVPECIIILSSWQNPHIGFLTGRARAIMVGKAKWKPLELTLPRKIVNKKQYHILGGTVEISATIKDLKDTEAVTPTTSPFNSPIWPVQKTDGSWRMTVDYCKLNQVVTPIAAAVPDVVSLLEQINTSPGTWFEWSPKKALQQVQAAVQAALPFGPYDPADPMVLEVSVADRDAIWSLWNAAIGESQRRPLGFWSKALLSSADNYSPFERQLLASYWALVETERLTVGHQVTLRPELPIMNWVLSDPSSHKVSGAQQRSIIKLKWYIHDWVRAGPEGTSKLHEEVAQMPMVSTPATLPSLSQPALMASGGVPYYQLTEEEKTRAWFTDGSARYAGTTQKWTAAALQPFSRTPLKDSCEGKSPHHPVIAQWAHEQSGHGGRDGGYLWAQQHGFPLTKADLAMATAECPICQQQRPTLSPRYGTIPQGDQPATWWQVDYMGPLPSWKGQRFVLTGIDTYCGYGSAYSARNASAKTTIHGLTECLFHCLGIPHSIASDRGTHFMDKEAPSASVLGLALALLAPQLADSLLEDPVIVKGTDEAEYFQSVREEPDSGVKRKKMLKSGKNY

SEQ ID NO: 34003 - protein, 247 aa, Homo sapiens
  DOMAIN (143)..(158): G-PROTEIN BETA WD-40 REPEAT SIGNATURE domain identified by eMATRIX, accession number PR00320C, p-value=5.500e-14, raw score of 13.01
  DOMAIN (76)..(202): WD domain, G-beta repeat domain identified by PFam, accession name WD40, E-value=9.8e-23, PFam score of 89.0
  misc_feature (1)...(247): Xaa = X or * as defined in Table 2
MGKIVQPEKAVSAKAGVCLKGCDCSEYKVQCEWQDTSPKYLGIVLSFGEEPVTHLRWDLHAWSYALSKVISTICRRGKFSEFKAHTAPVRSVDFSADGQFLATASEDKSIKVWSMYRQRFLYSLYRHTHWVRCAKFSPDGRLIVSCSEDKTIKIWDTTNKQCVNNFSDSVGFANFVDLXPPSGTMPXPSAGSDQTVKVWDVRVNKLPTALPRMVYYGAKCHLWGCWSFTENSELSFQLFCTSIPIWF

SEQ ID NO: 34004 - protein, 269 aa, Homo sapiens
  DOMAIN (212)..(238): Nuclear transition protein 2 proteins domain identified by eMATRIX, accession number BL00970B, p-value=7.923e-09, raw score of 10.09
  misc_feature (1)...(269): Xaa = X or * as defined in Table 2
AAGSAGLPATPQPRARRVGRRRLGPGARGAGGAGGAAGCRALRATARAAGSQPGPHSPGRTARSARKXRLRRPESNKVRVCGPHSPAPRTPPSSPGIQHAGKPRARRPLPPPGAGVGLGIVPGLGLGRAGADVAGRVGPGAGVPGCCREGARRPGSGRRAAPVLSPLCPGLQTARAAAGPAPGAGWPXVRRLEPAEALPSGMFMMRKSCSVALTSSLSSSPSSSSSSSSSSSSPSLTRPDVSPRVTAATGDMYRGSFSGLTKALRTWPR

SEQ ID NO: 34005 - protein, 356 aa, Homo sapiens
MGRTWFKSRLSTQGLGAASVGSGVFSHKVDSVGLKDGELGTPGPGLRLRGPARISCRRRRPFEAAPSFGAFEMSLLITYRLPSQRWQRCWGMKGRRVISLTPSGPGLRIPPTPSLTIFVTSQRRYSKGKKTRSLPSRKSQSRTEGRRLAVHSDGIKEPALQQNPPEEAKEVSQAEREHVIPSGTAEPPQRLLDLAEVAGVAGAGDAKPAEGFMGRREEFGFSPEGTGEPQQSLEQKKDTICALCPCVCRFPGPERSGECVCNALSLDASSLGNGGAARIEILGPCTPGGEIHDALFRQTPLNRAAAGGGGRGRLRGEVLVAGIVGTTRAAHRKIIVRSSILSCDLRLFPHGDVGSP

SEQ ID NO: 34006 - protein, 56 aa, Homo sapiens
DFSDYQIQQMTANFVDQFGFNDEEFADHDNINAPFDRIAEINFNIDTEEDSVSERG

SEQ ID NO: 34007 - protein, 62 aa, Homo sapiens
APFDRIAEINFNIDTEEDSVSERGSQRSSEACCSDRIQHFDEDEDISEDSDTRGAAQVKARA

SEQ ID NO: 34008 - protein, 116 aa, Homo sapiens
  misc_feature (1)...(116): Xaa = X or * as defined in Table 2
SKHNLKLTATSQPHRPMQLKPACVPPVLSSPHMWGRSDTSEGPAHXPPAAWRVCVVLGLXASPPAKLQAQHQAGSTRPVDRQAPSVLTAPPLVWPPFPQGICSKWGAQHGKRGQGH

SEQ ID NO: 34009 - protein, 147 aa, Homo sapiens
  misc_feature (1)...(147): Xaa = X or * as defined in Table 2
ERYKFFSAASPNILILLTFFKIVVRPLITKENLYLEILIRHSLLCSVLTLVCVFCCPVFIGSCSSKRLTTAWTHSTGLCAAMSSPRPGGGGGKGGPAPWAGKRAGSGGXGEGRGKERVCGVQAPSVPTGVGMGGQRRAGVGGPRAAP

SEQ ID NO: 34010 - protein, 161 aa, Homo sapiens
SVGQTSVETLPGVSMWHKRQSLLGAVGDSGAGAPKPLALPGSLQLMESCLGAGSPGRVPALLCIQVVGESHILTQESFVEETLTETNCRNTVDLLRRLGADPRHPHGAGTQEARGCPLGACTVLGRCQTLLSLPRSRGQERHKGRTPACSSWTRVPEHTLQ

SEQ ID NO: 34011 - protein, 97 aa, Homo sapiens
  misc_feature (1)...(97): Xaa = X or * as defined in Table 2
IHSIESSPIPHWIGGLRLMLCIVTRLNFEICLVKHFIKQCKVVEHTQQYEWHRVLHLKKKXQALNLKKNLQTGDKKLXVSSLVHGETNSCRSKALAL

SEQ ID NO: 34012 - protein, 347 aa, Homo sapiens
  DOMAIN (61)..(77): PHOSPHATIDYLINOSITOL TRANSFER PROTEIN SIGNATURE domain identified by eMATRIX, accession number PR00391C, p-value=5.771e- 09, raw score of 15.69
MTHKYESEIDYGTLGLEKGKSLGYEHSLTLKKKAKDSEDGHSSKLRRPVMPTIRDPQGVPLGTASSPDLGYQENNHHHFKRLVTPCMLFLRALSRPSPGMGRGAFSPDVEVAFFPDSGASVHCAGGILHHDYPGCVQILPIIKHLILRGPQRLLCHDPNFSLTLGIVWGNLPSDWQHRDIHRCGLGPISRVVPPTCCRCPDGSVAKQGEELQALHKHGNRSDWDAPPGVKGTLSSPRGIQPKDFPTVAWTYRELRPQVLCTALPLPGMALGGSREPEPLTICKLPPTLSQGLDAPSFLEALALAASAWLCFVSIRELHLGPDSELQTRTRTGSVPEDGHLLTLEGTS

SEQ ID NO: 34013 - protein, 155 aa, Homo sapiens
  misc_feature (1)...(155): Xaa = X or * as defined in Table 2
ERYKFFSAASPNILILLTFFKIVVRPLITKENLYLEILIRHSLLCSVLTLVCVFCCPVFIGSCSSKRLTTAWTHSTGLCAAMSSPRPGGGGGKGGPAPWAGKRAGSGGXGEGRGKERVCGVQAPSVPTGVGMGGQRRAGGGEGKGALARRLGGGG

SEQ ID NO: 34014 - protein, 718 aa, Homo sapiens
  DOMAIN (180)..(195): TEA DOMAIN SIGNATURE domain identified by eMATRIX, accession number PR00065A, p-value=9.100e-09, raw score of 9.88
  misc_feature (1)...(718): Xaa = X or * as defined in Table 2
MVPLHSSLKLFLDSLWKALAGHGGSRQLTQSSAIACAKLCKASTYINWEDNAVIFLLVQSMVVDLKICLVQNSHSTFHYVLVNSLHQIITNGDGLHEAWEHRPPHADRQRAGAEPGAGLCADAHQRGHLRAPCGLPWLLGELRGGDADGDQLQEHCGLVEEAWGCALGAGMASTHYLHSWSEDIEGAFPNELSLQQAFSDYQIQQMTANFVDQFGFNDEEFADHDNNIKCFQLHEGAEAPSENQGRSTEASDEHRGRSPEAPDEHQGRSTEAPDEHRGRSVEAPDEHQRRRAEAPDEPRGRSSEAPDEHRGRSAEAPDEHRGRSAEAPDEHAPFDRIAEINFNIDTDEDSTLWKLTLAFYSAAQRGSEACCSDRIQHFDENEDISEDSDTCCAAQVKARASLCRGGAAPRTPVRCPDALLFVMPARRASTPVLQALAPNAAAWSLLLSLTLSASDSASPRGLEPPMLQKAAQRMARSAEARMGRRAWKQTVMRLGQLLPLFGHAAVRASAASGGHNTGNGAKATAVDVPMLPVTGKPRPEPLGASPLDAQQNPLSPPVPWEVSPHYAQCQAEVGIMAQDPLGPSENEVLDDEQNLNAAWTERRGRPISILGGALSSSRQGCLPGTRQCDWDEPFIIREDTGYLGSHGVECLQHSAQKPLNLGRKLLPHQGLRASCPVPARRLWPQPVALFAQLCARSPASSPGCEVMRRKSSERRRLX

SEQ ID NO: 34015 - protein, 807 aa, Homo sapiens
  DOMAIN (589)..(629): kw TRANSCRIPTASE REVERSE II ORF2 domain identified by eMATRIX, accession number DM01354Y, p-value=4.064e-35, raw score of 10.69
  misc_feature (1)...(807): Xaa = X or * as defined in Table 2
MLTVIHSEMQAAKVSDGNEELIGKWNLLGIERPWGPRRDWSGLHGPGPGTPTARPRPLRDSSQNTWRLQLKPRLKGGPGAQNARMNEAWQPLPRFQRIYEKTWVPWQKHDAGAEPSQRTSTRAVPRGSMELEPPHRAPRAVRRVPQFSRFQNGRSTSILHPVPGKAAGTQLKPVRADLVAALYKATGAELPKALGAHPLHQCPLDVTDELLEKIASRSQNIIEINISDCRSMSDNGVCVLAFKCPGLLRYTAYRCKQLSDTSIIAVASHCPLLQKVHVGNQDKLTDEGLKQDNQPQCIEGNFESRMHAQGRTLVQERPKKTVNFITVCLLGPVQAGSKGQGRVVNGKVLTSTANLRRISVDGKSEKSVKDAEKAFDKIQQPFMLKILNELGIDGMYLKIVRAIYDKPIANIILNEQKLPWVVDGTGRCGAGGSVTGEARAMQGPQWGKGRLRHGGLQVPIPALQGGSXGPARNXAQQLLAQRIKYLXIQLTRDVKDLFKENXKPLLKEIKENTKKWKNIPCLWIXRINIVKIAILPKVIYRFSAITIKLPLTFFTKLEKKTTLNFIWNQKRACIAKTILGKKNKDGGIMLPDFKQYYKPTVTKRAWYWYQNRYIDQWNRTETSEITPHIYNHLIFDKPDKSKQWGKDSLLNKWCWENWPAIYRKLRLDPFLTPYTKINSRWIKDLNVRCTTVKILEENLCNTIQDIVMDKDFRSKTPKAMATKAKIDKWDLIKLKSFCSAKETIIRVNKQPTEWEKIVAIYPSDKRLISRIYKELKQIYKKKKPVKKWAKDMNRHFSKEDIYAANRH

SEQ ID NO: 34016 - protein, 352 aa, Homo sapiens
  misc_feature (1)...(352): Xaa = X or * as defined in Table 2
KAPQAPNINSYCLQVEECCQKGISVDLSTGMTSTGVVPHYNEQVAGEKEEETNSVATLSYSSVDETQVRSLYVSCKSSGKFISSVHSRESQHSRSQRVTVLQTNPNPVFESPNLAAVEICRDASRETYLVPSSCKSICKNYNDLQIAGGQVMAINSVTTDFPSESSFEYGPLLKSSEIPLPMEDSISTQPSDFPQKPIQRYSSYWRITSIKEKSSLQMQNPISNAVLNEYLEQKVVELYKQYIMDTVFHDSSPTQILASELIMTSVDQISLQVSREKNLETSKARDIVFSRLLQLMSTEITEISTPSLHISQYSNVNPXRGCFHYCLAFTXTXSNTLSIYSENVQEGLVKGN

SEQ ID NO: 34017 - protein, 57 aa, Homo sapiens
MKRTVSYNSLSNSRGEGKPDLKFGGKSKGKLWPFIKKNKLSLKLGATPEDFSNLPPE

SEQ ID NO: 34018 - protein, 40 aa, Homo sapiens
  misc_feature (1)...(40): Xaa = X or * as defined in Table 2
WWKVXKKYSGFKVFLXHQHXXPRRPLQSLFSXMPWKRIAK

SEQ ID NO: 34019 - protein, 88 aa, Homo sapiens
LMSLLTSPHQPPPPPPASASPSAVPNGPQSPKQQKEPLSHRFNEFMTSKPKIHCFRSLKRGVSSAPESCLSGVLWLHVWFCITNFVCE

SEQ ID NO: 34020 - protein, 679 aa, Homo sapiens
  DOMAIN (384)..(409): APILLOMAVIRUS E4 PROTEIN domain identified by eMATRIX, accession number DM00784A, p-value=7.818e-09, raw score of 16.65
  DOMAIN (615)..(671): SH3 domain identified by PFam, accession name SH3, E-value=2e -12, PFam score of 54.7
LWSGGEEEPPRRPRARSCEPEEAARTPGFPPSRGSRGAKGSPGRGTREPRPPRGAPLRVPCTMSWGTELWDQFDNLEKHTQWGIDILEKYIKFVKERTEIELSYAKQLRNLSKKYQPKKNSKEEEEYKYTSCKAFISNLNEMNDYAGQHEVISENMASQIIVDLARYVHELKQETKSNFHDGRKAQQHIETCWKQLESSKRRFERDCKEADRAQQYFEKMDADINVTKADVEKARQQAQIRHQMAEDSKADYSSILQKFNHEQHEYYHTHIPNIFQKIQEMEERRIVRMGESMKTYAEVDRQVIPIIGKCLDGIVKAAESIDQKNDSQLVIEAYKSGFEPPGDIEFEDYTQPMKRTVSDNSLSNSRGEGKPDLKFGGKSKGKLWPFIKKNKLMSLLTSPHQPPPPPPASASPSAVPNGPQSPKQQKEPLSHRFNEFMTSKPKIHCFRSLKRGLSLKLGATPEDFSNLPPEQRRKKLQQKVDELNKEIQKEMDQRDAITKMKDVYLKNPQMGDPASLDHKLAEVSQNIEKLRVETQKFEAWLAEVEGRLPARSEQARRQSGLYDSQNPPTVNNCAQDRESPDGSYTEEQSQESEMKVLATDFDDEFDDEEPLPAIGTCKALYTFEGQNEGTISVVEGETLYVIEEDKGDGWTRIRRNEDEEGYVPTSYVEVCLDKNAKDS

SEQ ID NO: 34021 - protein, 359 aa, Homo sapiens
  misc_feature (1)...(359): Xaa = X or * as defined in Table 2
NLSKKYQPKKNSKEEEEYKYTSCKAFISNLNEMNDYAGQHEVISENMASQIIVDLARYVQELKQERKSENDHRVSGASRRAPLPGPFRRLRPFTPDVGGEEAAANQAEQXYPSLKWNSKGKTNGTRNGTKCGKEHSPTLHQSRQGTVIQSANRPSVAXSYRAPLHPSPHXKLAPXVPAFSSSRVFPMLSSFSLYISTDDQEGLYSLYFHKCLGKELPSDKFTFSLDDSQLVIEAYKSGFEPPGDIEFEDYTQPMKRTVSDNSLSNSRGEGKPDLKFGGKSKGKLWPFIKKNKSPKQQKEPLSHRFNEFMTSKPKIHCFRSLKRGIQPPDGNEKQDDTMASSFTFSLSLDYEMPVIEKAE

SEQ ID NO: 34022 - protein, 71 aa, Homo sapiens
  misc_feature (1)...(71): Xaa = X or * as defined in Table 2
MAQDYGAMGDLVLLGLGLGLALAVIVLAVVLSRHQAPCXPPAFAHAAVAAHSKVFSNIVRERVKTQEAERA

SEQ ID NO: 34023 - protein, 69 aa, Homo sapiens
  misc_feature (1)...(69): Xaa = X or * as defined in Table 2
MAQDYGAMGDLVLLGLGLGAALAVIVLAVGLSRHQAPCXPPAFAHAAVAADSKVCSDIGQRTCRDATPT

SEQ ID NO: 34024 - protein, 54 aa, Homo sapiens
  misc_feature (1)...(54): Xaa = X or * as defined in Table 2
MRYRYIPVRMAEVRTSDETKCWXECGATGTFIHCWLANIQQHTLSRLFTCLCSC

SEQ ID NO: 34025 - protein, 171 aa, Homo sapiens
  misc_feature (1)...(171): Xaa = X or * as defined in Table 2
LAGPRCTTSLTPSEGGLPPPDSLGYTVHPPDSQGHTGPLPAREGTGSHRFGVEVRQRRWERGEAPLLQLSPPAGRPPRRPHPCRPQHLPSAAISEAATARGPRNRSQAAAAAADPDNLRVARGPRSTRSSAVDAGPPPSASPGFPXSSSQQRPSPEKTGSEVYSAYIPANC

SEQ ID NO: 34026 - protein, 114 aa, Homo sapiens
APGPHCWVLARSWGRRLASPPAPPWSYAPYPPPWAPRSRSRRWSSCLLWVRRPSGAGRDASSEVALRRHSAGTLSGDSPPGTRASLGRAEPSPRSLEAGEREVAGGTKCPDLLP

SEQ ID NO: 34027 - protein, 716 aa, Homo sapiens
  DOMAIN (435)..(454): 5-HYDROXYTRYPTAMINE 1F RECEPTOR SIGNATURE domain identified by eMATRIX, accession number PR00515G, p-value=8.134e-09, raw score of 10.77
  misc_feature (1)...(716): Xaa = X or * as defined in Table 2
MALSPWTPGLGAGEKLVQAAAVSTGPSLELCTLPSTLGSSVAVEALEQLFVVECVRDARRLNLFEINTIKMRITRTENEIELLKKKITDLTKYNEALGEKQEELARKHARFVLSLNQTMEKKATTTVYINETYTKINLKREDIALQKKCIQEAEELMEKERAEYLIRKQELTAQINEFENTREVKRMETYQKKQRIGXITNXNVKNKRNSYFSAAVLSDHNLEIARLHESIRYWEQEVSELKKDLAILEAKLCFFTDNKEKLDDISNDEKNEFLNKIKQLVETLHAARMEYKDLREKMKTLARQYKIVLSEEEKAFLQKQKIHDENQKQLTFISQKEYFLSQKRVDIKNMEEGLITLQELQQVILSFMSSVYSKPNLSHSRGLTCCSFPLYLQMMTPFPCVITQWKMACLRKKHARWTAKIKAEIQAITEKIQNAEVRRIELLNETSFRQQEISGFVAQIEKLTTELKEEEKAFVNKEKMLMKELSKYEEIFVKETQINKEKEEELVEYLPQLQVAEQEYKEKRRKLEELSNIITEIIWGFLFEQEDVKQELQQLRDQESKKNKDHFETLKNLENGFYINDQKADLLLLENKKLKEYILYLKNNIEKYREGQEALMHTSSDLSRQLIAQEGLLQVEEQGIQWWIRQSPKASQVGKPTVQPSVCGQRPKSPCQTTGVNPRVQKLKNLESNVRGQEASSTGERGILEDSASLATLAAD

SEQ ID NO: 34028 - protein, 888 aa, Homo sapiens
  DOMAIN (685)..(720): Polyomavirus coat protein domain identified by eMATRIX, accession number PF00761F, p-value=2.917e-09, raw score of 16.58
  misc_feature (1)...(888): Xaa = X or * as defined in Table 2
MQAPYRCQRTGWLQQKRLKAGLWGLESSSWSLGPLGQAAQQELTSAPGQFRLPPPPQAPERPTAGGSASLGPPLPPGKLSEVPEPSRPGRPRRPPSTWAPPGGPGASALPVVPGHRGARTRGASTRGASEAGPHLPIPVTSNAPGHAGGWGAPSHQNHASPCTGRGPQPAGELRQAGEQFPNSWGRRGSCRTCSVVLGHTEPRPEPAHVLVRGNPGSPVGAAWGNEAGHPRAPGAQRGGXRSPGLREAAPGDGRSPGSEPREGIGGPGPANSISPLSGLRGHPGAWWVPDPTLPAQPYRQRGTRGHGGHAHFTDEQKETGESKXRALVHTEGLEIPAPSPGPDGNRSSWXVHPGPGLAPHCWGGLGSPEEAHHPAAVHPPXHTAGSPHPESCPQLSGQQQRGATDARGNSDESPRHAPNSSSKIGPRPEEGETGQVGLSSGPWSGLGVPVEDPRAARESHGTLHRPRRPCQGAGQSCKGAGARPPSVKAARTPPLVRSALAPCQPPGAGASATGXQDTPQPDGGSDGDCGTGYRGGPCESRAPLPPGDQGAFPSLAMGTGAPGRTGPSGGPGEEAAAAPSDAGSQGWLGCXARTTPAAAVWRRGGPRSPLSRGGADKPGSAVCGAARRQWGRACEEAKQAGEERLCGPADCLRGEGAVXEEQLSGRAGALRGPQGGPAETQGQEQRAGPQASALSSRRRLPPGGASGRSCPEPRVPRCLGPHGTHSPRATAAGRPQVPSPALRGCVPGGRQVAGWLXQXGLRGSPGDRGTTQGSRAAAARRGQCGRVGALTLLCGQDGGQPPGREEEGEAGVAMXPRGRTGVARVRHQSCREPKGATGDRGNVGPRGPAGWPATPAPPKPCLECGFPPVGLVLPPRLIIPVRSRRAFC

SEQ ID NO: 34029 - protein, 175 aa, Homo sapiens
  DOMAIN (49)..(97): Intermediate filaments proteins domain identified by eMATRIX, accession number BL00226B, p-value=1.450e-10, raw score of 23.86
VSLLKDDFRVHQSEIEAKQEIQHLRKELIEAQELARTSKQKCFELQALLEEERKAYRNQVEESTKQIQVLQAQLQRLHIDTENLREEKDSEITSTRDELLSARDEILLLHQAADCPAGRLEPLRLRHLSPLHSGRGLAVAAQRCPATPSFGPKGLSWPRRTDPSFMLQCCNVSAT

SEQ ID NO: 34030 - protein, 463 aa, Homo sapiens
  DOMAIN (5)..(27): FOS TRANSFORMING PROTEIN SIGNATURE domain identified by eMATRIX, accession number PR00042D, p-value=6.283e-09, raw score of 8.97
RKKELQHKIDEMEEKEQELQAKIEALQADNDFTNERLTALQENQTRAKESDFSDTLSPSKEKSSDDTTDAQMDEQDLNEPLAKVSLLKDDLQGAQSEIEAKQEIQHLRKELIEAQELARTSKQKCFELQALLEEERKAYRNQVEESTKQIQVLQAQWQRFHIDTENLREQKDNEIASARDELHSARDEMWLVHQAAAKVASERDTDIASLQEELKKVRAELERWRKAASEYEKEVTSLQNSFQLRCQQCEDQQREEASRLQGELEKLRKEWNALETECHSLKRENVLLSSELQRQEKELHNSQKQSLELTSDLSILQMSRKELENQVGSLKEQHLRDSADLKTLLSKAENQAKDVQKEYEKTQTVLSELKLKFEMTEQEKQSITDELKQCKNNLKLLREKGNNPSILQPVPARIHRPIPGFPDMVIRSIVERKKPWPWMPMLAALVQVTAIVLYVPGLARASP

SEQ ID NO: 34031 - protein, 377 aa, Homo sapiens
  DOMAIN (120)..(168): Intermediate filaments proteins domain identified by eMATRIX, accession number BL00226B, p-value=4.977e-09, raw score of 23.86
  misc_feature (1)...(377): Xaa = X or * as defined in Table 2
LEEKEQELQAKIEALQADNDFTNERLTALQEHLLSKSGGDCTFIHQFIECQKKLIVEGHLTKAVEETKLSKENQTRAKESDFSDAVSPGKDXGSDDSTDAQMDEHDLNEPLVKVSLLKALLEDYRGGYRNQVEESTKHIQVLQAQLHRLHIDTENLREEKDSEITSTRDELLNARDEILALHQAAAKVASERDTDIASLQEELKKVRAELERWRKAASEYEKEITSLQNSFQLRCQQCEDQQREEATRLQGDHTDEAADLPLSRHSVSDPGVSCTQEEIQEARGLTLLCFSKIKCSQKQSLELTSDLSILQMSRKELENQVGSLKEQHLRDSADLKTLLSKAENQAKDVQKEVKRKDIMSPIMVGLKAKSKSDIHAS

SEQ ID NO: 34032 - protein, 180 aa, Homo sapiens
MQPELPIMNWVLSEPSSHKVGHGQQHSIIKWRWYICDWAVVGRESTTNGLAGWSETWKKHHWEMGEKQIWGRSMWMELSEWSKTVKIFVSYVSAHQCVTSTEEDFNNQWDGMTCSVDTTHPLSLTTSVIAKWAHEQSDHGGRYGGYAGAQQHGLPLTKADLAMTTAECPICQQQRPSLSP

SEQ ID NO: 34033 - protein, 93 aa, Homo sapiens
RQILACYWALVETERLTVDHQVTVRPELPIINWVLSDPSCHKVGHAQQHSIIKWKWYICDWAGAGPEGTSTPRKWTAAALQPLSRTSLKDSTE

SEQ ID NO: 34034 - protein, 138 aa, Homo sapiens
GPKMSGSPPVKVRAYGGQAISGVLAQVQLTVGPLTKEEKTRAWFADSYAQYAGITQKWTAVALQPLSRTSMKESSEGKSSQGAELQAVHLVVHFAWKEKWPDVRLYTDSWAVANGLAGWSGAWKKHDWKIGDKGIWGR

SEQ ID NO: 34035 - protein, 200 aa, Homo sapiens
LPSRGAGLGTCRPPCLSLPLLPWAPVLPEPPRRVPPPAPRRPVGSTTQGLRSASTRRVDWQAAPPAALVWDPLGEASWAPGVWCAAIDLANAFFSIPVHKACQKQFAFSGQGQQYTFTVIPQRYISFPALCHNLIRRDIDCFSLLVVHFAWKEKWSDVRLGTDSWAAASGLAGWSGTWKKHDWKTSPLVIHEQKFCFLFP

SEQ ID NO: 34036 - protein, 991 aa, Homo sapiens; identical to SEQ ID NO: 32864
  DOMAIN (337)..(383): kw TRANSCRIPTASE REVERSE II ORF2 domain identified by eMATRIX, accession number DM01354O, p-value=1.000e-40, raw score of 8.73
  DOMAIN (370)..(644): Reverse transcriptase domain identified by PFam, accession name rvt, E-value=3.5e-82, PFam score of 286.5

SEQ ID NO: 34037 - protein, 350 aa, Homo sapiens
  DOMAIN (245)..(262): BETA-AMYLASE (GLYCOSYL HYDROLASE FAMILY 14) SIGNATURE domain identified by eMATRIX, accession number PR00750F, p-value=7.338e- 09, raw score of 13.15
  DOMAIN (165)..(320): Integrase core domain identified by PFam, accession name rve, E-value=6.5e-32, PFam score of 114.4
MGPVPGEEEERVRDEFGDEDCAAFGFILLVIRAPGNFSAGITRKWTAAALQPLSRTSLKDSSEGKSSQWAELQAGHLVMHFAWKEKWPDARLCTDSWAVASGLAGCHPVIAHEQSGHGGRDGGYAWAQQHGLPLTKADLAMATAERPICQQQRPTPSPRYGTITLGNQPATWWQVDYIGTLPSWKGQRFVLTGIDTYSRYRFAYPACSASAKTTIHGLMECLILHHGIPYSIASDQGTHFTAKEVWQCAHVHGIHWSYHVPHRPEAAGLIEQWNGLLMSQLQHQLGDNTLQGWGKVLQKVVYALNQCSIYGTVSPIARIHGSRNQGVEVEVALLTVTPNDPLANISFLFL

SEQ ID NO: 34038 - protein, 392 aa, Homo sapiens
MGRARRLTPVIPALWETEADGSRALTVETTVTQLQHLNTVGIIGFRGGRGQVAAVNCQKRDIQPFTRVTVHWGKRNDQTFQALVDTGLELTLIPGDPKHHCDPPVKVGAYGHQVINGVLAQIQITVGPVGPWTHPVVIFTVPKCIIDIDILRWQNSHTGSLTGRMKAIMVGRAKWKPLELPLPRKTVNQKPYHTPVGTAEISATMKDLKDAGVVIPTTTLFNSPIWSVQKTGGSWRMTVDYCMLNQVVSAVEAIVLDVVSLLEQINTSPAIEWVMHSSIPSSNGSGTYMIGLKQVLKAQPAPMASWGVSYDQWTEEEKTTAWFTDGSSRYASTTRNWTAAALQSLSRISLKDSCEGKSSHHPCHGGKDGGYAWAQQHGLSLTKVDLPGYGHC

SEQ ID NO: 34039 - protein, 82 aa, Homo sapiens
  misc_feature (1)...(82): Xaa = X or * as defined in Table 2
DCLRVLWCPPVXFQRSPSLQQPLRPGFEPLVGRHLMRPARSWRPQPSSASAGLPSSPFRDGCHRFRASWALGGRAAEGEVAI

SEQ ID NO: 34040 - protein, 680 aa, Homo sapiens
  DOMAIN (342)..(383): CORE POLYPROTEIN PROTEIN GAG CONTAINS: P domain identified by eMATRIX, accession number PD02059A, p-value=7.943e-13, raw score of 28.10
  DOMAIN (600)..(680): RNase H domain identified by PFam, accession name rnaseH, E- value=0.035, PFam score of -25.0
  misc_feature (1)...(680): Xaa = X or * as defined in Table 2
LKNPPQTHPRRGHLLLISVWGHILRACGAWQEAKPKAKWPQIPEEKEEGQAPRACTLPGCWRLLRRGQEEKEENWVPPACTLSGCWRLEAVRQQQREGDGDFGAASCSDLAFRCASSQNPRSLEPVASSPERRRRQPSRAPLGWALKEPGSERSPPLLSCVEALQPPFLLGLGSGAFCLTRGEKGSPDQDPFCLHSPWMLEAGGSDAATARGDFGAASYSDLAFRCASSQSPRSPEPVASISERRRRQPSRGFQILRSSGAFLLDREHVCLASSASTTGLGSPRPSWSHQVASNKGLKPGLRGCWSDGERGTTLEDTRVLLSNPLLLRKGGRKVSTSRLMQLCSVVEKYCPWFLDQGTMNIEIWEKVARALKKAYRDGAEDIPINIWSVWALVHPTLEPFHTDHDEEESEEEGEYNEVTKEVTEQFCLPAKAAKEGGNPSLTSPQQLTTETEAEIQLIEKQVHKAQINRIDPEKTLDLLIFPTQHSPTGGVVQEQDLVEWLFLPHSNSWTLTPYLDQIATLIGNGRTQIVKLHGYDPGKIIVPLTKAQIQQAFINTLNWQTHLADFMGVLHNHFPKTKLFQFLKLTNWILPRITKFKPIECSENVFTGRSSNGKASYSRSKNKVFQTSYTSAQKAELVAVIEVLTAFEMPVNVISDSAYMAHSTQLIETAQLXFHTDEQL

SEQ ID NO: 34041 - protein, 261 aa, Homo sapiens
MGLGWLAGQEEEYPSLLETWAELLQKGSTCITNTEGWVGHPLDPIGCLCRALLEACRLEEETLTLYPDSGPEKRKVAYQHVPVPGSPGESYLVLALEVALLGLGQQRALPEGLYAQDKVVRNEEQLLALLEEVELDERLVQVLRKQAGLLLEGGPFSGFGEVLFRESVPMHTCARYLFTALLPHDPDLAYRLALRAMSSPDEETGSPCRLLRQPEKEPAPLPPSQNSFGRFVPQFAKSRKTVTRKEEMKDEDRGSGAFSLV

SEQ ID NO: 34042 - protein, 120 aa, Homo sapiens
  misc_feature (1)...(120): Xaa = X or * as defined in Table 2
AVQRRSGVGPACLSCGSANPGPPPGTSPGAGAAPGGGRWARAKSGPESPPGTGPPQPAXAPQAAGPKTRAGVSFLSPPLASSPGHANFGPDSFLGDGVMRQAXRSENKQDPAGTPGTWVR

SEQ ID NO: 34043 - protein, 479 aa, Homo sapiens
  misc_feature (1)...(479): Xaa = X or * as defined in Table 2
RGPSGPRTVSPSPAGASSVGGPPVQAWPCSLCVGSLEPRGSIGGPPKGLQLWGPRASWFLGDYACPLLASAPVLAACKTLCQTPAVPASLGXRPLVAVKTHVAAQPFLRIKHLAAVLADKSAPGLRPVCGTAGFAGYLCLPHSLPSPDGEPVDVSTLDSAEYCQLGLGGICRGPGRXEGGHGYRGSEKPHSTYPSSPSLSGEPENRGDPGVAQEPXPPPREQAGPFSPFVILEAAPFSAGACFPGSEAPGGSSPPNGSAVGLWRGRCPPGPRSLXRIAAAWPEKRCLDSWKGRRDGAARGVGTAATFSPPFASRLVLPGEASLGTPGVVFLLRAGEPSASGFPGPAWRESTAGASGGGCCGHGPCSGLRAAGLPSGAGSWRGDCCHLGMGEDPLGPWXSSGTPASARGSQEVPATXGRAGGRAARHPQGARLPSGPPGEPGSPGFWHRKESQSTLTFLGAQGSSSPLADLGSLGASAGT

SEQ ID NO: 34044 - protein, 467 aa, Homo sapiens
  misc_feature (1)...(467): Xaa = X or * as defined in Table 2
MNDAGNHHSHQTNTRTGNQTPHALIHKRKLINENTWTQEGEHHTLEPFGGTTDRIVSPSHTRSPDMAIANFQSSGCSVVPDTIPRPQYQCRSRHSVLLTSNLTVPMQSCVKPPYMLLVGNIKIWMNNQTVRCINCHVYTCITSHFDSRKSVMLVLAREGIWILVTLPRPWESSLSIRLINEVLQRILKRSKRFVFTLIAVIMGLITVTALATTAGMALHQSVQTAHFANDWQANSNQMWNSQQGIDQXEHMDTGRGTSHTGAFWWNNRQNSFPFPYSQSRHGNSQFPKFWVFCCPRYHPSPSVQCRSRHSVLLTSNLTVPMQSCVKPPYMLLVGNIKIWMNNQTVRCINCHVYTCITSHFDSRKSVMLVLAREGIWILVTLPRPWESSLSIRLINEVLQRILKRSKRFVFTLIAVIMGLITVTALATTAGMALHQSVQTAHFANDWQANSNQMWNSQQGIDQILAAI

SEQ ID NO: 34045 - protein, 42 aa, Homo sapiens
FQKQMACALQMAHHRQSHVPPTKAKKSPGNGVQAVSSNDRSL

SEQ ID NO: 34046 - protein, 140 aa, Homo sapiens
  misc_feature (1)...(140): Xaa = X or * as defined in Table 2
CGRKSRGTALPTGSSPQSGPAAPGHSAASALHPTPSPPPHPLPPAATGDIDGNRYPATPMTKYPSASARRPVHRPTCSGGGSHTNHAESLPPLTPLEEADTHPPGGSQXTRPPHCIRTGSCLPPPREAPYTRRERRRHPP

SEQ ID NO: 34047 - protein, 139 aa, Homo sapiens
PASKEAFYTWQYRVAKKLTALEINQITRSRKEGRERIYHVDDTPSGSMDGVLDYSKTIQGTRDPICAITASDKILIVGRESGTIQRYSLPNVGLIQKYSLNCRAYQFSLHCNFSRLAIIDTSGVLTFFDLDARVTDSTG

SEQ ID NO: 34048 - protein, 336 aa, Homo sapiens
MTKTHVIAASKEAFYTWQYRVAKKLTALEINQITRSRKEGRESRLAIIDISGVLTFFDLDARVTDSTGQQVVGELLKLERRDVWDMKWAKDNPDLFAMMEKTRMYVFRNLDPEEPIQTSGYICNFEDLEIKSVLLDEILKDPEHPNKDYLINFEIRSLRDSRALIEKVGIKDASQFIEDNPHPRLWRLLAEAALQKLDLYTAEQAFVRCKDYQGIKFVKRLGKLLSESMKQAEVVGYFGRFEEAERTYLEMDRRNTLELDCGLGRTGSVNFHTFLTLAKLFMALQQRHGIGSLSLAKESLLNVKDLLSIEPWHSEVYMVDPEEGVPELAIDKAAVA

SEQ ID NO: 34049 - protein, 156 aa, Homo sapiens
  misc_feature (1)...(156): Xaa = X or * as defined in Table 2
PGTCRGSTGQPXEACWRSPXSVRNTRCPVREEPASPGWSSCLTSPSARGWWACSXRLPSSSCPGSTAGSSSGTLCREAAPCHRXAACSDGKPPGMPRSTRRLGPSGARSGSARRCPCGDGPESLRGHAPARAATQAPDPSTQSSASSATPRAPPLL

SEQ ID NO: 34050 - protein, 251 aa, Homo sapiens
  misc_feature (1)...(251): Xaa = X or * as defined in Table 2
GPQSSAGNAGPQRRRTTLGVPRTWHPGPAAXAGNSCHISFYSSRFQPFLGVTSVLRGSSVSVSGIPDHLGQPRSSQEPSRPENAAAQMXTGCPGYAGCTVAXMKGRAELQGLRTIAAQPGQWLTLLPRCPSTRRLGPSGARSGSARRCPCGDGPESLRGHAPARAATQAPDPSTQSSASSATPRAPPLLGLCGGGCXGDRRSQQGTEXAVAVPGMLGGPSPFSQPEHPSAFAQPSSCLPLGLDFKLLIPSQ

SEQ ID NO: 34051 - protein, 302 aa, Homo sapiens
  misc_feature (1)...(302): Xaa = X or * as defined in Table 2
EAANEPKHLHQLRHAGLGQHRQAPRPQGRPFARPHQGQDQTDRLHHLQGGGRHGARGHLHQAGAGQSAPAPKGAHVQGPCGCHESTGPVEHXSHGERPKHRCPRPALXEHGHENPHKXSSPHDQRXQTADPEGDNXSQCCPTANXIPLRKLWLRGXDLCGRSHGQQXPHQGWHLDAQLLTPASSSTLCPTPLQQPLHQLRHAALAQHRQSPPAARTPLARPHQGQDQPDRLHHLRGGGRHGARGHLHQAGAGESAPAPKGAHVQLVSKQLGGVAAEAHVDSSGLWVSPGPRHNXYKSKSSRL

SEQ ID NO: 34052 - protein, 363 aa, Homo sapiens
  misc_feature (1)...(363): Xaa = X or * as defined in Table 2
LVEPGRLLEAQGFDKNKRXRRRGRVCGRGGEAPAPGQGQGQPDXNKGKEEVXNSSEEESSEVSLPKTSREQEIPSLACEFKGDHLKVVTDSQLQDDASGQNESEMFDVPLTSLTISNEESLTCNTEPPKEGGEARPCVGDSASTPKVHPGDNVGTKVETPKNFTEVEENMSVQGGLSESAPQSNFSYTQPAMENIQVRETQNSKEDKQGLVCSSEVPQNVGLQSSCPAKHGFQTPRVKKLYPQLPAEIAGEAPALVAVKPLLRSERLYPELPSQLELVPFTKEQLKILEPGSWLENVESYLEEFDSMAHQDRHEFYELLLNYSRCRKQLLLAEAELLTLTSDCQNAKSRLWQFKEEQMSVQVF

SEQ ID NO: 34053 - protein, 196 aa, Homo sapiens
  misc_feature (1)...(196): Xaa = X or * as defined in Table 2
QTALSCARHGRSAAFVWRPNRAPVWRSGFRGVAAGSALVHSTALPSRRQPPERRSEHDCLRCRALCGTKPQGLSYTGPWGLGKVPEAAAALDLGVHXPLFHLPLLDSESRKPGRGLAAPPPMPARWGLSCLEQVGHTRKEGGGQGCRPWPPCWSPVSGTRGGPITTRLRRGSAALHVRASYCLMENPPEPPSIVGS

SEQ ID NO: 34054 - protein, 70 aa, Homo sapiens
MPSVAFNKWSFPKHSSVRSACESVCICVYVYFKLLFVLCKNFFLILGILAVNLVHDNYGKKTFAWSKEDH

SEQ ID NO: 34055 - protein, 42 aa, Homo sapiens
  misc_feature (1)...(42): Xaa = X or * as defined in Table 2
MNTYHFPASRMSWHLNCASPRTYRSQGNRGRERVAQGXQGAG

SEQ ID NO: 34056 - protein, 52 aa, Homo sapiens
  misc_feature (1)...(52): Xaa = X or * as defined in Table 2
LGSVSSFASCTLGAPGYSPTAPVALXSVGPWGRIVKVPGHPGSWEMHFIISM

SEQ ID NO: 34057 - protein, 89 aa, Homo sapiens
VTGLQNLVLSIVTESGKTHLLSFSSHGLEEIISQLPGCSGTLTVRPQGPTGSQGNRGCDRVAQGSQGAGGERGDRSQAPVPAPARDSLV

SEQ ID NO: 34058 - protein, 200 aa, Homo sapiens
  misc_feature (1)...(200): Xaa = X or * as defined in Table 2
FLTRETGDPTGRSSSHGKHPVAVFPXXPTRPPXTIWEITHGCGRRAGRCPGTGPDGPSGRGGPRCWPSGHLAATGGLGPSCGRLGANRGEAGPAGFTVCSPLSGWRTPYTHHFPASRMSWHLDYASPRTYRSQGNRGCERVAQGSQGAGGERGAGSQVPVPAPARNKDPAKRQKPRPPLLSSPTARLIGLFPRADSCRSC

SEQ ID NO: 34059 - protein, 103 aa, Homo sapiens
ALDQVASLPIMVPASKQNTATSCCRLGYNSFDLGPAAATIFFPSPAMVISQLPGCPGTLTMRPQGPTGSQGNSGCERVAQGSQGAGDESGDGSQVPVPAPARD

SEQ ID NO: 34060 - protein, 1232 aa, Homo sapiens
  DOMAIN (494)..(584): RyR domain identified by PFam, accession name RyR, E-value= 0.00013, PFam score of 11.6
  misc_feature (1)...(1232): Xaa = X or * as defined in Table 2
MGKRSFERVLVDKCDSGRSCLRKQHENECAFIQILDTQSLMIPGQRGSFRLADSQHTDRVLCTLMAEKWDRKALSYTRNSFRAQIRLRKTRFQGKGCMICKKSRVLPYQAAYVSQHGSACQPSSHLPSVGSLSSTGDDEEEEEIVHMGNAIMSFYSALIDLLGRCAPEMHLIQTGKGEAIRIRSILRSLVPTEDLVGIISIPLKLPSLNKDGSVSEPDMAANFCPDHKAPMVLFLDRVYGIKDQTFLLHLLEVGFLPDLRASASLDTVSLSTTEAALALNRYICSAVLPLLTRCAPLFAGTEHCTSLIDSTLQTIYRLSKGRSLTKAQRDTIEECLLAICKCETAVKSLGCERGERERARGVGARKQRVVIDERKSSDPRLAAHHPLPISASPKDLPELQAKLLTNHYEQCWKYYCLPSGWGSYGLAVEEELHLTEKLFWGIFDSLSHKKYDPDLFRMALPCLSAIAGALPPDYLDTRITATLEKQISVDADGNFDPKPINTMNFSLPEKLEYIVTKYAEHSHDKWACDKGTSREKSKILXFRMKLIIWHFXLETAKARCQNLEDKTRSGRRQSGGETCIPSRPPSSWLHSRKCCPLVXICVLQATRSXSPSQNRDTAIGTQMKRSENICGTTCTCRKSLMTQLXNGNXTSTRMFXRVKNLSIRKRQWSVCREFQQLSSTWNSXEAKILPEXRSLGYRXLASATRRSAXCAPTDVISSQWNSLXGPRRPSGTNCYQSNGNGQWWPVSGWPLSTTCPEQVFCLFSWHVSQRWEWRYPPTAVLSHSXSKEXKLESLAYGAIAVCIVXGPGXDNQGTALLTSSSMAIRDFGXKQRSIPLKRNXYRIWLNLQRWKRRRRKRQKNNLTHYIRSFSILAATLSRRGELCLLDFPLIXLSVFSLPCSMKSRVVKVVRMKKKMKTRKKHSKRKRWRSKKPSISKLGCMSVVLQRWSFRXXALAKVRXAPWWLRRXSWGSPFXTEAMLVCNRKCXITXRRKRMLDSFKAFLVLCSLAVSLIXMHLRGRIKLKAWGWXLKKEHGQALTQHWCSQTFRTSCGLRWATPPPXMSSSALWTTFCVCSPWIKEXFXLASLIFXEMHFVRLQLLQIVIPLMDLGTSVAINIKARPFTSKKMVELTTCXELRNQSVISTGIIQGRTSLMNLDSTIFPKLWQSPSRFSILLQNTSRAALLAHCPVLYXRIRXLKGISCFWSRIPVKSSCXEDSWIFFKTWGGCFCPSWE

SEQ ID NO: 34061 - protein, 840 aa, Homo sapiens
  DOMAIN (525)..(568): kw TRANSCRIPTASE REVERSE II ORF2 domain identified by eMATRIX, accession number DM01354T, p-value=1.000e-40, raw score of 9.48
  DOMAIN (359)..(647): Reverse transcriptase domain identified by PFam, accession name rvt, E-value=3.4e-31, PFam score of 117.1
  misc_feature (1)...(840): Xaa = X or * as defined in Table 2
MKQFLLYLDESNALGKKFIIQDIDDTHVFVIAELVNVLQERCHTRLGYTEFLVAWRVTFGLCVEAVTLHLKYQILIRGLLEMMSFSDADILKQLPVTVPGLFPASLSPSSLLGNSPPSWLRHNSESKVSAVSSPSATKTLSTGIGKLDPGHKEMAEESELLKNKMQAPPLSRCPESQKCQHQLRLHHWKPSVRHQVKRRSPAVLRSAMPPADCPAVLEATTATHPEKGTALSKHLPSSDSMSLKVDVEALENSPGATYIWKGGKVTRDSQPKEQGKGDLKKKKKGKLPKNYDPKLTPDPERWLPMQECSFYQGRKKGKKKDQMGKGTQGATAGASSELDARKTVSSPPTSPRPGSAATLSASTSNIIPPRHQRPAGAPATKKKQQQKKKKGGKGFPVLREITVVKVDTLVVFQILEERLSVFHIQYDTSYPFSTVDIEDHECAVWLLLRKSKSDDKTTRLEAVREMSETHHWHDAEKAFDKIQQPFMLKTLNKFGVDGTYLKIIRAIYDKPTANIILNGQKLEAFPLKTGTRQGCPLSPLLFNTVLEVLARAIRQEKEIKGIQLGKEEVKLSLFAGDIIVYIENSIVSAPKLLKLISNFSKVSEYKINVQKSQAFLYTNNRHTESQIMSKLPFTIATKRIKYLGIQLTRDVKDLFKENYKPLLNEIKEDTNEWKNIPCSWVGRINIMKMAILPKVIYRFNAISIKLPMTFFTELEKTALKFQWNQKRARVAKSILSQKNKAGSIMLPDFKLYYKATVTKTAWYWYQNRDIDQWNRTEPSEIMLHIYNYLIFDKPEKNKQWGKDSLFNKWCWENWLATCRSXNWIPSKLKLDPFLTPYTKI

SEQ ID NO: 34062 - protein, 2070 aa, Homo sapiens
  DOMAIN (30)..(60): H-NS histone family domain identified by eMATRIX, accession number PF00816B, p-value=8.875e-09, raw score of 13.84
  misc_feature (1)...(2070): Xaa = X or * as defined in Table 2
MILDQAFKYITELKRQNDELLLNGGNNEQAEEIKKLRKQLEEIQKENGRYIELLKANDICLYDDPTIHWKGNLKNSKVSVVIPSDQVQKKIIVYSNGNQPGGNSQGTAVQGITFNVSHNLQKQTANVVPVQRTCNLVTPVSISGVYPSENKPWHQTTVPALATNQPVPLCLPAAISAQSILELPTSESESNVLGATSGSLIAVSIESEPHQHHSLHTCLNDQNSSENKNGQENPKVLKKMTPCVTNIPHSSSATATKVHHGNKSCLSIQDFRGDFQNTFVVSVTTTVCSQPPRTAGDSSPMSISKSADLTSTATVVASSAPGVGKATIPISTLSGNPLDNGWTLSCSLPSSSVSTSDLKNINSLTRISSAGNTQTTWTTLQLAGNTIQPLSQTPSSAVTPVLNESGTSPTTSNHSRYVATDINLNNSFPADGSASXASSCNIAFLSIFTYAATNCPATSXISASQKYPSTEFSNASDSDAQPVGSAVNSAPTNQNVIILQPPSTTPCPTVMRAEVSNQTVGATDSNHTGCXSESFATPPCSTSWFCSTPHQWSQYCKGSNNSVQNVPTPQTFGGKHLVHILPRPSSLSASNSTQTFSVTMSNQQPQTISLNGQLFALQPVMSSSGTTNQTPMQIIQPTTSEDPNTNVALNTFGALASLNQSISQMAGQSCVQLSISQPANSQTAANSQTTTANCVSLTTTAAPPVTTDSSATLASTYNLVSTSSMNTVACLPNMKSKRLNKKPGGRKHLAANKSACPLNSVRDVSKLDCPNTEGSAEPPCNDGLLESFPAVLPSVSVSQANSVSVSASHSLGVLSSESLIPESVSKSKSAEKSSPPSQESVTSEHFAMAAAKSKDSTPNLQQETSQDKPPSSLALSDAAKPCASANVLIPSPSDPHILVSQVPGLSSTTSTTSTDCVSEVEIIAEPCRVEQDSSDTMQTTGLLKGQGLTTLLSDLAKKKNPQKSSLSDQMDHPDFSSENPKIVDSSVNLHPKQELLLMNNDDRDPPQHHSCLPDQEVINGSLINGRQADSPMSTSSGSSRSFSVASMLPETTREDVTSNATTNTCDSCTFVETNXYSSSCSKSYFXPGEPXEGESWPPGXYKGSSSKPSEASLLEGDPPFKSQIPKESGTGQAEATPNEFNSQGSIEATMERPLEKPSCSLGIKTSNASLQDSTSQPPSITSLSVNNLIHQSSISHPLASCAGLSPTSEQTTVPATVNLTVSSSSYGSQPPGTISDVLNIPKNSXIPMTSTIPNSQIQEPLLKPSHESRKDSAKRAVQDDLLLSSAKRQKHCQPAPLRLESMSLMSRTPDTISDQTQMMVSQIPPNSSNSVVPVSNPAHGDGLTRLFPPSNNFVTPALRQTEVQCGSQPSVAEQQQTQASQHLQASAAACSSSRCISPSXSTISTXSSSSSSSSSSSSNSNNNKQGSXERGITYIKCSIMYLMQRALSTLSPIMSTNRGSATGSSDAEKEESCSGHPDLSAVPYNQSTMGTDQSRSKTGQPHPHHQQMQQQMQQHFGSSQTEKSCENPSTSRNHHNHPQNHLNQDIMHQQQDVGSRQQGSGVSSEHVSGHNPMQRLLTSRGLEQQMVSQPSIVTRSSDMTCTPHRPERNRVSSYSAEALIGKTSSNSEQRMGISIQGSRVSDQLEMRSYLDVPRNKSLAIHNMQGRVDHTVASDIRLSDCQTFKPSGASQQPQSNFEVQSSRNNEIGNPVSSLRSMQSQAFRISQNTGPPPIDRQKRLSYPPVQSIPTGNGIPSRDSENTCHQSFMQSLLAPHLSDQVIGSQRSLSEHQRNTQCGPSSAIEYNCPPTHENVHIRRESESQNRESCDMSLGAINTRNSTLNIPFSSSSSSGDIQGRNTSPNVSVQKSNPMRITESHATKGHMNPPVTTNMHGVARPALPHPSVSHGNGDQGPAVRQANSSVPQRSRHPLQDSSGSKIRQPERNRSGNQRQSTVFDPSLPHLPLSTGGSMILGRQQPATEKRGSIVRFMPDSPQVPNDNSDMPPMHMTNSHLSNFNMTSLFPEIATVLPDGSAMSPLLTIANSSASDSSKQSSNRPAHNISHILGHDCSSAV

SEQ ID NO: 34063 - protein, 84 aa, Homo sapiens
EYWGWLLRRINIILTGNCLRGWPSLLPQAEESLSPQTKVERLKAAWIEEGILPLLGMRKLFLLARKVHQSLQAQCPQLHQGPPT

SEQ ID NO: 34064 - protein, 295 aa, Homo sapiens
  misc_feature (1)...(295): Xaa = X or * as defined in Table 2
MLDLPWFNVEEGIQRLREIGMLEWLSHFRPTRLSREDPEDIPFTNTLPNKFVRGVPASLKSSFIGLLCMPDLTKTVGSWRMTVDYHKLNQTVTPIAAAVPDVVSLLEQINTSPGTWYAAIDLANAIFSIPVHKVKDKLLHLAPPTTKKEAQCLVGLFGFWRQHFLHLGVSLWVIYRVTLKAASFEWGSEQEKALQQAGQAAVQAALPLGPHKDPADPMVLEVSVADRDAVWSLWQAPIGESQQRPLGFWSKALPSYADNYSPFERQFLAYYWALVETERLTMGHQVTTXPELRIM

SEQ ID NO: 34065 - protein, 605 aa, Homo sapiens
  DOMAIN (220)..(237): RNase H domain identified by eMATRIX, accession number PF00075A, p-value=4.000e-09, raw score of 14.44
  DOMAIN (466)..(512): Integrase core domain identified by PFam, accession name rve, E-value=0.0097, PFam score of 13.5
MHAQPHQVSTVKVRALIGKEWDPATWNADVWGDPDEAGDTEFVNSDESFLPEEKASPSPVVTTSTPQPMLPSAFPPLSEEINPALPEATVMASPEAVARQDNVDSPQEPPPTPLFASRPTTRLKSWQAPRGPECIIGIDILSSGQNPHIGSLTGRVRAIMVGKAKRKPLELPLPRKILNQKQYRIAGGIEEISATIKDLKDAGVVIPTTSLFDSPIWPVQKTDGSWRMTVDYRQINQVATPIAAAIPDVASLLKQINTSPDTWPYDPPYPMVIEVSVADRHAVWSLWQAPIGESHQRPLGFWNKALPSSADNYSPFERQLLACYWALVEIERLIIPNGLAGWSGTWKKHDWKIGDKEIWGRGVWMKLSEWSTTVKIFVFHVSAHQWVTSAEEDFNNQVDRMTCSVDTIQPLSPATPVIAQWAHEQRGHSGTDGGYGWAQQHGLPLTKADLAMATAKCPICQHLWGNGLLKSQLQRKQGNNSLQGWGKVLQTAVNALNQHAIYGTLSPIARIHGSRHQGLDVEVAPLTIIPSDPLAKFLLPVPATLRSVDLEVLVPETGMLPPGDTTMIPLNWKLRLLPGHFGLLLPLTQQAKKGVTVLAGVIDPD

SEQ ID NO: 34066 - protein, 329 aa, Homo sapiens
  misc_feature (1)...(329): Xaa = X or * as defined in Table 2
MPAEFFQRCSVIMVQLPWKEAHVERPHGERDYTPDLQPDMWEKFPGLRRALRPVVKTLLVQLEYRQAEKCEKRDWPSLPDYIFLLCWMLPALEYRTPSSSVLELRLALRAPQPADSLLWDLVIVPITSLKSWQTPRGEVEGVTHEEICASLKSLAVALLSMSDLTVGTPVTQPQTLNTMGIIGSRGGRGQVAALNRQRQVPELIIGIDILSSWQNPHIGSLNGRGYINSLALCHNLIRRDLDRFLLPQDITLVHYIDHIMRLDSVKDKWLHLAPPTTKKEAQCLVGLFGFWRQHISHLETALRPVTGLWWKLNIXLWAIKSPCNLNCLS

SEQ ID NO: 34067 - protein, 98 aa, Homo sapiens
  misc_feature (1)...(98): Xaa = X or * as defined in Table 2
RTAWMQYSPLHSAYGRVPTVTSSHXLLPLRSHPRDSRPAPCPRAGPARNRQSSASRNRSPRRRNPEASRGRPPGRGVASPAPSPPTPRETRTAATRRP

SEQ ID NO: 34068 - protein, 55 aa, Homo sapiens
IWSVPFAPWRRRGHAGSRCSRRSRSRTPRRNELSTAALGAARGHARIWREAGNWP

SEQ ID NO: 34069 - protein, 386 aa, Homo sapiens
  DOMAIN (376)..(386): TYPE I ANTIFREEZE PROTEIN SIGNATURE domain identified by eMATRIX, accession number PR00308C, p-value=8.892e-10, raw score of 3.83
  misc_feature (1)...(386): Xaa = X or * as defined in Table 2
XLCLKEAAFWILPQTLEAGLLRHRLLGPPVIPANKSDHGYSDVWDDDASQAVPGAAGAVTDANSEPWPRTLWLASRGRSARSAGEPSSLPGPTNDDTRSLGLMQEDQMSCKGESPSPTSSPAPHPHLTRMQGVLASLQGGATPLPHQVAPEAGEEKTLGLQTTVWRILEDLEVPAAAWPGLSPTLAVLRKTHLGSKEQNFSVKTASHQAERSPAVPRPGSRSLSSAASLLAAAPKDLLIFGPHQELTQRVHPHPEPEDAENGLRTARGCFGGVRGYSEKQSCVSLVPSLNSGVLQSQCPSTYGPPPLGLGAQSHREGLRVGLEVSARLVCGGGGKLLLPWPGLSGAQCRRARSPRSRRAPHSPPGGAGDTPGAVVAAAAAAAAAAE

SEQ ID NO: 34070 - protein, 98 aa, Homo sapiens; identical to SEQ ID NO: 33998

SEQ ID NO: 34071 - protein, 674 aa, Homo sapiens
  DOMAIN (483)..(638): Integrase core domain identified by PFam, accession name rve, E-value=4.6e-28, PFam score of 101.1
  misc_feature (1)...(674): Xaa = X or * as defined in Table 2
MTVLTQTSSQHSTGCHAKPAITTPWLLAVFFQGPGVLQSVGGKASQADIILGLSPVSAIFQLYDVSFPPGKQGRPGLGSAGRIEVARDCGMLWKQRGYLISSSQPIKNGQQVSDLFEAIPEPKSLAIIKISGYSTLETPESKHNHFTNTLAAIDLVNAFFSIAVHKVHQKQFAFIWQGQQYTFTVLAQGYINSPPALCHNLTQRDLDCFWLLQDNTLVHYIDDIMLIRSSEQEAANTLDLLVRHFCATGWEINPTKTQGPSTSVKFLGFQWCGACQDIPSKVKDKLLHLAPLASKKETQRLVGLFEFWRQHSPHLRMLLQLIYQVTRKAARFEWACTDGLMRSPYDQLTKEEKTRARFTDGSTQCEGTTQKWIAAALQPLSRTCLKDSVHQRVSSAEEDFNNQVDRMSRSVDIIHPLSPATPVITQWVHEQSGHGGRDRGHAWAQQHGLPLTKADLAMFTAECPIFQQQRPTPSPQYGTIPQGDQPATWWQVDYIGPLPSWKRQRFVITGIDTYSRYRFAYPSFNASAKSTIHGLMECLIHSHGIPHSIAFNQGTHFMAKEVWQWSHAYGIHWSYHVPHYPEAAGLIELWNGFLKSQLQYQLSDNTLQGWGKVLQKVVYALNQCSIYGTVSPIARIHGSRNQGVEVEVALLTVTPNDPLGKYXLPVPVTLHSDR

SEQ ID NO: 34072 - protein, 397 aa, Homo sapiens
  misc_feature (1)...(397): Xaa = X or * as defined in Table 2
TLGPGTGPRAGTGSSSSPSSSPGTGSVPGAGPGANSVVHPGADSGVRAGAALAPGLCXVKLLGQMSPPGGALGPHNARQSAVAGGFGRARRPGRHEXLQGTWWSGPGQPLGAALQTATGPVVMNQFLRXTWHHEGHSRAPCPRFWGWFXTYSGEKPLPAAVQPSSSSVFXSLQQRCPFFLGVPCQACSSACPLLFXGLXWXPGVHEDQXASPAGSALTWPXLHHDPPPSSGAXSDATGPGGPGSALAGFQQLGSGGQVLQQGQLGSQTCRGGSPRGRRHCXASSWGXGXAGRLLPWAXXPPARSAGSPHRLRGLSXARPCGCAPRCRAAGGAGPXSSAPRTGDGDVGQLGEREXEAHPARVGQWGWGSRCPQGQGVAFSGSESYMDWSSRNRRFRNT

SEQ ID NO: 34073 - protein, 32 aa, Homo sapiens
RGRVDLDTALGKDFMTKNPKANAIKAKINCWD

SEQ ID NO: 34074 - protein, 204 aa, Homo sapiens
MNPNTYSQLIFNKANKNIKWGNDTLFSKWCWDNWLATCRRMKLDPHLSPHTKINSRWIKDLILRPETIKILEDNIGKTLLDIGLGKDFMNKNPKANAIKTVINSWDLIKLKSFCTAKGTVGTVNRQPTEWEKIFTVYTSDKGLISRIYNKLKQISKKKTNNPIIKWAKDMNRQFSKEDIQMANKHMKKGSTSLIIREMQIKTTM

SEQ ID NO: 34075 - protein, 234 aa, Homo sapiens
  misc_feature (1)...(234): Xaa = X or * as defined in Table 2
EGDLVFPLGRGMLRLVSFSKMFKLLKRTMDYGSGSPSVSGHIPLPQACGPPQLVCSRRVRGQRPRPHSVPGSRAAPGLSGDTGRFLSGFGKFCFGSRKGALLTKGFSVSSGWPAAKFPPAQRVQTIVRSRPRRPGKRVLXGEKGEWAASLPTPLPLAGPSLPSVPGPVPVAPQTVRAVSPVTPQGPSSPPFLREHSTQPRPGCREIYQHPRMGTGRMRTPWPWRLSARPAAAAA

SEQ ID NO: 34076 - protein, 505 aa, Homo sapiens
  misc_feature (1)...(505): Xaa = X or * as defined in Table 2
QAAGGAAGAERDEGAGVAGAHGPSRSTARRGGRGAGPRPPPPPRSLGTGSAGRGAAEGTGRARRPAGAAAGRALRAGRAGRLGACGGVAAVGARGLRAAAAGARRRGAPATGAPPPPSAAASPTAPPGPRHPGRVSGAAARAPPGTAPRIGERRPGGGAPATEPPDSRTPAAARASSAPGAVSGPAAAPGPPGRRENAEGRXPQDAGXRGLWEGALPVPGSSPQTSSSSTGRTSGGSRAPSHMVPGTGSPPGRGGEAGARXAAAPAGVKPSSLWKKXLALFRPCFQEPTPGSVGCRGPLECFTHSSPVGVNGHRHCDNCCRPLKPPSPKAAWAVPRAAVPEAHAXKXRAEDQRGLRVLGPNVTLSNPPTRGFRXLGTGVPGFQDPCVDSGLXVEEGLCPEASRGNGERNKGTWGIPPQPPLRPSSRWLQEXPTPLPGSPXDATSPPAGGGRHRSRLPKPALVGNAGTSSLPAPEPCFPHLYFTTFLLSLDSSLKFRDLAGILIPE

SEQ ID NO: 34077 - protein, 72 aa, Homo sapiens [sequence omitted]

SEQ ID NO: 34078 - protein, 263 aa, Homo sapiens
  misc_feature (1)...(263): Xaa = X or * as defined in Table 2
GPQRVPTLWWEDAEARSQRDGVGGRAEAPGARIPRDLGAAGGLRGHPRLVRGHCRRRLRCSMARTLVLRVTPVPGGAPLALRQPPVPGGSRQEWPAFSRVGTGLPLTPTAGPSRARGARRPCPPALPGHCLLDRTYTGLQTLGAETLLAVVNSAAMNVGVQVVDVELHRHSLGEDCIYPQSSESDISDAPPSLPLTIPAPVKASSPIKQSHEPVPDTSVEKGSPGSCPFHLXGPLSHLGSSPGFLLWRPPGLLSSVALVASCS

SEQ ID NO: 34079 - protein, 307 aa, Homo sapiens
  misc_feature (1)...(307): Xaa = X or * as defined in Table 2
LQLCSMWLLRSWVQAEGAVSISDSPFSLHQCWAVLHKAWCVFLQLPGGFTFTLNPLSDNLLGKRVDSAPSWGPLGSAFRGVHMPCVGAAWEGKGPNLLRPSGKLGPSGSRPTPIGQQQLPEVPRAKGPLGPAAVICQHMPAPSTGGKRGSFSGRYLSASLELGGLPMAPTGPSALSAPPSVSRGARXSTREKPGVYASATXAAEIREGQALGGPRPSRNGSGGPLGPDFGPNGPKLRRSKAGCPWWHLSSVDAGEXLWKQHSTAVFSMPGTQPPWRGLITMPISPRGTEPTAHPGPRSPGLAYSLTA

SEQ ID NO: 34080 - protein, 241 aa, Homo sapiens
  DOMAIN (218)..(229): GUANYLIN PRECURSOR SIGNATURE domain identified by eMATRIX, accession number PR00774C, p-value=9.018e-09, raw score of 11.76
  misc_feature (1)...(241): Xaa = X or * as defined in Table 2
GTVLDDPHLTGYCWHPPCPPNSVCNGSLSPVLREEAESSEAPVQSPQRSWTPSAKSPPLPASPPCSQLKAGGDQEGLQRGALPVGMDRGGPGGCGGHCQCSRPRILSPVVPVPQVCPSSEAPGPPRQVPHTPRPQEPSRTRGRLEASAPSWQXPAPPAGSLPAWPPGRPAPTGSRARXAGLEASETTWSTNGPTTVHPXTLXAGSLGAPQTSAAASEHSPCPNLPLPLXKPWCATNLSCRI

SEQ ID NO: 34081 - protein, 603 aa, Homo sapiens
  DOMAIN (150)..(190): Gamma-glutamyltranspeptidase proteins domain identified by eMATRIX, accession number BL00462D, p-value=3.769e-36, raw score of 23.07
  DOMAIN (1)..(349): Gamma-glutamyltranspeptidase domain identified by PFam, accession name G_glu_transpept, E-value=2.9e-15, PFam score of 64.1
MKRLSTLLTLHLYAYPIPPGRGTGTQDLPNGETARAVRAETPPNSPHCGDEERKAVAILGARAVICFNTLFGALWFLASPSFQVPPHSPCPDAGACSGSHLQPALGSRQVVRDMTSEFFSAQLRAQISDDTTHPISYYKPEFYMPDDGGTAHLSVVAEDGSAVSATSTINLYFGSKVRSPVSGILLNNEMDDFSSTSITNEFGVPPSPANFIQPGKQPLSSMCPTIMVGQDGQVRMVVGAAGGTQITMATALPPSHADHTPMPQAIIYNLWFGYDVKWAVEEPRLHNQLLPNVTTVERNIDQEVTAALETRHHHTQITSTFIAVVQAIVRMAGGWAAASDSRKVPTPGAGFWEGLVEVGWWEAVITAQHLDITRGTGARGQGPSWLCLRMVERGGGTSPTLLSPLFLLPPLFLLPRPLSFQDCSGATVQDCRAMVGLVLLGLGLALAVIVLAVVLSRHQAPFDPQAFAHAAVAADSKVCSNIVGHANFCTELGNPLSRNHILTSHGSRDPSKQRSVKLSRIALALDCLLLLALTLGHCTAGQDALGYGVHLSLMSNVPKNKSPRNGVEDGRKPPGPLLRTLHQLYELTTPTAVGKWMSSSWEV

SEQ ID NO: 34082 - protein, 69 aa, Homo sapiens
  misc_feature (1)...(69): Xaa = X or * as defined in Table 2
MAQDYGAMGDLVLLGLGLGLALAVIVLAVVLSRHQAPCXPPAFAHAAVAADSKVCSDIGQRTCRDATPT

SEQ ID NO: 34083 - protein, 153 aa, Homo sapiens
  misc_feature (1)...(153): Xaa = X or * as defined in Table 2
PPLPGCLGDTGAPWPGPGCTGPPPRTRSPPRLPGXAPASRLQNPHPRGRPWPAGHSRCHXSQPWLAGPTGSXHLPDASGFCPGALTGSCLPSLGGAGGGWQSAPPDVGSKWNTPRRSGAPAPPGGRLLPGPACRAPPRSDLPLSXAGRVGRPG

SEQ ID NO: 34084 - protein, 163 aa, Homo sapiens
  misc_feature (1)...(163): Xaa = X or * as defined in Table 2
NRIFLNCNMVHKCKCKTPMVVAGASLVETGQDESIKDEXLNGIPGPVATPSRLPPQRTWNPGPHPMPXRRPQSLPQPSQAPPGPFLSXGSEGEGTQPKPPGLPGLGPPRQPGRCGFAVDPPRCGVSPGPGVPGPAGPAAGAAPGXPKLRQRPGPSIGDCGDAP

SEQ ID NO: 34085 - protein, 77 aa, Homo sapiens
  misc_feature (1)...(77): Xaa = X or * as defined in Table 2
YCNVSFGPILSARKPASPRSSXTSATWLQNHPLMYLTPGTGTLWRFLTTRENVPYGPVPXWNRTICGVANWPYWPSV

SEQ ID NO: 34086 - protein, 90 aa, Homo sapiens
  DOMAIN (4)..(20): 60KD INNER MEMBRANE PROTEIN SIGNATURE domain identified by eMATRIX, accession number PR00701E, p-value=3.250e-20, raw score of 13.83
  DOMAIN (3)..(87): 60Kd inner membrane protein domain identified by PFam, accession name 60KD_IMP, E-value=4.2e-26, PFam score of 96.8
  misc_feature (1)...(90): Xaa = X or * as defined in Table 2
GTGGWVAMLQQYFATAWIPHNDGTNNFYTANLANGIAAIGYKSQPALWVTGGLLVIIITFIVRGIVYPLTKSQYTSMAKMLVLXPGAEGL

SEQ ID NO: 34087 - protein, 36 aa, Homo sapiens
YGSVVERTLGKGEVPSSTLGTAPPDHPRNPPASLGC

SEQ ID NO: 34088 - protein, 167 aa, Homo sapiens
  DOMAIN (14)..(33): PLANT THIONIN SIGNATURE domain identified by eMATRIX, accession number PR00287A, p-value=8.934e-09, raw score of 9.08
  misc_feature (1)...(167): Xaa = X or * as defined in Table 2
QGSRAKLSTPLGLSCTRSTAGPSRFARCSLGGCSHPSRHSPHLPPPPPVQFRAGPRGRQGSPSRGSPSGAFPAGPGGAAAAAVGDDQQQQEQHGAHEGEENNEGNSVPCGPGKTGGSSVSPGLPEPWPPAPLWTQPSWSAPCHPXKPPIPPTRQVLGRTGCFLLPAP

SEQ ID NO: 34089 - protein, 133 aa, Homo sapiens
  misc_feature (1)...(133): Xaa = X or * as defined in Table 2
ADELNVPLTXAPAIPLSKEMKLHVPTKPARKRLKWLHSQQPTCPSTGEPVSNCGPPPVPQPTTQQYQGLDAGATTRVPRSLLRSEGSQTQKSPSCGSHSQDNSGGSQSSPVTPQHLLSPRAPQAAPSPDRAPV

SEQ ID NO: 34090 - protein, 696 aa, Homo sapiens
  DOMAIN (36)..(71): Troponin domain identified by eMATRIX, accession number PF00992A, p-value=7.211e-10, raw score of 16.67
  misc_feature (1)...(696): Xaa = X or * as defined in Table 2
RWQGDKRDSAXRGNLRARKPSKRGKDRXRRVSPTRSGKRRGAEEKNRQEKKKGREKERREKRSERQRDRRRRKEQRKEEQRRRARTNERKPRQTQANGATSSXKASAQQAGMWGGSPXTDATAIRRGGAPCSSRRTCLNQGTIATPSGRRRHGDAGXPGLASEHDASGHGCLRTGAGXPSDSTESVCRRPLAMHVPTHESHGPVFTRLVSHTFHCGSKLPAVGRPVACRPTYSPSLCHNPQRPAQLLAHSSALQCAPLSWDPQRCAPPSPRPHRRGPPSPHPHRRAPPSPHPHRRAHTTARTDPTTSAPPPRQTQRRATREPATKHTRNAHPRRSACNRGTHTHPRRRRTTERTTHHARPRNRGQATPNTRQPTAGRHEETDGATRRRQHGQTRGEGGRRRGRAAKTRQRERQEPPHDNTRRTRRRPKRRDRTGAPAGTRNRTSGHKKRQPGTRASTGTAPASQQQQTPTVLSRCISRFGVFYGPDFSGGNSFCSLPLMSDSTLSTYGGQRRGRSRARKTQDTGVLSPLRRERSCPPAHGRFPGLFLSTHRQVGPAALRPPELSCEXLPQDGDFCVWLPSLRSRLRGTRVVAPASSPCGDWQVTAVAPXPQTQSPSLSQSRDVEKRHRGQHPSVGSVXLMKAAXRGPSGAKRPKTAPRPQCRARVLPKRSGPTSPGRGSCGSQSRTRGFXDVRPGP

SEQ ID NO: 34091 - protein, 148 aa, Homo sapiens
  misc_feature (1)...(148): Xaa = X or * as defined in Table 2
MWESLELPRDLLNGFDQNADNDMDNEIQAEVVSDGDEELVGNWSKGKQLKSSENLQLDDATEKKNLFSEEKFKLAEETYLSNEEPNINSQDNGKNVSKACQRTLEQAFPSSGSGGLGGKNGFVGXAQSPSAVCSLGTWYPCPSCCSHG

SEQ ID NO: 34092 - protein, 114 aa, Homo sapiens
  misc_feature (1)...(114): Xaa = X or * as defined in Table 2
GTCWKLEQSTLPLLHWAGLACPLAPGTCTSGPLLTAPQRXMQLCGSPGWHWKRSVVVAPGRQLPGSGECMFQLPLPCRQPSLCAIPPILQANLPLNGRQNCCAQISCKEDQSFH

SEQ ID NO: 34093 - protein, 433 aa, Homo sapiens
MWESLELPKDLLNGFDQNADNDMDNEIQAEVVSDGDEELVGNWSKGDSCYVLAKRLAAFCPGPRDLWHFELKRDDLGYLAEEISKQQSFQEKCYFSPPKKNGTLKDLLGLVIQPWCGPAHFSGTRLGHLLRTTDVPRLQEPHHMLSEEEGRGVECADTQSNRLFRREGGRRGPRFSVWHGSPQASLPAGASGDYAPPQKRPLGRGQAQSKEERERERQRSSKKSRKVNRPERAMVQTASKAGPWSPCHCRGVGGLENREVWQPSSLAIVPEGCKRLGGQCMSRTSSKWAMESLTETLMSYSGPETSQWVLNSTEKCSPERFTWTGVSACGQVIEEQMGSKNLDYMLEHSLPWALHIFAGYAKNSRPCISFLRPFSESCLQGAMLQDEVTSLTKSRLASASYKSSRPIPGFPAPGKLTPDNAGPRSIMEEEKKG

SEQ ID NO: 34094 - protein, 290 aa, Homo sapiens
MWESLQLPGDLLNGFNQNVDNDMDNEIQAEVISDGDEELVGNWSKGDSCYALAKRLVAFCPCPSDLWNFELERDNSGYPADEISKQQSIQEVTWVLLKAFSFKRETEHKTLENLQPDNAIEKKIPFPKKKFKQATEICISNKEANVQKTNVELEPSHRIPTQALPSGAVRRGSPSSRPQNGRSTDSLHHVPGKATETQHQPVKEARRGDIPCKATGADLPKAVEAHFLHQRILNVRYGVKGNDFEALKFDGPPGFQTCMWPLAPLFWPISPIWNGCIYPMPVPPLYLGSN

SEQ ID NO: 34095 - protein, 203 aa, Homo sapiens
  DOMAIN (154)..(190): Synapsins proteins domain identified by eMATRIX, accession number BL00415Q, p-value=1.669e-09, raw score of 2.23
  misc_feature (1)...(203): Xaa = X or * as defined in Table 2
FTTCSKHQTRPGHRPEQQHPAEKSVSGIFCYAEEMESSQLPDPGSGQPPRGGALGPPYEPLSNRIPDAPGEAGPASTPGHXSLDQGIPGXPGLAPRGHRLWKSPETPAPSPAPRGVSGGLPGSRSAQVGSGDPSPHHLXQPAAAGRKDSSSFXATWRPPGPPGPAAAAGRKDSSSFXGHMASPRPPGPAAAGRKDSSSFMVLP

SEQ ID NO: 34096 - protein, 483 aa, Homo sapiens
  misc_feature (1)...(483): Xaa = X or * as defined in Table 2
VIRSRMLIPKTMGKVSPGHVRGLHSRPSQHRPRGLGGKNGFTAAPAMAEGSNIGALAVASEGASPKPWQLPCGVEPSIRRCMETPGXPGRSLLQEQVPHGEPPARAAQKGNVGLEPPSTVPTGVPPSGAVRRRPPSSRPQNGRSTDSLHHAPGKATSSSMPAPESSYEGGGTLQSHRGRAAQDHGNPPLASAXPGDLVKLQLLTPQSDNSCTHIGDNGTYRSQLKAAFAEKLNMGKLTFFITGVNHKWGLPLSLTWLPANSWESLLSFPPPSPPQQLNDKPGRRSNITHSSKEDKKTEESLELPRDLLNGFDQNADNDMDNEIQAEVVSDGDEELFGNWSKGDSCYVLAKRLVAFCPFPRDLWDFGLERDDLGYLVEEISKQQCIQEVTRVLLKAFSFIRETDHKSSENLQPDNAIENKIAFSKKKFKPVAEICISNKEPNVNPQDNGESVSRACQRSSQQALPAQAQRPRRKKWFHSCSSYG

SEQ ID NO: 34097 - protein, 134 aa, Homo sapiens
  DOMAIN (43)..(63): INHIBIN ALPHA CHAIN SIGNATURE domain identified by eMATRIX, accession number PR00669D, p-value=9.703e-09, raw score of 7.36
  misc_feature (1)...(134): Xaa = X or * as defined in Table 2
GPVSGHHRVNCLPCTILPLRRXRAKGHLCRLLCPAGEATGARWRHSPQPLALLQRAPEPAHHHPAAPPGRLHHAGLRCSPVRPAEEGRGPRPQQRARTASLQLLRRRSLLQPQPPDXRDKMAEPQRRSRQPAHL

SEQ ID NO: 34098 - protein, 94 aa, Homo sapiens
  misc_feature (1)...(94): Xaa = X or * as defined in Table 2
DTPRFHSRSKRGITLQEYASSRNXRTSSAVPVFXRMSVRGMEVPCSNERXTQSISGDQVRPAEEGPGPRPQQRARTASLQLPRRRYFLQPQPPD

SEQ ID NO: 34099 - protein, 123 aa, Homo sapiens
  misc_feature (1)...(123): Xaa = X or * as defined in Table 2
GVEELRNVNVFFPHFKYSMDTYVFKDSSQKDLLNFTGTLPVMYQAXICHCWSSSSSSPQVSRGTSHVFSITSDEARQVDLLAYIAKTLKVFQIQIQRAGQIMRIKQSIKLLWLEVENSVLPAH

SEQ ID NO: 34100 - protein, 482 aa, Homo sapiens
  DOMAIN (328)..(343): FIBRONECTIN TYPE III REPEAT SIGNATURE domain identified by eMATRIX, accession number PR00014D, p-value=3.647e-10, raw score of 12.04
  DOMAIN (258)..(443): Fibronectin type III domain identified by PFam, accession name fn3, E-value=7.6e-37, PFam score of 135.8
MSDVHAATGSPAELCVVLNDEKVEGVWLKDGKEITDLPGVQIVKQGAVHKLIFPSMGPEHEGKYTFRAKGTESEASVFIADPPTIDPSVLEALAAHAITVKVGHTAHIKVPFRGKPLPKVTWYKDGMEVTEEERVSMERGEDQALLTISNCVREDSGLILLKLKNDHGSATATLHLSVLGVSDTNSKSWANHENKTVNKITVVGGGELGIACTLAISAKCHPERYEELVAYCVASCRCHEEASVKSIMVVHTGDREPPGFASQPQVTDVTKEAVTITWNAPTQDGGAPVLGYIVERRKKGSNLWVPVNKDPIQGTKCTVDGLLEDTEYEFRVIAVNKAGPGQPSVPSSSVVAKDPVKPPGLVQDLHVSDSSNSSISLAWREPAEGDPPSGYILEMRAEDTKEWSKCTKIPISGTCYTVGGLIERQKYFFRIRAVNEAGVGEPVELDKGVRAMPPPVHRVPEDDSGSMGTTEAEQGSGDDTGY

SEQ ID NO: 34101 - protein, 309 aa, Homo sapiens
  DOMAIN (29)..(59): kw TRANSCRIPTASE REVERSE II ORF2 domain identified by eMATRIX, accession number DM01354R, p-value=4.780e-28, raw score of 8.50
  DOMAIN (1)..(202): Reverse transcriptase domain identified by PFam, accession name rvt, E-value=3.8e-07, PFam score of 31.7
  misc_feature (1)...(309): Xaa = X or * as defined in Table 2
MQRWFNICKSISVIHHINRVKTYMIISIDAEKAFDKIQHLFMIKTLSKIGIQGTYLHVIKVIYDKPTANIILNGKKVEAFPLRTGTRQGYPLSQLFFNIALEVLARAIRQEEIKGIQISKEKVKLSLFAGDMIFYLENPKDSSKKLLELIKELSKVSRYKINVHKPVALLYTNSDLVENQIKNSTPFTVAAKIIKYLEIYLINYMKDLYKENYKTLLKKIIDNTNKWKHILCLWIGRINLVKMTILQKAINKLNTIPIKILPXFFTELEKPILKCIQNEKRAHIAKARLSQKNKSGGIRLPDFKLYYKP

SEQ ID NO: 34102 - protein, 213 aa, Homo sapiens
  misc_feature (1)...(213): Xaa = X or * as defined in Table 2
MGRNQSKKAENSKNQNAFSPPKENDSSTAREQNWMENEFDMLTELDFRRSVITNFSKLKEHVLTHHKAAENLEKRLDKWLTRINSVEKTLNYLMELKTTLFMVDNGCRXLENSHDLXAYFLHLLGNTGLXCCVRGQIGDGKEKREQRDSRSMGEILRAQLEPFAFHQRSVQCGDIRDLWMGYFLLNLMKKLTFQXFPXQDTXQLKELKKIAST

SEQ ID NO: 34103 - protein, 358 aa, Homo sapiens
  DOMAIN (165)..(209): Synapsins proteins domain identified by eMATRIX, accession number BL00415N, p-value=7.569e-09, raw score of 4.29
  misc_feature (1)...(358): Xaa = X or * as defined in Table 2
APGPRGAGAQKACGASAGGDPECAAYXGGAQCECGPTVGPGEVPRAVXVWVHGGPWAGGYPVQXCDAGGREGSFAGAAAAPGGAAGEPAGPCPGAAAAEPAGAGAQQPPAGREVCAGDSGPGAAPEAGGAGGGGAGGTAVPGGDPRAAAGPASGPQGPGTAAAAAGGRARGTAGAAPRPQGQHAGTGAGPPGAAGPARAAAGPAGQRGGTGGGPAGRAXTPDARWASAAGPGGGAAEASERARQGSDAAGRVVSGAGXAAGXTRGATGPAGAAGAGAGTAGDAEPAAARVQPAAGPERLPADHAVXAIDTAAKCPGRGEPAAAGXSSGPEPGEQGAPGAQPGESGPPAPRTAGVPGPA

SEQ ID NO: 34104 - protein, 372 aa, Homo sapiens
  DOMAIN (166)..(220): Kinesin light chain repeat proteins domain identified by eMATRIX, accession number BL01160B, p-value=9.838e-10, raw score of 19.54
  misc_feature (1)...(372): Xaa = X or * as defined in Table 2
MLVAEKAALXXXLQHLEGQLGSLQGRAQELLLQSQRAQEHSSRLQAEKSVLEIQGQELHRKLEVLEEEVRAARQSQEETRGQQQALLRDHKALAQLQRRQEAELEGLLVRHRDLKANMRALELAHRELQGRHEQLQAQRASVEAQEVALLAERERLMQDGHRQRGLEEELRRLQSEHDRAQMLLAELSRERGELQGERGELRGXLARLELERAQLEMQSQQLRESNQQLDLSACRLTTQCELLTQLRSAQEEENRQLLAEVQALSRENRELLERSLESRDHLHREQREYLDQLNALRREKQKLVEKIMDQYRVLEPLPLPLMELMENEALEILTKALRSYQLGIGRDHFLTKELQRYIEGLKKRRSKRLYVN

SEQ ID NO: 34105 - protein, 262 aa, Homo sapiens
  misc_feature (1)...(262): Xaa = X or * as defined in Table 2
EGKDERNDGKDEGKDEKKNERNDGKDERNDEGKDEGKDERKDERNDEGKDEGNDEGKDDXKDEGKDEGKDEGKDDGKDERKDEGKDEGKDERKDEGKDEGNDEGKDERKDERKDEGKDEGKDEGKDERKDEGKDEGKDEGKDEGKDEGKDEGKDEGKDERKDEGKDEGKDEGKDEGKDEGKDEGKDERKDEGKDEGKDEGKDEGKDERKDEGKDEGNDEGKDERKDERKDEGKDEGKDEGKDERKDEGKDEGKDEGKDAGKG

SEQ ID NO: 34106 - protein, 67 aa, Homo sapiens
  misc_feature (1)...(67): Xaa = X or * as defined in Table 2
VRGHEWAQKKYHKFSLWSVDSTXNXQPSPHASGCHWLEEPAAFCHASPAASGIFAAAASDRPLLPSV

SEQ ID NO: 34107 - protein, 145 aa, Homo sapiens
  DOMAIN (65)..(95): kw TRANSCRIPTASE REVERSE II ORF2 domain identified by eMATRIX, accession number DM01354R, p-value=1.429e-23, raw score of 8.50
  misc_feature (1)...(145): Xaa = X or * as defined in Table 2
RPLSLINIHANFLSKILANSIKQCLNRIIHHDGVRFIFEMXEXFNIHRSINVTYYINRMKNKNMIIDAEKAFDNIQHPFIIKILIKLGIEGTXLNTIKALLMAAAACLNSCCKDARSSRGGMAEGCRLSASSELWAPMSMGGGLR

SEQ ID NO: 34108 - protein, 382 aa, Homo sapiens
  misc_feature (1)...(382): Xaa = X or * as defined in Table 2
RHPGWPTPAACPTTLRWLKAPVWTPGPQKMEKEPAARGTPGTGKERLKAGASGFAGGMGPRSVPARKKAQTAPPLQPPRAAPGPERGAALGRPVAQQVPGARLAGGAAGLGFPAVPRVLPPFPCALSGDRSARERPPGALLRPLPCXGPPTPVVGGKNDQLKERADSGPDPVAADAVPGEAALQARVPGALGPAKLSPEGAIVAPAXVRGPGRLHQPGLRPGPRQRSDPRFPGSREPAGERGRGARRGHRRGRPGGPCDPRRPGTQGEASERGEAAEGEAAEGGETXERGGRGKRRGHGPPGSPGKPYPSAGSHAKGATGRGHGTPGTPSPGRSRPGCPRGVPTRSSGLGVARSSAQARGGTEPAPRRSPGAPSGRPATLAK

SEQ ID NO: 34109 - protein, 53 aa, Homo sapiens
  misc_feature (1)...(53): Xaa = X or * as defined in Table 2
TRNKILYRQANAERFCHHQACPKGRSXRKHXTWKGTTGTSHCKNMPNCKDHQG

SEQ ID NO: 34110 - protein, 61 aa, Homo sapiens
  misc_feature (1)...(61): Xaa = X or * as defined in Table 2
FTFWHDFAAAGTGCSFPCLVLPSWWXQNLSAFACLXRILFLLHLXSLVWLDMKCWVENSFL

SEQ ID NO: 34111 - protein, 73 aa, Homo sapiens
  misc_feature (1)...(73): Xaa = X or * as defined in Table 2
IALMVSTIWHVFAVAGTGCFFPCLVLPSGALVRQAXWXQNLSAFACLXRILFLLHLXSLVWLDMKFWVENSFL

SEQ ID NO: 34112 - protein, 94 aa, Homo sapiens
  misc_feature (1)...(94): Xaa = X or * as defined in Table 2
KFFSLRMLNIGPHSLLCLQSFCQRSAVSLMGFPLWEPDLSLWLPLTFFPSFQLWXIXQLGFLXLLFLRSIFVAFSVFPEFECWPALLDWGSSPG

SEQ ID NO: 34113 - protein, 565 aa, Homo sapiens
  DOMAIN (441)..(482): kw TRANSCRIPTASE REVERSE II ORF2 domain identified by eMATRIX, accession number DM01354I, p-value=1.000e-40, raw score of 15.55
  DOMAIN (196)..(427): AP endonuclease family 1 domain identified by PFam, accession name AP_endonucleas1, E-value=4.6e-53, PFam score of 189.7
MELKAKAQELREECRSLRSRCNQLEESVSVMEDEMNEMKREGKFREKRIKRNEQSLQEIWDYVKRPNLRLTGVHESDGENGTKLENTLQDIIQENFPNLARQANIQIQEIQRTPQRYSSRRATPRHIIVRFTKVEMKEKMLRAAREKGWVTHKGKPIRLTVDLSAETLQARREWGPIFNILKEKNFQPRISYPAKLSFISEGEIKSFTDKQMLTDFVTTRPALQELLKEALNMERKNRDTHRLKIKGWRKIYQANGKQKKAGVAILVSDKTDFKPTKILKDKEGHYIIVKGLIQQEELTILNTYAPSTGAPRFIKQVRSDLQRDLDSHTLIIGDFNTPLSTLDRSTRQKVNKDTQELNSALHQADLIDIYRTLHPKSTEYTFFSAPHHTYSKIDHIVGSKALLSKCKRTEIITNYLSDHSAIKLELRIKKLTQNHSTTWKLNNLLLNDYWVHNEMKAEIKMFFETNENKDTTYQNLWDTFKVVCTGKFIALNAHKRKQERSKIDTLTSQLKELEKQEQTHSKASRRQEITKIRAELKEIETQKTLQKLMNPGAGFLKGSTKLIDH

SEQ ID NO: 34114 - protein, 57 aa, Homo sapiens
HPTVNIRQINETESQQGYPGIELSSAPSGPNRHLQNSPPQINRIYIFFSTTPHLFQN

SEQ ID NO: 34115 - protein, 169 aa, Homo sapiens
  misc_feature (1)...(169): Xaa = X or * as defined in Table 2
LTKRWPGTNTSPESGXSRRAACAGLLIPFTSRSSSPTWTRPLLSACASSHDPGHHNSPXVLVPPDGGTQGFLVLHQADDLHRFLIKILIDIVRQRRENGVKILLGNRVMYHEHSPQVRGGQQLEQLPLITVHGGGLQLLHHVLSEGHSAVQNWGWTLPFIIAKLLMNLH

SEQ ID NO: 34116 - protein, 636 aa, Homo sapiens
  DOMAIN (5)..(20): RIBOSOMAL PROTEIN P2 SIGNATURE domain identified by eMATRIX, accession number PR00456E, p-value=6.966e-11, raw score of 3.06
  DOMAIN (39)..(96): PHD-finger domain identified by PFam, accession name PHD, E- value=6.4e-06, PFam score of 33.1
MAGAAAAVAAGAAAGAAAAAVSVAAPGRASAPPPPPPVYCVCRQPYDVNRFMIECDICKDWFHGRSQSGAFNICVGVEEHHAVDIDLYHCPNCAVLHGSSLMKKRRNWHRHDYTEIDDGSKPVQAGTRTFIKELRSRVFPSADEIIIKMHGSQLTQRYLEKHGFDVPIMVPKLDDLGLRLPSPTFSVMDVERYVGGDKVIDVIDVARQADSKMTLHNYVKYFMNPNRPKVLNVISLEFSDTKMSELVEVPDIAKKLSWVENYWPDDSVFPKPFVQKYCLMGVQDSYTDFHIDFGGTSVWYHVLWGEKIFYLIKPTDENLARYESWSSSVTQSEVFFGDKVDKCYKCVVKQGHTLFVPTGWIHAVLTSQDCMAFGGNFLHNLNIGMQLRISSTEKTLNDLMELKTMAKELCDACTSFGSRFDQVEERVSVIEDQMNEMKQEEKFREKRVKRNKQSLQEIWDYMKRPNVRLIGVPESDGENGTKLENTLQDIIQENFPNLARRANIQIQEIQRTPQRYFLRRATPRHVIVRFTKVEMKEKMLRAAREKGRVTHKGKPIRLTADLSAETLQARREWGPIFNILEENNFQPRISYPAKLSFISEGEIKSFTEKQMLRDFVTTRPALQELLKEALNMERNN

SEQ ID NO: 34117 - protein, 657 aa, Homo sapiens
  misc_feature (1)...(657): Xaa = X or * as defined in Table 2
MTGVSRGSGLPISMAENRRPLPVSAGSKPVIPILQSPLQILNTTHYFLKSLLTPTSSFAHVISSAEDLVQRRNVIGDVYSQGPASPFEINNGLGSPLKYTAWRKQEMGPWQWLWQQDFHLFLGAPLQRYAEPLPVGTISPGWGSCVVDSSQESLPNDKHLRAAKEVPLQLQWQRSFQLPLGASPQRNTRILLTGMFSWVWLNIHPGTLLGEKLGSWGSKGRTTAGAIAERLLVSSESSIPGNPEQLPRNAELPLTEVFRCGXIFIQGPCLVKSWGPGAARAEPLQEPXRRGCWFLLRAAIPGNPEQLPRNAELPLTEVFRCGQCSYAAGTPQKAPCPVRSSRARDPCRKPSDCLLGTDEQKDSSNLCRLKCPCLTALKRAVFLPARSWRSENGQTASSSGSLSPEQPKWEAPPSRGRLTPHTAGSLRSQCDQREEWVSAMEDEMNEMKREGKFREKRIKRKEQTLQEIWDYVKRPNLCLIGVPESDGENGTKLENTLQDIIQENFPNLARQANIQIQEIQRTPQRYSSRRATPRHIIIRFTKVEMKEKMLRAAREKGWVTHKGKHIRLTADLSAETLQARREWGSIFNILKEKNFQPRISYPAKLSFISEGEIKYFTDKQMLRDFATTRPALKELLKEALNMERNKRYQPLQKHAKM

SEQ ID NO: 34118 - protein, 258 aa, Homo sapiens
  misc_feature (1)...(258): Xaa = X or * as defined in Table 2
XSLPWQLNGQGEPDFARSWSDEDGFPLLARPLSLAAAGVSGLVFTGLCPILLEAQPLWPCDLQFFRQSVKTNFSKLKEDVRIHHKEAGNLEKRLDEWLTIIDSVEKTLNDLIELKTMAQKLRDECRSLSIQCDQQEEKVSVIVKMNEMKQEEKFRDKIIKRNEQSLQEIWDYVKRPNLRLIGVPESDGENRTKLENTLQDIIQENFPNLARQADIQIQEIQRTPQRYSSRRATPRHIIVRFTKVEMKEKMLRAAREKX

SEQ ID NO: 34119 - protein, 96 aa, Homo sapiens
RVSRGRKWFFIALKRMPAMKKAMNLFLGLSNVRTVHPEGFTVYISTHISFPSLSGYRTGLRSFGLVKQKKSPIRMPCVYTNPCVSIVSPMAQASSL

SEQ ID NO: 34120 - protein, 223 aa, Homo sapiens
  misc_feature (1)...(223): Xaa = X or * as defined in Table 2
EAPACLXKALSPLAPTTISSVDCGFRASTGITLLPRTGAAHGAAGXDRGGRAGVLTMTASRACCAGPXSSXRYLRQXTPNSLEGPTGRSLRSRASPGFTLRDPVTQPSSPVAAVSALGVEPGLAPALXSQRVXALPRXTRRKSKATAPTATKPNAGHNTTKKARPGQGPTPEIPALGSPREVDPEVAHPGAFLSQPERRRCVLGSSFPPGYQQRRVDPLPVFS

SEQ ID NO: 34121 - protein, 276 aa, Homo sapiens
  misc_feature (1)...(276): Xaa = X or * as defined in Table 2
GTRAGWRRRRSGRDGPEVTPQPPGAARDGAGXTGPSPPRCAGPATAAKPSGHPPPGDFIALGSKGQANESKTASTLLTPAPSGLPSERKRDAAAALSSASALTGLTKRPILSSTPPLSALGRLAEAAVAEKRAISPSIKEPSVVPIEVLPTVLLDEIEAASWRATMTGSRACCAGPXSSXRSPAPSLTAPSTXASCTWPRSSPTSSPLRASLRLCVASCGGTPPSTSRPRGTAWCLCWPVTSSWPPTRRTRTGPRSLSRCTSRTPWGSGSGWTALT

SEQ ID NO: 34122 - protein, 46 aa, Homo sapiens
ELRPLPTWTGGIPALQGTAAATQLPGAFSRPTHGHPWTNQHVLPPF

SEQ ID NO: 34123 - protein, 683 aa, Homo sapiens
MGAHLDGSDKSGNLGLEPNFMFSSASIYKWISQDHDSTLGCCRTSFPACGRLQIAPILHTSLTTPFAMVCPPESQQLGHGTWFGHWDVHGANRGLHGARVLSFHLWSPFSCYEKDIPGWPAGGKETWGVEPQKPLDFNQKFIGAKEPNKTSIRNSLDAFFETRNCHSSSLSGFLHTPVANSYSPNSKQEVTAGKQLNKAKQLGQHCIPHELALISEVLIKKVPPPLSSPSLFTVPVNAGLREREYEPSIFDLDLPLTNKSPECSANKGLLPWFYHGNPYEHKINLYRQVPGVQSRPDSRPCCAAERGGSRASAVPAMGARGPPRSLEGGFAVNPSPLRFLPVPQDLALLGRTQSMRAGGQCTCARQQGWWENQPGIPFLLLIHKPKIHLSTYSLPPQPRPLETPNPLLPSEKLQLIPAHDSHSIYLSHSKCLAVSWASSGKMNKDRMSGGPIQGHMLGRTSPFKSWWEKDFEQGHRRQIPITKELHKHISPIPSSVPQENNHIPAVSRQSGKRGARTQSINSPECASRQEDEAHAELSLQDEFQSTQKGPEAPTRRELGASLICRVCSSPPPPNSPPQTVISFGANVQLYGGEGNKEASFTCLASSIPQAASTAGHGVVVISGVLMRGSLLDFSVCRHSRSVFDILVNSFFLPVLFEIPPKSGDTGDVAASFSASVQPGTEDK

SEQ ID NO: 34124 - protein, 76 aa, Homo sapiens
HQAPQTAKSQKRAEHRPSCQGDLHLDKEFQIRFHWSQLKKLILKYQLQDQVQLVHTTRKGDTRRFFLPEASMGVGK

SEQ ID NO: 34125 - protein, 101 aa, Homo sapiens
  misc_feature (1)...(101): Xaa = X or * as defined in Table 2
LNPLSMGRRWPGEETVTDPGWKRLCHPLHWVAETVPVQAVGAPWSLQMGGWNWGGRCPQHLAPSKGVMXRLPGQFGRTPSWKEVPEVWGMFRRPACGPRLS

SEQ ID NO: 34126 - protein, 136 aa, Homo sapiens
  misc_feature (1)...(136): Xaa = X or * as defined in Table 2
VSHLEAQKXPSWTCXHQCQWALPMFPHHSEADGLIEXWNGLLKSQLQCPPGGNILXGXGKVLQESVYAQNRHLIYGTVSPISRTHRPLCSQSTQDSCLLVANPSQICLVHIPFPXVQHSLGLXISWDWTGEVGPFL

SEQ ID NO: 34127 - protein, 237 aa, Homo sapiens
  misc_feature (1)...(237): Xaa = X or * as defined in Table 2
LEHPATVIFCFSWETFDPQGFCFSLPKVSGTCLISLLLHAFPFVVTSAPCPQEFPHSPHLCFHVPHHSEADGLIEXWNGLLKSQLQCPPGGNILXGXGKVLQESVYAQNRHLIYGTVSPISRTHGHQVTHGQPVKTTLLXSPSMGSWGIALVLPPLDLLLSGXSLTLPLAFLLRTHPLLTTVQRRAELPFTSWICFLSLFERGKGPGQPLVTWTECQALTLLPSPGSHTQGTWRIPH

SEQ ID NO: 34128 - protein, 419 aa, Homo sapiens
  DOMAIN (4)..(14): C2H2-TYPE ZINC FINGER SIGNATURE domain identified by eMATRIX, accession number PR00048B, p-value=8.105e-09, raw score of 6.02
PSVLEKHIRSHTESEGAGGGLLEEGDKAGEPPRPEGRGESRCQGMHEGASERPLSPGAHVPLLAKNLDVRTEAAPCPGSAFADREAPWDSAPMASPGLPAASTQPWRKLPEQKSPTAGKPCALQRQQATAAEKPWDAKAPEGRLRKCESTDSGYLSRSDSAEQPHAPCSPLHSLSEHSAESEGEGGPGPGPGVAGAEPGAREAGLELEKKRLEERIAQLISHNQAVVDDAQLDNVRPRKTGLSKQGSIDLPTPYTYKDSFHFDIRALEPGRRRAPGPVRSTWTPPDKSRPLFFHSVPTQLSTTVECVPVTRSNSLPFVEGSRTWLEPREPRDPWSRTQKPLSPRPGPARLGCRSGLSSTDVPSGHPRALVRQAAVEDLPGTPIGDALVPAEDTDAKRTAAREAMAGKGRAAAGSAAREG

SEQ ID NO: 34129 - protein, 420 aa, Homo sapiens
  DOMAIN (356)..(388): Endothelin family proteins domain identified by eMATRIX, accession number BL00270, p-value=2.768e-27, raw score of 12.82
  DOMAIN (351)..(381): Endothelin family domain identified by PFam, accession name endothelin, E-value=3.2e-21, PFam score of 78.8
MTTNPTTLQRQEEPRNETLMKACAARLFKVEHGAWVIEGAQDVVVEQVNGVPKAWFCAIRLPEYTGGATEAAAKEAPEDSRGSPTCLALSFEPPGTSPGSASCFWDDKEAGCRRHKEKQRQRWDEQGECSCLIGATGFRERAAAPTCLWTEHLKSQILWNWTRREQEGVNKILSLLQTPCLTFEKAQETNPGCERKLCPSLDCSEKRMGAEEEGKWEGQASTREEQYSLPDLPKIAQDEKDFLFPKQVGSIGVGAGSLRVQITFVSFTKSWYQGPVFSPGLCSSVLGGPLPGPCVEPTARSEGDCEETVAGPGEETVAGPGEGTVAPTALQGPSPGSPGQEQAAEGAPEHHRSRRCTCFTYKDKECVYYCHLDIIWINTPESLLQVRGVTHIPPEGLAQEKLNPEFDPVEGGALPLNEVN

SEQ ID NO: 34130 - protein, 949 aa, Homo sapiens
  DOMAIN (169)..(182): PROTEIN ZINC-FINGER METAL-BINDI domain identified by eMATRIX, accession number PD00066, p-value=1.391e-11, raw score of 13.92
  DOMAIN (151)..(203): Zinc finger, C2H2 type domain identified by PFam, accession name zf-C2H2, E-value=6.6e-10, PFam score of 46.3
  misc_feature (1)...(949): Xaa = X or * as defined in Table 2
MAPRSLRMEDAIESLAVVSSEYVGAGVNWMFLPPSSKSTCKILTPHVMVLGEQGLAPPTVFLKALPIPLYHTVPPGGLQPRAPLVTGSLDGGNVPFILSPVLQPEGPGPTQVGKPAAPTLTVNIVGTLPVLSPGLGPTLGSPGKVRNAGKYLCPHCGRDCLKPSVLEKHIRSHTGERPFPCATCGIAFKTQSNLYKHRRTQTHLNNSRLSSESEGAGGGLLEEGDKAGEPPRPEGRGESRCQGMHEGASERPLSPGAHVPLLAKNLEXGPKLLPVQGPHLPTERLLGTLHPMASPGLPAASTQPWRKLPEQKSPTAGKPCALQRQQATAAEKPWDAKAPEGRLRKCESTDSGYLSRSDSAEQPHAPCSPLHSLSEHSAESEGEGGPGPGPGVAGAEPGAREAGLELEKKRLEERIAQLISHNQAVVDDAQLDNVRPRKTGLSKQGSIDLPTPYTYKDSFHFDIRALEPGRRRAPGPVRSTWTPPDKSRPLFFHSVPTQLSTTVECVPVTRSNSLPFVEGSRTWLEPREPRDPWSRTQKPLSPRPGPARLGCRSGLSSTDVPSGHPRALVRQAAVEDLPGTPIGDALVPGRGHRRKENCCAGGHEPARAERAAGSAAREGXRCSHQEKWQVYGDETFKRIYQKMKASPHGGKKAREVGMGSGAELGFPLQKEAVRELRHSPHPRQEDPCPXGHTAGATPEPWGNPPALEASLVTEPTKHGETVARRGDSDRPRVEEAVSSPALGGRDSPCSGSRSPLVSPNGRLVTGVADAPSTWPPQRGXCRGPQASLAGPQAGRRCPRCGGCSGDLPVGPDCPEMAQQGLRGGQAPLREEEAESGGPAQLEATRGLXAQRPHVGPTQPASLSSQKQDADPGEVPGGSKESARQVRRTASWRTPAVPGHRMGEKGHSWGGTRGTGWPLAGQQPGSCPSQHQGLPGRLPPPRPLQRVRHT

SEQ ID NO: 34131 - protein, 93 aa, Homo sapiens
  DOMAIN (1)..(93): Ribosomal S3Ae family domain identified by PFam, accession name Ribosomal_S3Ae, E-value=5.3e-05, PFam score of -17.1
ARDGGWQEQAPYERRQKGSQEESTMIEAHVDVKTTDGYLLRLFCVGFTKKRNNQIRKTSYAQHQQVRQIRKKMMEIMTREVQTNDLKEVVNKL

SEQ ID NO: 34132 - protein, 172 aa, Homo sapiens
  DOMAIN (27)..(78): Ribosomal protein S3Ae proteins domain identified by eMATRIX, accession number BL01191B, p-value=2.370e-38, raw score of 13.33
  DOMAIN (1)..(159): Ribosomal S3Ae family domain identified by PFam, accession name Ribosomal_S3Ae, E-value=7.3e-68, PFam score of 238.9
  misc_feature (1)...(172): Xaa = X or * as defined in Table 2
KGLAFEVSLADLQNDEVAFRKFKLITEDVQGKNCLTNFYGMGLTCDKICSMVEKWSTMTEAHVDVKTTDGYFFHLFCVGFTKKHNNQILKTSYAQHQQSRQIQKKMMEIMTXEVQTNDLKEVVNKLIPDNIGKDTEKVCPIYPLHDVFIRKVKMLENPGFERMELRGGGSSS

SEQ ID NO: 34133 - protein, 191 aa, Homo sapiens
  DOMAIN (16)..(67): Ribosomal protein S3Ae proteins domain identified by eMATRIX, accession number BL01191A, p-value=1.000e-40, raw score of 15.57
  DOMAIN (15)..(191): Ribosomal S3Ae family domain identified by PFam, accession name Ribosomal_S3Ae, E-value=2.6e-80, PFam score of 280.2
PAPWRLACNKRLTKGGKKGAKKKGVNPFSKKEWYDVKAPAMFNIRNIGKTLVTRTQGTKIASDGLKGRVFEVSLADLQNDEVAFRKFKLITEDVQGKNCLTNFHGMDLTRDKMCSMVKKWQTMIEAHVDVKTTDGYLLRLFCVGFTKKRNNQIRKTSYAQHQQVRQIRKKMMEIMTREVQTNDLKEVVNKL

SEQ ID NO: 34134 - protein, 216 aa, Homo sapiens
  misc_feature (1)...(216): Xaa = X or * as defined in Table 2
GEPHSQATSGHFASSAGDTQANRVWSGPPANTNRPAAEGHDCXKENXETERTSTPKPHLYVTIIKDQRKGISDXRSNEXNEARREVXRKKSKKKXTKPPRNMGLCEKTKSTSDWCTXKXRGEWNQVGKHSSGYYPGERPQPRKAGQHSNSGNTENATKILLKKTNSKTHNCQIHQSXNEGKNVKGSQRERSGYPQREAHQTNRXSLGRNSTSQKRV

SEQ ID NO: 34135 - protein, 406 aa, Homo sapiens
  misc_feature (1)...(406): Xaa = X or * as defined in Table 2
RNRRRERHKEREGGGTGGTDWXRRGNRRKRTQRGRDDERRGRDDDQNHTTNTRRETTKTKRTTNRTQQKREQKRNETSKRNETKRATEQNRRERTGTRSGRSAKRQRTEPERERAARRARAKRTASAARDRGLSSTFQLPTRSGNSVHTSKKPLSRKYEQDPWADSGSEGVWKPVPRRLEAKVMRESQGSSRSCCNSRTSARLITRTMRXATLSSNKWSFCMPAGRCLTVTSPCCTPCALVTRKMLVTLGLXSRSRELTTXGTFVRGKQKSVFSAAWGPGHQAQCSEQPSRGRFHRAQPMAXEPCCKSRHPRATPLHPRPSRPKSPTTPPPTRQNANNKGHNTTHTKPRAPPEPQTTQHEHTPQPPPDSHAQDNNNKNTPQQPPTKNAERPPRPTAHPPPAHKPLL

SEQ ID NO: 34136 - protein, 171 aa, Homo sapiens
EFPGRRFRAAPGSQGTVSLVVGSWIHVGGGSVAAFSAGITDLRQWPPEGTGQKQPSKWLSGGTLLKCSCSGRGFPQVGIGAPCRRQPRVASGTVSRVQGAGTRKGGAGELPRASRLQTSRLGRRRSWERRWKSELFGTVHGTDWTHTPREARRHGKFEAYYHPWPGHPQTV

SEQ ID NO: 34137 - protein, 336 aa, Homo sapiens
MQAKQMLALAKVLGQKQEHRGRDRGALSPPATCGVRYSQQSAGCGHQERGRRGTPAGLAFANFSPGQEAVVGKKVEERAFWNCARDRLDAHPSGGAKGRFTPRIQPTKGECEEAAQLPQSEVEQVIHKRCEEMKYCKKQCRRLGHRVLGLIKPLEMLQDQGKRSVPSEKLTTAMNRFKAALEEANGEIEKFSNRSNICRFLTASQDKILFKDVNRKLSDVWKELSLLLQVEQRMPVSPISQGASWAQEDQQDADEDRRAFQMLRRGKLGLWSDLPPKCMQEIPQEQIKEIKKEQLSGSPWILLRENEVSTLYKGEYHRAPVAIKVFKKLQAGSIAI

SEQ ID NO: 34138 - protein, 422 aa, Homo sapiens
  DOMAIN (274)..(322): Receptor tyrosine kinase class III proteins domain identified by eMATRIX, accession number BL00240F, p-value=7.324e-10, raw score of 17.74
  DOMAIN (141)..(394): Eukaryotic protein kinase domain identified by PFam, accession name pkinase, E-value=2.8e-68, PFam score of 240.2
  misc_feature (1)...(422): Xaa = X or * as defined in Table 2
WRGGLDSALRAAVTLQGCAGCDRPGSAXSNNYSIXIXRXRWXSNYSEKXXGNEGNAVILLFHSNGTASKWTVNRASADISKSLQASWGTEHTWPEGEYSAGPSQHSSPAVSDSLPSNSLKKSSAELKKILANGQMNEQDIRYRDTLGHGNGGTVYKAYHVPSGKILAVKVILLDITLELQKQIMSELEILYKCDSSYIIGFYGAFFVENRISICTEFMDGGSLDVYRKMPEHVLGRIAVAVVKGLTYLWSLKILHRDVKPSNMLVNTRGQVKLCDFGVSTQLVNSIAKTYVGTNAYMAPERISGEQYGIHSDVWSLGISFMELALGRFPYPQIQKNQGSLMPLQLLQCIVDEDSPVLPVGEFSEPFVHFITQCMRKQPKERPAPEELMGHPFIVQFNDGNAAVVSMWVCRALEERRSQQGPP

SEQ ID NO: 34139 - protein, 377 aa, Homo sapiens
MNEQDIRYRDTLGHGNGGTVYKLGAAEHWSPGEAGVGGDTQGGRARGRTGLEATTNPQSQEPHPTQPPKKRGRQSQTSEAELRKGIAEVEEEEGPTWWSRPNRKPGGKRPASAAAKGGRNKRKSRQRKVDHEVEELQKERQRGAQGREKTTEERQRGRKGSGEPEPLCGKPPEGKPRGGPRALFMPPFSSPTCGLFGSQLNFSVARQNPHGFQKWAVTSGVGKHLTLTIDTSLSTHSSLNTVYLIPQLSPTSTPSIQTHPLDYDSQRAPLSPHTIALHALTYYTCLPSHIAALTLSTLSHRYIPASRTQTQFYSSTQSLHPPTQHTTPYPRLLCDSQTRLLLLTSTCYRHFTDHTHSYYRTHHLQPAQTSTKQSRHS

SEQ ID NO: 34140 - protein, 185 aa, Homo sapiens
  misc_feature (1)...(185): Xaa = X or * as defined in Table 2
WRGGLDSALRAAVTLQGCAGCDRPGSAXSNNYSIXIXRXRWXSNYSEKXXGNEGNAVILLFHSNGTASKWTVNRASADISKSLQASWGTEHTWPEGEYSAGPSQHSSPAVSDSLPSNSLKKSSAELKKILANGQMNEQDIRYRDTLGHGNGGTVYKAYLCPEWENIICKGHTTRYYTGTSEANYV

SEQ ID NO: 34141 - protein, 146 aa, Homo sapiens
LKKIDRPLFKDFWQRFLDSLKALAVKQQRTVYRLTLVKAWNVDELQAYAQLVSLGNPDFIEVKFKIGGEWWTWIDYNRFQELIQEYEDSGGSKTFSAKDYMARTPHWALFGASERGFDPKDTRHSEERNKFKGLIFWVFEIYLIFQ

SEQ ID NO: 34142 - protein, 244 aa, Homo sapiens
  misc_feature (1)...(244): Xaa = X or * as defined in Table 2
GIAGFVNIHLDSLSFLTGVPGVKAERFEXRMTAKHCALSLVGEPIMYPEINRFLKLLHQCKISSFLVTNAQFPAEIRNLEPVTQLYVRVDASTKDSLKKIDRPLFKDFWQRFLDSVKALAVKYLQRIGSRTPMDTKIYSYCPAVHPAEPTDMKSWPSLFEVPTSLEYCPFYLQLVESADAEGTQKYRRLTAYYIPVYTEPPLITKEPSCLWKQAEFGDLGKHVWLVEQFSSTRVQEHGVGWGVE

SEQ ID NO: 34143 - protein, 682 aa, Homo sapiens
  misc_feature (1)...(682): Xaa = X or * as defined in Table 2
KVMNKRSQTQNGTRYMTPPPRSSHTKQHLLPTPPPRSSHTKQHPLHDPITTKLTHRTCTRYTTPSPRSSDTEQHPLPAPSPRSSDTEQHPLPAPSSRSSDTEQHPLHDPTTTKLTYRTAPATRPHHHEAHTQNSTRYTTPSPRSSDTEQHPLHGPITTKLTHRTAPATRPHHHEAHTQNSTRYTAPPPRSSDTEQHPLHGPTTTKLRHTTAPATRPHHHEAHTQNSTRYTAPSPRSSDTEQHPLHGPITTKLTHRTAPATPAPSPRSSHTEQHPLPAPPPRSSDTEQHPLHGPTTTKLTHRTAPATRPHHHEAHTQNSTRYTAPPPRSSDTEQHPLPAPPPRSSHTEQHPLPAPSPRSSHTEQHPLPAPSPRSSHTEQHPLHGPITTKLSTQNSTRYTAPSPRSSDTEQHPLPTPSPRSSHTEQHPLPTPSPRSSHTEQHPLHGPITMKLTHRTAPATRPHHHEAHTQNSTRYTAPSPRSSHTEQHPLPAPSPRSSHTEQHPLPAPSPRSSHTEQHPLHGPITTKLTHRTAPAPPTPSPRSSDTEQHPLHGPITTKLRHRTAPATRPHHHEVQEQAKPIKXPPRPSPETTRAQPREPAVTLLPSGALGQACPCDATAGPHGTTLWPAVPPRWQQHLTRELLHPVPRACPXQGQGQPFTAGPGRGSHPYDPTGASPKGQSSIL

SEQ ID NO: 34144 - protein, 34 aa, Homo sapiens
  misc_feature (1)...(34): Xaa = X or * as defined in Table 2
RLTLPDRLGSPPDTHXAQHITRAVLPQGFTDSPH

SEQ ID NO: 34145 - protein, 270 aa, Homo sapiens
  DOMAIN (192)..(203): RNase H domain identified by eMATRIX, accession number PF00075B, p-value=1.346e-09, raw score of 12.56
  DOMAIN (124)..(258): Reverse transcriptase domain identified by PFam, accession name rvt, E-value=0.00015, PFam score of -4.8
  misc_feature (1)...(270): Xaa = X or * as defined in Table 2
MAEEDSGNLQPEGEGEAGTSSHGGAGERVKGKVLQTFKQPDLTKQTRFIRGPKTPAPVTDWEGSLPLVFNHCRDASLIIHPHFKGVRPRRDACLGPSPLAASPAFLGKGQHALKRLKPIITRLLQHGLLKPINSPYNSPILPVLKPDKPYKLVQDLCLINHIVLLPIHPMVPNPYTLLSSIPASTTHYSVLDLKHAFFTIPLHPSSQPLFAFTWTDPDTHQAQQITXAVQPQSFTDSPHYLNQAQISSSSVTYLGIILHENTRALPADHV

SEQ ID NO: 34146 - protein, 108 aa, Homo sapiens
  misc_feature (1)...(108): Xaa = X or * as defined in Table 2
HFEARRQAGPPKPSPQPPFRXLPTAGTRGGGGEKAAGGFRWGRFAGMGQGPDPPGAHGQNPASPSLDFPWGPICASQGVTDQSPSTFQGPLGEAXKPTAGAKPGAGAG

SEQ ID NO: 34147 - protein, 395 aa, Homo sapiens
  misc_feature (1)...(395): Xaa = X or * as defined in Table 2
XYTEPCPNSCPSSNSQFLGPRIAVDTSLVPAPPANCLESHPGWNQEGSIRQAPNRQDSRTPSSERPLCSAGPGPGQFPSPATRETPAIVVPTWKRPLVEPPAPGGPRAQGAWSDSEQPRVTVGITGTTTVRKTVSKTDSWQQSEAPPERGAAALNPCPAGSHDPQHPEPHVPLCSLLLGNTLCSPSLQPTRWGDPTLPRAFSTCCTCRPPKQPWTRPWYFQDKGSPKSSPCRPLPSLPGYTGASCAQKQGAQLFHRQKALKEIGLQCLDTRRLRTPSKDEGSRQQHHGRMQGSQTAQPSRRPLLGRDLQPPLNSHGGRWIVTESVTDLEGRGAVNRSPDHRDRDQPLTSRAPHWRPQNTPWKQNRPTVPPGTGQTLLSPQHQPQETLGNSIRGGS

SEQ ID NO: 34148 - protein, 188 aa, Homo sapiens
  DOMAIN (120)..(164): Synapsins proteins domain identified by eMATRIX, accession number BL00415N, p-value=7.044e-09, raw score of 4.29
  misc_feature (1)...(188): Xaa = X or * as defined in Table 2
LGSSAGNSAPDPWRPTSSGVFSFHNTSHSHWILRLRTQERFSEVCVQGTWPTRPLWALPPPXFPFPSPAPAAFASCQSLPPHSPQSPRPGAGISRPRSQEAPDSSQPAPTRPSVPSPMANQGSGDDRQPPPPQDTPPRPNAASQSAGHNYASLPAPRGRVGVGIGFPGSPACAGGGIWHFHTLSFPAF

SEQ ID NO: 34149 - protein, 558 aa, Homo sapiens
  misc_feature (1)...(558): Xaa = X or * as defined in Table 2
KDNERRLNTCRSTRSHKRAHTRRSIRAHRGSAAAPPAAQAPGWRWASSCPRVQSAAGRGGRSGAASGRXAPRWGCPPXCGSRPGKCSPSPAPLASTFPRPGTEPPCRLXRGTCLGSACSGGSGRGXRRXGTGTQRRCPLPSARPRTRRRQISCQGKFSXCPSASSTNVCSPTGRGLXKPVPWAPGGRRRRPSXGRSSGDLSSGTWWPXSXXELGIPEYSHSTQGLVGVAMPPHRRAVTGNVHIAGQARKKDSPGGRSPAWLXSPLFCAPGGRGASHLLLSFPXESPAPXTARPPLPARKLTVPVVLLRDGLGRGGLGRRXPCSAEKSGRGRSGWRRARRPPSEAGTRGNRTSSSWRAPWRPGLGTGEPPGAPPGFAPSSSPRRTPISPLSPASGSGGSGLGRRQRAADRARTKPGGDXVGSWAGRRPPGGAEGPXGQRRPRPYAVLLLSGWPGGEGGGSLQPSVQLLVQGGPVGLTGXVSPRLLTREALKQNGATEAGGEHWPSCPPSHXPGAGEHPGAADTLQVASPAXGHGTAGRQGRAPAAHPAHRGQRAHSTRQ

SEQ ID NO: 34150 - protein, 97 aa, Homo sapiens
MKLGNTGAMRRCVKLTVALETAECEFPPHLDVYIEDPHLPPSLGLLPGARVHFSQLEKRGSRSHNVYCWFRSSTYVQVLSFPPETTISGPLPHIYLG

SEQ ID NO: 34151 - protein, 80 aa, Homo sapiens
MTMFLWTLCTSPSVLRPIVLSFELERKPSKIVPLEPPRLQRFQCGELPFLTHVNPRLRLSCLSIRESEYSSSLGILASSC

SEQ ID NO: 34152 - protein, 431 aa, Homo sapiens
  misc_feature (1)...(431): Xaa = X or * as defined in Table 2
AGRSVRIQAMTCLHPAHLGYPGSFQAPESSCPGQXGRMHSQPTPAGRRDMQDEPSFSNNIGVAGPGAMSRYTCPGCKNSNQRTEEPKKMRXTFXSLSSFPWGSGSPHPVPSFLWVPPSQLPNTXKLRAGLGTSGLAPGGTQKLRFMRASLWQSKKSRLCPRWGPSGPVGSVXGVEGVAEXRQGLGTAGSGHQPERTGHRLWPAASGXSLACSAPSRKGSCFSRPSLRSTETSLPAPGSLSAVGHXGVESAWPAAGRAGNHFGPEVADNLYEMKPPEPQVKPGLGRRQRAADRARTKPGGDXVGSWAGRRPPGGAEGPXGQGGPGLTLSFFFQGGQSGEGGGSPAAECISGGDSDVALQGSHCVHSEQGCLAELEDPGXEPGVAVPGWGSQERNVAGTGGVSAHGDTACRPAPPGHWXPTGRGDEIVEAKTK

SEQ ID NO: 34153 - protein, 150 aa, Homo sapiens
  misc_feature (1)...(150): Xaa = X or * as defined in Table 2
PRHSPGCRCPVAEGQSSGRALPPRLILLAVLLLLLCGVTCWLCPVLLPPEAGTGPATSATSTAALRCGSHPYGQXQPCTQPGPPTAPCSTHWACGCPAFGSWNWTPWPPPAYSLYTPEPPTSYDEAVKMAKPREEGPALSQKPSPLLGAS

SEQ ID NO: 34154 - protein, 34 aa, Homo sapiens
RRLGRGPGPGWVGGQEAQPDCALGGEASVCPPQH

SEQ ID NO: 34155 - protein, 251 aa, Homo sapiens
  DOMAIN (220)..(235): RIBOSOMAL PROTEIN P2 SIGNATURE domain identified by eMATRIX, accession number PR00456E, p-value=7.844e-10, raw score of 3.06
  misc_feature (1)...(251): Xaa = X or * as defined in Table 2
SWQELESRAQAPNVGQRDGPRRGLSYHVAAEVNELLVEGQHRLEGDKHFTGHSGXQGARGVKAAGRDPXPRGLVKAVGRGAMESRSSSPKGRGNRMPSGYCTELXAAGNQSGFVEAGLAFTPAISTPTGGPLGTHRSQCCVQGCHCPXGXLPRRRAAVLVADVAGPVPASGGSRTGAQPAVTPQAEAGGPPAGXAPLATGCSSGPRAGTGPRGRSCRPRSPAPPAAAAGAAGAAGAAAAAAVRGRSAAPGP

SEQ ID NO: 34156 - protein, 153 aa, Homo sapiens
  misc_feature (1)...(153): Xaa = X or * as defined in Table 2
GPVSIGEPEIGPPGPVSIGEPEXGPPGPVSIGEPEEGPPGPVGIGEPEEGPPGPVSIGEPXEGPPGPVSITEPEXGPPGPVSIGEPEEGPPGPVGIGEPEEGPPGPVGIGEPEEGPPGPVSIGEPEEGPTGPVSITEPEEGPPGPVGNEMSSR

SEQ ID NO: 34157 - protein, 124 aa, Homo sapiens
  misc_feature (1)...(124): Xaa = X or * as defined in Table 2
YRALVFSSSTQXVSKNFLYSGSSSMLPVLASFFLSFFLAIFWNGANSATAGYSRPQVGGEELEVVVCWQRAQLLLQLLLGEARRQAADDHLRGARGRSHRGGAWTRSSKGTAYRAGRPGPRPTK

SEQ ID NO: 34158 - protein, 184 aa, Homo sapiens
  DOMAIN (101)..(136): Troponin domain identified by eMATRIX, accession number PF00992A, p-value=2.050e-13, raw score of 16.67
  misc_feature (1)...(184): Xaa = X or * as defined in Table 2
VRSLFSEMNVVEFQNGFWNMFPVKRPKISCSGRVCSIPEDSQKEAEKKRCQDWKHRRXSRIXEVFRNLRVEEEKTSANPETLLGEMEAKTRELIARRTTPLLEYIKNRKLEKQRIREEKREERRRRELEKKRLREEEKRRISVEDRWLYTIRINRRKSQRKKXGLRSHSGSDKEHRDVERSQEQ

SEQ ID NO: 34159 - protein, 76 aa, Homo sapiens
  misc_feature (1)...(76): Xaa = X or * as defined in Table 2
QVSTCYHSQEKEKKRISSTSKSLNKEKRRNEQKDQXALLSSPPSPPAESQGWHWSSLPPHSRFLKTSYILDLDIKK

SEQ ID NO: 34160 - protein, 96 aa, Homo sapiens
  DOMAIN (48)..(83): Troponin domain identified by eMATRIX, accession number PF00992A, p-value=2.050e-13, raw score of 16.67
CLDPEYKKFLETYCVEEEKTSANPETLLGEMEAKTRELIARRTTPLLEYIKNRKLEKQRIREEKREERRRRELEKKRLREEEKRRRREEERCKKKK

SEQ ID NO: 34161 - protein, 30 aa, Homo sapiens
  misc_feature (1)...(30): Xaa = X or * as defined in Table 2
MRIKTQVGGEELEVVVCWQRAQLLLQLLLX

SEQ ID NO: 34162 - protein, 223 aa, Homo sapiens
  DOMAIN (173)..(208): Troponin domain identified by eMATRIX, accession number PF00992A, p-value=2.050e-13, raw score of 16.67
  misc_feature (1)...(223): Xaa = X or * as defined in Table 2
XRGPEAFGRVVAARGPSGREKLSALEVQFHRDSQQQEAETPPTSSSGCGGGAGKPREEKRTALSKVVIRRLPPGLTKEQLEEQLRPLPAHDYFEFFAADLMVEFAPFQKIAKKKLRKKDAKTGSIEDDPEYKKFLETYCVEEEKTSANPETLLGEMEAKTRELIARRTTPLLEYIKNRKLEKQRIREEKREERRRRELEKKRLREEEKRRRREEERCKKIRDR

SEQ ID NO: 34163 - protein, 49 aa, Homo sapiens
  misc_feature (1)...(49): Xaa = X or * as defined in Table 2
NCGNNQXLTNQKKSRSRWIHSQILPDVQGGAGTIPSETIPINRKRGNPP

SEQ ID NO: 34164 - protein, 662 aa, Homo sapiens
  DOMAIN (170)..(216): kw TRANSCRIPTASE REVERSE II ORF2 domain identified by eMATRIX, accession number DM01354O, p-value=1.000e-40, raw score of 8.73
  DOMAIN (205)..(453): Reverse transcriptase domain identified by PFam, accession name rvt, E-value=7.7e-11, PFam score of 49.4
MKREEKFREKRVKRNEQSLQEIWDYEKRPSLPLIGVPESDGENGTKLENTLQDIIQDNFPNLGRQANIQIQEIQIMPQRYSSRRATPRHIIVRFTKVKMKEKILRAAREKEIQTTISEYYKHLYANKLENLEEMGKLLDTYTLPRQNQEEVESLNRPIAGSEIEAIINSLPTKKSPGPDGFTAKFYQRHKEELVPFLLKQFQSMEKEVILPNSFYEASIILIPKPGRDTTEKENFTPISLMIIDAKILNKILANRIQQHIKKLIHQDQVGFISGMQGWFNEHKSVNVIHHINRTKDRNHMIISVDAEKAFNKIQQPFMLKTLNKLGIQLTRDVKDPFKENYKPLLNEIKEDTNKWKNIPYSWIGRINIVEIAILPKVSLERERQHDQTHVQSQLEKLDLLEQEYNKLTTMQALAEKKMQELEAKLHEEEQERKRMQAKAAEHPRLCLYLAAIFSALKNLQDKIRRLELERIQAEESVKTLSRETIEYKKVLDEQIQERENSKNEESKHNQELTSQLLAAENKCNLLEKQLEYMRNMIKHAEMERTSVLEKQTPLLIPRQRGSRVDLQQTPTDLQLRVLTVRRKTNKQKGHPHQNPICMSPSSKTKEERSSSPTTERSWTENDFDELREEGFRRSNYSELKEELQTHGKEVKNLEKKIRRMAN

SEQ ID NO: 34165 - protein, 372 aa, Homo sapiens
  DOMAIN (307)..(327): kw TRANSCRIPTASE REVERSE II ORF2 domain identified by eMATRIX, accession number DM01354U, p-value=6.400e-18, raw score of 12.24
  DOMAIN (136)..(340): Reverse transcriptase domain identified by PFam, accession name rvt, E-value=1.4e-05, PFam score of 9.8
MGRRQSRKTGNSKNQSGSPPPKERSSSPAMEQSWTENDFNELRDEGFRRSNYSELKEEVQTHGKEVKNCEKKLDKWLTGIINAEKSLKDLMELKTKARELRDECTSLGNRCDQLEERVSVMEDEMNEMKREEKFREKRIKRNEQSLQEIWDYVKRPNLRLIGVRESDEENGTKLENTLQDIIEENFPNLARQANIQIQEIQRTPQRYSSRRATPRHIIVRFTKGEMKEKMLRAAREKVLEVLARAIRQEKEIKGIQLGKEEVKLSLFADDMIVYLENPIISAKNLLKLISNFSKVSGYKINVQKSQAFLYTNNGQTDSQIMSELPFTIASKRIKYLGIHLTRDVKDLFKENYKPLLNEIKEDTNKWKNIPRS

SEQ ID NO: 34166 - protein, 181 aa, Homo sapiens
  misc_feature (1)...(181): Xaa = X or * as defined in Table 2
ERSSSPAAEQSWMENDFDELREEGFRRSNFSELKEEVRTHGKEVKNLEKRLDKWLTRITNTQKSLKDLMELKTTARELHDECTSLTNQFDQLEERLISNFSKVSGYKINGKNHKHSYTPITDKQRAKSXVNSHSQLLQREYKYLGIQAYNGCEGPLQGKLQTTAQGNKRIQTNGRTFHAHG

SEQ ID NO: 34167 - protein, 329 aa, Homo sapiens
MGRNQIRKAENSKNQSTSSPPKDCSSSLAMKQSWMENDFDELTGAGFRRLVITDFSELKEDVQTHHKEAKNLEKRLEKWVTRINSEEKTLNYLMELKTMAQELCDACTSFSSQFDQVEERVSVIEDQINKMKLVEKFREKRVKRNEQSLQEIQNYVKRPNLHLIGVPESDGENQTKLENTLQDIIQENFPNLARQANIQIQEIQRTPQRCSSRRATPRHIIIRFTKVEMKEKMLRAAREKGRERSSSPAMEQSSTENDFDKLREEGFRRSNYSELKEEVRTHGKEDKNLEKRLDEWRTTTTNAEKSLKDLMELKTMAQELCDECTSLSS

SEQ ID NO: 34168 - protein, 530 aa, Homo sapiens; identical to SEQ ID NO: 31749

SEQ ID NO: 34169 - protein, 492 aa, Homo sapiens
  DOMAIN (386)..(395): PROTEIN AMINOPEPTIDASE PRECURSOR HYDROLASE SIGNA domain identified by eMATRIX, accession number PD01795A, p-value=6.667e- 09, raw score of 10.27
MGEKQSRKTGNSKNQSASPPPKERSSSPAREQSWTENDFDELREEGFRRSNYSELKEEVRTHGREVKNLEKKLDEWLTRITNAENSFTKLPHLAGTEQNFLLAKKIQTQWKKFGLDSAKLVHYDVLLSYPNETNANYISIVDEHETEIFKTSYLEPPPDGYENVTNIVPPYNAFSAQGMPEVKNAMLAGAIGIILYSDPADYFAPEVQPYPKGWNLPGTAAQRGNVLNLNGAGDPLTPGYPAKAGSRLSRQTGASDTGVANASSCRSRCLGLACDGGKRKWPCCATTGAAVSASILRPIPTGCTKGRHNSEKPPEPVKPEVKTTEKKELCELKPKFQEHIIQAPKPVEAIKRPRKVRMHVYNINKITRIYNVVGTIRGSVEPDRYVILGGHRDSWVFGAIDPTSGVAVLQEIARSFGKLMSKGWRPRRTIIFASWDAEEFGLLGSTEWAEAFLLPPGWRYRILALGHALGTMLGCRGQRQTQVLTRSPRISP

SEQ ID NO: 34170 - protein, 79 aa, Homo sapiens
MLACLARLGKFSWIISCRVFSNLVPFSPSLSGTPIRRRLGLSSFKDFSALVILVSHSSTFFSRFLTSLPLVRTFSFSSE

SEQ ID NO: 34171 - protein, 627 aa, Homo sapiens
MDEAGNHILSKLTQNRKPNTTCSHSDGPIFVTESRRVENLDPDRRPTFIGEMALQLRPQNFLPLGSKIVALMVTKCPPSRQYFKKEEYTYIIQTYPIPLEDNYQYHAGKLEHTHKIEYYLEDQATNLKRSKTFVGKQNKILRHEGSVMDTCRLCLFSSSSPTCLPVQHLISLERKVLPLLLKVLVDSQTSLQSTGGRLTPHTAGYPSETKLPEERSDSNICCSAIFAVLQPLLLIPRQTESGVDLQQTPTDLQLRVLTVRRKTNRKDIHTKTPSVRHHHQRPKVDKTTKMGKKQSRKTENSKNQSASPPPKERSSSPAMEQSWTENDFDELREEGFRRSNFSELKEEVRTHCKEAENLDKKLDEWLTRITNVEKALNDLMELKTMARELCDECTSFSSQFDQLEETVSVIEDQMNEIKREEKFREKRMKTNEQRLQEIWDYVKRPNLRLIGVPESDRENGTKLENTLQDIIQENFPNLARQANIQIQEIQRMPQRYSSRRATPRHITVTFTKVEMKENMSRAPREKGQVTHKGKPIRLTADLSAETLKARREWGPIFSILKEKNFQPRISYPAKLSFISDGEIKSFTDKQMLRDFVTTRPALQELLKEALNMERNNRYQPLQKHAKL

SEQ ID NO: 34172 - protein, 156 aa, Homo sapiens
MICDKEWHYYVINVEFPVVTLYMDGATYEPYLVTNDWPIHPSHIAMQLTVGACWQGGEVTKPQFAQFFHGSLASLTIRPGKMESQKVISCLQACKEGLDINSLESLGQGIKCYYNYKATWKPLRGKALDADIHHLIHYMQRCTHVPNGFISALAGY

SEQ ID NO: 34173 - protein, 224 aa, Homo sapiens
MSRYEQVLHHIRYRNWRPASLEARRFRIKCSELNGRYTSNEFNLEVSILHEDQVSDKEHVNHLIVQPPFLQSVHHPESRSSIQHSSVVPSIATVVIIISVCMLVFVVAMGVYRVRIAHQHFIQETEAAKESEMDWDDSALTITVNPMEVILMHGWEFWKHEGPGHGEDETEGEEEEEAEEEMSSSSGSDDSEEEEEEEGMGRGRHGQNGARQAQLEWDDSTLPY

SEQ ID NO: 34174 - protein, 136 aa, Homo sapiens
MAGYFSEIKLPEERSGSNICCSPISTVLQTPLLIPRQRGSRVDLQQTPTDLQLRVLTVRRKTNKQKGHPHQNPICMSPSSKTKEERSSSPTTERSWTENDFDELREEGFRRSNYSELKEELQTHGKEVKNLEKKIR

SEQ ID NO: 34175 - protein, 209 aa, Homo sapiens
  misc_feature (1)...(209): Xaa = X or * as defined in Table 2
GEVTKPQFAQFFHGSLASLTIRPGKMESQKVISCLQACKEGLDINSLESLGQGIKYHFNPSQSILVMEGDDIGNINRALQKVFYINSRQFPTAGVRRLKVSSKVQCFGEDVCISIPEVDAYVMVLQAIEPRITLRGTDHFWRPAAQFESARGVTLFPDIKIVSTFAKTEAPGAXKPQVQNSEFSLXAFENPVSCQISNSGHVPNFQFRV

SEQ ID NO: 34176 - protein, 1333 aa, Homo sapiens
  DOMAIN (227)..(268): kw TRANSCRIPTASE REVERSE II ORF2 domain identified by eMATRIX, accession number DM01354I, p-value=1.000e-40, raw score of 15.55
  DOMAIN (473)..(748): Reverse transcriptase domain identified by PFam, accession name rvt, E-value=1.1e-83, PFam score of 291.4
AYLKVTGRREPSWKTLCRILSRRTSPNLARQANIQIQEIQRTPQRYSLRGATPRHLIVRFNKVEMKEKMLRAAREKGRVTHKGKPIRLTADLLAETLKARREWGPIFNILKEKNFQPRISYPAKISFIDRSTRQKVNKDTQELNSALHQADLIDIYRTLHPKSTEYTFFSAPHHTYSKIDHIVGSKALLSKCKRTEIITNCLSDHSAIKLELRIKKLTRNHSTTWKLNNLLLNDYWVHNEMKAEIKMFFETNENKDKTYQNLWDTFKTVCRGKFIALNAHKRKQERSKIDTLTSQLKGLEKQEQTHSKASRRQEITKIRAELKEIETQKTLQKINESRSWFFEKINKIDRPLARLIKNKREENQIDAIKNDKGDITTDPTEIQTAISEYYKHLYANKLENLEEMDKFLDTYTLPRLNQEEVESLNRPITGSEIEAIINSLPTKKSPGPDGFMAEFYQRDKEELVPFLLKLFQSIEKEGILPNSFYEASIMLIPKPGRDTTKKENFRPISLMNIDAKILNKILANRIQQHIKKLIHHDQVGFIPGMQGWFNLRKSLNVIQHINRTNDKNHMIISIDAEKAFDKIQQPFMLKTLNKLGIDGMYLKIIRAIYDRPTANIILNGQKLEAFPLKTGTRQGCPLSPLLFNIVLEVLARAIRQEKEIKGIQLGKEEVKLSLFADDMTVYLENAIVSAPNLLKLIGNFSKVSGYKINVQKSQAFLYTNNRQTESQIMSELPFRIASKRIKYLGIQLTRDVKDLFKQNYKPLLNEIKEDTNKWKNIPCSWVGRINIVKMAILPKVIYRFNAIPIKLPMTFFTELEKTTLKFIWNQKRARIAKSILSQKNKAGGITLPDFKLYYKATVTKTAWYWYQNRDIDEWNRTEPSEIMPHIYNYLIFDKPEKNKQWGKDSLFNKWCWENWLAICRKLKLDPFLTPYTKINSRWIKDLNVRPKTIKTLEENLDITIQDIGVGKDFMSKTPKAMATKDKIDKWDLIKLKSFCTAKETTIRVNRQPTTWEKIFATYSSDKGLISRIYNELKQIYKKKTNNPIKKWVKDMNRHFSREDIYAAKKHMKKCSSSLAIREMQIKTTMRFYWDLIMLIMMVGNLVIIPVGITFFTEQTTTPWIIFNVASDTVFLLDLIMNFRTGTVNEDSSEIILDPKVIKMNYLKSWFVVDFISSIPVDYIFLIVEKGMDSEVYKTARALRIVRFTKILSLLRLLRLSRLIRYIHQWEEERSSSPATEQSWTENDFDKLREGFRRSNYSELKEEVRTLGKEVKNLEKKLDEWLTRIINAEKSLKDLMELKTMARELHDQCTSLSSRFDELEERVSVMEDQMNEMK

SEQ ID NO: 34177 - protein, 306 aa, Homo sapiens
  misc_feature (1)...(306): Xaa = X or * as defined in Table 2
MYAQPPNCKREKASGDVSLYWWKLAKGCLQMEVSEGAPNSASTPTGNTVSQELNRPLPQPPYPRRFSWVCRSSLQAXVAESATKTSAFRAPNSFCRLQPRPCCRASPASPATSCTCPGSLAWARPAPASHWARPHRPPPCPTSPRPPRGRDAPERXAHGPPVPDARXGALAPQATGGGQPPGAQPHHARAGPGQPRTPLQXGLCARPGEPQLRVTPHGPQAGGHTQRLPPMGKPGVSGGVCPHSDFPQPMPTVEMTGPRSGVQRPTXDGTGWLAPDAESLVSFEFSSPTXVLXQQWKXRSGVQRPT

SEQ ID NO: 34178 - protein, 49 aa, Homo sapiens
ESNVSFLAENGNNSPLPKYATSPKPNNSYMFKREPPEGCERVKVFEECS

SEQ ID NO: 34179 - protein, 301 aa, Homo sapiens
  misc_feature (1)...(301): Xaa = X or * as defined in Table 2
GGRQRGKDTGHMAKQEQEREVGGATHLXTTRFRSCSKSALIPVIPITKSTGSRFRNSVEGLNQEIEIIIKETGEKEEQLIPQDIPDGHRAPPPLVQRSSSTRSIDTQTPGGADRGSNNSSRSQSVSPTSFLTISNEGSEESPCSADDLLVDPRDKENGNNSPLPKYATSPKPNNSYMFKREPPEGCERVKVFEECSPKQLHEIPAFYCPDKNKVNFIPKSGSAFCLVSILKPLLPTPDLTLKGSGHSLTVTTGMTTTLLQPIAVASLSTNTSKTESLEEQVQSCHQLLYSHHQNQLRKLKD

SEQ ID NO: 34180 - protein, 88 aa, Homo sapiens
  misc_feature (1)...(88): Xaa = X or * as defined in Table 2
LWKRFNSWTSLRHPYQPYQAEQIAPQTCGSQSDGGLPSSSGPAPLHHAGLGYGTEGSPGARRRVEGQDPXVLEQAAGPTPPRYLVRPR

SEQ ID NO: 34181 - protein, 181 aa, Homo sapiens
  misc_feature (1)...(181): Xaa = X or * as defined in Table 2
IPGSWRQKMPVPPAAPAHAQGRPGALQSPGSSTPAQPGSRWEVGGPAAPWGSLRHPXQPYQAEQIAPQTCGLQSDGGLPSSSGPAPLHHGGLGYGTGGSPGALEEGGRPRSLGPGAGSRAHAAEVSFPSGPPSRGLTGSGFCACSEERAGFPRELMVIKNTVTPTREATTLILTKAPAILP

SEQ ID NO: 34182 - protein, 180 aa, Homo sapiens
  misc_feature (1)...(180): Xaa = X or * as defined in Table 2
FFQPIFWGKDPQSGTPPHPRPGPAPSGPEPSISMVTRRWLRAPNCSDRRGEGPRTEADRHGSCCRFRSRAGTAVHSCRRRHPRAAGLPSSLCAEAGPRETXXLEGGCREGAEPRPXRPGSGAHAHTDPERAHRSGARTQHPERAHRSGARTQIRSAHTDPERAHRSGARHRSGARRTLPL

SEQ ID NO: 34183 - protein, 361 aa, Homo sapiens
  misc_feature (1)...(361): Xaa = X or * as defined in Table 2
GRPPGVPPATAPRAAPGAGDGEAGTPAPGDHPEPVCRIQPGXWGTXGWGASQHWGGHPALALAGRRPSRGLAGASGRSSEEPGVATQRLWESMERSDEENLKEECSSTESTQQEVLALEEERAQVLGHVEQLKVRVKELEQQLQESAREAEMERALLQGEREAERALLQKEQKAVDQLQEKLVALETGIQKERDKDLQRQCCGMMGDRAKASPSWTSTVILKFPLIKNCLNPKDISLMAKELWSLRTMDALNRNQIGPGCQTQTMVQKGPLDLIETGKGLKVQTDKPHLVSLGSGRLSTAITLLPLEEDCLPSLVDDLVPRLGLKISLETRRRGQLMLCTPKFENQWPTTDKMPETSTGSH

SEQ ID NO: 34184 - protein, 133 aa, Homo sapiens
  misc_feature (1)...(133): Xaa = X or * as defined in Table 2
DHGRSQXEPNRPWMPDPDHGAERTLGPDRDRQRAEMQTDKPHLVSLGSGRLSTAITLLPLEEGRTVIGSAARDISLQGPGLAPEHCYIENLRGTLTLYPCGNACTIDGLPVRQPTRLTQGLSMSLPSQLIQET

SEQ ID NO: 34185 - protein, 587 aa, Homo sapiens
  DOMAIN (160)..(179): TYPE III EGF-LIKE SIGNATURE domain identified by eMATRIX, accession number PR00011B, p-value=8.962e-15, raw score of 13.08
  DOMAIN (35)..(513): EGF-like domain identified by PFam, accession name EGF, E- value=1.6e-17, PFam score of 71.6
  misc_feature (1)...(587): Xaa = X or * as defined in Table 2
MALLPTVLCLWAQAQVGVQRHNHIFWNEKEHGHGKSGSCHNGASCSAEDGACHCTPGWTGLFCTQRKPHLLASQPLRIPCCGLLATVGIVQTSREGGMQAAPGLVVPDSCPTRTEELCRGSSRPDWIQGIDKPKVLQGCPAAFFGKDCGRVCQCQNGASCDHISGKCTCRTGFTGQHCEQRCAPGTFGYGCQQLCECMNNSTCDHVTGTCYCSPGFKGIRCDQGIMLLLFLIVCAAGPICLASAAAEREGPRPGSPCLLHTCHERXPAPTTPSQDLTDHYLRFSMPIMVLTCLQGAFPGSPGRPGXTWAPLCGMNVNRPGTHELGCDSDHWGPHCSNRCQCQNGALCNPITGACVCAAGFRGWRCEELCAPGTHGKGCQLPCQCRHGASCDPRAGECLCAPGYTGVYCHPVTGACTCQPGWSGHHCNESCPVGYYGDGCQLPCTCQNGADCHSITGGCTCAPGFMGEVCAVSCAAGTYGPNCSSICSCNNGGTCSPIDGSCTCKEGNVPSLPSPSLTYEHIPQVVLPAEGSQDGTFGLNCSEHCDCSHADGCDPVTGHCCCLAGWTDIQEGFLEKEGPKRTLKDMGC

SEQ ID NO: 34186 - protein, 804 aa, Homo sapiens
  DOMAIN (748)..(782): PROTEIN TRANSCRIPTION REGULATION NUCLEAR domain identified by eMATRIX, accession number PD02411, p-value=4.780e-17, raw score of 21.89
  DOMAIN (658)..(787): SET domain identified by PFam, accession name SET, E-value= 5.7e-51, PFam score of 182.8
EFESSSESSPSSSEDEEEVVAREEEEEEEEEEMVAEESMASAGPEDFEQDGEEAALAPGAPAVDSLGMEEEVDIETEAVAPEERPSMLDEPPLPVGVEEPADSREPPEEPGLSQEGAMLLSPEPPAKEVEARPPLSPERAPEHDLEVEPEPPMMLPLPLQPPLPPPRPPRPPSPPPEPETTDASHPSVPPEPLAEDHPPHTPGLCGSLAKSQSTETVPATPGGEPPLSGGSSGLSLSSPQVPGSPFSYPAPSPSLSSGGLPRTPGRDFSFTPTFSEPSGPLLLPVCPLPTGRRDERSGPLASPVLLETGLPLPLPLPLPLPLALPAVLRAQARAPTPLPPLLPAPLASCPPPMKRKPGRPRRSPPSMLSLDGPLVRPPAGAALGRELLLLPGQPQTPVFPSTHDPRTVTLDFRNAGIPAPPPPLPPQPPPPPPPPPVEPTKLPFKELDNQWPSEAIPPGPRGRDEVTEEYMELAKSRGPWRRPPKKRHEDLVPPAGSPELSPPQPLFRPRSEFEEMTILYDIWNGGIDEEDIRFLCVTYERLLQQDNGMDWLNDTLWVYHPSTSLSSAKKKKRDDGIREHVTGCARSEGFYTIDKKDKLRYLNSSRASTDEPPADTQGMSIPAQPHASTRAGSERRSEQRRLLSSFTGSCDSDLLKFNQLKFRKKKLKFCKSHIHDWGLFAMEPIAADEMVIEYVGQNIRQVIADMREKRYEDEGIGSSYMFRVDHDTIIDATKCGNFARFINHSCNPNCYAKVITVESQKKIVIYSKQHINVNEEITYDYKFPIEDVKIPCLCGSENCRGTLN

SEQ ID NO: 34187 - protein, 284 aa, Homo sapiens
  misc_feature (1)...(284): Xaa = X or * as defined in Table 2
DEEEVVAREEEEEEEEEEMVPEESMASAGPEDFEQDGEEAALARGAPAVDSLGMEEEVDIETEPVAHEKRPSMLDEPPLPVGVEEPADSREPPEEPGLSQEGAMLLSPEPPAKGLAHPNGSQKVIFRVPLRVIHGPKAVELQVFPGLHKQPTNQPKTEPCDPHSWFKSCYHLLFIPVGISRPPHNPTITATIFASTASVLWPVLDTCMSSNSGYFKAVLESYSSKVLSVTQYGNPRATGSAGLRGRPGSPGSSGSRGPAWPXPQAAPRCPPSSGRPGPTSQSPS

SEQ ID NO: 34188 - protein, 665 aa, Homo sapiens
  DOMAIN (605)..(645): Cyclophilin-type peptidyl-prolyl cis-trans isomerase signatur domain identified by eMATRIX, accession number BL00170B, p-value= 1.000e-24, raw score of 20.97
  DOMAIN (586)..(648): Cyclophilin type peptidyl-prolyl cis-tr domain identified by PFam, accession name pro_isomerase, E-value=7.8e-20, PFam score of 71.9
  misc_feature (1)...(665): Xaa = X or * as defined in Table 2
AQGSVVPGLFWAFLQLEVNCLLESPIIQGKFHFRLERISVVEPQERKRLSFRKSEIXPXKXSLVKKLXERLKTRKQMQLANRLRRYGYSVVESXFPNLKVSSSVSTTPTTTYIPMTHKAIFSSYFLWDGRSAFLTIYKMMSSHPQEEEEEEEEEGGEGEERKRRKKEEERGKRRKRRRRMKXRRRRTRKRRKRRKMKXRRRRRRRNMRKKRKEGKNMKKKMREEIKRQNALYEIEMRKKLEKKREEMHESRRRFLAPLFSSPTANCSTSLVPRLRLASLPAALPSNRVVRVTTPPAGVRGAWRHSHFSRSRSIMDTSSEMLVRFGRRCGRAKESTGRDWNSLKSSEEDRKMWESLELPRDLLNAFDQNADSDMDNKMQAEMVSDGDEELSGNWSKGDSCYVLAKRLASFYLCPRDLWNFEKDDLGYLAEEISKQQSIQEAQRSRRKKWFYGPGPGSLCCVQPIDLVPCVPAAPAMAERGQCRAHAVASEGGSPKPWQLPHGVEPVGAQKSRIEVWEPPPRFQKMYGNAWMSRQKFAAEAGPHGEPLLGQCRRELWGRSSHVESLMGHYLVELLSIGAMGIKVQRPRCFFDIAINNQPGEKGTGKSTQKPLHYKSCLFHRVVKDFMVQGGDFSEGNGRGGESIYGGFFEGPAMGPNATNNFTKLAG

SEQ ID NO: 34189 - protein, 344 aa, Homo sapiens
  misc_feature (1)...(344): Xaa = X or * as defined in Table 2
LVLSKGKEHLLGIKEHEEEEERRKKYEXKDAEEIKRQNALYEIEMRIKLEKKREEMHESRRRFLEHMQDKHIIKAVEQQQRQRKKMKRXENSSKQKKRLIQMGKEKEAETHRLMEKRRERIHNFLSELLKEKLDNEDMIIARDIAEAEAEWEKREREKDEKNQAELKTIAEYRAIVMKNKEEEERQRKIEAKEQLLAVMKADQIFWEHEKEKKCKADKEHQEVQDAHIQQMAKNKFNAKQAKQAELDYCRLTEALVAEKEKEFQDYAREVIELESETPNKYIYPLVKAVQEGPGGGRGPVFVDRGGLRPSYQANDVTGVQLPFYNSQGPKYNFQKSKRRLGFTW

SEQ ID NO: 34190 - protein, 740 aa, Homo sapiens
  DOMAIN (124)..(141): Adenylate kinase proteins domain identified by eMATRIX, accession number BL00113A, p-value=8.475e-10, raw score of 12.74
  misc_feature (1)...(740): Xaa = X or * as defined in Table 2
WVHQPAGSXGEKPTXISAPPWPEAPTSELWVLTPPEAVQEAAARVGQEVPAAPRGPLPSSATGAKSLGQGSPTPSTRSMSLQSCAGPQHPXTLRRGPLWGTSRWKMVLTXASRTSSTPGLTQGPRVTVLLGKAGMGKTTLAHRLCQKWAEGHLNCFQALFLFEFRQLNLITRFLTPSELLFDLYLSPESDHDTVFQYLEKNADQVLLIFDGLDEALQPMGPDGPGPVLTLFSHLCNGTLLPGCRVMATSRPGKLPACLPAEAAMVHMLGFDGPRVEEYVNHFFSAQPSREGALVELQTNGRLRSLCAVPALCQVACLCLHHLLPDHAPGQSVALLPNMYSALYADGARPQPPWALAHLVLYWTWGRWPXGAWRQGRLSSMQKILLHPXXLLGPLTACXLPSASAQALGTSETGYAFTHLSLQEFLAALHLMASPKVNKDTLTQYVTLHSRWVQRTKARLGLSDHLPTFLAGLASCTCRPFLSHLAQGNEDCVGAKQAAVVQVLKKLATRKLTGPKVVELCHCVDETQEPELASLTAQSLPYQLPFHNFPLTCTDLATLTNILEHREAPIHLDFDGCPLEPHCPEALVGCGQIENLSFKSRKCGDAFAEALSRSLPTMGRLQMLGLAGSKITARGISHLVKALPLCPQLKEVSFRDNQLSDQVVLNIVEVLPHLPRLRKLEQGRSGAPGVGDSTPDTFATILQPEQQQHLRVNPTLLGKGGSHVSYRQDASGQGKGLFLDS

SEQ ID NO: 34191 - protein, 928 aa, Homo sapiens
  DOMAIN (8)..(53): kw TRANSCRIPTASE REVERSE II ORF2 domain identified by eMATRIX, accession number DM01354N, p-value=1.000e-40, raw score of 13.17
  DOMAIN (23)..(261): Reverse transcriptase domain identified by PFam, accession name rvt, E-value=6.7e-36, PFam score of 132.7
MQTTIREYYKQLYANKLENLEEMDKFLDTYTLPRLNQEEVESLNRPITGSEIVAIINSLPTKKSPAPDGFTTKFYQRTEDKNHMIISIDAEKTFDKIQQLMLKTLNKLGIDGMYLKIIRAIYDKPTANIILNGQILEAFSLKTGTRQGCPLSPLLFNIVLEVLARAIRQEKEIKGVQLGKEEVKLSLFADDMITYLENPIVSAQNLLKLISNFSKVSGYKINVQKSQAFLYTNNRETENQIMSELPFTIASKRIQYLGIQLTRDVKDLFKENYKPLLNEIKEDTNKWNNIPCSWIGRINIMKMAILPKVIYRFNDIPIKLPLTFFTELEKTILKFIWKQKRARIAKSILSKKNKAGGIMVPDFKLYYKTTVTKTAWYWYQNRDINQWNRTEPSEIMPHICNYLIFDKPDKNKKWGKDSLFNKWCWENWLATCRKLKLDPFFTPYTKINSRWIKDLNVTSKTIKTLEENLGNTIEDIGMGKDFMFKTPKAMATKAKIDKWDLIKLKSFCTAKETTIRVNRQPTEWEKIFATYSSDKGLISRIYNELKQIYKKKTKNPIKKWAKDMNRHFSKEDIYAAKGHVKKCSSSMAIREMQIKPTMRYHLTPVRMAIIKKSGNHRCWRGCGEMGTFLHCWWDCKLVQPLWKSVWRFLKDLELEIPFDPAIPLLSIYPKDYKSCCYKDTCTRSPGRQYLLELQAQWYCFCVNSPAECIFLLSLETWKHLDSRIFATLRSRDPLMSPHHQGLEPETELCGISAEQLLRHAETQELYIPWPRYPQQGGSHSSLQALESPSSPDEEGSPKLSTAALPECVQIASLNETPSIPPHWVNNEIKAQIKKFFETNESKDTMCQNLQDAAKAVLRGKFIPLNAHIKKLERSEVNNLTLQQKELENQEQTNSKASRRQEITKIRAELKEMGTHKPLQKSMNVGAVF

SEQ ID NO: 34192 - protein, 329 aa, Homo sapiens
  DOMAIN (188)..(243): kw TRANSCRIPTASE REVERSE II ORF2 domain identified by eMATRIX, accession number DM01354Q, p-value=1.000e-40, raw score of 9.23
  DOMAIN (156)..(322): Reverse transcriptase domain identified by PFam, accession name rvt, E-value=0.00027, PFam score of -8.7
  misc_feature (1)...(329): Xaa = X or * as defined in Table 2
YLSKGLKEVREGSLQIPGEIIPGRKKLMQMLSEKTLXSQHHYXKGFLQRQIHQKMIAHLVEQRNKDCMFLQIMPAATSXTEIQATIRDYYKHLYANELENPEEMDKFLDTYTLQRLNQEEVESLNRPITGSEVEAIINSLPTKKSPGPDGLTAEFYQRYKEELPKPCRDTTKKENFRPISLMNIDAKILNKILANRIQQHIKKLIHHDQVGFIPGMQGWFNICKSINVIQHINRTKDKNHVIFSIDAEKAFDKIQQPFMLKTLNKLGIKYPGIQLTRDVKDLFKENYKPLLSKIKEDTKKWKTILCSWVGRINIVKMAILPKAPLPLPP

SEQ ID NO: 34193 - protein, 628 aa, Homo sapiens
  DOMAIN (272)..(317): kw TRANSCRIPTASE REVERSE II ORF2 domain identified by eMATRIX, accession number DM01354N, p-value=1.000e-40, raw score of 13.17
  DOMAIN (339)..(556): Reverse transcriptase domain identified by PFam, accession name rvt, E-value=7.5e-37, PFam score of 135.9
MGDFNTPLSTLDRSTRQKVNKDTQELNSALHQADLIDIYRTLHPKSTEYTFFAAPHHTYSKIDHILGSKALLSKCKITEIITNYLSDHSVIKLELRIKNLTQNRSTTWKLNNLLLNDYWIHNEMNAEIKMFFETNENKDTTYQNLWDTFKAVCRGKFIALNAHKRKQERSKIDTLTSQLKELEKQEQTHSKASRRQEITKIRTELKEIETQKTLQKINESRSWFFERINKSDRMLARLIKKKREKNQIDTIKNDKGDITTDPTEIQTTIREYYKHLYANKLENLEEMDKFLDTYTLPRLNQEEVESLNRPITGAEIVAIINSLPTKKSPGPDGFTAEFYQRYKEELHHSDTKAGQRHNQKKNFRPISLMNIDAKILNKILAKRIQQHIKKLIHHDQVGFIPGMQVWFNIHKSINVIQHINRAKDKNHMIISIDAEKAFDKIQQPFMLKTLNKLVLEVLARAIRQEKEIKGIQLGKEEVKLSLFADDMIVYLENPIVSAQNLLKLISNFSKVSGYKINVQKSQAFLYTNNRQTESQIMSELPFTIASKRIKYLGIQLTRDVKDLFKENYKPLLKEIKEDTNKWKNIPCSWVGRINIVKMAILAQGNLQIQCHPHQATNDFLHRIGKKLL

SEQ ID NO: 34194 - protein, 349 aa, Homo sapiens
  DOMAIN (4)..(51): kw TRANSCRIPTASE REVERSE II ORF2 domain identified by eMATRIX, accession number DM01354V, p-value=1.000e-40, raw score of 12.97
MLKTLNKLGIKYLGIQLTRDVKDLFKENYKPLLKEIKEDTNKWNNIPCSWVGRINIVKTAILPKVIYRFNAIPIKLPMPFFTELEKTTLKFIWNQKRACITNSILSQKNKAGGITLPDFKLYYKATVTKTAWYWYQNRNIDQWNRTEPSEITPHIYNYVIFDKPDKNKKWGKDSLFNKWCWENWLAICRKLKLDPFLTPYTKINSRWIKDLNVRPKTIKTLEENPGSTIQDIGMGKDFMSKTPKAMATKDKIDKWDLIKLKSFCTAKETTIRVNRQPTEWEKIFATYSSDKGLIISRTYNELKQIYKKETNNSIKKWVKDMNRHFSKEDIYAAKKHMKNFSSSLAIREM

SEQ ID NO: 34195 - protein, 59 aa, Homo sapiens
  misc_feature (1)...(59): Xaa = X or * as defined in Table 2
XPPRIPCPLLAAAADPWALRWSRACCPLTPSEPELPASWDSAVSSLPPVQSNCLQENKX

SEQ ID NO: 34196 - protein, 325 aa, Homo sapiens
  misc_feature (1)...(325): Xaa = X or * as defined in Table 2
LFTDDLCQPVEATSGQAMVQSRGATTHGGGRGGSCKLLGDRGQGSTSQVGRWGSSCHPPTGGPARSPCWPTARKPLRGVLQGASLGSTASMLGAASGTPRPPPSWLVSVPSPRAPCWGVPGAGEQGGPETQPPGAREYPQPAGREGRPQILRFPKSSSSQCLVEFCSLASSCFALEAMKTRRSPSSSGSSGSDGSQRTTRSGPAQRPRVSGSSEQGDGMRGGSSGGMKGRRVPKREPRTEAASSSTAXRQPPPPPSPLPHARRHFRFRPCCGPARDAAPSRAQTEAPPPLRTQSALSWPLCSRTDGKLSRGQSRDGSRAPTPGVL

SEQ ID NO: 34197 - protein, 640 aa, Homo sapiens
  misc_feature (1)...(640): Xaa = X or * as defined in Table 2
TPVSDEEEGSLHHTTWRNLRIGVRIACPAGENAQSSESPVRACQPGTKTQYGLNQAWSPGVRRDLIQGSAERPARYPAPGEMGVGAFIPLGHDKRRAASQHLHVSGREGPEALGSRGSALRKQVPAWLPHSLRTCPVDRNPQAPCARTGLMVETPHHEQWVRGEHYRYKFSRPGGRHAAEGKWWVRKRIGAYFPPLSLEELRPYFRDPHTLMLGQRVTERELDGEPRGPVTVEGRSATTSGYPTKVTKIGGPLDPAGGLEGPLHGALGSDPLEVSDCPGPHLSRKVWENGSFGASDQQHTRYTTDGSSWPTVAEKKAPSSKQYHSSMETXRXTGHSNHPRNRPTCGQVPPNENNTRNRPTHTARYLPTENNPRNHSTHATRYLLTTTTTEIIPHAARYRPTRTTRYLPTRTTRYLPTKMTREIVPHAATYLPMRTTREIIPHTATYASNENNQYLPMRTTSQVPSNEDNPGCLPTRTTRHLPTRTTRYLPTRMTQEIVPHVAWYLPTKALRPFNGKRTAFSANAAKRSEAPTLRXALRTXCPVNPPDTEGTGPAMPSLECPEQGNPQRRWAGRRRSSGAQDAGQGTRFTPSLWRAWGWSRLRPRLSAPGCWLTRKCRTEPPVVPQALMMAAVTDMQTLIH

SEQ ID NO: 34198 - protein, 54 aa, Homo sapiens
TPFLLSGLVQPINQTLIISVSFQCSPSYRAAFGSKIYLDKTFSRGSYYTKEMNS

SEQ ID NO: 34199 - protein, 254 aa, Homo sapiens
  misc_feature (1)...(254): Xaa = X or * as defined in Table 2
GNEVKMPARETTPHRVPTGAQPSEAGEKGHHPPDRRMVDPLTLALCTWKSCRHSMPDCKAAGREAVPCKVTGAERPRPRAPTSAXPSGKLEGLSLWCTQSCSCMLHRAGVISVFFTMEDVAPTRGLLHXRAAIGIISPITISVTKTSNNCRWCRVGGCANXLRGALEAGGWLQNQKGRDAFNKRLRGGMDKPGAGGTCGSGRRNRPLRDRSVPEVKGGTGTGXKTGSGGLKRKYVGDGTTASFESLRVLIKWPL

SEQ ID NO: 34200 - protein, 305 aa, Homo sapiens
  misc_feature (1)...(305): Xaa = X or * as defined in Table 2
GGADSGERLGPHALGLGAGSGGGRGRYGPSRSRPSGRAADPGGVRPFPVAPRGARARRGGRVVPAFXRPAGAAXAAQHHVVVSEPAAAARGGGGPGGQGSRAWRGVRRLPGGAGGLAGPPGRVPVLGPPGSGPAAQRPPGRGQGAGQEPPPAGDAAAAPSSGSASCRGPGAAGPRALCPGPAPPARRGPRAGLGRPAADRGAPAAAPVRAEPHGLGGAAGARPPHRLRGGAGHSGALVVLLTLWITGGGGDGDRASPGSPGPLATGAGLVGNKAAPSXRAARAPGGLGCRWARFSLTSQCPCPQL

SEQ ID NO: 34201 - protein, 160 aa, Homo sapiens
  misc_feature (1)...(160): Xaa = X or * as defined in Table 2
TPWRRKSTEXPTLGVRRPVPRNAMPHHCSFFTGRTVPSMATPGYNEGWDKFRMKCHLCVNYIEMQTDPANCDYVIVSGAQRKEERWDMADNEQVLTTEHEKKQKLETDAMFRLEHGEADRSTLKKALAHTDHIQEAQSAWKDDFALNSMLRRRFRVPSKP

SEQ ID NO: 34202 - protein, 176 aa, Homo sapiens
  DOMAIN (35)..(61): Elongation factor 1 gamma chain profile domain identified by eMATRIX, accession number BL50040B, p-value=5.000e-12, raw score of 13.65
  DOMAIN (29)..(123): Glutathione S-transferases domain identified by PFam, accession name GST, E-value=5.9e-08, PFam score of 29.5
  misc_feature (1)...(176): Xaa = X or * as defined in Table 2
GRKRSKRMEKGERGEPYSLSLRNHQGSWEPEHMSXKPEGGVLAFKGDDGFSVWESNAIATYVSNEELWGSAPEAAAQAVQWVNFADDSQYQGVPTLGKMHHDKQATQDAGEEVQPQFQAVLGEMKLCENMAHFDAKIFAESQPKKDTPRKEKGSREEKQKPQAERKEEKKVATPAP

SEQ ID NO: 34203 - protein, 438 aa, Homo sapiens
  DOMAIN (126)..(164): 7 kw 103-1A LACTOYLGLUTATHIONE GLUTATHIONE LYASE domain identified by eMATRIX, accession number DM01181C, p-value=6.055e- 12, raw score of 17.27
  DOMAIN (282)..(391): Elongation factor 1 gamma, conserved doma domain identified by PFam, accession name EF1G_domain, E-value=1.5e-77, PFam score of 271.1
TMAAGTLYTYPENWRAFKALIAAQYSGAQVRVLSAPPHFHFGQTNRTPEFLRKFPAGKVPAFEGDDGFCVFESNAIAYYVSNEELRGSTPEAAAQVVQWVSFADSDIVPPASTWVFPTLGIMHHNKQATENAKEEVRRILGLLDAYLKTRTFLVGERVTLADITVVCTLLWLYKQVLEPSFRQAFPNTTRWFLTCINQPQFRAVLGEVKLCEKMAQFDAKKFAETQPKKGTPRKEKGSREEKQKPQAERKEEKKAAAPAPEEEMDECEQALAAEPKAKDPFAHLPKSTFVLDEFKRKYSNEDTLSVALPYFWEHFDKDGWSLWYSEYRFPEELTQPFMSCNLITGMLQRLDKLRKNAFASVILFGTNNSSSISGVWVFRGQELAFPLSPDWQVDYESYTWRKLDPGREETQTLVREYFSWEGAFQHVGKAFNHGKIFK

SEQ ID NO: 34204 - protein, 54 aa, Homo sapiens
  misc_feature (1)...(54): Xaa = X or * as defined in Table 2
MXQSWLTATSASWVQAILLPQPPKQLGLQACTTTPANLCIFIRDGVSPCWPGWS

SEQ ID NO: 34205 - protein, 48 aa, Homo sapiens
SLAAPKSAPCFTHSAICPGAPSMSRHPERSVFLLFQAPVQEPPAPGPP

SEQ ID NO: 34206 - protein, 296 aa, Homo sapiens
  misc_feature (1)...(296): Xaa = X or * as defined in Table 2
CPPWELILDQFRKSLGISPANTGPLCPAPPSCMYPPSPQMPAKAPPDHPPEGRPGTTPEPFPRVTCVTEPVGKGLSRDSQXETRGDLQEXSLAAPKSAPCFTHSAICPGAPSMSRHPERSVFLLFQAPVQEPPAPGPPXWVLREPDFGTGVFPEPSWXKAADFEPLGLCPGRSLSAQCPSWWPPTSSDPGXALLKSGTGTPTVAPRQPAPAAPRFQRPPQPRGLASTCPAGPQQKGSDPPGRSAGSEGSVSGKSLKPCLSSPLIPPPQSSTQKKASVAKFVEFSPYTKQKSQLSVP

SEQ ID NO: 34207 - protein, 129 aa, Homo sapiens
  misc_feature (1)...(129): Xaa = X or * as defined in Table 2
MAKAVEKPESTLEATKSKESVMSRVEWIGTAHMWVDDETGDNASKTQQTLEPAELATKYANFSEGACKPGYASALMTAIFPRFCKPIRLSPXPRHLAHWCKKWAPKILGSSAPVALQGAAPVAALMGWR

SEQ ID NO: 34208 - protein, 115 aa, Homo sapiens
  DOMAIN (25)..(72): kw TRANSCRIPTASE REVERSE II ORF2 domain identified by eMATRIX, accession number DM01354V, p-value=1.000e-40, raw score of 12.97
QKSQAFLYTSNRQTESQIMSELPFTIASNRIKYLGIQLTRDVKDLFKENYKPLVKEIKEDTNKWKNIPCSWLGRINIVKMAILPKVRQKPYKPEESGGQYSTFLKKRIFNPEFHI

SEQ ID NO: 34209 - protein, 75 aa, Homo sapiens
  DOMAIN (28)..(75): kw TRANSCRIPTASE REVERSE II ORF2 domain identified by eMATRIX, accession number DM01354V, p-value=9.873e-21, raw score of 12.97
  misc_feature (1)...(75): Xaa = X or * as defined in Table 2
VYLLIVLAVLYTNNRQTESQIMSELPFTIASKRIKYLGIQLTRDVKDLFKDNYIPLLKEIXEDTSKWKSIPCSWI

SEQ ID NO: 34210 - protein, 92 aa, Homo sapiens
VIQLPIPSSPRSCEGGSSLGKRSVALPGIPLGKMRQLKGKPKKETSKDKKERKQAMQEARQQITTVVLPTLAVVVLLIVVFVYVATRPTITE

SEQ ID NO: 34211 - protein, 745 aa, Homo sapiens
  DOMAIN (220)..(265): kw TRANSCRIPTASE REVERSE II ORF2 domain identified by eMATRIX, accession number DM01354N, p-value=1.000e-40, raw score of 13.17
  DOMAIN (235)..(483): Reverse transcriptase domain identified by PFam, accession name rvt, E-value=6e-44, PFam score of 159.4
MGKKQNRKTENSKTQSASPPPKEHSSSPATEQSWMENDFDELREEGFRRSNYSELQEDIQTKGKEVENFEKNLEECITRITNREKCLKELMELKTKARELREECRSLRSRCDQLEERVSAMEDEMNEMKPNLRLIGVPESDVENGTKLENTLQDIIQENFPNLARKANIQIQEIQRTPQRYSLRRATPRHIIARFTKVEMKEKMLRAAREKEIQTTIREYYKHLYANKLENLEEMDKFLDTYTLPRLNQEKVESLNRPITGAEIVAIINSLPTKKGPGPDGFTAEFYQRYKEELYINRAKDKNHMIISIDAEKAFDKIQQPFMLKTLNKLGIDGTYFKIIRAIYDKPTANIILNGQKLEAFPLKTGTRQGYPLSPLLFNIVLEVLARAIRQEKEIKGIQLGKEEVRLSLFADDMIVYLENPIVSARNLLKLISNFSKVSGYKINVQKSQAFLYTNNRQTESQIMSELPFTIASKRIKYLGIQLTRDVKDLFKENYKPLLKEIKEDTNKWKNIPCSWVGRINIVKMAILPKVIYRFNAIPIKLPMPFFTELEKTTLKFIWNQKRARITKSILSQKNKAGGITLPDFKLYYKATVTKTAWYWYQNRDIDQWNRTEPSEITPHIYNYLIFDKPEKNKQWGKDSLFNKWCWENWLAICRKLKLDPFLTPYTKMNSRWIKDLNVRPKTIKTLEENLGITIQDIGMGKDFMSKTPKAMATKAKIDKWDLIKLKSFCTAKETTIRVNRQPTK

SEQ ID NO: 34212 - protein, 907 aa, Homo sapiens
  DOMAIN (437)..(478): kw TRANSCRIPTASE REVERSE II ORF2 domain identified by eMATRIX, accession number DM01354I, p-value=1.000e-40, raw score of 15.55
  DOMAIN (584)..(809): Reverse transcriptase domain identified by PFam, accession name rvt, E-value=9.1e-49, PFam score of 175.4
MGGMVESSRHNWSGLDKQSDIQNLNEERILALQLCGWIKKGTDVDVGPFLNSLVQEGEWERAAAVALFNLDIRRAIQILNEGASSEKGDLNLNVVAMALSGYTDEKNSLWREMCSTLRLQLNNPYLCVMFAFLTSETGSYDGVLYENKVAVRDRVAFACKFLSDTQLNRYIEKLTNEMKEAGNLEGILLTGLTKDGVDLMESYVDRTGDVQTASYCMLQGSPLDVLKDERVQYWIENYRNLLDAWRFWHKRAEFDIHRSKLDPSSKPLAQVFVSCNFCGKSISYSCSAVPHQGRGFSQYGVSGSPTKSKVTSCPGCRKPLPRCALCLINMGTPVSSCPDRSTRQKVNKDIQELNSALHQADLIDIYRTLHPKSTAYTFFSAPHHTFSKIDHIVGSKALLSKCKRTEIITNCLSDHSAIKLELRIKTFTPNRSTTWKLNNVLLNDYWVHNEMKAEIKMFFETNENKDTTYQNLWDTFKAVFRGKFIALNAHEKIQTTIREYHKHLYANKLENLEEMDKFLDTYTLPRLNQEEVESLNRPITGSEIEAILNSLPTKKSPGPDGFTAELYQRYKEELVPFLLKLFQSIEKEGILPNSFYEASIILIPKTGRDTTKKENFRPISLMNIDAKILNKILANQIQQHIKKLIHHDQVGFIPGMQGWFNIRKSINVIQHINRTKDKNHMIISIDAEKAFDKIQQPFMLKTLNKLVLEVLARAIRQEKEIKGIHLGKEEVKLSLFADDMIVYLEIPIVSAQNLLKLISNFSKVSGYKINVQKSQAFLYTNNRQTESQIMSELPFTIASKRIKYLGIQLTRDVKDLFKENYKLLLKEIKEDTNKWKNIPCSWVGRINIMKMAILPKVIYRFSAIPIKLPMTFFTELKKTKFIWNQKRARIAKSIPSQKNKAGGITLP

SEQ ID NO: 34213 - protein, 656 aa, Homo sapiens
  DOMAIN (476)..(523): kw TRANSCRIPTASE REVERSE II ORF2 domain identified by eMATRIX, accession number DM01354V, p-value=1.000e-40, raw score of 12.97
  DOMAIN (262)..(489): Reverse transcriptase domain identified by PFam, accession name rvt, E-value=9.4e-07, PFam score of 26.2
MGGFSSHVATHPASIPTLEIYRVTLLLKPFLSYPLLPTATGPPLYPPALGLPNYTKPFTLFVHECNNQELGALIQERRGKHRPIAYYSPQLDLVVKPPLLIPRQTGSGVDLQQTPTDLQLRVLTIRKKTNKQKGHPPQNPICTSPSSKTKVGSKALLSKCKRREIITNYLSDHSAIKLELRIKKLTQNRSTTWKLNNLLLNDYWVHNEMKAEIKMFFETKENRDTTYQNLWDTFKAVCRGKFIALNAHKRKQERSKIDTLTSQLKELEKQEQTHSKASRRSWFFEKINKIDRLLARRIKKKREKNPIDAIKSDKGDITTDPTEIQTTIREYYKCLSANKLENLEEMDKFLDTYTLPRLNQEEFESLYRPITGSEIEAIINGLPTKKRLEVLARAIRQEKEIKGIQLGKEEVKLSLFADDMIVYLENPIISAQNLLKLIGNFSKVSGYKINVQKSQAFLYTNNRQTESQIMSELPFTIASKRIKYLRIQLTRDVKDLFKENYKPLLNEIKEDTNKWKNIPCSWVGRINIVKMAILPKVVYRFNAIPIKLQMTFFTELEKTTLKFIWNQKRVHIAKSILSQKNKAGGITLPDFKLYYKPTVTKTAWYWYQNRDIDQWNRTEPSEIMPHIYNYLNFDKPDKNKQWGRIPYLINGAGKTG

SEQ ID NO: 34214 - protein, 382 aa, Homo sapiens
  DOMAIN (147)..(192): kw TRANSCRIPTASE REVERSE II ORF2 domain identified by eMATRIX, accession number DM01354N, p-value=1.000e-40, raw score of 13.17
  DOMAIN (75)..(351): Reverse transcriptase domain identified by PFam, accession name rvt, E-value=1e-16, PFam score of 69.0
METRPSRGPLTPHTARCQSETKLPEEGSGSNICCSAIFAILQPPLVIPRQTGSGVDLQQTPTDLELRDLTVRRKTNKWKGIASTSTKRTSTPKRHLSWFFEKINKIDRPLAKLIKKKREKNQIDTIKNDKGDITTNPTEIQTTIREYYKHLYANKLENLEEMDKFLDTYTLTRLNQEEVESLNIPITVSEIEAIIKSLPTKKSPGPDGFTAEFYQASIILNGQKLEEFPLKTGTRQGCPLSPLLFNTVLELLTRTIRQEKETKGIQLGKEEVKLSLFADDMIVYLENPIVSALNLLKLISNFSKISGYKINVQKSHAFLETNNRQTESQIVSELPFTITTKRIKYLGIQLTRDLKDLFKENYKPLLNEIKEDTNKWKNILCS

SEQ ID NO: 34215 - protein, 442 aa, Homo sapiens
  DOMAIN (45)..(90): kw TRANSCRIPTASE REVERSE II ORF2 domain identified by eMATRIX, accession number DM01354N, p-value=1.000e-40, raw score of 13.17
  DOMAIN (73)..(339): Reverse transcriptase domain identified by PFam, accession name rvt, E-value=8.8e-67, PFam score of 235.3
  misc_feature (1)...(442): Xaa = X or * as defined in Table 2
QVLLSFGTPLVLTTKREKNQIDAIKNDKGDITTDPTEIQITSIEYYKHLYANKLENLEEMDKLLDTYTLPRLNQEGVESLNRPITGSEIEAIINSLRPISLMNIHAKILNKILGNXIQQHIKKLIHHDQVGFIPGMQGWFNIRKSINVIEHINRTKDKNHMIILIDAEKAFDKIQQPFMLKTLNKLGIDGTYLKIIRAIYGKPTVNIILNRQKLEAFPLKTGTRQGCPLSPLLFNIVLEVLAKAIRQEKEIKGIQLGKEEVKLSLFADDMIVYLENPIISAQNLLKLTGNFSKVSGYKINVQKSQAFLYTNNRQTESQIMSELPFTIASKRIKYLGIQLTRDVKDLVKENYKPLLKEIKEDTNKWKNIPCSWVGRINILKMAILPKVIYRFNAIPIKLPMTFFTELEKTTLKFIWNQKRACIAKSILSQKNKAGGITLPDFK

SEQ ID NO: 34216 - protein, 955 aa, Homo sapiens
  DOMAIN (237)..(278): kw TRANSCRIPTASE REVERSE II ORF2 domain identified by eMATRIX, accession number DM01354I, p-value=1.000e-40, raw score of 15.55
  DOMAIN (402)..(654): Reverse transcriptase domain identified by PFam, accession name rvt, E-value=3e-55, PFam score of 197.0
MSDAEDERFLQFQLRYRVYLTGDCRTVGAGQWVQRTEREPKQGEALPHPGSARGWGVPFPRDDGWHLENRVTPTLILRFSHSLSKQHTRRPYSAPGSEGPTPTEPCSLLAQQSEIKLQDGSEAGGGPLLLIPRQTGSGVDLRQTPTDMQLRVLTVRRKTNKQKGQPHQNPICTSPSSKTKAPHHTYSKTDHIVGSKALLSKCKRSEIITNCLSDHSAIKLELRIKKRIQNRSTTWKLNNLLLNDYCVHNEIKAEIKMFFETNENKDTTYQNLWDTFKAVCRGKFRALRAHKRKQERSKIDTLTSQLKELEKQEQTHSKASRRQEVTKIRAELKETETQKKTFKKSMNPGAEIQTTIREYYKHLYANKLENLEEMDKFLDIYTLPRLNQEEVESLNSPITGSEIEAIINSLTTKKIPGPDGFTAEFYQRYKEEQQHINKLIHHDQVGFIPGMQDWFNIRKSINAIQHINRTNDKNHMIISIDAEKAFDKIQQPFMLKPLNKLGIDGTYLKIIRAIYDKRTANIILNGQKLEAFPLKTGTRQGCPLSPLLFNIVLEVLARAIRQEKEIKGIQLGKEEVKLSLFADDMIVYLENPTVSAQNLLKLISNFSKVSGYKINVQKSQAFLYTNNRQRESQIMSELPFTTASKRIKYLGIQLTRDVKDLFKANYKPLLKEIKEDTNKWKNIPCSWVGRINIVKMAILPKVIYRFSAIPIKLPMTFFTELEKTTLKFIWNQKRARIAKSILSQKNKAGGVTLPDFKLYYKATVTKTAWYWYQNRDTDQWNRTEPSEIMPHIYNYLIFDKSDKNKQWGKDSLFNKWCWENWLAICRKLKLDPFLTPYTKINSRWIKDLNVRPKTIKILEENLGNTIQDIVVGKDFMSKTPKAMAAKAKIDKWDLMKLKSFCTAKEITIRVNRQPTKWEKIFAIYSSDKGLISRIYNELKQIYKKKTTPSTSGRRI

SEQ ID NO: 34217 - protein, 406 aa, Homo sapiens
  DOMAIN (195)..(238): kw TRANSCRIPTASE REVERSE II ORF2 domain identified by eMATRIX, accession number DM01354T, p-value=1.000e-40, raw score of 9.48
  DOMAIN (79)..(317): Reverse transcriptase domain identified by PFam, accession name rvt, E-value=2.3e-22, PFam score of 87.7
FPYKVPDLEVSKESHFWTDPGTSMYFEDLEKKGIHRSFRTDIIKNDEGDISTDSTEIQTTIREYYKDLYTNKLENLEEMDKFLDTYILPRLNQEEVESLNRPKTGSDIDAIINSLPTKKSPGPERFTAEFYQRAKDKNHMIISIDAEEAFNKIQQPFMLKTLKLGIDVTYLKIIRAIYDKPTANIILNGQKLEAFPLKTGTRKGCPLSPLLFNIMLEVLAGAIRQEKEIKGIQLGKEEVKLSLFTDDMIVYLENPIVSAQNPCKLISNFSKVSGYKFNVQKSQAFLYTNNRQTESQMMSELPFTIASKRMKYIEIQFTRDVKDLFKQNYKPLLNEIQEDTNKWKNIPCSSVGRINIVKMAILPKVIYRFNAIPIKLPMTFFTELEKTTLKFIWNQKRARIAKSILS

SEQ ID NO: 34218 - protein, 631 aa, Homo sapiens
  DOMAIN (68)..(113): kw TRANSCRIPTASE REVERSE II ORF2 domain identified by eMATRIX, accession number DM01354N, p-value=1.000e-40, raw score of 13.17
  DOMAIN (152)..(330): Reverse transcriptase domain identified by PFam, accession name rvt, E-value=1.3e-21, PFam score of 85.3
MKEIETQKTLQKINESRSWFFEKINKVDRPLARLIKKKREKNQIDAIKNDKRDVSTDPAVIQTTIREYYKHLYANKLENLEEMDKFLDTYTLPRLNKEEVESLNRPITGSEIEAIINSLPIKKSPGPDGFTADFYQRYKQELVPFLLKLFQSIEKEGILPGSVYEASIILIPKPGRDTTKKENFRPISLTNIDAKILNKILANRIQQHIKKLIPHDQVGFIPRMQSWLEVLARAIRQEKEIKGIQLGKEEVKLSLFADDMIIYLENPIISAQNLLKLISNFSKVSGYKINVQKSQAFLYINNRQKESQIMSELPFTIASKRIKYLGIQLTRHVKEHFKENYKPLVNKIKEDTNKWKNMPCSWVGRINIVKMTILPKIERIGKTKGTETQRGKSCKPTHPVSVISLAESIARDFCLQLNRARSCDQSSYNEVLEADNRAFSLCKGMPFDRLSPISQTPGPSWYQSSPYQPMFLAAPIDIGSRPASMDPIHSRTWHYVTVVILARSRKHQELILSESKQFEEAPPELRSRAPGGFSKPAAGQIKVGLRENLTASMQISPADANLILQDSFLAIFLFQALIVTIYKENEKEEGQERREEALRSTGKNNVWKNTDIDRPESISDSESAGCDYGDR

SEQ ID NO: 34219 - protein, 520 aa, Homo sapiens
  DOMAIN (110)..(155): kw TRANSCRIPTASE REVERSE II ORF2 domain identified by eMATRIX, accession number DM01354N, p-value=1.000e-40, raw score of 13.17
  misc_feature (1)...(520): Xaa = X or * as defined in Table 2
WGEIRAEKLKIPKTGAPLFLQRIAAPRQQRNKTGQRMSLTSXQKXASEGRXXQTLSKLKEHVLTHCKEVKNLEKRALAKLIKKKREKNQIDAIKNDKRDITTDPTEIQTTIREYYKHLYANKLETLEEMDKFLDTYTLPRLNQEEVESLNRPITGSEIEEIINSLPTKKSPGPDGFTAEFYQRYKEELPDKQLQQSLRIQNQCAKITSIPIHQXQTNREPNHEXTPIPNYYKENEIPRNPTYKGCEGPLQGELQTTAQRKRGHKQMEEHSMLMDRKKQYCENGHTAQGSTDFGEVQRLRLWQEDDVAEEVSGFFEEDNLKSVAQDPFWESRQVKTIFNCVDTYIAGAKAIAGITQVTCTGNQFAEINQRFLKLKKSWSLYRRFQPWQEECGPSWNPSWTHPSVASSRKDAAAQREAQEGDLQGQEGAEASHAGGPAADHYSGTAHAGRGRALDRGVCVRGHAPPPITELSRPAGCGPHRQGEEAREGDANKKNGFHIQRCSCCLSCKQEHPVLPLVFGLD

SEQ ID NO: 34220 - protein, 1224 aa, Homo sapiens
  DOMAIN (363)..(408): kw TRANSCRIPTASE REVERSE II ORF2 domain identified by eMATRIX, accession number DM01354N, p-value=1.000e-40, raw score of 13.17
  DOMAIN (447)..(722): Reverse transcriptase domain identified by PFam, accession name rvt, E-value=1.9e-80, PFam score of 280.6
YPESTMNSNKFTRKKSNNPIKKCQQASQLKALPTQSCSPSSNSYETFLVSPLHPFQFYISFPHYTEMVPPLTPEDYNSRGDFGGDTETNHIISKFHRSLEQVQNAASRRSQDGRIGTAPVYSSQRERRRRRVISAFPSEERSSSPAMEQSWMENDFEELREEGFRRSNYSELREDIQTKGKEVENFEQNLEECITRITNTEKCLKELMELKTKARELREECRSLRSRCDQLEERISVMEDEMNEMKREGKFREKRIKRNEQSLQEIWDYVKRPNLRLIGVPESDGENGTKLENTLQHIIQENFPNLARQANVQIQEIQRTPQRYSSRIAIPRHIIVRFTKVEMKEKMLRAAREKEIQTTIREYYKHLYANKLENLEEMDTFLDTYTLPRLNQEEVESLNRPITGAEIVAIINSLPTKKSPGPDGFTAEFYQRYKEELIPFLLKLFQSIEKEGILPNSFCEASIILIPKPGRDTTKKENFRPISLMNIDAKILNKILANQIQQHIKKLIHHDQVGFIPGMQGWFNICKSINVIQQINRTKDKNHMIISIDAEKAFDKIQQPFMLKTLNKLGIDGTYLKIIRAIYDKPTANIILNGQKLEAFPLKTGKRQGCPLSPLLFNIVLEVLAKAIRQEKEIKGIQLGKEEVKLSLFADDMIVYLENPIVSAQNLLKLISKFSKVSRYKINVQKSQALLYTSNRQTESQIMSELPFTIASKRIKYLGIQLTRDVKDLFKENYKPLLNEIKEDTNKWKNIPCSWIGRINIVKMAILPKVIYRFNAIPIKLPMTFFTELEKTTLKFIWNQKRARIAKSILSQKNKAGGITLPDFKLYYKATVTKTAWYWYQNRDTHQWNRTEPSEITPHIYTILIFDKPEKNKHGGKASLFIKWCWENWLAICRKLKLDPFLTPYTKINSRWIKDLNVKPKTIKTLEENLGITIQDIGVGKDFMSKTPKAMATKDKIDKWDLIKLKSFCTAKETTIRVNRQPTTWEKIFATYSSDKGLISRIYNELKQIYKKKTNNPIKKWAKDMNRHFSKEDIYAAKKHMKKCSSSLAIREMQIKTTMRYHLTPVRMAIIKKSGNNRCWRGCGEIGTLLHCWWDCKLVQPLWKSVWRFLRDLELEIPFDPAIPLLGIYPNDYKSCCYKDTCTRMFIAALFTIAKTWNQPKCPTMIDWIKKMWHIYTMEYYAAIKNDEFMSFVGTWMKLETIILSKLSQEQKTKHRIFSLIGGN

SEQ ID NO: 34221 - protein, 126 aa, Homo sapiens
  DOMAIN (63)..(98): Troponin domain identified by eMATRIX, accession number PF00992A, p-value=9.194e-11, raw score of 16.67
  misc_feature (1)...(126): Xaa = X or * as defined in Table 2
MPPKNKMATXXXXXXXXXXXXXXXXXXXSKEMPPKNKEKGKKSGAQKKKKNWGADVVAESRHRLVVLEKELLRDHLEACQREAAAAREEAEQALGERDQALAQLRAHMADMEAKYEEILHDSLDRL

SEQ ID NO: 34222 - protein, 195 aa, Homo sapiens
  misc_feature (1)...(195): Xaa = X or * as defined in Table 2
WLSAWPRACPDCRVRFPHTSPPCLPCGPEAEPGPGPALRELVQPLPGQLQPPFGMPLPLVPAGSFLICTVWERPRPGLAVGSPPCFPSLHPTVPVGCPPPSPCLRPPAXPTTHLHIWPSLLFGPLPALPPPLAASASAGLRKPWLDGLHPSVEPSGLGAAPSPAPPACAWTRPPHLHPSSFSSCVPQISSLFLCF

SEQ ID NO: 34223 - protein, 395 aa, Homo sapiens
  DOMAIN (356)..(371): WILM'S TUMOUR PROTEIN SIGNATURE domain identified by eMATRIX, accession number PR00049D, p-value=9.331e-15, raw score of 0.00
  misc_feature (1)...(395): Xaa = X or * as defined in Table 2
SAASSVLYVHNEPQVHGAHQKIHPIHPSLHYCLAHIISQDLHTSMNALGLFGVGXEQGLQEKSNLSSTHHEPGHGGQDAAGARDGARGRGGSTGSAAGERGGRTVPHWAGQPAEAGGAGXPRGPQLRRSPPPRLPPRAGSSANTRNSVLLXFFXAVCLWADHYPLXTLISSSXMAGRWRSVPGIPTSPTKPPPPPPPPPPPPPPPPPGSFLSEPVWSTAXNSTCPPRRCRSASGGPIWCPCRPPAPPPAPPAPPPLEATEESLEEGGGRASRSANMFAPTAPAGSSWHRARWGXPAWKAGAAGTRGAKCGQFVPSASSAPXLAGGWPGAGGQRGARRAQKAWCCRPGTSLAPGPELFPESALVQAGSAPPPPPPPPPPPLCLLLLRAESEGAVLM

SEQ ID NO: 34224 - protein, 95 aa, Homo sapiens
GSLGGDRGSPAPLTVPAPLPSPQAGQAEGAHAEAHGREAVPVPAVRRRLCPQLRPEEPHARAHGPAPLPVRQLLQDLRPLRPPAQTPQERRLQRR

SEQ ID NO: 34225 - protein, 592 aa, Homo sapiens
  DOMAIN (98)..(111): BTB (also known as BR-C/Ttk) domain proteins domain identified by eMATRIX, accession number PF00651, p-value=3.368e-11, raw score of 15.00
  DOMAIN (72)..(186): BTB/POZ domain identified by PFam, accession name BTB, E- value=8.6e-28, PFam score of 105.8
  misc_feature (1)...(592): Xaa = X or * as defined in Table 2
RAAARKEHQGSATRAERAPRTPKASGRGSPVPTSGTVTARTGTAPRGLSAEDGRRRGRPIGIPFTDHSSDILSGLNEQRTQGLLCDVVILVEGREFPTHRSVLAACSQYFKKLFTSGAVVDQQNVYEIDFVSAEALTALMDFAYTATLTVSTANVGDILSAARLLEIPAVSHVCADLLDRQILAADAGADAGQLDLVDQIDQRNLLRAKEYLEFYYQSNPMNSLPPAAAAAAASFPWSAFGASDDDLDATKEAVAAAVAAVAAGDCNGLDFYGPGPPAERPPTGDGDEGDSNPGLWPERDEDAPTGGLFPPPVAPPAATQNGHYGRGGEEEAASLSEAAPEPGDSPGFLSGAAEGEDGDGPDVDGLAASTLLQQMDVIGGPGGGRGGGQRRGVAGRRQGRHGLLPEVLQRRPRRRRLPGLVAEGGEEDPSQGLPEVPHLREGHPGRRQAAATHPHPHGREALRVQHLQGPLHQDTSTSTLQKPGSPRPLXVTAGRXAGQAEGAHAEAHGREAVPVPAVRRRLCPQLRPEEPHARAHGPAPLPVRQLLQDLRPLRPPAQTPQERRLQRRPLAPAVPASPCVLWAGGCPDPQPW

SEQ ID NO: 34226 - protein, 64 aa, Homo sapiens
  misc_feature (1)...(64): Xaa = X or * as defined in Table 2
MESFMESLNRLKEIHEKEVLGXQNKLXEXNSERCRDXQRIEEXFXQEPXXSGTAXXXLGELXFX

SEQ ID NO: 34227 - protein, 760 aa, Homo sapiens
  DOMAIN (397)..(412): WILM'S TUMOUR PROTEIN SIGNATURE domain identified by eMATRIX, accession number PR00049D, p-value=5.500e-12, raw score of 0.00
  misc_feature (1)...(760): Xaa = X or * as defined in Table 2
GELHGVAEQAEGDPREGSPGPAEQASGTELREVPGPHWPLHPPEAPVCQHYHRPMVQKGNXGSVWGRGESLVQGAHGQTSQRSVQMTGGGAWTGQTSQRSVQMTGGGGTPRGSRSSSPRTTTPGTAEDTEGEPAGAGEQAAGRPVRPLHGHPGAGQEAAAGVRELPPAEPAAHLHPQPALLIQQHPISHARSQHPRRPCCLPGPGLRAGGTAEGLPCAFCSQRDERAEGRERDLEGGGEAASGPGRQAQAPGQGGHLGPPLTPAAPLPWWLEGHHREATGRPRGGXGRPPGRGPTGRRKASRAQDISSGQNLPRGHPAXVASPRHEPPAHLQPAARDHCRGAPGSQACPADRGPANGTPPPLPARSSPPSPGMSVASPWTASCGPPGPPPXPIGPEALPEGGPALPPKPPPVPAPSEPPQQPPGPCCSPQRPPAPGPEGQRSRGLGGAHRTAGAAQCPGGHAGPSPGGGTAPAPGPAAAAGXGQGRQCQAKGPAHTRGDAALPTSRLRLXGPXEXGDQGSSGAAGLSGGRHTQPAGPGRAQRTEAAATQDCALDKPLDLSEWGRARGQDTPKPAGQHGSLSPAAAHTASPEPPTQSGPLTRSPQALSNGTKGTRVPEQEEASTPMPPDLDGHPGPARLKCXDQSPTNWMRQTPQAASGPELPGGGPTSTTGEGPECICTQEHGQGPPRKRKRASEPGDKGSAHALGGNGPLGPPPLPAKLQAQSWTPPRGLTANRCLAVRVEGDSGRQHPRRPGPLSDGE

SEQ ID NO: 34228 - protein, 1055 aa, Homo sapiens
  DOMAIN (967)..(975): Pentapeptide repeat proteins (8 copies) domain identified by eMATRIX, accession number PF00805E, p-value=5.622e-09, raw score of 10.18
  misc_feature (1)...(1055): Xaa = X or * as defined in Table 2
ASQLVLTLAYQANCVSVSYTDLLGKPGGSYFTFLYVLNIRSRSRLKKDYDDFRRQPDHDTFNRELWTTDEGEGDLGKDSPKGEISKSIDSTEPLDILEKDHFDSDDMKLSEIDFPMARSKLLKKELPSKDLPKTLLKTLKRQSKQTDYVDDSTKELSPRKKAKLSTNETTVENLESDVQIDCFSESKHTEPSFPESFASLDSVPVSTLQKGTKPIQALLAKNIGNKVTLTNQLPPSTGRNALAVEKPVLSPPEASPIKPALTCHTNTKGPLQMVYKMPCGQWLPIDLQNSSVKIQVQPMVDPKTGEKIMQQVLILPKNFVIQHKEGKAVAKEVPPLQQKGTEQHCSSFPQTTNINSSLASVFVNSPGTVSTQLPNTAFNKTITPLSNISSARPQPLSPVTSVSNLLTPSVKTSQSEAGKAKNAVSAATFSLPSASPTISSTGQPLSSTTTLNGSTNPGSSFNCFAQQTADSSEAKQELKTVCIRDSQSILVRTRGGNTGVVKVQTNPDQNSPNTVSSSSVFTFAPQLQAFLVPKSTTSSSAFSPVAGTTTTSSLSPFSQTPTSVSIPASFAPSMGKNLKLTLGHTTGSGDLGHVIDKTSHMPSSPLKSSICSSTLLPSTTSSSVSVISISAANFGQNNANIIHTPTKQQQVDYITKSYPVTRSEATAATNGDVISGTPVQKLMLVSAPSILSSGNGTAINMTPALTSTGVSAQKLVFINAPVPSGTSTPTLVAESLKQTLPPPLHKAYVKTPEQPQIVLIPSTVGTPIKINSSPAVSQIKDVKIGLNIGQAIVNTSGTVPAIPSINILQNVTPKGEDKSSKGYILPLSTSGNSVPVSSNFVSQNITPVNESVVSSARAVNVLSVTGANLSLGSFPVTSASASAGAQPPVLVSGNDTSSRIMPILSNRLCSSSLGNTVGYINCENRTPCIICSDFNYTTSSVSXMFXHQLCKFLLRVGLTYTWRTTSPKNNXTQFPHSGAVPGATRSVSISKRQSRTSLQFHSPGISTHSANKCKHKXTSNXIVVPFNKSSELSLKCAKLPSNFLEHFFSWEMIKF

SEQ ID NO: 34229 - protein, 397 aa, Homo sapiens
  DOMAIN (47)..(65): NEUTROPHIL CYTOSOL FACTOR 2 SIGNATURE domain identified by eMATRIX, accession number PR00499A, p-value=2.761e-09, raw score of 10.66
  misc_feature (1)...(397): Xaa = X or * as defined in Table 2
HHLRGTGQRAGQQLPPGMKMGRAGPPGPWCEHTTPPSRGRPTSSGGPTLAPALAELSPRPQTPSPSISSLPMITSLPGGTGPLCLRPLSWEKPGSATGKRGSQQEVDVGPSPGHTAPSKSHGQGPVGSPSARQGCGPASSALQRRREPGGGPRGHPAGPHGGCVLPPWPGCPGNTMQRLXGFHTRAMNTQSGAGPRTAPSPRAQGAQGRPSKSCSGASQGPCPAVGPHXAPGEDRVRHPLASISGTTRAHGRPSQQREPRNKSTRADSRSPRTVPPHGPPGPSLPRGRPAQPGPGVXRNGISVGAGRFPPFTAPCGQQARPGAGNRGAGSGAPELXGGLGRDPGSSGCEVPGGRAGGPPRTXHFLARPAPPSPPQGLPRPPKVLGLQAXASAPSQLG

SEQ ID NO: 34230 - protein, 354 aa, Homo sapiens
  misc_feature (1)...(354): Xaa = X or * as defined in Table 2
DNRAVFSPTGRRDRGGGGPAGTLARVXSAPGAFGVXSTRTHVAGVQMPPVPGTCDVCTRPCSPVSRPPRASTAVAAAASSGPRQPRHPRHTSPMPPPAALRPPAGPRGLAPGGHTAPPATAAPVELQHPLLRLQTGPPLGPPTGPAXEPRAHPCIRGLLPAGSGPPPRRQGHPEPPRLHTAACSPCQPQRALESSCPPRAFPGTAAHWLLGTGDWLLXPAAQAALASQEWALPGICLCNSLSEPTGRVILASQLAPCIRLGCRKRSLAKAPKLISGGAGAHTPTPEPTCFSVSVLGTSPPAAGGPRGQESVVSSPVTMGTVPAWAIPSLGCRGEASLDHPAGQLPARGQRSRRH

SEQ ID NO: 34231 - protein, 475 aa, Homo sapiens
  misc_feature (1)...(475): Xaa = X or * as defined in Table 2
VLHAVGNQVQGCPGPEVHVCGWRPGCVRLLQLHVVGRADGPECDLCAVWPGGGDVXPAVPGAVPHVTQCEPQGHPYGEGTGAGAYCAALCGPPGARGHCGQEARQPQVRTCQGQERRRDCQDLLXEAGGQEAPGAERPSAGXASRGTPRAAATHPPRTASPGEGQHVXVPAHVGGARPGAWQRHPGLHQYHRPQHLEPPAQPDEPHQDPXHLPGQRPAPAVEAEPGQQAPSKPCPPPEPSAPQDGVPAENGLPQGDPGAIAPRAQAPDSPCGRCTSPGQQXYWLGPGAPQRGSSPEWDRPXATQDGRPRPRPTPAAAICDPGXPREPRGGAPQWAGWGGRRRXXRLRNPQXPGQPSGSSGRGPGPRRPSVASSVSERVLRGERALSPSPEAPLRASGQRANPTTAPAAECPPYNPRDLCWTPGWLPMGPESGKRRSRCVEEDAGPALHRQGGTDGETXXTGRGGNRPGPYGRPSL

SEQ ID NO: 34232 - protein, 263 aa, Homo sapiens
  misc_feature (1)...(263): Xaa = X or * as defined in Table 2
HKDRFWQLQNDSCFLHSPGERQWLGGPRSDTFGPQVLFGHVGICSQRAHPAGPGHRGLPEGRXPPHRSQRHPPRSRKPYLAXPPDMCVATDRRTQTPRDFPPLGRXKPHGTLRSAACPAGRVSPSPRPRGLPAPPPKSHLCGPGVRGRXQLLPPHPGSPKGERGWTASPGAARGGPGPAPAPRPRASWSQPSVTFPLPLAGLAGHPGSRTEPAWKAGGAAARPGPELPRDLLQAGSTDTASGEQLAAGPWTGKEISGRARPRL

SEQ ID NO: 34233 - protein, 138 aa, Homo sapiens
  misc_feature (1)...(138): Xaa = X or * as defined in Table 2
YTILTEKXKLSKLSTXWVHQDQLQKREELSMEILNKXDQDSEAYPQRTVTGEETWLYQYDPPPLPRSLPPPQTHTAPVGAXSDWGGXELPPGLNGDKLAHHSPTPFLSFSGLLFVDWLXSQLLSLFGLFTQGVIRIFI

SEQ ID NO: 34234 - protein, 1509 aa, Homo sapiens
  DOMAIN (42)..(50): GLYCOPROTEIN PRECURSOR CELL SI domain identified by eMATRIX, accession number PD00015A, p-value=6.400e-09, raw score of 8.90
  DOMAIN (339)..(1446): Cadherin domain identified by PFam, accession name cadherin, E-value=5.5e-111, PFam score of 382.1
  misc_feature (1)...(1509): Xaa = X or * as defined in Table 2
MGFCCRECRPRLLKGRPCIQHAGPVAAFKVATPYSLYVCPEGQNVTLTCRLLGPVDKGHDVTFYKTWYRSSRGEVQTCSERRPIRNLTFQDLHLHHGGHQAANTSHDLAQRHGLESASDHHGNFSITMRNLTLLDSGLYCCLVVEIRHHHSEHRVHGAMELQVQTGKDAPSNCVVYPSSSQDSESNHGNNFRIHVSNGLLMRGPRPLDRERNSSHVLIVEAYNHDLGPMRSSVRMRKLRQSTALAQHWTGTALDRKQVWFSRKPSCSHLLSKNLTDLCFLYICASQAKATMPGLHKHLLNCITFMMYSAHIHKENLVLVIVYVEDINDEAPVFTQQQYSRLGLRETAGIGTSVIVVQATDRDSGDGGLVNYRILSGAEGKFEIDESTGLIITVNYLDYETKTSYMMNVSATDQAPPFNQGFCSVYITLLNELDEAVQFSNASYEAAILENLALGTEIVRVQAYSIDNLNQITYRFNAYTSTQAKALFKIDAITRILGTQMDTKMNKTLLSPQRVLRLEVEMELIQDANQSATRRCAENYNRGVVEPLRAQQSYLAGEAGRLHGRGGFPVECEREEGIQQTECPGEVMPDRGSDMEGVITVQGLVDREKGDFYTLTVVADDGGPKVDSTVVSGTRVYITVLDENDNSPRFDFTSDSAVSIPEDCPVGQRVATVKAWDPDAGSNGQVVFSLASGNIAGAFEIVTTNDSIGEVFVARPLDREELDHYILQVVASDRGTPPRKKDHILQVTILDINDNPPVIESPFGYNVSVNENVGGGTAVVQVRATDRDIGINSVLSYYITEGNKDMAFRMDRISGEIATRPAPPDRERQSFYHLVATVEDEGTPTLSGAMGVATGRSGWARAAPPPIICLASKWPSLAQDQPCWRTRAXKIHSFVHPTPSSXELDIPANSLGHPHPASAHITRTRNSCAARGDLGQTQARHTMLPAQPLHRPEGKPVCHRGNCQGRSSPKSNLVQLPCFMVERTKHREVKRLGPGEITTTSLLDRETKSEYILIVRAVDGGVGHNQKTGIATRPGSFLPSKAQALPKAPKVGGAGRINAKIARGHLSTFPLAGPALAHLSWVNITLLDINDNHPTWKDAPYYINLVEMTPPDSDVTTVFGKFFPNGIDGQEIHELSGNAYCMPGPTLVRLRVQEATPGQVVAVDPDLGENGTLVYSIQPPNKFYSLNSTTGKIRTTHAMLDRENPDPHEAELMRKIVVSVTDCGRPPLKATSSATVFVNLLDLNDNDPTFQNLPFVAEVLEGIPAGVSIYQVVAIDLDEGLNGLVSYRMPVGMPRMDFLINSSSGVVLDRERIAEYQLRVVASDAGTPTKSSTSTLTIHVLDVNDETPTFFPAVYNVSVSEDVPREFRVVWLNCTDNDVGLNAELSYFITGGNVDGKFSVGYRDAVVRTVVGLDRETTAAYMLILEAIDNGPVGKRHTGTATVFVTVLDVNDNRPIFLQSSYEASVPEDIPEGHSILQAGLRAASTPTPTSRKTVPNGQQGLLVRWMATG

SEQ ID NO: 34235 - protein, 725 aa, Homo sapiens
  DOMAIN (601)..(619): CADHERIN SIGNATURE domain identified by eMATRIX, accession number PR00205B, p-value=2.373e-09, raw score of 11.39
  DOMAIN (13)..(722): Cadherin domain identified by PFam, accession name cadherin, E-value=1.6e-66, PFam score of 234.4
  misc_feature (1)...(725): Xaa = X or * as defined in Table 2
MALTFPCRKFEWYGRRQPEVRYSVPASHQLKATDADEGEFGRVWYRILHGNHGNNFRIHVSNGLLMRGPRPLDRERNSSHVLIVEAYNHDLGPMRSSVRMRKLRQSTALDSTGQAQHWTESRSGSPGSPVAPTCSARTXQTSASVHLCLSGKSHHAWPPXTPFKLYYVHEYSAHIHKENLVLVIVYVEDINDEAPVFTQQQYSRLGLRETAGIGTSVIVVQATDRDSGDGGLVNYRILSGAEGKFEIDESTGLIITVNYLDYETKTSYMMNVSATDQAPPFNQGFCSVYITLLNELDEAVQFSNASYEAAILENLALGTEIVRVQAYSIDNLNQITYRFDAYTSTQAKALFKIDAITRILGTQMDTKMNKTLLSPQRVLRLEVEMELIQDANQSATRRCAENYNRGVVEPLRAQQSYLAGEAGRLHGRGGFPVECEREEGIQQTECPGEVMPDRGSDMEGVITVQGLVDREKGDFYTLTVVADDGGPKVDSTVVSGTRVYITVLDENDNSPRFDFTSDSAVSIPEDCPVGQRVATVKAWDPDAGSNGQVVFSLASGNIAGAFEIVTTNDSIGEVFVARPLDREELDHYILQVVASDRGTPPRKKDHILQVTILDINDNPPVIESPFGYNVSVNENVGGGTAVVQVRATDRDIGINSVLSYYITEGNKDMTFRMDRISGEIATRPAPPDRERQSFYHLVATVEDEGTPTLSRSICEARLXHRRHTP

SEQ ID NO: 34236 - protein, 265 aa, Homo sapiens
  misc_feature (1)...(265): Xaa = X or * as defined in Table 2
RGRPRGSPIFPTRAPREKKRXEEVGGHKREQTGXGGGERRKPPNPQHEPKERGWCSRVPEEPQRKRRSARARPKKLXREKRRRGRPKRCLWXTGRHPSHHPRTHQCXFXWRKREEGKERKKEQPAHAGQKRRKAARHRRRRRRRERTDEKNRTWTRRRREKAGQDEKREGEHGQKRSQQGRESRRDGRARTRKERRQKRENDNRARRRQQAEREKTKSVKRRQTTQQAEEVRQARENEAREPQQRRQHSRRRKEKEEMRAPRSKQ

SEQ ID NO: 34237 - protein, 182 aa, Homo sapiens
KINPALPEETVMASPEAVARKDNVESPQDPSPTPLFASRPITGLKSQWAPRVPECIISTDILSNWQNPHIGSPTGGVRAVMVGKAKWKPLEVPLPRKIVNQKQCHIPGGIAEISAAIKALKDAGAMIPTISLFDSTQPVQKTGGFWRMTVDYCKLNQVVSPIAAAVPDVVSLLEQINTPSGT

SEQ ID NO: 34238 - protein, 601 aa, Homo sapiens
  DOMAIN (436)..(564): dUTPase domain identified by PFam, accession name dUTPase, E- value=0.00093, PFam score of 6.0
MSESLKTREADSAALSLQPKAQGPQGRCWHKFQSQRLKILESDVQGQEEWKEANILHVKKKEPEDSACKFISSSPAFFVPAALVANWMMPTHIEGKEGEKKGERKVGRREEENKEKRREAEREKERKGESEGGGKEGKERQQEGMKGRKKDGRGREGGDLGWRKKAFPPWSEEINPVLTDTTVMASPEAVAKKDNVDSPQKPPPIAMFASRPTTRLMSSQNPRGDLQPFTRITMHWGKGNDQTFWGLLDNGSELTLIPGDPKCHCRLPIEVGAYGGQVITGILEQPQLTVCPVGSWTHPVIIIPVPECIIGIDILSQLAEPPYWISDWLKAVMVTRAQWKPLELPLPRKIVNQKQYSIPEELAEINATIKDLKDGRGSSSHKVGHEQQHPIIKWKWYIHDQARAGPEGNTRSHRSRNQGVGVEVAPLMVTPSDPLAKFLLPVPATLLSAGLEVLVPDGGRLPPGDTTTIPLNLKLRLPPGYFGLLLPLSQQAKKGVTVLAGMIDYHDEISLPLHNGACRWPIVGPSDYVLYVLLLSKEIASTILVDAIEKPRVGLVIEIVDPPSQYVIQGPISSHRLILPGIGLELHFNAGGSCDYRDYFN

SEQ ID NO: 34239 - protein, 93 aa, Homo sapiens
  DOMAIN (33)..(81): 3-beta hydroxysteriod dehydrogenase/isomerase family domain identified by eMATRIX, accession number PF01073C, p-value=1.900e- 30, raw score of 10.62
LPLTLMYWIGFLLEVVSFLLSPIYSYQPPFNRHTVTLSNSVFTFSYKKAQQDLAYKPLYSWEEAKKNVPESVRTVEWVSLVDRHKETLKSKTQ

SEQ ID NO: 34240 - protein, 168 aa, Homo sapiens
  DOMAIN (1)..(168): 3-beta hydroxysteroid dehydrogenase/isomera domain identified by PFam, accession name 3Beta_HSD, E-value=9.8e-05, PFam score of -118.8
  misc_feature (1)...(168): Xaa = X or * as defined in Table 2
MCYSRQSNLGTFGEGKIKGSEVIDECPRSSRYQDLQELQNKTKLTVLEGDILDESCLKRACQDMSVIIHTTSIIDIIGVTHRESIMNINVKRTQLLLEACVQATVPVFIYTSTPEVAGPNSYKEIIQNSHEEEPLENTWCSPSPYKKALARSGIXATLQLGGSQEECT

SEQ ID NO: 34241 - protein, 206 aa, Homo sapiens
AGQQTVEIDLRHRIQLPDLENQRNFNELSRIVLEVRERVRQEQQEGGHEAGEGRGRQGPRESQPSPAQPRAEAPSKGPDGTPGEDGGEPGDAVAAAEQPAQCGQGQPFVLPVGVSSRNEDYPRTCRMWNSTFQTYKKEVCLPRHSMHPGPWAICCECQTRFGGRLPVSRVEAALPYWVPLSLRPRKQHPCWMHAAGTTAGGSAVMS

SEQ ID NO: 34242 - protein, 142 aa, Homo sapiens
  misc_feature (1)...(142): Xaa = X or * as defined in Table 2
RHRIQLPDLENQRNFNELSRIVLEVRERVRQEQQEGGHEAGEGRGRQGPRESQPSPAQPRAEAPSKGPDGTPGEDGGEPGNAVAAAEQPAQCGQGQPFVLPVGVSSRNEDYPRTCRMWXGCGGYWGLKVGQHGLQRGPQPHT

SEQ ID NO: 34243 - protein, 391 aa, Homo sapiens
WQPDIGPYGGLLNVVVDGLFIIGWMYLPPHDPHVDDPMRFKPLFRIHLMERKAATVECMYGHKGPHHGHIQIVKKDEFSTKCNQTDHHRMSGGRQEEFRTWLREEWGRTLEDIFHEHMQELILMKFIYTSQYDNCLTYRRIYLPPSRPDDLIKPGLFKGTYGSHGLEIVMLSFHGRRARGTKITGDPNIPAGQQTVEIDLRHRIQLPDLENQRNFNELSRIVLEVRERVRQEQQEGGHEAGEGRGRQGPRESQPSPAQPRAEAPSKGPDGTPGEDGGEPGDAVAAAEQPAQCGQGQPFVLPVGVSSRNEDYPRTCRMCFYGTGLIAGHGFTSPERTPGVFILFDEDRFGFVWLELKSFSLYSRVQATFRNADAPSPQAFDEMLKNIQSLTS

SEQ ID NO: 34244 - protein, 84 aa, Homo sapiens
  DOMAIN (13)..(30): Zinc finger C2H2 type, domain proteins. domain identified by eMATRIX, accession number BL00028, p-value=9.217e-12, raw score of 16.07
  DOMAIN (11)..(33): Zinc finger, C2H2 type domain identified by PFam, accession name zf-C2H2, E-value=1.9e-05, PFam score of 31.5
  misc_feature (1)...(84): Xaa = X or * as defined in Table 2
HLRIHTQESSYVCDECGKALTSKRNLHQHQRIHTGEKPYECSKYGXPFGLLPQLGHLEHVYSGEKPVLDICRFGLPEFFTPFYW

SEQ ID NO: 34245 - protein, 465 aa, Homo sapiens
  DOMAIN (143)..(153): C2H2-TYPE ZINC FINGER SIGNATURE domain identified by eMATRIX, accession number PR00048B, p-value=6.000e-12, raw score of 6.02
  DOMAIN (128)..(347): Zinc finger, C2H2 type domain identified by PFam, accession name zf-C2H2, E-value=1.6e-62, PFam score of 221.1
  misc_feature (1)...(465): Xaa = X or * as defined in Table 2
MRPQLAGRDHHRGAATLLLERPGRLVTHFRQRRGAVRYGGGKSTTQHLSQRRLSGPNDHTKGLVWLLEHILQRLVSFVKLQATRTFTRTYITYAWFLPWGFSGVLCGTPVDTCWALKHQRIHTGEKPFECSECGKAFNGNSSLIRHQRIHTGERPYQCEECGRAFNDNANLIRHQRIHSGDRPYYCTECGNSFTSSSEFVIHQRIHTGEKPYECNECGKAFVGNSPLLRHQKIHTGEKPYECNECGKSFGRTSHLSQHQRIHTGEKPYSCKVCGQAFNFHTKLTRHQRIHSEEKPFXLCVDCGKAFSAQEQLKRHLRIHTQESSYVCDECGKALTSKRNLHQHQRIHTGEKPYECSKYEKAFGTSSQLGHLEHVYSGEKPVLDICRFGLPEFFTPFYWKEEKKCGRKMRNEVVHKVSFFLVVPIALSSLLKKKWKMLKKEKAQDPTEYGNLEDDNSQQHQGAKWK

SEQ ID NO: 34246 - protein, 182 aa, Homo sapiens
  misc_feature (1)...(182): Xaa = X or * as defined in Table 2
MDSQRPRERQRERERQSERQRHTQRMHREAETEDERDWKGHDTKTRRQRQRKRAEEGQCREHDRERRRDRTGERREKQRKSTQQSRKPSEEPHREKTQIKRERGPEQGELERGQCTERNRKAGTPECXTDPHIWTPHPARSAPAHPPDHTAAKYRPPYRSHHSGITHQHPRAASTLKLWPKP

SEQ ID NO: 34247 - protein, 133 aa, Homo sapiens
ENGEESRQNSTVEEDSEGDNDSEEFYYGGQVNYDGELHKHPQLEADLSAVREIYGPHAVSLREYGAIDDVDIDLHIDVSFLDEEIAVAWEVIRTEPIIVRLHCSLTQYLNGPVPTVDVFQISTKERFGLGHQL

SEQ ID NO: 34248 - protein, 290 aa, Homo sapiens
  misc_feature (1)...(290): Xaa = X or * as defined in Table 2
KSKLKSEQDGISKTHKLLRRTCSSTVKTDDVCVTKSHRTFGRSLSSDPRAEQAMTAIKSHKLLNRPCPAAVKSEECLTLKSHRLLTRSWSGDPRCEHNTNLKPHKLLSRSYSSNLRMEELYGLKNHKLLSKSYSSAPKSSKTXVFSKEPXRRRGRKALSLPQGLFGYPXHHLHPSSSQLAPNGAKCIPVRDRGFLVQTIEFAEQRIPVLNEYCEVCDEPHVFQNGPMLRRGRDVCEWAKKYANSVVRKKFCRLSIARRSRYRADMDLLRMSNFILTIIYKQKLNLQRFFS

SEQ ID NO: 34249 - protein, 71 aa, Homo sapiens
CCRSHQGAGEGGHLSVQLLWQYRWMWCSWGPVFQFHTDLELVAWRCVGLDPGCQQLDIGMQTLIGDHICVF

SEQ ID NO: 34250 - protein, 351 aa, Homo sapiens
  DOMAIN (224)..(271): kw TRANSCRIPTASE REVERSE II ORF2 domain identified by eMATRIX, accession number DM01354V, p-value=1.000e-40, raw score of 12.97
  DOMAIN (1)..(237): Reverse transcriptase domain identified by PFam, accession name rvt, E-value=1.6e-05, PFam score of 8.7
MGDFNTPLSTLDRSRKQKVNKDIQELNSALHQADLKDIYRTLHPKSTEYTFFSAPHHTYSKIDHIVGSKALFSKCKRTEIITNCLSDHSAIKLELRIKKLTQNRSTTWKLNNLLLNDYWVHNEMKAEIKMFFETMLEVLARAIRQEKEIKGFQLGKEEVKLSLFADDMIVYLENPINSAQNLLKLISNFSKVSAYKITVQKSQAFLYTNNRQTKSQLMSELPFTIASKRIKYLGIQLTKDMKDLFKENYKPLLNEIKEDTNKWKNIPCSWVGRINIVKMAILPKLIYRFNVIPIKLPMTFFTELEKTTLKFIRNQKRTHISKSILSQKNKAGGITLPDFKLYYKATVTKTA

SEQ ID NO: 34251 - protein, 321 aa, Homo sapiens
  DOMAIN (261)..(308): kw TRANSCRIPTASE REVERSE II ORF2 domain identified by eMATRIX, accession number DM01354V, p-value=1.000e-40, raw score of 12.97
  DOMAIN (23)..(274): Reverse transcriptase domain identified by PFam, accession name rvt, E-value=3.8e-11, PFam score of 50.5
RSMRQKVNKDIQDLISALPQADLIDIYRTLHPKSTEYTFFSAPHRTYFKIDHIVGSKALLSKCKRTEITTNCLSDHSAIKLELRIKKLTQNRTTTWKLNNLLLNDYWVHNEMKAEIKMLFETNENKDETYQNLWDTFKAPSIILNGQKLEAFPLKTGTREGYLLLPLLFNIVLEVLAMAIRQEKEIKGFQLGKEEVKLSLFADDMIVYLEDPIISAANLLRLISNFSKVSGYKINVQKSQTFLYTNNRQTESQIMSELPFTIATKRIKYLGIQLTRDVKDLLKENYKPLFNEIKEDTNKWKNIPCSWIGRIKIVKMAILPK

SEQ ID NO: 34252 - protein, 484 aa, Homo sapiens
  DOMAIN (110)..(151): kw TRANSCRIPTASE REVERSE II ORF2 domain identified by eMATRIX, accession number DM01354I, p-value=1.000e-40, raw score of 15.55
  misc_feature (1)...(484): Xaa = X or * as defined in Table 2
MGDFNTPLSTLDRSMRQKVNKDTQELNSALHQADLIDIYRTLHPKSKEYTFFSALHHTYSKIDRTVGSKALLSKCKRTEIITNSLSDHRAIKLELRIKKLTQNRSTTWKLNNLLLNDYWVHNEMKAEIKMFFETNENKDTTYQNLWDTFKAVCRGKFIALNAHNRKQERSKIDTLTSQLKELEKQEQTQSKASRRQEITKIRAELMEIETQKTLQKSNESRSWFFERINKIDRPLARLIKKKREKNQIDVIKNDKGDITTDPTEIQTTIREYYKHLYANKLENLEEMDKFLDTYTLPRLNQEEVESLNRPITGSEIVAIINSLPTKKSPGPDGFTVEFYQEGNXAGEGNKGYSIRKRRSQIVPVWRXHDCISRKPHRLRPKSPXAGKQLQQSLRIQNQCTKITSIFIHQXQANRKSNHEXTPIHNCFKENKIPRNPPYKGCEGPLQGELQTTAQXNKRGYKQMEEHSMLMGRKNQYRENGHTAQ

SEQ ID NO: 34253 - protein, 417 aa, Homo sapiens
  DOMAIN (248)..(291): kw TRANSCRIPTASE REVERSE II ORF2 domain identified by eMATRIX, accession number DM01354T, p-value=1.000e-40, raw score of 9.48
  DOMAIN (141)..(371): Reverse transcriptase domain identified by PFam, accession name rvt, E-value=5.9e-16, PFam score of 66.4
MKAEINMFFETNENKYTVYQNLWDTFKAVCRGKFIALNAHKRKQERSAMNTLTSQLKELEKQEKTNSKANRKQETTKIRAELKEIETQKTHQKINESRSLFFEKTNKIDRPLARLVKKKREKNQIDAIKNDTGDITTDPTEIQTTIREYYKCLYANKLEYLEEMDKFLDTYTLQRLNQEKVESLHRPITGSEIEAIINSLPTKKSPGPDRFTAQFYQRYDGMYLKIIRAIYDKPTANIMLNGQKLEAFPLKTGTRQGCPLSRLLFNIVLEVLARAVRQEKEINGIHLGKQEVKLSLFADGMIVYLENPIVSAQNLLKLISKFSKVSGYKINVQKSQAFLYTNNRQTESQIMSELPFTITTKRIKYLGIQLARDVKDLFKENYKPLLNKIKEDPNKWKNIPCSWIGRINIMKMAILPK

SEQ ID NO: 34254 - protein, 401 aa, Homo sapiens
  DOMAIN (263)..(310): kw TRANSCRIPTASE REVERSE II ORF2 domain identified by eMATRIX, accession number DM01354V, p-value=1.000e-40, raw score of 12.97
  DOMAIN (18)..(276): Reverse transcriptase domain identified by PFam, accession name rvt, E-value=0.00093, PFam score of -16.3
MGATGNKGEVRDDAAPGNLQYHRQIPEGATAPEKETGKPLLGILQCINPKKMHSQKKFERLLEPIAMLIQDHSSLSATEQSWTENDFDELTEVGFRRLVITNFSELKEDVGTHCKEAKNLEKRFDEWHTRINSVEKTLSDPKELKTMAPELCDACTIFNSRFNQVEERVSVIEDQINEIKAIRQENEIKGIQLGKEEVKLSLSADDMIVYLENPTVSAQNLLKLKSNFSKVSGYKINVQKSQAFLYTDNRQTESQIMSELPFTIASKRIKYLGIQLTRDVKDLFKENYKPLLNKIKEDTNKWRNIPCSWIGRINIVKMAIQPKVIYKFNVIPIKLPMAFFTELEKTTLKIIWNQKRTCIAKSILSKKNKPGGITLPDFKLHYKATVTKTAWYWCQNRDTDQ

SEQ ID NO: 34255 - protein, 411 aa, Homo sapiens
  DOMAIN (243)..(290): kw TRANSCRIPTASE REVERSE II ORF2 domain identified by eMATRIX, accession number DM01354V, p-value=1.000e-40, raw score of 12.97
MGDFNTPLSILDRSTRQKVNKDIQELNSALHQADLIDTYRTLHPKSTEYTFFSAPHHTYSKIDHIVGNKALLSKCKITEIITNCLSDHSAIKLELRIKKLTQNHSTTWKLNKLLLNDYWVHNEMKAEIKMFFETNENKHTTYQNLWDTFKAVEIQTTIREYYKHLYENELENLEEMDKFLNTYTLPRLNHEEVESLNRPITGSEIEAMINSLPTKKRPTANGFTAEFYQRQTESQIMSELPFTIASKRIKYLGIQLTRDVKDLFKEKYKPLLNEIKENTNKWKNIPCSWVGRINIMKMAILPKQDVAQRVGRHAGDNGLLLAETFGGGTSDEGLSEGVQDSEYRKRQADHRRAPAKAVLAENDPERCRHLSYELHDKEDSHKCGDDSHAPRPPEGADWVEGSQGHRSSLTL

SEQ ID NO: 34256 - protein, 317 aa, Homo sapiens
  DOMAIN (32)..(77): kw TRANSCRIPTASE REVERSE II ORF2 domain identified by eMATRIX, accession number DM01354N, p-value=5.327e-39, raw score of 13.17
  misc_feature (1)...(317): Xaa = X or * as defined in Table 2
MKREKNQIDAIKNDKGDITTDPTEIQTTIREYYKPLYTNKLENLEEMDKFPDTYTLPRLNQEEVESLNRPITGFEIEAINSLPTKXSPGAEGFTAEFYQSVGSSGQGNQARERNKGYSTRKRGTQIVPVCRWHDCIFRKLHGLSPKSPXADKQLQQSLRIQNQCAKITSIPIHQXQTYREPNHEXTPIHNCYKENKIPRNTTYKGCERPFQGELQTTAQXNKRRHKQMEEHSMLMDRKNQYRENGHTAQGHLXIQCHPHQATNYFLHRIGKNYFKLHMEPNKSLHSQDNPKQKEQSWRHHATXLQTILQGYSHQNSI

SEQ ID NO: 34257 - protein, 271 aa, Homo sapiens
  DOMAIN (166)..(213): kw TRANSCRIPTASE REVERSE II ORF2 domain identified by eMATRIX, accession number DM01354V, p-value=1.000e-40, raw score of 12.97
  DOMAIN (1)..(179): Reverse transcriptase domain identified by PFam, accession name rvt, E-value=2e-09, PFam score of 44.8
MIISIDAEKAFDKIQQHFKLKALNKLGIDGTYLKIIRAIYDKPTANIILNGQKLEAFPLKTGTRQGCPLSTLLFIIVLGVLARAIRQEKETKGIQLGKEEVKLSLSADDMIVYLENPIVSAQNLLKLIGNFSKVSGYKINVQKSQAFLYTNNRQTESQIMSELPFTIASKRIKYLGIQLTRDVKDLFKENYKPLLNKIKEDTNKWKNIPCSWIGRINIMKMAILPKIRVYQLESARGEMEQDGRIEEDSTACPPDKDTNGTKKHLCEKQKS

SEQ ID NO: 34258 - protein, 514 aa, Homo sapiens
  DOMAIN (402)..(449): kw TRANSCRIPTASE REVERSE II ORF2 domain identified by eMATRIX, accession number DM01354V, p-value=1.000e-40, raw score of 12.97
  DOMAIN (145)..(415): Reverse transcriptase domain identified by PFam, accession name rvt, E-value=4e-05, PFam score of 3.1
HQLKVQFRIIISIRSSCDGSAWGVAPTFKTRGARSRSRAAIRLGAADLDEVKSSLVNESENQSSSSDSEAERRPQPVRDTFQKPRDYFAEVRRPQDSAFFKGPPYPGYPFLMIPDLSSPYLSNGPLSPGGARTNSSPAPKETWICARFGGVSLSFLEIGSRVLLLGRDVNRSSSLLPAQIPIACHFAVDGGNFIRGKGAYLLTFDLFGNWGLFFLIEIAVWELSAHSSGQSEDALELSRGTCSSSLQLCWTAKALVGKGLDGGPVCKNSGICSTRTKTQEQMSFMEALYQEGFLRETVVQAVRKVPQTPRKAVLEVLARAISQEKEIKGIQLGKEEVKLSLFADDMTVYLENPIVSAQNLLKLISNFSKVSGYKINVQKSQAFPYTNNRQTESQIMSELPFTITTKRIKYLGIQFTKDVKGLFKENYKPLLNEIKEDTNKWKNIPCSWIGRINIVKMAILPKVIYRFNAIPIKLPLTFFTELEKTTLNFIWNQKSRIGKKILSKKNKAGGIMLP

SEQ ID NO: 34259 - protein, 281 aa, Homo sapiens
  DOMAIN (93)..(140): kw TRANSCRIPTASE REVERSE II ORF2 domain identified by eMATRIX, accession number DM01354V, p-value=1.000e-40, raw score of 12.97
  misc_feature (1)...(281): Xaa = X or * as defined in Table 2
ARAEVKLSLFADDMIVYLENPIIXARAEVKLSLFADDMIVYLENPIISAQNLLKLISKFSKVSRYKINVQKSQAFLYTNNRQTESQIMSELPFTIATKRIKYLGIQLTRDVKDLFKENYKPLLNEIKEDTNKWKNIPCSWIGRINIVKMAILPKVIYRFSAIPIKLPMTFFTELEKKNWLAICRKLKLDFFFIPYTKINSRWIKDLNVRPKTMKTLEESLGNTIQDIGIGKDFMTKTPKAMATKDQKSFCTAKETTIRVNRQPTEWEKIFAIYPSDKGLIS

SEQ ID NO: 34260 - protein, 770 aa, Homo sapiens
  DOMAIN (413)..(438): 7 kw REVERSE TRANSCRIPTASE RNA POLYMERASE domain identified by eMATRIX, accession number DM00895E, p-value=3.333e-11, raw score of 15.72
  DOMAIN (404)..(663): Reverse transcriptase domain identified by PFam, accession name rvt, E-value=2.1e-11, PFam score of 51.3
  misc_feature (1)...(770): Xaa = X or * as defined in Table 2
ENRKSNCLCLQMAXLYIXKIPSSQPKISLSXXANLAKSQDTKSMCKNHKHSYTLITDKQRAKSXVNSHSQLLQREXNTXESNLQGMXRTSSRRTTNHCSTKXKRTQTNGRTFHAHGXEESISXKWPYCPSKCKRTEIITNSPSDHSTNKLELRIKKLTQNHTITWKLNNLLLNDSWVNNEIKAEIKKFFETNENKKTTYQNLWDTAKAVLRGKFIALNAHIGNLERSKIYTLISQLKEPERQEQTNPKASRRQEITKIRAELKEIETQKTLQKINESRSWFFENIKIDRQLARLIKKKREKNQIDTITNNKGDITTDPIEIQTTIREYYKYLYANKLENLEEMDKFLDTYTLPRLNQEEVESLNTPITGSEIKAIINSLPTKRSPGPDRSTAEFYHRYKEELVLFLLKLFQSTEKEGGRDTTKKENFRPISLMNIDAKILNKILANRIQQHIKKLIYHDQVGFIPGMQGWFNICKSINVIFQYTNNRQTESQIMSELPFTIASKRIKYLGIQLTRDVKDLFKENYKPVLNEIRGHKQMEEHSMLMDRKNQYCENGHTAQGNLXIQCHPHQATNDFLHRIGKEEVKLSLFADDMIVYLENPIISAQNLLKLISNFSKVSAYKINVQKSQAFRYTNNRQTESQIMSELPFTIASKRIKYLGIQLTRDVKDLFKENYRPLLNEIKEDTNKWKNIPCSWVGRINIVIMAILSKVIYRFNANPIKLPMTFFTELEKTTLKVIWNQKRARIAKSILSQKNKAGGIMLPDFKLYYKA

SEQ ID NO: 34261 - protein, 434 aa, Homo sapiens
  DOMAIN (312)..(359): kw TRANSCRIPTASE REVERSE II ORF2 domain identified by eMATRIX, accession number DM01354V, p-value=1.000e-40, raw score of 12.97
  DOMAIN (139)..(325): Reverse transcriptase domain identified by PFam, accession name rvt, E-value=0.021, PFam score of -35.4
LDALQCLRYSIRQYAVQNIHARSSSALKGEAILEKGTEGKKGQADGQEWTREGKGVPLCTPMSRACECPLPAALTLESAMKTLDFRQSGEKQQSPEDNKLQLDLMEKTMYQADILDFEVDAIMYKNSFQEGFWFPGKTEMLLLIHALSWCFKQKGDAYSRSSHLATTLSLMHTFKNRLGNIIQDIGMGKDFTTKTAKAMATKAKIDKWDLIKLKSFCRAKETTIRVNRKPTEWEKIFAIYPSDKGLISRIYKEFKQIYKKKTTPSKAQNLLKLISNFSKVSGYKINVQKSQAFLYTNNRQTESQIMSELPFTIASKRIKYLGIQLTRDVKDLFKENYKPLLKEIKEDTNKWKNIPCSWVGRINIVKMAILPKKKKKKKKKKEKEKKGGEGGKREGGGREEGGGGGGEGEEGEGGEGGGRKEEEEGRKKEERRRK

SEQ ID NO: 34262 - protein, 623 aa, Homo sapiens
MQPNVIDWSDVRKHKYGHLSESASQYQAADILDLGHFTWDKYLKETCSVPAPVHCFKQSYTPPSNEFKISMKLEAQDPRNTTSTCIATVVGLTGARLRLRLDGSDNKNDFWRLVDSAEIQPIGNCEKNGGMLQPPLGFRLNASSWPMFLLKTLNGAEMAPIRIFHKEPPSPSHNFFKMGMKLEAVDRKNPHFICPATIGEVRGSEVLVTFDGWRGAFDYWCRFDSRDIFPVGWCSLTGDNLQPPGTKVVIPKNPYPASDVNTEKPSIHSSTKTVLEHQPGQRGRKPGKKRGRTPKTLISHPISAPSKTAEPLKFPKKRGPKPGSKRKPRTLLNPPPASPTTSTPEPDTSTVPQDAATIPSSAMQAPTVCIYLNKNGSTGPHLDKKKVQQLPDHFGPARASVVLQQAVQACIDCAYHQKTVFSFLKQGHGGEVISAVFDREQHTLNLPAVNSITYVLRFLEKLCHNLRSDNLFGNQPFTQTHLSLTAIEYSHSHDRYLPGETFVLGNSLARSLEPHSDSMDSASNPTNLVSTSQRHRPLLSSCGLPPSTASAVRRLCSRGSDRYLESRDASRLSGRDPSSWTVEDVMQFVREADPQLGPHADLFRKHEIDGKALLLLRSDMMMN

SEQ ID NO: 34263 - protein, 615 aa, Homo sapiens
  DOMAIN (57)..(100): kw TRANSCRIPTASE REVERSE II ORF2 domain identified by eMATRIX, accession number DM01354T, p-value=1.000e-40, raw score of 9.48
  DOMAIN (1)..(179): Reverse transcriptase domain identified by PFam, accession name rvt, E-value=1.1e-06, PFam score of 25.0
  misc_feature (1)...(615): Xaa = X or * as defined in Table 2
MVISVDAEKTFNKIQQPFTLKTLNKLGIDGSYLKIIRAIYDQPTANIILNGQKLEAFPLKTGRRQGCPLSPLLFNIVLEVLARAIRQEEEIKGIQLGKEEVKLSLFADEMIVYLENPIVSVQNLLKPIRNFSKVLGYKINVQKSQAFLYTINRHTESQIMSELPFTIATKRMKYLGIQVTRYVKDLFKENYKPLLNEVKEDTNKWKNIPCPWIGRINILKMAILPKELEKTTLKFIWNQKRACIAKSILSKKNKAGGITLPDFKLYYKATVTKTAWYWYQNRDIDQWNRTEPSDIIPHIYNHLIFDKPDKNKKWGMGSLFNKWCWENWLAICRKLKLDPFLTPYTKINSRWIKDLNVRPKTIKTLEENLGNTIQDIDMGKDFMSKTPKAMATKAKIDKWDLTKLRSFCTAKETTIRVNRQPKEWEKIFAIYSSDKGLISRIYKELNFTRKNNPIKKWAKDMNRYFXKEDIYAANRHMKKCSSSLAIREMQIKTTMRYHLTPVRMAIIKKSGNNRTRENYFKIHMESKKSQNSQGNRKEKEQSWRHHATRLQTIVQGYTVAKTACYWYKNRPTDQSNRTENQEIRLHTYNHLIFDKPDKSNGETTPYSINGARITG

SEQ ID NO: 34264 - protein, 233 aa, Homo sapiens
  DOMAIN (116)..(163): kw TRANSCRIPTASE REVERSE II ORF2 domain identified by eMATRIX, accession number DM01354V, p-value=1.000e-40, raw score of 12.97
MIISTDVEKDFHKIQQPFMLKILNKLVLEVLARAIRQKKEIKGIQLGKEEVRLALFADDMIVYLENPTVLAPNLLKLISNFSKVSGYKINVQKSQAFLYTNNRQTESQIMSELPFTIASKRIKYLGIQLTRDVKDLFKENYKPLLNEIKEDTNKWKNTPCSWIGRINIVKMAILPKIGYCVQDTTSANTTLVHQTTPSHVMPPNHHQLAFNYQELEHLQTVKNISPLQILPPS

SEQ ID NO: 34265 - protein, 1162 aa, Homo sapiens
  DOMAIN (328)..(371): kw TRANSCRIPTASE REVERSE II ORF2 domain identified by eMATRIX, accession number DM01354T, p-value=1.000e-40, raw score of 9.48
  DOMAIN (218)..(1009): Reverse transcriptase domain identified by PFam, accession name rvt, E-value=2.1e-61, PFam score of 217.4
  misc_feature (1)...(1162): Xaa = X or * as defined in Table 2
MKSGHPEKEQDNSDVQETREITIRGLLCTALMRHSTGAIAYLGVLSGSASLKLAGVPLRCCEGDKDAGHPLETQTALCERGRGARSLVGNTIMTSQPVPNETIIVLPSNVINFSQAEKPEPTNQGQDSLKKHLHAEIKVIGVNLIQNVLERGWGKCQEMIYVLGLDICRPFFVSRVSEEGRMGQRGEEDANSLDFPPASLLCLICQEQGVNGESCSPVGMYHREIVPVYEVLSVITGLQIQVFSGKEADSVIKRSIGWGPFFKPRTKDKNHMIISIDAEKAFDKIQQHFMLKTLSKLGIDGTYLKIIRAIYDKPTANIILNGQKLEAFPLKTGTRQGCPLSPLLFNIVLEVLARAIRQEKEIKGIQLGKEEVKLSLFADDMIVYLENPIVSDQNLLKLISNFSKVSGYKINVQKSQAFLYTNNRQTESQIMSELPFTIASKRIKYLGIQLTRDVKDLFKENYKPLLNEIKEDTNKWKNIPCSWVGRINIVKMAILPKVATITVLTLQVRFRDLCNMPKVTQLDTAEPRFKSAQNPIQNNSIFSYQASLGSLWLRQFLRLSIVMPWTVLKGIGQLSVLHVYVVWPLKEFVFEALGKWLGKDQLQATMRVCLISSTVRNSSMSREQSGTLASQETLSMEAFLKALCGGGPNLCTSIDPLNLFFPVVVNSQILLSHPQIPAIAETYSEEKCLKELKTKARELREECRSLRSRCDQLEERVSAMEDEMNEMKREGKFREKRIKRNEQSLQEIWDYVKRPNLRLIGVPESDGENGTKLENTLQDIIQENFPNLARQANIRIQKIQRMPQRYSSRRATPRHIIVRFTKVEMKEKMLRLNHEELESRIDQXQVLKFRQLLIAYQPKKVQNQMDSQPNSTRANIILNGQKLEAFPLKTGTKQGCPLSPLLFNIVVDVPARAIRQEKEIKGIQLGKEEAKLSLFADDMNVYLKIPIVSVQNLLKLISNFSKVSGYKINVQKSQAFLYTNNRQTESQIMSELPFTIASKRIKYLGIQLTRDVKDLFKENYKPLLNEIKEDTNKWKNIPCSWIGRINIMKMAILPKVIYRFNAIPIKLPMTFFTELEKTALKFIWNQKRACIAKTILSQKNKAGGITLPDFKLYYKATVAKTAWYWTKTAWYWYQNRDIDQWNRIEPLEIIPYTYNHLIFEKP

SEQ ID NO: 34266 - protein, 404 aa, Homo sapiens
  DOMAIN (341)..(388): kw TRANSCRIPTASE REVERSE II ORF2 domain identified by eMATRIX, accession number DM01354V, p-value=1.000e-40, raw score of 12.97
  misc_feature (1)...(404): Xaa = X or * as defined in Table 2
TSLGPIYCAVRHTSSCRKVGSSRCQHGCQLSVRLQLDQAHHKQLPWLAPKNAVVPKSLEDPQGRKEGVTALTPEAPRSGPPKRLQLFPPSLCPNCSKQGAYFSPFGVTATLLATPFSRSRVLVLQPGRMRYADKWRVSKMKRCCIEQWNSSEKTHSARASHSLQRQRGGPRVGGSSLQAGCHVISAALSKEEALEWVASFCRQIVQSYLRPLLCSGADPGAFMDLRGEELRSLELSLSYTPPSNEFKISMKLEAQDPRNTTSTCIATVVGLTGARLRLRLDGSDNKNDFWRLVDSAEIQPIGNCEKNGGMLQPPLGDSFHCDVRVSILDLFCFLLSELPFTIDTKRIKYLGIQLTKDVKDLFKENYKPLLNEIKEDTNKWKNIPRSRIGXINIVKMAILPKDFG

SEQ ID NO: 34267 - protein, 473 aa, Homo sapiens
  DOMAIN (182)..(229): kw TRANSCRIPTASE REVERSE II ORF2 domain identified by eMATRIX, accession number DM01354V, p-value=1.000e-40, raw score of 12.97
  DOMAIN (22)..(195): Reverse transcriptase domain identified by PFam, accession name rvt, E-value=4.6e-05, PFam score of 2.2
MDSMSGGGQYRKINGNPTSVKCPLLLLPAILTPEPVNRWRQSCKAFARHSPLAFRVTISTSTFFDGLLVTGLYTSTSVQASQSIGGSSAFGFVLEVLARAIRQEKEIKGIQLGKEEIKLSLFAGDMIVYLENPIVSAQNLLKLISNFSKVSGYKINVQKSQAFLYTNNRQTESQIMSELPFTIASKRIKYLGIQLTRDVKDLFKENYKPLLKEIKEDTNKWKNIPCSWVGRINIVKMAILPKNWKKLKFIWNQKRAHIAKSILSQKNKAGGITLPDFKLYYEATVTKTAWYWYRNRDIDQWNTTEPSEIMPHIYNYLIFDKPEKNKKWGKDSLFNKWCWESWLAICRKLKLDPFLTPYTKINSRWIKDLNVRPKTIKTLEENLGITIQDIGMGKDFMSKTPKAMATKAKIDKWDLIKLKSFCTAKETTIRVNRQTTKWEKIFATYSSDKGLISRICNELKQIYKKKTNNPIKK

SEQ ID NO: 34268 - protein, 521 aa, Homo sapiens
  DOMAIN (120)..(167): kw TRANSCRIPTASE REVERSE II ORF2 domain identified by eMATRIX, accession number DM01354V, p-value=9.022e-38, raw score of 12.97
  DOMAIN (79)..(314): Reverse transcriptase domain identified by PFam, accession name rvt, E-value=0.00013, PFam score of -3.9
  misc_feature (1)...(521): Xaa = X or * as defined in Table 2
IQTTIGEYYKHLYTNKLENLEEMDKFLDTYTLPRLNQEEGESLKRPMAGSEIEAIINSLPTKNSPGPDRFTAEFYQRYKEELLISNFSKVSVIQNQWEKITSIPIHQXQTNREPNHEXTPIHNCFKENKILGIQLTRDVKDLFKENYKPLLSEIKEDTNKWKNIPCSWIGRTNIVKMAILPKDKTSKYIDVDENEGSHCGKRKYKYGMEKALEILARAIRQEKEIKGIQLGKEEVKLSLFADDMIVHLENPIISAQNLLKLISNFSKVSGHKINVQKSQTFLYTNNRQTESQIMSGLPFKIATKRIKYLGIQLTRDVRDLFKENYKPLLNETKEDTNKWKKNILSSWIGRINIVKMAILPKVIYRFNAILINLPMTFFTELEKTTLKFIWNQKRACIAKTILSQRNKAGGITLRDFKPYYKATETKTASEMKYYLENKIPFKVLHMVYNVPTHPPFIGDLHPNTKVVSLPPNITSLIEPMNQGVISAFKDCYLRKTFVQAVATPEGETEMTVMQFWKDYNT

SEQ ID NO: 34269 - protein, 856 aa, Homo sapiens
  DOMAIN (295)..(338): kw TRANSCRIPTASE REVERSE II ORF2 domain identified by eMATRIX, accession number DM01354T, p-value=1.000e-40, raw score of 9.48
  DOMAIN (193)..(418): Reverse transcriptase domain identified by PFam, accession name rvt, E-value=1.8e-25, PFam score of 98.1
  misc_feature (1)...(856): Xaa = X or * as defined in Table 2
MVKGSIQQEELTILNRYAPNTGAPRSIKQVLSDLQRDLDSHTIIMGDFNTPLSTLDRSTRQKVSKDIQELNSVLHQADLIDIYRTLHPKSTECTFFSAPHRTYSKIDHIVGSKALLSKYKRTEIITNCCSDHSATKLELRINKLTQNRSTTWKLNNLLLNDYWVHNEMKAQIKMFFETNENKDTAYQNLWDTFKAMCRGKFIALNAHKRKQERSKIDTLTSRLKELEKQEQTLHSKDSRRQEINAEKAFDKIQQPFMLKTLNTLDIDETYLKIIRAIYDKPTVNIILNGQKLEVFPLKTGTRQGCRLSPLLFNIMLEVLARAIRQEKEIKGIQLGKEEVKLSLFADDMIVYLENPIISAQNLLKLISNFSKVSGYKINVQESQAFLYTNNRQTESQIMSELPFTIASKRIKYLGIQLTRDVKDLFKENYKPLLKEIKEDTNKWKNIPCSWVGRINIVKMAILPKVIYRFNAISNKLPMTFFTELEKTTLKFIXKQKRACIAKSILSQKNKAGGITLPDFKLYYYKAIVTKTAWYWYQNRDIDQWNRTEPSEIIPHIYNHLIFDKPDKNKKWGNDSLFNKRCWENWLAICRKLKLDPFLTPYTKINSRWIKDLHVRPKTIKTLEENLGNTIQDIGMGKDFMTKTPKAMATKSKIDKWDLIKLKSFCTAKETTIRVNRQPTEWKKIFTIYPSDKGLISRIYKEPKQIYKKKTNNLIKKWMKDVNRHFSKEDIYAANRHMKKCSSSLAIREMQIKTTMRYHLTPVRMAVIKKSGNNRQTESQIMSELPITIASKRIKYLGIQLTKDVKDLFKENYKPLLNEIKEDTNKWKNIPCSWIGRINIVKNGHTAQGICEHEPRQ

SEQ ID NO: 34270 - protein, 710 aa, Homo sapiens
  DOMAIN (458)..(480): MUSCARINIC M3 RECEPTOR SIGNATURE domain identified by eMATRIX, accession number PR00540B, p-value=1.909e-10, raw score of 16.29
  misc_feature (1)...(710): Xaa = X or * as defined in Table 2
QRLRRQHRLEQKTRSTTCHMRQSTTRSAERADTRIESMPTXTTPXHTDDVPSHCTNSTHTATTSPSTHNHQQTLTRVANVAQIRRTDISSIAATEWISTINTHNYACRTRAVSQRRYVSDFEKRERPTSNTPEPRFRLVVSTPTLVGTTQGTYQPPPARSRISIASHLLPPLSLLPSSLDLDGRSTLACSSSVSQFSGSRGSPSSYIVATTRVISDVDYDMTTYYNSTITPISPSARSXCQRSVHLLLSSHRTYRHPLVSRHTSQEHSLGGPLHRHXYNPVGSRAAAWASKSALVSVSLEALVVSALIXLVATRQRLVGICRTTPIRARSSVVRXVTRYQPNQRAPLIHATYHLLDRGQHPQSMQTISHWTTPPCWCLVCGKKSSLPCCSTSSMSTRRNQYDTLSLTTSWVLXSSIFWLAFILLPRTSLPWPTVSXLAANASSGSTPVNSSFRTSVRRSKLVVPANEIETPSFVVVTKFSRSASSYDCSIEYASTYAINITIVNSYVFAPTHTTREHTISYALTSPGQPQNKTRIPELQWAFXAVRPSTQPSTVIYHAPTSQAIASCALHSLLGCLLGSATAPLPPTWTTPPPPPQLRTTXSTGSLPHPPSCXTRPXPLAPRNXPFTGMSSQHCIPTXPQLASHSIALRGSRARPTTSQTSIASSHSHSXLSHVQXRPLSDQRSPLDHHAHSSILYARASRISCLRVCAV

SEQ ID NO: 34271 - protein, 210 aa, Homo sapiens
  DOMAIN (99)..(142): kw TRANSCRIPTASE REVERSE II ORF2 domain identified by eMATRIX, accession number DM01354T, p-value=5.154e-38, raw score of 9.48
  DOMAIN (11)..(210): Reverse transcriptase domain identified by PFam, accession name rvt, E-value=9.6e-07, PFam score of 26.1
  misc_feature (1)...(210): Xaa = X or * as defined in Table 2
MTPNYTSRLFLHMGVLFYPFYRRLTXHIRTHINLKGWKNRHFMQMDTKNAEKALDKIQHRFMIKTLSKISIQGTHFKIIKAIYGKSTTNTILNGEKLKAFPLRTGIKQGCPLLPLPFNIVLELLARAIRQEKEIKGIQIGKEEVKLTLFADDMIIYLENSKDSSRKLPELIKEFSKVSRYKVNLHKSIALLYTNSDQAENQIKNSTSFTI

SEQ ID NO: 34272 - protein, 263 aa, Homo sapiens
  DOMAIN (170)..(208): Lysyl oxidase  copper-binding region proteins domain identified by eMATRIX, accession number BL00926B, p-value=8.726e- 09, raw score of 13.84
MATNTANSAGLKPTCVCVALPLPPGRSAPHRRGRAAASGVRGHLRDTLSDLPVLLASAGSRAAVGGAGEPRSEPQISRPDPEEPQNALIRAPGLGPPGRGRRAGLREGARRAKVTLRAGAGTRTQAQAAPARPAAAAAPRLADPPEAALAGPPPAQEPLLPVVFSRDVAAAGGATEAEGARPQRACARPARPPPPSRASAMWRRIYGQRSTPPTGRHEPRPFLSSQSAALTPPRRTGRAAARGRAAVSPFDPGAPRCSQTRSR

SEQ ID NO: 34273 - protein, 560 aa, Homo sapiens
  misc_feature (1)...(560): Xaa = X or * as defined in Table 2
MEMLYCLIAEAGHISSRMATNTANSAGLKPTCVCVALPLPPGRSAPHRSCSQAGRELPGQGPRYYRHLPQLSILHSIGEGQGCGFWSERSFKGYPERPAGAAGVCRLQGCGRRGRGAPFRTTDFSSRPRGAAERADQGPRAGSPWPRTTSGAQRGRAQGQGHTARRRGNSNPGPSRARQASRRRRPATSGPPRGSPRPDRPRRRSPFYRSSSRETSRPPEGPRRPRAPALSAPAPGQPARPRPREPVPCGAVFTARDRLRPPAATSHAPFSAANPRRXHRPGGPGARRLGDAQLSRRSTSGAPRCSQTRSRXPTCVCVALPLPPGRSAPHRSCSQAGRELPGQGPRYYRHLPQLSILHSIGEGQGCGFWSERSFKGYPERPAGAAGVCRLQGCGRRGRGAPFRTTDFSSRPRGAAERADQGPRAGSPWPRTTSGAQRGRAQGQGHTARRRGNSNPGPSRARQASRRRRPATSGPPRGSPRPDRPRRRSPFYRSSSRETSRPPEGPRRPRAPALSAPAPGQPARPRPREPVPCGAVFTARDRLRPPAATSHAPFSAANPRR

SEQ ID NO: 34274 - protein, 88 aa, Homo sapiens
  DOMAIN (10)..(88): Gag P30 core shell protein domain identified by PFam, accession name Gag_p30, E-value=1.3e-22, PFam score of 82.8
  misc_feature (1)...(88): Xaa = X or * as defined in Table 2
XKGALDDSHRYLLASIKRASQKPINLSKTTEVVQRPEKSPRRFLEHLQEAYRIYTPFYRIYTPFDPAAPENSLAINLAFVAQAAQDIK

SEQ ID NO: 34275 - protein, 212 aa, Homo sapiens
  misc_feature (1)...(212): Xaa = X or * as defined in Table 2
DHTCRLRQRLRLRVLVGPVPGAGPAGXKGCYGGRSANHHGAPASCHLARSSCGPRLPGRYSAQQPRARCAASGLCGWTAPAADPVPSEVLASQEVQLLCAGEXSGSCGPTHADLQPSPGGTGEDGAARAKRDLPGSVGERAAAPASGRLRACPGRPAGAPGPRARPPGGTAALAQPPRPQGAAARPPSGIGWPGNNGSAQSKGRALMEQAAG

SEQ ID NO: 34276 - protein, 739 aa, Homo sapiens
  DOMAIN (447)..(454): 0 kw ZK63212 YDR313C ENDOSOMAL III. domain identified by eMATRIX, accession number DM01970A, p-value=3.700e-09, raw score of 8.50
  DOMAIN (224)..(721): Zinc finger, C2H2 type domain identified by PFam, accession name zf-C2H2, E-value=9.4e-104, PFam score of 358.1
  misc_feature (1)...(739): Xaa = X or * as defined in Table 2
SLFHGKVCHFLHEPLPLVYLSLCTGYQLFKPSLISWLEEEEELSTLPRVLQEWKMCLKTKGPALWQDNFCLKTLNGIQLARNQNGEELYDCKQCEDVFCKHPCLKTNMSTQNRGNTSECIQYAKDLLSLYNKTSTIRKVSVFSKHGKSFRLFXMFRSRESVHKINPLKCTDYGKAFIYQSYLEAHRKTQSGEKLNEWKQCGEAFTHSTSHAVNVETHIIKNPYECKECGKDFRYPTHLNNHMQTHIGIKPYKCKHCGKTFTVPSGFLEHVRTHTGEKPYGCKECGKAFGTSAGLIEHIRCHAREKTFKCDHCGKAFISYPSLFGHLRVHNGEKPYEHKEYGKAFGTSSGVIEDRRSNTGQKRFDCDQCGKVFVSFSSLFAHLRTHTGEKPFKCYKCGKPFTSSACLRIHMRTHTEERLYQCKKCGKAFTKCSYLTKHLRTHAGEKPYECMKCGKAFTERSYLTKHLRRHSGEKPYECKKCGKAFTERSDLTKHLRRHTGDKPYEYKDCGKAFVVSSSLVDHLRTHTGYKPYKCNACEKAYSRSCVLTQHLKTHAAEKTSECNACGNSFRNSMCFHDRLKTLTKIKPYKCKDCGKAFTCHSDLTNHVRIHTGEKPYKCKECGKAFRTSSGRIQHLRTHMGEKPFECDQCGKAFAFSQLVLHIXKHTREKPCGCEECGKTFAVSSSLTEHVKIHRRKXHYQCKECGESLNSSNLSRYVQTHTVEKPCKCKGCRKTLVLLSL

SEQ ID NO: 34277 - protein, 150 aa, Homo sapiens
  DOMAIN (12)..(52): Zinc finger, C3HC4 type (RING finger) domain identified by PFam, accession name zf-C3HC4, E-value=0.029, PFam score of 11.6
  misc_feature (1)...(150): Xaa = X or * as defined in Table 2
GLLHERQAEARCSICLDYLRHPMTTDCRHYIXSARIHQCWXELQDISPCPVCLQHCPDKNLKRNFQLCHMTDIAKQLLTTARRKRKLQGEEPVCRKSDVALFCEKDPELLCHQYRVSLDHXDHSPMPIEQAAAKHRKQFESYIEPLEKQV

SEQ ID NO: 34278 - protein, 337 aa, Homo sapiens
  misc_feature (1)...(337): Xaa = X or * as defined in Table 2
WNGHRMNXMQSSNGLEWNQSSNGKEWNHRIESNGIIIAWNQWYQHQTEKNGIFEWNRRESSNGPEWNHVMEWNGDNPWTRMQSSSNGIEWNHRMDSNGIIFQWNGNGNHRIGIEWNYDQSNEWIQWNQHQTEKNGIIKWNRRESSNGPEWNHLMEWNENNPWTRMQSSSNGIEWNRMESSNGLEWNNHXTESNGSVESSSDGNERQSSSNGIAWNHHKMESNGINIKWNQMESWNWNXMNRMELSSNGIEWNQHQTEKNGIIEWNRRESSNGPEWNHLMEWNENNPWTRMQSSSNWNRMESSNGLEWNNQLNGIEWNHHRMEMNGIIIEWNRIELWN

SEQ ID NO: 34279 - protein, 499 aa, Homo sapiens
  misc_feature (1)...(499): Xaa = X or * as defined in Table 2
MASLLGAPRLAGWASGAGALSRGWAIRPADTGGNLGPVPRVPLPPDPVLTARWAPGVNSGSQFSCHCQAPILEMGHKGSSPGLGDAEVRAITVQCIRPIDGPQQPPGGGSAGRRLTIPASTQEWAQLPVGRVLANVLTEGGDTGNQPIPQRSLCRPQPCSHAETWGEVEAQVPAQSNREQPAAAPGCGPGRGETGARPETTFSPRRAPPNPYDEEGVRWSLEFMLCGTDGPVQPVQHQEGPAARLQLIRGGSLILESEGTLRGSPVLQTDQPASHLLHTQGFWAAALSAVCLHQNIIHSGSALLAPATRAAWEQIQRSEGGTAQLLRRLEGYFSNVARNVQWTYLQPFVIVTTNMILAVDIFDKFNFTGARVPWFDAIHEAFPRELESSISFPANFFKPPEEKEGPLVRPASRKTTPQTTRPGPGTEREAPISRXKRHPDDTGXFTFTLGIVYCTPGQLPPEPYDPNRRSLWLPHWPIINTSMVSALVYSEGAPLPSPL

SEQ ID NO: 34280 - protein, 227 aa, Homo sapiens
  misc_feature (1)...(227): Xaa = X or * as defined in Table 2
MGQLLDKNTPSHGARTREECGRERLCVSPSQTGDTPRTSAYLCVGGPAWSPLSESRPAGSSGCPWIKPPDPRYSPIGLCSLLTTEMMSRQPRTDLRGQTNPAAPSAPVPLSCSQNLPVWPSLMAGTTWHSPLSPSCFWHSPGHNXHXCCVSKDXKSLFWEPTAYSPLLPSTSPSSKSMQPPKPRSNADSSVQASLIPRAMSSPTVSPWIMGNGSQGFDHIAVSMWDD

SEQ ID NO: 34281 - protein, 95 aa, Homo sapiens
  misc_feature (1)...(95): Xaa = X or * as defined in Table 2
RESRNLSRGEESEDPAEPSRNGXEHPLCYLQXEFLQVLTMLQAEGTMHHFRSICQVNRNFLERGHSPPSPAPPPETHTGSPRPPSGRSRIRAYLH

SEQ ID NO: 34282 - protein, 594 aa, Homo sapiens
MGFLQVVEAGLEPTTSVYQLPEATRAQRGRPIVNLLPLEQDERITAILPVTEFEEGVKVFMATANGTVKKTVLTEFNRLRTAGKVVRFKESSVRAMGCNTTGVRGIRLGEGDKVVSLIVPRGDGAILTATENGYGKRTAVAKYPTKSRAETGVNLIKVTERNGLSVGAVQVDDCDQIMMIHDAATSKGIFPISMKQAKPQASNASTVVSGEFQPIASVLLIISICVETAISANSSKPQAWRGTANRAAWGGAGEGARKAGEGARGLRGLRIGDWRAMALGLQRARLGGHCATPEQWAEFFYVLKANQSLKHLRLSANVLLDEGAMLLYKTMTRPKHFLQMLSKPSNVTVQFIPLAKNSVMPRKPPGIKDSNQKRPCQTTTAEKATDPSLRIQRLLRLITQPEWLAEAARITLSSKGAHTPGVDGVNKTMLQARLAVELQILRDELLSGHYQPLPARRVYIPKSNGKLRPLGIPALRDRIVQRAMLMAMEPIWESDFHTLSYGFRPERSVHHAIRTTVVKPGGRWVIEGDLSSYFDTVHHRLLMKAVRRRISDARFMTLLWKTIKAGHIDVGLFRAARKGCHRAVLYRPYYRTSW

SEQ ID NO: 34283 - protein, 952 aa, Homo sapiens
  DOMAIN (171)..(193): AAA-protein family proteins domain identified by eMATRIX, accession number BL00674B, p-value=4.818e-11, raw score of 4.46
  DOMAIN (176)..(190): NB-ARC domain identified by PFam, accession name NB-ARC, E- value=0.033, PFam score of 11.4
MTSPQLEWTLQTLLEQLNEDELKSFKSLLWAFPLEDVLQKTPWSEVEEADGKKLAEILVNTSSENWIRNATVNILEEMNLTELCKMAKAEMMEDGQVQEIDNPELGDAEEDSELAKPGEKEGWRNSMEKQSLVWKNTFWQGDIDNFHDDVTLRNQRFIPFLNPRTPRKLTPYTVVLHGPAGVGKTTLAKKCMLDWTDCNLSPTLRYAFYLSCKELSRMGPCSFAELISKDWPELQDDIPSILAQAQRILFVVDGLDELKVPPGALIQDICGDWEKKKPVPVLLGSLLKRKMLPRAALLVTTRPRALRDLQLLAQQPIYVRVEGFLEEDRRAYFLRHFGDEDQAMRAFELMRSNAALFQLGSAPAVCWIVCTTLKLQMEKGEDPVPTCLTRTGLFLRFLCSRFPQGAQLRGALRTLSLLAAQGLWAQMSVFHREDLERLGVQESDLRLFLDGDILRQDRVSKGCYSFIHLSFQQFLTALFYALEKEEGEDRDGHAWDIGDVQKLLSGEERLKNPDLIQVGHFLFGLANEKRAKELEATFGCRMSPDIKQELLQCKAHLHANKPLSVTDLKEVLGCLYESQEEELAKVVVAPFKEISIHLTNTSEVMHCSFSLKHCQDLQKLSLQVAKGVFLENYMDFELDIEFESSNSNLKFLEVKQSFLSDSSVRILCDHVTRSTCHLQKVEIKNVTPDTAYRDFCLAFIGKKTLTHLTLAGHIEWERTMMLMLCDLLRNHKCNLQYLRLGGHCATPEQWAEFFYVLKANQSLKHLRLSANVLLDEGAMLLYKTMTRPKHFLQMLSLENCRLTEASCKDLAAVLVVSKKLTHLCLAKNPIGDTGVKFLCEGLSYPDCKLQTLVLQQCSITKLGCRYLSEALQEACSLTNLDLSINQIARGLWILCQALENPNCNLKHLRLKTYETNLEIKKLLEEVKEKNPKLTIDCNASGATAPPCCDFFC

SEQ ID NO: 34284 - protein, 59 aa, Homo sapiens
  DOMAIN (17)..(45): Granins proteins domain identified by eMATRIX, accession number BL00422C, p-value=8.054e-13, raw score of 16.18
STTHPSVHEQEEEEEEEEEEEEEEEEEEEEEEEEEEEEEERKKECSKAQCKHFPLSEVL

SEQ ID NO: 34285 - protein, 99 aa, Homo sapiens
  DOMAIN (45)..(73): Granins proteins domain identified by eMATRIX, accession number BL00422C, p-value=4.886e-11, raw score of 16.18
MTVCIHIASEDLPVGRDVEVEDSDIHDRDPGLGDKSETPSEEKKEEEEEEEEEEEEEEEEEEEEEEEEEEEEEEEEEEEEEEEEEEEEESNFLQHYLHL

SEQ ID NO: 34286 - protein, 122 aa, Homo sapiens
  DOMAIN (1)..(36): Matrix protein (MA) p15. domain identified by eMATRIX, accession number PF01140D, p-value=7.488e-09, raw score of 15.54
KKRKEEEEEEEEEEEEEEEEEEEEEEEEEEEEEEEEEEEEEEEEEEEEEEEEEEEEEGEPFLLLLVNGVLIPGVRSCLDSTSQFSLTGMLLQEKSEIFGLAVCSPLIKRKGGHIPVLNTVPG

SEQ ID NO: 34287 - protein, 65 aa, Homo sapiens
  DOMAIN (4)..(55): Neuromodulin (GAP-43) proteins domain identified by eMATRIX, accession number BL00412D, p-value=2.688e-13, raw score of 16.54
  misc_feature (1)...(65): Xaa = X or * as defined in Table 2
CLWLFQEEEEEEEEEEEEDXEEEEEEEEEEEEEEEEEEEEEEEEEEEEEEEEEEEKIFLGHRVGI

SEQ ID NO: 34288 - protein, 191 aa, Homo sapiens
  DOMAIN (52)..(78): INHIBITOR CALPAIN CALPASTATIN REPEAT THIOL PROT domain identified by eMATRIX, accession number PD01443H, p-value=4.265e- 09, raw score of 11.91
  misc_feature (1)...(191): Xaa = X or * as defined in Table 2
MQIPSLHKLKKEEEEEEEEEEEEERRRRIGRGREKKEEEEEEEEEEEEEEEEEEEKKKKEEKKKKEEEEEERRRKKKKERKEEEEEEGKEEEEGEEGEEEEEEEEEERRKEEEEEEEEGEEEEEEEESCLMGPMCVHIHPDKDLYSLGPPAQRFTGSHAELPTXKARRSSSWTAASRGCAARDPPRRCSPA

SEQ ID NO: 34289 - protein, 77 aa, Homo sapiens
  misc_feature (1)...(77): Xaa = X or * as defined in Table 2
PKGRTPSPSCIHRYPCQTPRPHEPXGCHCPEEKPRPRVWGPSRCMPLGSVQEKRPCPAPGGVQGSFRVSPLMMLTRL

SEQ ID NO: 34290 - protein, 191 aa, Homo sapiens; identical to SEQ ID NO: 34288
  DOMAIN (52)..(78): INHIBITOR CALPAIN CALPASTATIN REPEAT THIOL PROT domain identified by eMATRIX, accession number PD01443H, p-value=4.265e- 09, raw score of 11.91
  misc_feature (1)...(191): Xaa = X or * as defined in Table 2

SEQ ID NO: 34291 - protein, 38 aa, Homo sapiens
  misc_feature (1)...(38): Xaa = X or * as defined in Table 2
WCNGSPLYSGWXLVGMESLGRMHKDLWTRQPNQDQDLQ

SEQ ID NO: 34292 - protein, 1240 aa, Homo sapiens
  DOMAIN (1194)..(1222): PRECURSOR GLYCOPROTEIN SIGNAL RE domain identified by eMATRIX, accession number PD01719A, p-value=8.200e-17, raw score of 12.89
  DOMAIN (28)..(896): Immunoglobulin domain identified by PFam, accession name ig, E-value=3.8e-102, PFam score of 334.2
MGMTKKIRDNKSRQGCGEKGTLAHCWWDSPKMTWMKDGRPLPQTDQVQTLGGGEVLRISTAQVEDTGRYTCLASSPAGDDDKEYLVRVHVPPNIAGTDEPRDITVLRNRQVTLECKSDAVPPPVITWLRNGERLQATPRVRILSGGRYLQINNADLGDTANYTCVASNIAGKTPENLFLLSKYEQSKKADSEDFTCDFSCRYSILENGFLHIQSAHVTDTGRYLCMATNAAGTDRRRIDLQVHGSLVIISPSVDDTATYECTVTNGAGDDKRTVDLTVQVPPSIADEPTDFLVTKHAPAVITCTASGVPFPSIHWTKNGIRLLPRGDGYRILSSGAIEILATQLNHAGRYTCVARNAAGSAHRHVTLHVHEPPVIQPQPSELHVILNNPILLPCEATGTPSPFITWQKEGINVNTSGRNHAVLPSGGLQISRAVREDAGTYMCVAQNPAGTALGKIKLNVQVPPVISPHLKEYVIAVDKPITLSCEADGLPPPDITWHKDGRAIVESIRQRVLSSGSLQIAFVQPGDAGHYTCMAANVAGSSSTSTKLTVHVPPRIRSTEGHYTVNENSQAILPCVADGIPTPAINWKKDNVLLANLLGKYTAEPYGELILENVVLEDSGFYTCVANNAAGEDTHTVSLTVHVLPTFTELPGDVSLNKGEQLRLSCKATGIPLPKLTWTFNNNIIPAHFDSVNGHSELVIERVSKEDSGTYVCTAENSVGFVKAIGFVYVKEPPVFKGDYPSNWIEPLGGNAILNCEVKGDPTPTIQWNRKGVDIEISHRIRQLGNGSLAIYGTVNEDAGDYTCVATNEAGVVERSMSLTLQSPPIITLEPVETVINAGGKIILNCQATGEPQPTITWSRQGHSISWDDRVNVLSNNSLYIADAQKEDTSEFECVARNLMGSVLVRVPVIVQGECDQRNIHSKQYLGGLHGEPAVSPVEKASKRGVVCATSPFQPMVGSPAKVQIWKCETVKISLVQWMVAGRNGVFGKNAQGAVDAATKPGPGLAIIHQFSMFMEHGALGSLGEHAAKVVGKVLRQEQDFVITHHQRLVGPTVMEQKHRCKFAMKEIVQFMASGRLGPVGVPVLCHVEEVPDREQGAAPTLCPSMEEGNAKGVMSRVIFATVTLAQVSVGNTHGNWSPWSGWGTCSRTCNGGQMRRYRTCDNPPPSNGGRACGGPDSQIQRCNTDMCPVDGSWGSWHSWSQCSASCGGGEKTRKRLCDHPVPVKGGRPCPGDTTQLSLW

SEQ ID NO: 34293 - protein, 190 aa, Homo sapiens
MACHMVKPDLKIENIYYQSTNAKAKVTDRTQNLNGQSVFSVAPVKGVMDPGKTQDFTVTFSPDHESLYFSDKLQVVLFEKKISHQILLKGAACQHMMFVEGGDPLDVPVESLTAIPVFDPRHREEAEELRPILVTLDYIQFDTDTPAPPATRELQVGCIRTTQPSPKKVPTALPLGTPGSPLGLPCRGQP

SEQ ID NO: 34294 - protein, 141 aa, Homo sapiens
  DOMAIN (59)..(94): Prion protein domain identified by eMATRIX, accession number BL00291A, p-value=1.517e-09, raw score of 4.49
  misc_feature (1)...(141): Xaa = X or * as defined in Table 2
AGGQALQGPGQGRGSQGVVGPGTGSSGAQHLGKHYPVLSGGSERSWGRSHTPAGAGCXVRGRRAGGRPGTGHSRPPGGSCLSPAPPNSARWLGLGAPWQAGAGLRDPGDWRRGQGGPGWAWCPGQPPAQPHTCPPNSTARY

SEQ ID NO: 34295 - protein, 412 aa, Homo sapiens
  DOMAIN (275)..(310): Prion protein domain identified by eMATRIX, accession number BL00291A, p-value=1.517e-09, raw score of 4.49
  misc_feature (1)...(412): Xaa = X or * as defined in Table 2
RGAERRAWSRGPACTRRGPADWAAAGAGRPCPQRRGVCCTAAVPGAARLSCPTGPGPGDPGRRSLTGQGSXGLGAAFGGWTGALPSWHSXSQGWQTDPVRXVRGTERDICTGLXQPCPPGGLQTGSGGLEHSLPWPGIGIQAPXGPNHPCRLPRSXALSAGGSGGQALQGPGQGRGSQGVVGPGTGSSGAQHHCCPPYTPPGXHPIPSLLALGPQSLQPEWAHSGTASGEQHSAGEHGMGTTGHXLPGLCSRCVLGKHYPVLSGGSERSWGRSHTPAGAGCXVRGRRAGGRPGTGHSRPPGGSCLSPAPPNSARWLGLGAPWQAGAGLRDPGDWRRGQGGPGWAWCPGQPPAQPHTCPPAGSLPGAAPGVLCAAXGPAAGVXAGPGPGPGSRRXTRGPSPGAPRPAAPVGAP

SEQ ID NO: 34296 - protein, 138 aa, Homo sapiens
  misc_feature (1)...(138): Xaa = X or * as defined in Table 2
ETGRHRSQQSVSSPPVQPRGKRAMYHSAAELVSRGFPRPPVQAPAEPAGAAEGVHSQPASRQEAGSTEVRGQAHRFVSPPNAAGAGDGPDPQSLLAPTNRPCPPGGISPARSEPVPPAPGRAAPXCFPDLPGLAPPLC

SEQ ID NO: 34297 - protein, 218 aa, Homo sapiens
METEPSKARANDPGSAAEGLSLLLLPLLLVQAGVWGFPRPPGRPQLSLQELRREFTVSLHLARKLLSEVRGQAHRFDPERLCFISTTLQPFHALLGGLGTQGRWTNMERMQLWAMRLDLRDLQRHLRFQVLAAGFNLPEEEEEEEEEEEEERKGLLPGALGSALQGPAQVSWPQLLSTYRLLHSLELVLSRAVRELLLLSKAGHSVWPLGFPTLSPQP

SEQ ID NO: 34298 - protein, 133 aa, Homo sapiens
  misc_feature (1)...(133): Xaa = X or * as defined in Table 2
EAEALENQSQPCDTGPQSAFSPPGSTQHPRSQLSQCKQRYQDLQEKLLLSEATVFAQANELEKXRVILSGEPLLKQDSKQVQVDLQDLGYETCGQSKNEAEQEETTSPEHEEHSSRKEMVLVEGLCSEQGRRG

SEQ ID NO: 34299 - protein, 215 aa, Homo sapiens
  DOMAIN (88)..(204): gag gene protein p24 domain identified by PFam, accession name gag_p24, E-value=4.3e-14, PFam score of 57.3
  misc_feature (1)...(215): Xaa = X or * as defined in Table 2
MGQVWGLVHFTLEVFHTGDEEEQEYSEVTEDVTEHVYLPAKAKVAKEEEAGIQQARQEGDLEAWQFPVRIHPPDQQENITATFEPFPFKLLKELKQAINQYGPGSPFVMGLLKNVTVSSQMIPTDGDPLTRACLTPAQFLQFKTWWADEASIQAARNAWAQPQINITADQLLGVGGWAGLDAQFVMQDDAIEQLRGVCIRAREKITXCGEQYPSF

SEQ ID NO: 34300 - protein, 242 aa, Homo sapiens
  DOMAIN (10)..(105): gag gene protein p24 domain identified by PFam, accession name gag_p24, E-value=9.7e-25, PFam score of 95.6
GSNRRSNRAEQLRGVCIRAWEKITSGEEQYPSFSIVKQGPREPYTDFIAWLQESLKKVIADSAAQDIVLWLLAFDNANPDCQAALRPIRGKAHLVDYIKACDGIRGPAGRLSWLSLQGRPAGAARCTSSSSDWKAQLAPGPHAGPLRCPAFRARQPRLPAVLSAGAAFRDCPLSCVQALLGGSAGPGDRLPGHYSALVALSLPFVKEATMNRWSRNHRSAFFLFSANAHGAEGVLSHTVASR

SEQ ID NO: 34301 - protein, 210 aa, Homo sapiens
  DOMAIN (140)..(203): gag gene protein p24 domain identified by PFam, accession name gag_p24, E-value=1.4e-05, PFam score of 25.5
  misc_feature (1)...(210): Xaa = X or * as defined in Table 2
WDNCGLWFIPSWNLFTLMMRRKESLMKXQKKXQSRFVCQLKLKPAKEGEVYPYPSAPPPYFEEKEWPDPPDLSFLEDAGQKVIAPVTVQAAPQAIALSSIQAGIQQARREGDLEAWQFPIRIHPPDQQGNIIATFEPFPFKLLKESKQAINQYGQGSPFVMELLKNVAVSSQMIPTDWDALAQACLTLTQFLQFKTLWADEVSIQAACNA

SEQ ID NO: 34302 - protein, 123 aa, Homo sapiens
  misc_feature (1)...(123): Xaa = X or * as defined in Table 2
WSSRCQHSSRPQASESWFPGXGPSFWPRIQGDEKTGAGGHPXLGCXPGMTGQGFSTKCQHTCLMWGSHWAQEAPENAPGTSCPGSSGSWVLRSSLQRQKSAWSPGASMPAPKMPFLTPSSGFS

SEQ ID NO: 34303 - protein, 135 aa, Homo sapiens
  DOMAIN (81)..(135): Domain of unknown function DUF27 domain identified by PFam, accession name DUF27, E-value=0.015, PFam score of -14.8
  misc_feature (1)...(135): Xaa = X or * as defined in Table 2
KKKVWREEKERLLKMTLEERRKEYLRDYIPLNSILSWKEEMKGQGPKXEENTQETSQVKKSLTEKVSLYRGDILXVDAIVNAANASLLGGGGVDGCIHRAAGPCLLAECRNLNGCDTGHAKITCGYDLPAKCEYN

SEQ ID NO: 34304 - protein, 119 aa, Homo sapiens
  misc_feature (1)...(119): Xaa = X or * as defined in Table 2
MLHNLRPRTLTTRTRCPSTPSXTTTXATPPTTTHGSAGPRAAHLRRTGTRRWRAPRRARSCTRSSPRRARAASTPPLAPARELRSPASPPSCEQSAAPPSGRNGGNFPESIFVKTINSN

SEQ ID NO: 34305 - protein, 298 aa, Homo sapiens
  misc_feature (1)...(298): Xaa = X or * as defined in Table 2
WGGYGMRTGPRTLTTRTRCPSTPSXTTTXATPPTTTHGSAGPRARTCAAQRTSGSHPSQRRTSSAAPGVXRANVFPWAHXMKRVXTTLENLTAPEMAMPPAPHVIFATDDWAAMVHPSARVPGLDGTGALLVPTGVCAPGPCKCPLTSSSVTHTRLKTTLSVPPSARQTGRCRSPSDLRCSYPPDEQPVCVPKCGSPWVSVLVAWIQSESAVLDPRHPQHPYLYPVDMQNLLTNLGEPPQARALAAKLLGRPSSSQSGSRVPAVWAQAGNATYITVHTLCSHNTHMSPVRVKRFTHLG

SEQ ID NO: 34306 - protein, 138 aa, Homo sapiens
GPDGSLNQKVTREGDVSQLGRAQLMSFHVVLTFQTGSMLPGALTHREATLRVRKPGCLVREDKLHLCAKNCVRNKNHATEPFRANIHAFSPVTVRYKHGLRRPVQIEPPPGGCGGAFRVWHLGSPLPGAPRFFGCSIE

SEQ ID NO: 34307 - protein, 312 aa, Homo sapiens
MAIKTNITRTSSLEGYGSPWVFSIKDTATEAVRSEKKRLRKPSKWLLEYTEEYDQIFAPKKKQKKVQEQVHKACVKTLPRSSRISMRDSECVQEEESTGCTFPIRSLYRVSHPVTTYCGTLNHRFWKMLSLTDELRPRIMTATGRPHTPMMERQFRYFVGTQQTTSVVKHGLRLGQDCPTRTAFMEAIGIAPVCPQGVVAENAYAVRGGVLSCTLVLMSCRYRSRGLFLMCRLYPGCSGAQPLTGPSWDVCVGRMLVFRVSGCHHALQRVVHNALVRSQCSASDAVGCHMVNTNAALGLQRRLPGRLQACHK

SEQ ID NO: 34308 - protein, 1225 aa, Homo sapiens
  DOMAIN (947)..(978): Protein kinases ATP-binding region proteins domain identified by eMATRIX, accession number BL00107A, p-value=3.250e-21, raw score of 18.39
  DOMAIN (812)..(1164): Eukaryotic protein kinase domain identified by PFam, accession name pkinase, E-value=8.5e-60, PFam score of 212.1
MDQTCELPRRNCLLPFSNPVNLDAPEDKDSPFGNGQSNFSEPLNGCTMQLSTVSGTSQNAYGQDSPSCYIPLRRLQDLASMINVEYLNGSADGSESFQDPEKSDSRAQTPIVCTSLSPGGPTALAMKQEPSCNNSPELQVKVTKTIKNGFLHFENFTCVDDADVDSEMDPEQPVTEDESIEEIFEETQTNATCNYETKSENGVKVAMGSEQDSTPESRHGAVKSPFLPLAPQTETQKNKQRNEVDGSNEKAALLPAPFSLGDTNITIEEQLNSINLSFQDDPDSSTSTLGNMLELPGTSSSSTSQELPFAKLMPGTELIDRTSRYRRGALGLSVDPAACRGRGRLELGVRRRRSQVRMEPGRQLVGSPAWVPESCEKEMRLLLALLGVLLSVPGPPVLSLEASEEVERCLEQQEQELTVALGQPVRLCCGRAERGGHWYKEGSRLAPAGRVRGWRGRLEIASFLPEDAGRYLCLARGSMIVLQNLTLITGAPYWTHPQRMEKKLHAVPAGNTVKFRCPAAGNPTPTIRWLKDGQAFHGENRIGGIRLRHQHWSLVMESVVPSDRGTYTCLVENAVGSIRYNYLLDVLERSPHRPILQAGLPANTTAVVGSDVELLCKVYSDAQPHIQWLKHIVINGSSFGADGFPYVQVLKTADINSSEVEVLYLRNVSAEDAGEYTCLAGNSIGLSYQSAWLTVLPEEDPTWTAAAPEARYTDIILYASGSLALAVLLLLARLYRGQALHGRHPRPPATVQKLSRFPLARQFSLESGSSGKSSSSLVRGVRLSSSGPALLAGLVSLDLPLDPLWEFPRDRLVLGKPLGEGCFGQVVRAEAFGMDPARPDQASTVAVKMLKDNASDKDLADLVSEMEVMKLIGRHKNIINLLGVCTQEGPLYVIVECAAKGNLREFLRARRPPGPDLSPDGPRSSEGPLSFPVLVSCAYQVARGMQYLESRKCIHRDLAARNVLVTEDNVMKIADFGLARGVHHIDYYKKTSNGRLPVKWMAPEALFDRVYTHQSDVPVSKQFIPSCQSPFGPQSSRGAGRVCIRHLQTCAKGLLTWEPPSLDCGPWRAKGPSTKAFLPHFPDVDTEALKVEVTGPGSQGGKQKPPSFPGSPCTAPIACCVALNPVQLLPVLLLPAKSPPRYGLMRECWHAAPSQRPTFKQLVEALDKVLLAVSEEYLDLRLTFGPYSPSGGDASSTCSSSDSVFSHDPLPLGSSSFPFGSGVQT

SEQ ID NO: 34309 - protein, 1357 aa, Homo sapiens
  DOMAIN (56)..(73): PWWP domain proteins domain identified by eMATRIX, accession number PF00855, p-value=2.306e-13, raw score of 13.75
  DOMAIN (51)..(132): PWWP domain identified by PFam, accession name PWWP, E-value= 4.7e-07, PFam score of 36.9
  misc_feature (1)...(1357): Xaa = X or * as defined in Table 2
MPLKTRTALSDDPDSSTSTLGNMLELPGTSSSSTSQELPFCQPKKKSTPLKYEVGDLIWAKFKRRPWWPCRICSDPLINTHSKMKVSNRRPYRQYYVEAFGDPSERAWVAGKAIVMFEGRHQFEELPVLRRRGKQKEKGYRHKVPQKILSKWEASVGLAEQYDVPKGSKNRKCIPGSIKLDSEEDMPFEDCTNDPESEHDLLLNGCLKSLAFDSEHSADEKEKPCAKSRARKSSDNPKRTXLXKRATYNFEAHKDERRGKIPRDTLGLNFISGDISDTQASNELSRIANSLTGSNTAPGSFLFSSCGTNAAKKEFETSKSDSLLGLPEGALISKCSREKNKHQRSLVCGSKVKLCYIGAGDEEKRSDSISICTTSDDGSSDLDPIEPPAQSLITSVLGNSQMLFGXDQRTMLSMQENXKDXSILRFAATNTRVKAKQKPLISNSHTDHLMGCTKSAEPGTETSQVNLSDLKASTLVHKPQSDFTNDALSPKFNLSSSISSENSLIKGGAANQALLHSKSKQPKFRSIKCKHKENPVMAEPPVINEECSLKCCSSDTKGSPLASISKSGKVDGLKLLNNMHEKTRDSSDIETAVVKHVLSELKELSYRSLGEDVSDSGTSKPSKPLLFSSASSQNHIPIEPDYKFSTLLMMLKDMHDSKTKEQRLMTSLQNLGSLTRSPGRGDCSTNSPVGVSKVLVSGGSTHNSEKKGDGTQNSANPSPSGGDSALSGELSASLPGLLSDKRDLPASGKSRSDCVTRRNCGRSKPSSKLRDAFSAQMVKNTVNRKALKTERKRKLNQLPSVTLDAVLQGDRERGGSLRGGAEDPSKEDPLQIMGHLTSEDGDHFSDVHFDSKVKQSDPGKISEKGLSFENREKAPELDSVMSSENDELNGVNQVVPKKRWQRLNQRRTKPRKRMNRFKEKENSECAFRVLLPSDPVQEGRDEFPEHRTPSASILEEPLTEQNHADCLDSAGPRLNVCDKSSASIGDMEKEPGIPSLTPQAELPEPAKSEKTSAPPRKAKEHTKGSRSLLFVRVVLWCRMYVRLCVRCSGRLPLYASYVFAQLMRHPLIELFHFSNLLQMLNDRRMVDVELFDNFLAVRSEKKRLRKPSKWLLEYTEEYDQIFAPKKKQKKVQEQVHKVSSRCEEESLLARGRSSAQNKQVDENSLISTKEEPPVLEREAPFLEGPLAQSELGGGHAELPQLTLSVPVAPEVSPRPALESEELLVKTPGNYESKRQRKPTKKLLESNDLDPGFMPKKGDLGLSKKCYEAGHLENGITESCATSYSKDFGGGTTKIFDKPRKRKRQRHAAAKMQCKKVKNDDSSKEIPGSEGELMPHRTATSPKETVEEGVEHDPGMPA

SEQ ID NO: 34310 - protein, 48 aa, Homo sapiens
MHRDHVAKNRTRERGKYQSLFNSRISRIFLWKLIQNSIITVRMAPRHS

SEQ ID NO: 34311 - protein, 182 aa, Homo sapiens
  misc_feature (1)...(182): Xaa = X or * as defined in Table 2
RNCGTARSQHEPLGSWLQDTPQPPXTLELAGNLPGDFXPGPGKEQGMFVCHPIRQPLPRPLPGSSHQSMPTAQPPLSSSSALLPALPAGFPVTQGQWTKLQVQAPAPFHLPPQVEAVXAFYQKQMLVPCSLXSMPTAQPPLSSSSALLPALPAGFPVTQGQWTKLQVQAPAPFHLPPQVEAV

SEQ ID NO: 34312 - protein, 115 aa, Homo sapiens
  DOMAIN (4)..(90): Integrase core domain identified by PFam, accession name rve, E-value=9.9e-17, PFam score of 61.9
KWQRFVLTGIDTYSRYEFAYPACHASTKTTIHGLMEFLIHHHGIPHSIASDQGTHLMAKEVRQWAHAHGIHWSYHVPHHPEVAGLIERWNEGLLKSQLQHQLVNRLRRELQCWLG

SEQ ID NO: 34313 - protein, 572 aa, Homo sapiens
  DOMAIN (36)..(88): ELEMENT TRANSPOSABLE INSERTION PROTEIN TRANSPOSITION DNA domain identified by eMATRIX, accession number PD02455C, p-value= 7.120e-09, raw score of 29.23
  DOMAIN (2)..(125): Integrase core domain identified by PFam, accession name rve, E-value=1.7e-22, PFam score of 81.8
MYSRYEFACPAHNASAKTTIHGLTECPVHCHGIPHSIASDQGTHFVAKEVWQWAHAHGIHWSYHVPHHPEAAGLTEWQNGLLKSQLKCQLGDNTLQGWGKVLWKAVYALNRRPIYGTVSPIAKIHWSRNQGVEVEVAALTITLSDPPAKFLLPGTATLCSARLEVLVPEGGMLPPGNTTIIPLNWMLRLPPGHFGLLLPLSQQAKKGVTVLAGVTDPDYQDEISLLLHNEVKTVRNVKEGLRQKPALTAWGILLAFELGTEPLTDIKEDAVKSHRGRSLDKRPLQSFIQYRYKDKGLEATHFAIQYNKSRKAKELPFITEEMDYEMFSVDGWDDLQAYVFMALGQTRTLSLVELRDSLEENILLHTLMDQISGGVAELCTWDRGVLKECTRLARERALIIYHSCRPVRLQWHQGSIGGIKLLFVLLTLHLSAYFILPGLRTRPWYLLNGKAKSCNRNRAETCPLLATLWVKRRREKLWPFREPSSGSSLSQGSDSLFGALKFLTSPSFQELLHSLVPAGEAVCSPPGPAVASQRASTHTGTWNCLPRSSSSQCVLLCTLARPHTHSHSPLHA

SEQ ID NO: 34314 - protein, 245 aa, Homo sapiens
  DOMAIN (208)..(219): dUTPase domain identified by eMATRIX, accession number PF00692B, p-value=5.304e-09, raw score of 8.14
MSSVLLRLIYQLTQKTASFEGGPEQKALQQIQAAVQAALPLGPYDPANPMVLEVSVADRDTVWSLWQVPIGESQLGFWSKALPSSADNYSPFERQLLACYWALVETEYLTMGHEVTMLPELPIMTWVLSDPSSYKPAPMASWGVPYGQLTEEEKTRAWFTDGSARYTETTRKWTAVAIQPLSRTSLKDSNEGKSSHQQAKNGITVLAGVIDPDYQDEISLLTPQWRCHPGSSVWRASSLGISHPP

SEQ ID NO: 34315 - protein, 128 aa, Homo sapiens
  misc_feature (1)...(128): Xaa = X or * as defined in Table 2
CGRSGYWHSSVATKITRLRMLRPREGRKLPPGDIMIPLNXKLRLPPGSFLLLSHQAKKGVTMLAGVTDPDYQDEISLLLHNGGTGKSPHISDTFYGSKVASCQNTGPEKQDETQAQETAVYKSQIFGS

SEQ ID NO: 34316 - protein, 423 aa, Homo sapiens
  DOMAIN (2)..(99): Integrase core domain identified by PFam, accession name rve, E-value=1.5e-07, PFam score of 30.1
QRFVLTGIDTYSGYEFASPARNASAKTTTRGLAEGLIHHHATPHSIASEQGTHFTAKAVRQWAHAHGIHYSYHVPHHLEAAGLTEWWNVLLKSQLQRQLARIHRSRNPGVKVEMASLTITPSDPLETFLLPVPMTLRSAGLVVLVPERRTLPPGDTTMIPLNWKLRLPLGHFGLLLPLSQQAKEGVTVLAGVTDPDYQDEISLLLHNGGRGNSNGFHLACPTIIALTPPVREPLWGLCQLLSMSMPINAFWHWGNDHRMSPGTHWTDSPDPRTPSGDAGHRLWADPAGWAWRRPVRADWNRGSRPAGGGLGDPEGLRVINMEKDKHSHFYNQKSDFRIEHSMLEELENRLIHSRKTENIPKQSIQRNMSAMECFCNTDKRATTEGSNMALKMLRQNSITQVSIYEVDEKDCRKYCTTGIDGEP

SEQ ID NO: 34317 - protein, 112 aa, Homo sapiens
  misc_feature (1)...(112): Xaa = X or * as defined in Table 2
GLGRRQPAGSWPERRPGPSARRSTAPRRCGQAESXTERGSQPHQVQGQGRWGVCMKIPSHSGKSPDVSEVSKSRNSIISTAVTHAVVAPEGLKRNGGGSHLRSSRGHRAVIF

SEQ ID NO: 34318 - protein, 66 aa, Homo sapiens
ETRGRGSCGPGLGPRQPAGSWPERRPGPSAQALDSSKTLRPSRKLNRTRLPATPSSESRYCLWLMK

SEQ ID NO: 34319 - protein, 173 aa, Homo sapiens
  misc_feature (1)...(173): Xaa = X or * as defined in Table 2
LGSIQVMQAVRNAGSRFLRSWTWPQTAGXQMTAPSSPPPPPGLCSYSCPLSHPSLPVTVRPWPSPSFSSQQGRGQNAAPGPSAQALDSSKTLRPSRKLNRTRLPATPSSGEPHLDQPSGDPQPLTLARHPPESEPVNFQLCHLLSVGPYANKSEPQPSHLKMRIMLREVVRIT

SEQ ID NO: 34320 - protein, 82 aa, Homo sapiens
  misc_feature (1)...(82): Xaa = X or * as defined in Table 2
RRHLFLQWGQRAWRLQVAAAGTTRPTSAMGIRCSEGAAARATAARAXTAGPEPLEPAANPPPPLTASALRAPPSFVLPQCTR

SEQ ID NO: 34321 - protein, 315 aa, Homo sapiens
  misc_feature (1)...(315): Xaa = X or * as defined in Table 2
SWHGPPGANTVAAAAGPEEKAALKLRPTHGWPVRATDVHDVILKASGESEWRGGSRASHQMSPVAMATALGEGVPVRGPAAGSLRLLPGSSAPLGRDAISSCNGVNGLETTGGRCRHNAPNKRHGDPLLEGAAARAQAARAXTAGPEPLEPAANPPPPLTASALRAPPSFVLPQCTAAPRDPSAAGAANXGKAQSRNCXNEPFAYGGGTHGTGAGAAVTVAADGNXLGSIQVMQAVRNAGSRFLRSWTWPQTAGPWPSPSFVFPAGSWPERRPGPSAQALDSSKTLRPSRKLNRTRLPATPSSAFTLPFQERRAL

SEQ ID NO: 34322 - protein, 330 aa, Homo sapiens
  misc_feature (1)...(330): Xaa = X or * as defined in Table 2
MTKRGHGTAWAVASKSASPKPWQLPHSVEPVGTEKSRIEVWEPLPRFQRMYGNTWMSGSSLLQGNQNLHAERYCNSTLERNDTPIESLKPKRESEDGLGEHNGSTMEEVGAETRVQRHWVRVSMTELALASDAHMWGSNPGQRVTGVMVGECGTMLGDTQVLLSNPCGDRARRAYSTAPDYAVCGNGGKVKLNEQRFGSTNKQGKAAYWMEALRPEPLCWQSNYPEAAAVGKPKAAYTKKLHGEDSXAIPVVTELGERIAQLLIMLYVKWGKSEIKRTGGFGSTNKQGKAAYWMEALRPEPLCWQSNYPEAAAVGKPKAAYTKKLHGEDS

SEQ ID NO: 34323 - protein, 80 aa, Homo sapiens
  DOMAIN (26)..(37): dUTPase domain identified by eMATRIX, accession number PF00692B, p-value=3.613e-11, raw score of 8.14
  DOMAIN (1)..(80): dUTPase domain identified by PFam, accession name dUTPase, E- value=0.0024, PFam score of 1.4
MLAGGMIGLLLGRSSLNLKGVQVHTGVIDSDYNGEIQIVIFTSFPWKAEPGKRIAQLLIVPYVEMGKSEIKRIGEFGTHK

SEQ ID NO: 34324 - protein, 60 aa, Homo sapiens
  DOMAIN (1)..(52): Neuromodulin (GAP-43) proteins domain identified by eMATRIX, accession number BL00412D, p-value=4.273e-14, raw score of 16.54
EEEEEEEEEEEEEEEEEEEEEEEEEEEEEEEEEEEEEEEEEEEEEEEEEEEEEEEEEQAM

SEQ ID NO: 34325 - protein, 52 aa, Homo sapiens
  DOMAIN (13)..(41): Granins proteins domain identified by eMATRIX, accession number BL00422C, p-value=6.170e-10, raw score of 16.18
MKEERRRRREEEGEGEEEEEEEEEEEEEEEEEEEEEVVLLTPGTGAEDFKKH

SEQ ID NO: 34326 - protein, 147 aa, Homo sapiens
  DOMAIN (73)..(101): Granins proteins domain identified by eMATRIX, accession number BL00422C, p-value=4.886e-11, raw score of 16.18
TQWRKHIASQLTFADRAKLRGVTFAGKVRGIVSANLERWELQAANKIALPLGNLPTATIRVKIIGKTSSLKKEEEEEEEEEEEEEEEEEEEEEEEEEEEEEEEEEEEEEEEEEEEEEEEEEEEEEEEEEEEEEEEEEEEEEEEEEEE

SEQ ID NO: 34327 - protein, 67 aa, Homo sapiens
  DOMAIN (7)..(41): Amyloidogenic glycoprotein extracellular domain proteins domain identified by eMATRIX, accession number BL00319C, p-value= 5.701e-11, raw score of 17.12
LRKKEEEEEEEEEEEEEEEEEEEEEEEEEEEEDLNKRTKSFAYSFPCFFVVILIVILNLVFATWREE

SEQ ID NO: 34328 - protein, 72 aa, Homo sapiens
  DOMAIN (10)..(61): Neuromodulin (GAP-43) proteins domain identified by eMATRIX, accession number BL00412D, p-value=9.630e-15, raw score of 16.54
EEKKEKEKEKEKEKEEEEEEEEEEEEEEEEEEEEEEEEEEEEEEEEEEEEEEEEEEEEEEEEEEEEEEEEEE

SEQ ID NO: 34329 - protein, 62 aa, Homo sapiens
  DOMAIN (3)..(54): Neuromodulin (GAP-43) proteins domain identified by eMATRIX, accession number BL00412D, p-value=7.000e-12, raw score of 16.54
  misc_feature (1)...(62): Xaa = X or * as defined in Table 2
MNRCXRHIYSSNEVHXKEEEEEEEEEEEEEEEEEEEEEEEEEEEEEEEEEEEEEEEIPLSSL

SEQ ID NO: 34330 - protein, 92 aa, Homo sapiens
  DOMAIN (31)..(82): Neuromodulin (GAP-43) proteins domain identified by eMATRIX, accession number BL00412D, p-value=1.338e-13, raw score of 16.54
MTSYKFTEPKNGIWQLHEAAQLDTTYNKLNKKEEEEEEEEEEEEEEEEEEEGEGEEEEEEEEEEEEEEEEEEEEEEEEEEEEEEGVILLSPK

SEQ ID NO: 34331 - protein, 109 aa, Homo sapiens
  DOMAIN (46)..(97): Neuromodulin (GAP-43) proteins domain identified by eMATRIX, accession number BL00412D, p-value=4.575e-15, raw score of 16.54
  misc_feature (1)...(109): Xaa = X or * as defined in Table 2
DLPREEYALLPAGPRRRCRHTHRYEPNPEFGAKHSCPAAXHRAAPATSDTQEXHRSNAFGEEEEEEEEEEEEEEEEEEEEEEEEEEEEEEEEEEEEEEEEEEETLFSNM

SEQ ID NO: 34332 - protein, 49 aa, Homo sapiens
  DOMAIN (16)..(44): Granins proteins domain identified by eMATRIX, accession number BL00422C, p-value=9.270e-13, raw score of 16.18
TEEEEEEEEEEEEEEEEEEEEEEEEEEEEEEEEEEEGEEEEEEEEEANL

SEQ ID NO: 34333 - protein, 99 aa, Homo sapiens
  DOMAIN (2)..(47): RIBOSOMAL PROTEIN 40S ZINC-FINGER METAL domain identified by eMATRIX, accession number PD01457A, p-value=6.400e-10, raw score of 16.51
MKKKKKKKKKKKKKKKKKKKKKKKKNSQIDYFQTFLGDTTRELLPASSGEEQGMVLNIRDAQDDPHSKELCGPDVNGAEVETHWFTVSNGSVIVLGILK

SEQ ID NO: 34334 - protein, 407 aa, Homo sapiens
  DOMAIN (354)..(407): Clathrin light chain proteins domain identified by eMATRIX, accession number BL00224B, p-value=6.885e-10, raw score of 16.94
MPSSKGVHVHSPPRYLAAKDFKMINKELTAATFMEVIAEDNRFIYDGIDSNFEPELVFLEFFEALLSFAFICVTDQMTKSYTNVPADDVSGNKHETIYTILNQDAQNKSPSAVMSHESDAAHSDSARSSSSKLELSPDVNKIRKSEAMVKEKKKADKKGEKSARSPSSLSDNLDFSKQDGNTTRQEMSPAGVPLLGMQLNEVKPKKDRQNVQQNEDATQYEESILTKLIVESYEGEKVRGLYEGEGFAAFQGGCTYRVSCPFENLQEGEEGRLCEECPDEPRRVHVAGRSMYEGEVVNGMRNGFGMFKCSTQPVSYIGHWCNGKRHGKVGEVATWRAEKKKKEEEEEEEEEEEEEEEEEEEEEEEEEEEEEEEEEEEEEEEEEEEEEEEEEEEEEEEEEEEEEKIRP

SEQ ID NO: 34335 - protein, 107 aa, Homo sapiens
  DOMAIN (30)..(65): Troponin domain identified by eMATRIX, accession number PF00992A, p-value=3.418e-11, raw score of 16.67
LLSIVQAEAVSENSHPILPRVSRSGWGQKEEEEEEEEEEEEEEEEEEEEEEEEEEEEEEEEEEEEEEEEEEEEEEEEEEEEEGRRRRRSSPSCYSITPELSCKLGHR

SEQ ID NO: 34336 - protein, 205 aa, Homo sapiens
  DOMAIN (68)..(112): PROTEASE IMMUNOGLOBULIN PRECURSO domain identified by eMATRIX, accession number PD01781B, p-value=7.840e-09, raw score of 27.55
  misc_feature (1)...(205): Xaa = X or * as defined in Table 2
ESSTQTCSGFWTGCTALHRWRGMPERCPPESRDSXTRFPQSSLPGHKTSEKEEEENRKEEEEEEKEKEKEEEEEEEEEEEEEEEEEEEEEEEKEEEEEEEEEQEEEEDDEEEEEEKSCSVNVSLIELPWDPKAYSRLAPLSSQPGPAVKVPTEHLIAKLEDCVQGFTYLTVEKRWARAVTGAQELGVDYPRNEKCKPHNNGYDND

SEQ ID NO: 34337 - protein, 1063 aa, Homo sapiens
  DOMAIN (272)..(317): kw TRANSCRIPTASE REVERSE II ORF2 domain identified by eMATRIX, accession number DM01354N, p-value=1.000e-40, raw score of 13.17
  DOMAIN (212)..(466): Reverse transcriptase domain identified by PFam, accession name rvt, E-value=8.3e-07, PFam score of 27.0
MGDFNTPLSTLDRSMRQKVKKDTQELNSALHQADLIDIYRTLHPKSTEYTFFSAPHHTYSKIDHILGSKALLSKCKRTEIITNYLSDGSAIKLELRIKNLTQNRSTTWKLNNLLLNDYWVPNEMKAEIKMFFETNENKDTTYQNLWDAFKAVCRGKFIALNAHKRKQERSKIDTLTSQLKELEKQEQTHSKASRRQEITKIRAELKEIETQKTLQKINESRSWFFERINKIDRPLARLIKKKREKNQIDTIKNDKGDITTNPTEIQTTIREYYKHLYANKLENLEEMDKFLDTYTLPRLNQEEVESLNRPITGSEIVAIINSLPTKKSPGPDGFTAEFYQRYKEELVPFLLKLFQSIEKEGILLLEVLARAIRQEKEIKGIQLGKEEVKFSLFADDMIVYLENPIVSAQNLLKLISNFSKVSGYKINVQKSQAFLYTNNRQTESQIMSELPFTIASKRIKYLGIQLTRDVKDLFKENYKPLLKEIKEDTNKCKNIPCSWVGRINIVKMAILPKVIYRFNAIPIKLPMPFFTELEKTTLKFIWNQKRARIAKSILSQKNKAGGITLPDFKPYYKATVTKTAWYWYQKRDIDQWNRTEPSEITPHIYNYLIFDKPEKNKQWGKDSLFNKWCWENWLAICRKLKLDPFLTPYTKINSRWIKDLNVRPKTIKTLEENLGNTIQDIGMGKDFMSKTPKAMATKDKIDKWDLIKLKSFCTAKETTIRVNRQPTKWEKIFTTYSSDKGLISRIYNELKQIYKKKTNNPIKKWAKDMNRHFSKEDIYAAKKHMKKCSSSLAIREMQIKTTMRYHLTPVRMAIIKKSGNNRVSNGQLSLSPDDSSLILALLPPASSFKESCGYTGTTCITPRISSLNSRGEEGAHRRGTCAMGSGAWHLSVGTILSKAPGWDIGEGNLHPNPPKHRPEVGGEAQCRSPREMAVTQVAATFRAPGPRQHICRFAPGTRVGQEHEGHPVVSTQQFAAAACGQLPTEFHQHPRTQLPAYQHWLVALRQTSPPSENKMRQTCTSPKEPPDTAEQGVRGDTEELEGGEMREEKIMELELVFADDWCL

SEQ ID NO: 34338 - protein, 1709 aa, Homo sapiens; identical to SEQ ID NO: 32700
  DOMAIN (797)..(842): kw TRANSCRIPTASE REVERSE II ORF2 domain identified by eMATRIX, accession number DM01354N, p-value=1.000e-40, raw score of 13.17
  DOMAIN (391)..(621): AP endonuclease family 1 domain identified by PFam, accession name AP_endonucleas1, E-value=7e-83, PFam score of 288.8

SEQ ID NO: 34339 - protein, 1203 aa, Homo sapiens
  DOMAIN (121)..(166): kw TRANSCRIPTASE REVERSE II ORF2 domain identified by eMATRIX, accession number DM01354N, p-value=1.000e-40, raw score of 13.17
  DOMAIN (211)..(387): Reverse transcriptase domain identified by PFam, accession name rvt, E-value=3.5e-23, PFam score of 90.5
  misc_feature (1)...(1203): Xaa = X or * as defined in Table 2
QGRPTFRFRKYREHHKDTPREEQLQDTXSSDSPKLKXRKKCXGQPERKVKLPTKGSPSDXKRISRQKTLQARRQSWFFEKINKIDRPQARLIKKKREKNQIDTIKNDKGDITTDPTEIQITIREYYKHLYANKLENLEEMDKFLDTYTLPRLNQEEVESVNRPITGSEIEAITNSLPTKKSPGPDGFTAEFYQRYKEELVPFLLKLFQPIEKEGILPNSFYEASIILIPKPGRDTTKKGNFRPISLMNIDAKILNKILANQIQQHIKKLIHHDQVGFIPGMQGWLEVLARAIRQEKEIKGIQLGKEEVKLSLFADDMIVYLENPTVSAQNLLKLISNFSKVSGYKINVQKSQAFLYTNNRQTESQIMSELPFTIASKRIKYLGIQLTRDVKDLFKENYKPLLNEIKEDTNKWKNIPCSWIGRINIVKMAILPKVIYTFNAIPIKLPMTFFTELEKTTLKFIWKQKRSHIAKSILSQKNKAGDITLPDFKLHYKATVTKTAWYWYQNRDIDQWNTTEPSEIMLHIYNHLIFDKPDKNKQWGNDSLFNKWCWENWLAICRKLKLDPFLTSYTKINSRWIKDLNVRPKTIKTLEENLGNTIQDIGMGKDFMSKTPKAVATKAKIDKWDVIKLKSFCTAKETTIRVNRQPTEWEKIFATYSSDKGLISRIYNELKQIYKKKTNNPIKKWAKDMNRHFSKEDIYAAKRHMKKCSSSLAIREMQIKTTMRYHLTPIRMVIIKKSGNNRAPGGRGGCGCSFGRLKRSCVPALKRVADLPAQRSSSAKGETASSSGSLNPVPPDWEKPPSRGRQTPHTGELRLASDGCLSGMKLPEEGIGSSLCCSAASAGDTQANGVRSGLPANSSRPAAEGPVRRKTNRQKGIVSTSTKRTSTPKPHPKDHNSSPAMEQNWMENAFDELTEVGFRRWVITNFSKLKEHVLTQCKEAKKLEKRLEELLTRITSLEKNINDLMELKNTSQELREAYTTEERISEIEDQLNEIKHEDRIREKNEKERTKPPRNMGLREKTKPTFDCVPESDGENGTKLENTLQDIIQENFPNLARQANIQIQEIQRTPQRYSSRRATPRHIIIRFTKVEMKEKMLRAAREKGQVTHKGKPIRLTADPLAETLQARREWGPIFNILKEKNFQHRMSYPAKLSFISVGEIKYFTDKQMLRDFVTTRPALQELLKDALNMERNNQNQSLQKHAKL

SEQ ID NO: 34340 - protein, 1189 aa, Homo sapiens; identical to SEQ ID NO: 32525
  DOMAIN (562)..(607): kw TRANSCRIPTASE REVERSE II ORF2 domain identified by eMATRIX, accession number DM01354N, p-value=1.000e-40, raw score of 13.17
  DOMAIN (646)..(871): Reverse transcriptase domain identified by PFam, accession name rvt, E-value=4.9e-50, PFam score of 179.7

SEQ ID NO: 34341 - protein, 782 aa, Homo sapiens
  DOMAIN (40)..(86): kw TRANSCRIPTASE REVERSE II ORF2 domain identified by eMATRIX, accession number DM01354O, p-value=1.000e-40, raw score of 8.73
  DOMAIN (73)..(298): Reverse transcriptase domain identified by PFam, accession name rvt, E-value=2.9e-46, PFam score of 167.1
  misc_feature (1)...(782): Xaa = X or * as defined in Table 2
MELKTKARELHDECTSLSSRFDQLEERVSVMEDEMNEMNLPTKKSPGPDGFTAEFYQRYKEELVPFLLKLFQSIEKEGILPNSFYEPSIILIAKPGRDTTKKENFRPISLMNINAKILNKMLANQIQQHIKKLIHHDQVGFIPGMQGWFNIRKSINVIQHINRTKDKNHMIISIDAEKAFDKIQQHFMLKTLNKLVLEVLARAIRQEKEIKGIQLGKEEVKVSLFADDMIVYLENPTVSAQNLLKLIGNFSKVSGYKINVQKSQAFLYTNNRQTERQIMSELPFTIASKRIKYLGIQLTRDVKDLFKENNKPLLKEVKEDTNEWKNIPCSWVGRINIVKMAILPKVIYRFNAIPIKLPMTFFTELEKTTLKFIWNQKRACIAKSIFSQKNKAGGITLPDFKLYYKATVTKTAWYWYQNRDIAQWNRTEPSEIMLHIYNYLIFDKPEKNKQWGKDSLFNKWCWENWLAICRKVKLDPFLTPYTKMNSRWIKDLNVRPKTIKTLEENLGITIQDIGVGKDFMSKTPKAMATKAKIDKWDLIKLKSFCTAKETTIRVNRQPTTWEKIFATYSSDKGLISRIYNELKQIYKKKTNNPIKKWAKDVNRHFSKEDIYAAKKHMKKCSSSLAIREMQIKTTMRYHLTPVRMAIIKKSGNNRKIQGGIWCDRILXRXTTCRVAKEIQSLXRRIWKRLQRTLSIPVLDAVXPPMFXASVIDTMTIXCFEARDTCFTLTLESFWDMHRCLAASKGIGLLLCXPLIWHMSLMGVKSPPFVFSCLWTSAVRPTT

SEQ ID NO: 34342 - protein, 1691 aa, Homo sapiens
  DOMAIN (795)..(836): kw TRANSCRIPTASE REVERSE II ORF2 domain identified by eMATRIX, accession number DM01354I, p-value=1.000e-40, raw score of 15.55
  DOMAIN (1031)..(1306): Reverse transcriptase domain identified by PFam, accession name rvt, E-value=1.3e-79, PFam score of 277.9
MAQFHVSHPPAEWPRHVLLLMADSKNELQNMNTGQTCGTRQTLKSKLQGWNKPGIQSDPGSQGHPRCLKTFPLVAQSSTQERNHVMEKAVLKSQNWAIIEEFITKIGWFPDYSGKVKYLSSPKSSCTTVLQVTHFSLFFHPNPDELVSKIKVWSKHRLYQNNSEAFLEVQIPEPKCEVYSMRTMGRRQPGTAMDLNAGGSICNVPRTLLHLTGESTFRDRQRVGAYLDIRGWYILVLVVDKEKLGIPGQKQNSSKILFGSEKLKQWVYVKNHAKESITQEAMGIWVGQQRKRQPLGYEERKLTNRKDIHIKNPSVCHHHQRPKVDKTTKMGKKQSRKTGNSKNQSTSPTLKESSSSPATEQSWTENDFDELREEGFRRSDYSELQEEVQNNGKEVKNFGKKLDEWITRITNAKKSLKDLMELKTKARELCDERTSLSSQCNQLEERVSVMEDEMNEIKQEEKFREKRIKRNEQSLQEIWDYMKRPNLRLIGVPESDGENGTKLENTLQDIIQENFPNLARQANIQIQEIQRTPQRYSLRRATPRHIIVRFTKVEMKEKMLRVAREKGRVTHKGKPVRLTADLLAETLQARRQDTHRLKIKGWRKIYQANGKQKKAGVAILVSDKTEFKPTKIKRDKEGHYIMVKGSIQQEELTILNIYAPNTGAPRFTKQVLRDLQRDLDSNTIITGDFNTPLSTLDRSMRQKVNKDIQELNSALHQADLIDIYRTLHPKSTENTFFSAPHHTYSKIDHIVGSKALLSKCKRKEIITNCLSDHSAIKLELRIKKLPQNCSTIWKLNNLLLNDYWVHNEMKAEIKMLFETNENKDTTYQNLWDTLKAVCRGKFIALNAHGRKQERSKIDTLTSQLKELAKQEQTHSKASRRQEITKIRAELKEIETQKTLQKINESRSWFLPLARLIKKKTEKNQIDAIKNDKGDITTNPTDIQTAIREYYKHLYANKLENLEEMDKLLNTYTIPRLNQEEVEPRNRPITGSEIEAIINRLPTKKCPGPDGFTAEFYQRYKQVPFLLKLFQSTEKGGILPKSFYEASIILIPKPGKDTTKKENFRPISLMNIDVKILNKILAKQIQQHIKKLIHHDQVGFIPGMQRWFNIRKSINVIQHINRTKDKNRMIISIDAEKAFDKIQQRFMLKTLNKLGIDGTYLKTIRAIYDKPTANIILNGQKLEAFPLKTGTRQGCPLSPLLFNMVLEVLARAISQEKEIKDIQLGKEEVKLSLFADDMIVYLENPIVSAQNRLKLISNFRKVSGYKINVQKSQAFLYTNNSQTESQIMSELPFTTASKRIKYLGIQLTRDVKDLFKENYKPLLSEIKEDTNKCKNVPCSWVGRINIMKMAILPKVIYRFNAIPIKLPMTFFTELEKTTLKFIWNQKRACIAKSILSQKNKAGGITLPDFKLYYKATVTKTTWYWYQHRAVDQWNRTGPSEIMPHIYNYLIFDKPDKNKQWGKDSLFNKWCWENWLAICRKLKLNPFLTPYTKINSRWIKDLHVRPKTIKTLEENLGNTIQVIGMGKDFMSKTPKAMATKAKIDKWDLIKLKSFCTAKESTIRVNRQPTEWEKIFATYSSDKGQISRIYNELKQIYKKKTNNPIKKWAKDRNRHFSEEDIYAAKKHMKKCSPSLAIREVQIKTTMRYHLTPVRMAIIKKSGTNREASCHVMRTLKQPMLEELRRYGEAYAKKN

SEQ ID NO: 34343 - protein, 1099 aa, Homo sapiens
  DOMAIN (22)..(67): kw TRANSCRIPTASE REVERSE II ORF2 domain identified by eMATRIX, accession number DM01354N, p-value=1.000e-40, raw score of 13.17
  DOMAIN (71)..(341): Reverse transcriptase domain identified by PFam, accession name rvt, E-value=7.5e-70, PFam score of 245.5
MKNDKGDITTDPTEIQTTFREYYKHLYANKLENLEEMDKFLDTYSLPRLNQEEVESLNRPITGAEIVAIINSLPTKKSPGPDGFTAEFYQRYKEELNFRPISLMNIDAKILNKILANRIQQHIKKLIHHDQVGFIPGMQGWFNIRKSINVIQHINRAKDKNHMIISIDAEKAFDKIQQPFMLKTLNKLGIDGTYFKIIRAIYDKPTANIILNGQKLEAFPLKTGTRQGCPLSPLLFNIVLEVLARANRQEKEIKGIQLGKEEVKLSLFADDMIVYLENPIVSAQNLLKLISNFSKVSGYKINVQKSQAFLYTNNRQTESQIMSELPFTIASKRIRYLGIQLTRDVKDLFKENYKPLLKEIKEDTNKWKNIPCSWVGRINIVKMAILPKVIYRFNAIPIKLPMTFFTELEKTTFKFMWNQKRACMAKAILSQKNKAGGITLPDFKLYYKATVTKTAWYWYQNRDIDQWNRTEPSEITPHIYNYLIFDKPEKNKQWGKDSLFNKWCWENWLAICRKLKLDPFLTPYTKINSRWIKDLNVRPKTIKTLEENLGITIQDIGMGKDFMSKTPKAMATKDKIDKWDLIKLKSFCTAKETTIRVNRQPTKWEKIFATYSSDKGLISRIYNELKQIYKKKTNNPIKKWAKDMNRHFSKEDIYAAKKHMKKCSSSLAIREMQIKTTIRYHLTPVRMASIKKSGNNSLVSDAPNILHQKNQSELQLRTELKLSLGSCVVGLGVEVFLSEQGTITMRTMLRMYERKQERAVSDNLSFPSGSPTEQEYDKCMDSTCFQSLSSDCSWPVHKVALDCLAPEQSDNNQRRLGAWAQNVRIPKRVEEELGELNIGLLWPKHATAAKVTLMEPINVDVRERGASIFHCWLELGPEHCPFLVLLAKASCASRQLHCLPLLSEPLRSHPAYQVHTVLVSSLAHEVMPVAPLRNSIKYSNTAVKRSDLIPVHRREGACTFVQWRSTHLLPAPPGVSQNHQPEERVPGSKWGLGLTNAGCLCSVMVDINGGRLPTFMRQADQALGLTVEDEKLQGKQKPAAKVNGQNSCCGVNSPSQSEALPWRMSFREQWDKDRPDRTGRPEHCPEKFPPPLPAPKLPV

SEQ ID NO: 34344 - protein, 1170 aa, Homo sapiens
  DOMAIN (246)..(287): kw TRANSCRIPTASE REVERSE II ORF2 domain identified by eMATRIX, accession number DM01354I, p-value=1.000e-40, raw score of 15.55
  DOMAIN (459)..(736): Reverse transcriptase domain identified by PFam, accession name rvt, E-value=5.5e-72, PFam score of 252.6
  misc_feature (1)...(1170): Xaa = X or * as defined in Table 2
MELKTKARELREECRSLRSRCDQLEERVSAMEDEMNEMKREGKFREKRIKRNEQSLQEIWDYVKRPNLRLIGVPESDVENGTKLENTLQDIIQENFPNLARQANIQIQEIQRTPQRYSLRRATPRHIIVRFTKVEMKEKMLRAAREKDRSTRQKVNKDTQELNSALHQADLIDIYRTLHPKSTEYTFFSAPHHTYSKTDHIVGSKALLSKCKRTEIITNYLSDHSAIKLELRIKNLTKSRSTTWKLNNLLLNDYWVHNEMKAEIKMFFETNENKDTTYQNLWDAFKAVCRGKFIALNAYKRKQERSKIDTLTSQLKELEKQEQTHSKASRRQEITKIRAELKEIETQKTLQKINESRSWFFERINKIDRPLARLMKKKREKNQIDTIKNDKGDITTNPTEIQTTIREYYKHLYANKLANLEEMDTFLDTYTLPRLNQEEVESLNRPITGSEIVAIINSLPTKKSPGPDGFTAEFYQRYKEELPGRDTTKKENFRPISLMNIDAKILNKILANRIQQHIKKLIRHDQVGFIPGMQGWFNIRKSINVIQHINRAKDKNHMIISIDAEKAFDKIQQPFMLKTLNKLGIDGTYFKIIRAIYDKPTANIILNGQKLEAFPLKTGTRQGCPLSPLLFNIVLEVLARAIRQEKEIKGIQLGKEEVKLSLFADDMIVYLENPIVSAQNLLKLISNFSKVSGYKINVQKSQAFLYTNNRQTESQIISELPFTIASKRIKYLGIQLTRDVKDLFKENYKPLLKEIKEDTNKWKNIPCSWVGRINIVKMAILPKVIYRFNAIPIKLPMTFFTELEKTTLKFIWNQKRARIAKSILSQKNKAGGITLPDFKLYYKATVTKTAWYWYQNRDIDQWNRTEPSEIMPHIYNYLIFDKPEKNKQWGKDSLFNKWCWENWLAICRKLKLDPFLTPYTKINSRWIKDLNVRPKTIKTLEENLGITIQDIGVGKDFMSKTPKAMATKAKIDKWDLIKLKSFCTAKETTIRVNRQPTTWEKIFATYSSDKGLISRIYNELKQIYKKKTNNPIKKWVKDMNRHFSKEDIYAAKKHMKKCSSSLAIREMQIKTTMRYHLTPVRMAIIKKSGNNGCRATKTFQQCXWDCKMVETLWKTGXQFLIKVYMEEEHGIQVKRTCSKMLAASSSTQPNWVLLQLQLLPISTGSPLVWC

SEQ ID NO: 34345 - protein, 888 aa, Homo sapiens
  DOMAIN (154)..(195): kw TRANSCRIPTASE REVERSE II ORF2 domain identified by eMATRIX, accession number DM01354I, p-value=1.000e-40, raw score of 15.55
  DOMAIN (1)..(140): AP endonuclease family 1 domain identified by PFam, accession name AP_endonucleas1, E-value=9e-08, PFam score of 1.9
  misc_feature (1)...(888): Xaa = X or * as defined in Table 2
MVKGSIQQEELTILNIYAPNTGAPRFIKQVLSDLQRDLDSHTLIMEDFNTPLSTLDRSTRQKVNKNTQELNSALHQADLIDIYRTLHPKSTEYTFFSAPHHTYSKIDHIVGSKALLSKCKRTEIITNYLSDHSAIKLELRIKNLTQSRSTTWKLNNLLLNDYWVHNEMKAEIKMFFETNENKDTTYQNLWDAFKAVCRGKFIALNAYKRKQERSKIDTLTSQLKELEKQEQTHSKASRRQEITKIRAELKEIETQKTLQKINESRSWFFERINKIDRPLARLIKKKREKNQIDTIKNDKGDITTDPTEIQTTIRESYKHLYANKLENLEEMDTFLDTYTLPRLNQEEVESLNRPITGSEIVAIINSLPTKKSPGPDGFTAEFYPESYLXQTHRQYHTEWAKTASIPFENWHKTGMPSLTTPIQHSVGSSGQGNQPGEGNKGYSIRKRGSQIVPVCRRHDCLSRKPHRLSPKSPXADKQLQQSLRIQNQCTKITSILIHQQQTNREPNHEXTPIHNCFKENKIPRNPTYKGCEGPLQGELQTTAQGNKRGHKQMEEHSMLMGRKNQYRENGHTAQGNLQIQCHPHQATNDFLHRIGKNYFKVHMEPKKSPHRQVNPKPKEQSWRHHTTXLQTILQGYSNQNSMVLVPKQRYRSMEQNRALRNNAAYLQLSDLXQTXEKQAMGKGFPIXXMVLGKLASHMXKAETGSLPYTLYKNQFKMDXRFKRXTXNHKNPRRKPRHYHXGHRRGQGLHVQNTKSNGNKSQNXQMGSNXTKELLHSKRNYHQSEQATYNMGENFRNLLIXQRANIQNLQXTQTNLQEKNKQPHQKVGEGHEQTLLKRRHLCSQKTHEEMLIITGHQRNANQNHYEISSHTSXNGNHXKVRKQQERQNS

SEQ ID NO: 34346 - protein, 957 aa, Homo sapiens
  DOMAIN (267)..(312): kw TRANSCRIPTASE REVERSE II ORF2 domain identified by eMATRIX, accession number DM01354N, p-value=1.000e-40, raw score of 13.17
  DOMAIN (351)..(626): Reverse transcriptase domain identified by PFam, accession name rvt, E-value=1.7e-88, PFam score of 307.4
AWKGTTDRSTRQKVNKDTQELNSALHQADLIDIYRTLHPKSTEYTFFLAPHHTYSKIDHIVGSKALLSKCKRTEIITNYLSDHSAIKLELRIKNFTQSRSTTWKLNNLLLNDYWVHNEMNAEIKMFFETNENKDTTYQNLWDAFKAVCRGKFIALNAHKRKQERSKIDTLTSQLKELEKQEQTHSKASRRQEITKIRAELKEIETQKTLQKINESRSWFFERITKSDRPLARLIKKKREKNQIDTIKNDKGDITTDPTEIQTTIREYYKQLYANKLENLEEMNKFLDTYTLPRLNQEEVESLNRPITGSEIVAIINSLPTKKSPGPDGFTAEFYQRYKEELVPFLLKLFQSIEKEGILPNSFYEASIILIPKPGRDTTKKENFRPISLMNIDAKILNKILANRIQQHIKKLIHHDQVGFIPGMQGWFNIRKSINVIQHINRAKDKNHMIISIDAEKAFDKIQQPFMLKTLNKLGTDGTYLKIIRAIYDKPTANIILNGQKLEAFPLKTGTRQGCPLSPLLFNIVLEVLARAIRQEKEIKGIQLGKEEVKLSLFADDMIVYLENPIVSAQNLLKLISNFSKVSGYKINVQKSQAFLYTNNRQTESQIMSELPFTIASKRIKYLGIQLTRDVKDLFKENYKPLLTEIKEDTNKWKNIPCSWVGRINIVKTAILPKVIYRVNAIPIKLPMTVFTELEKTTLKFIWNQKRARIAKSILSQKNKAGGITLPDFKLYYKATVTKTAWYWYQNRDIDQWNRTEPSEITPHTYNYLIFDKPEKNKQWGKDSLFNKWCWENWLAICRKLKLDPFLTPYTKINSRWIKDLNVRPKTIKTLEENLGITIQDIGMGKDFMSKTPKAMATKAKIDKWDLIKLKSFCTAKETTIRVNRCSKGIPKSERRNYLATACEDILGQKLCNQGKERKEERKKERRREREGKERERERKKKKGRKEGEKEKERKVKK

SEQ ID NO: 34347 - protein, 1254 aa, Homo sapiens
  DOMAIN (96)..(137): kw TRANSCRIPTASE REVERSE II ORF2 domain identified by eMATRIX, accession number DM01354I, p-value=1.000e-40, raw score of 15.55
  DOMAIN (289)..(523): Reverse transcriptase domain identified by PFam, accession name rvt, E-value=1.8e-49, PFam score of 177.7
MRQKVNKDTQELNSALHQADLIDIYRTLHPKSTEYTFFSAPHHTYSKIDHIVGSKALLSKCKITEIITNYLSDHSAIKLELRIKNPTQSRSTTWKLNNLPLNDYWVHNEMKAEIKMFFETNENKDTTYQNLWDTFKAVCRGKFIALNAHKRKQERSKIDTLASQLKELEKQEQTHSKASRRQEITKIRAELKEIETQKTLQKINESRSWFFERINKIDRPLARLIKKKREKNQIDTIKNDKGDITTDPTEIQTSIREYYKHLYANKLENLEEMDKFLDTYTLPRLNQEEVESLNRPITGAEVVAIINSLPTKKSPGPENFRPISLMNIDAKILNKILGAKDKNHMIISIDAEKAFDKIQQPFMLKTLNKLGIDGTYFKIIRAIYDQPTANIILNGQKLEAFPLKTGTRQGCPLSPLLFNIVLEVLARAIRQEKEIKSIQLGKEEAKLSLFADKMIVYLENPIVSAQNLLKLISNFSKVSGYKINVQKSQAFLYTNNRQTESQIMSELPFTIASKRIKYLGIQLTRDVKDLFKQNYKPLLKEIKEDTNKWKNIPCSWVGRINIVKMAILPKVIYRFNAIPIKLPMPFFTELEKTTLKFIWNQKRARIAKSILSQKNKAGGITLPDFKLYYKATVTKTAWYWYQNRDIDQWNRTEPSEIMPHIYSYLIFDKPEKNKQWGKDSLFNKWCWENWLAICRKLKLDPFLTPYTKINSRWIKDLNVRPKTIKTLEENLGITIQDLGMGKDFMSKTPKAMATKDTIDKWDLIKLKSFCTAKETTIRMNRQPTKWEKIFTSYSSDKGLISRIYNELKQIYKKKTNNPIKKCQQASQLKALPTQSCSPSSNSYETFLVSPLHPFQFYISFPHYTEMVPPLTPEDYNSRGDFGGDTETNHIISKFHRSLEQVQNAASRRSQDGRIGTAPVYSSQRERRRRRVISAFPSEERSSSPAMEQSWMENDFEELREEGFRRSNYSELREDIQTKGKEVENFEQNLEECITRITNTEKCLKELMELKTKARELREECRSLRSRCDQLEERISVMEDEMNEMKREGKFREKRIKRNEQSLQEIWDYVKRPNLRLIGVPESDGENGTKLENTLQHIIQENFPNLARQANVQIQEIQRTPQRYSSRIAIPRHIIVRFTKVEMKEKMLRAAREKGRVTLKGKPIRLTADLSAETLQARREWGPIFNILKENNFQPRISYPAKLSFISEEEIKYLTDKQMVRDFVTTRPALKELLKEALNMERNNRYQLLQNHAKF

SEQ ID NO: 34348 - protein, 1597 aa, Homo sapiens
  DOMAIN (272)..(317): kw TRANSCRIPTASE REVERSE II ORF2 domain identified by eMATRIX, accession number DM01354N, p-value=1.000e-40, raw score of 13.17
  DOMAIN (1057)..(1423): Voltage gated chloride channels domain identified by PFam, accession name voltage_CLC, E-value=1.1e-169, PFam score of 576.2
MGDFNTPLSTLDRSTRQKVNKDTQELNSALHQADLIDIYRTLHPKSTEYTFFSAPHHTYSKIDHILGSKALLSKCKRAEIITNYLSDHSAIKLELRIKNLTQSRSTTWKLNNLLLNDYWVNNEMKAEIKMFFETKENKDTTYQNLWDAFKAVCRGKFIALNAHKRKQERSKIDTLTSQLKELEKQEQTHSKASRRQEITKIRAELKEIETQKTLQKINESRSWFFERINKIDRPLARLIKKKREKNQIDTIKNDKGDITTDPTEIQTTIREYYKHLYANKLENLEQMDAFLDTYTLPRLNQEEVESLNRPITGAEIVAIINSLPTKKSPGPDGFTAEFSQRYKEELVPFLLKLFQSIEKEGILPNSFYEASIILIPKPGRDTTKKENFRPISLMNIDAKILNKILANRIQQHIKKLIHHDQVGVIPGMQGWFSIRKSINVIQHINRAKDKNHMIISIDAEKAFDKIQQPFMLKTLNKLAQNLLKLISNFSKVSGYKINVQKSQAFLYTNNRQTESQIMSELPFTIASKRIKYLGIQLTRDVKDLFKENYKPLLKEIKEDTNKWKNIPCSWVGRINIVKMAILPQVIYRFNAIPIKLPMTFFTELEKTTFKFIWNQKRARIAKSILSQKNKAGGITLPDFKLYYKATVTKTAWYWYQNRDIDQWNRTEPSEITPLTYNYLIFDKPDKNKQWGKDSLFNKWCWENWLAICRKLKLDPFLMPYTKINSRWIKDLNIRPKTIKTLEENLGITIQDIGMGKDFMSKTPKAMATKAKIDKWDLIKLKSFCTAKETTIRVNRQPTTWEKIFATYSSDKGLIARIYNELKQIYKKKTNNPIKKWAKDMNRHFSKEDIYAAKKHMKKCSSSLAIREMQIKTTMRYHLTPVRMAIMKKSGNNRCWRGCGEIGTLLHCWWDCKLVQPLWKSVWRFLRDLELEIPFDPAIPLLGIYPKDYKSCCYKDTCTPLKKHISFHLYQYDTDMIGNAGLVIQQPSILQSEDKSYNGGGIGSSNRIMDFLEEPIPGVGTYDDFNTIDWVREKSRDRDRHREGAFAYIVNYFMYVLWALLFAFLAVSLVKVFAPYACGSGIPEIKTILSGFIIRGYLGKWTLVIKTITLVLAVSSGLSLGKEGPLVHVACCCGNILCHCFNKYRKNEAKRREVLSAAAAAGVSVAFGAPIGGVLFSLEEVSYYFPLKTLWRSFFAALVAAFTLRSINPFGNSRLVLFYVEFHTPWHLFELVPFILLGIFGGLWGALFIRTNIAWCRKRKTTQLGKYPVIEVLVVTAITAILAFPNEYTRMSTSELISELFNDCGLLDSSKLCDYENRFNTSKGGELPDRPAGVGVYSAMWQLALTLILKIVITIFTFGMKIPSGLFIPSMAVGAIAGRLLGVGMEQLAYYHQEWTVFNSWCSQGADCITPGLYAMVGAAACLAKEEFAHKTLAMDVMKPRRNDPLLTVLTQDSMTVEDVETIISETTYSGFPVVVSRESQRLVGFVLRRDLIISIENARKKQDGVVSTSIIYFTEHSPPLPPYTPPTLKLRNILDLSPFTVTDLTPMEIVVDIFRKLGLRQCLVTHNGRLLGIITKKDVLKHIAQMANQDPDSILFN

SEQ ID NO: 34349 - protein, 1099 aa, Homo sapiens
  DOMAIN (110)..(151): kw TRANSCRIPTASE REVERSE II ORF2 domain identified by eMATRIX, accession number DM01354I, p-value=1.000e-40, raw score of 15.55
  DOMAIN (356)..(597): Reverse transcriptase domain identified by PFam, accession name rvt, E-value=6.8e-65, PFam score of 229.0
MGDFNTPLSTLDRSTRQKVNKDTQELNSALHQADLIDIYRTLQPKSTEYTFFSAPHHTYSKIDHIVGSKALLSKCKRTEIITNYLSDHSAIKLELRIKNLTQSRSTTWKLNNLLLNDYWVHNEMKAEIKMFFETNENKDTTYQNLWDAFKAVCRGKFIALNAHKRKQERSKIDTLTSQLKELEKQEQTHSKASRRQEITKIRAELKEIETQKTLQKINESRSWFFERINKIDRPLARLIKKKREKNQIDTIKNDKGDITTDPTEIQTTIREYYKHLYANKLENLDEMDKFLHTYTLPRLNQEEVESLNGPITGAEIVAIIDSLPTKKSPGPDGFTAEFYQRYKEELVPFLLKLFQSIEKEGILPNSFYEASIILIPKLGRDTTKKENFRPLSLMNIDAKILNKILAKRIQQHIKKLIHHDQVGFIPGMQGWFNIRKSINVIQHINRGKDKNHMIISIDAEKAFDKIQQPFMLKTLNKLGIDGTYFKIIRAIYDKPTANIILNGQKLEAFPLKTGTRQGCPLSPLLFNIVLEVLARAIRQEKEIKLISNFSKVSGYKINVQKSQAFLYTNNRQTESQIMSQLPFTIASKRIKYLGIQLTRDVKDLFKENYKPLLKEIKEDTNKWKNIPCSWVGRINIMKMAILPKVIYRFNAIPIKLPMTFFTELEKTTFKFIWNQKRACITKSILSQKNKAGGITLPDFKLYYKATVTKTAWYWYQNRDIDQWNRTEPSEIMLHIYNYLIFDKPEKNKQWGKDSLFNKWCWENWLAICRKLKLDPFLTPYTKINSRWIKDLNVRPKTIKTLEENLGITIQDIGMGKDFMSKTPKAMATKAKIDKWDLIKLKSFCTAKETTIRVNRQPTKWEKIFATYSSDKGLISRIYNELKQIYKKKTNNPIKKWAKDMNRHFSKEDIYAAKKHMKKCSSSLAIREMQIKTTMRYHLTPVRMAIIKKSGNNRCWRGCGEIGTLLHCWWDCKLVQPLWKSVWRFLRDLELEIPFDPAIPLLGIYPKDYKSCCYKDTCTRMFIAALFTIAKTWNQPKCPTMIDWIKKMWHIYTMEYYAAIKNDEFMSFVGTWMKLEIIILSKLSQEQKTKHGIFSLIGGN

SEQ ID NO: 34350 - protein, 1056 aa, Homo sapiens
  DOMAIN (316)..(361): kw TRANSCRIPTASE REVERSE II ORF2 domain identified by eMATRIX, accession number DM01354N, p-value=1.000e-40, raw score of 13.17
  DOMAIN (400)..(675): Reverse transcriptase domain identified by PFam, accession name rvt, E-value=2.4e-85, PFam score of 297.0
  misc_feature (1)...(1056): Xaa = X or * as defined in Table 2
MVKGSIQQEELTILNIYAPNTGAPRFIKQVLSDLQRDLDSHTLIMGDFNTPLSTLDRSTRQKVNKDTQELNSALHQADLIDIYRTLHPKSTEYTFFSAPHHTYSKIDHILGSKALLSKCKRIEIITNYLSDHSAIKLELRIKNLTQSRSTTWKLNNLLLNDYWVHNEMKTEIKMFFETNENKDTTYQNLWDAFKAVCRGKFIALNAYKRKEERSKIDTLTSQLKELEKQEQRHSKPSRRQEITKMRAELKEIETQKTLQKINESSSWFFERINKIDRPLARLIKKKREKNQIDTIKNDKGDITTDPTEIQTTIREYYKHLYTNKLENLEEMDTFLDTYTLPRLNQEEVESLNRPITGSEIVAITNSLPTKKSPGPEGFTAEFYQRYKEELVPFLLKLFQSIEKEGILPNSFYEASIILIPKPGRDTTKKENFRPISLINIDAKILNKILANRIQQHIQKLIHHDQVGFIPGMQGWFNIRKSINVIQHINRAKDKNHMIISIDAEKAFDKIQQRFMLKTLNKLGIDGTYFKIIRAIYDKPTANIILNGQKLEAFPFKTGTRQGCPLSPLLFNIVLEVLARAIRQEKEIKGIQLGKEEVKLSLFADDMIVYLENPIVSAQNLLKLISNFSKVSGYKINVQKSQAFLYTNNRQTESQIMSELPFTIASKRIKYLGIQFTRDVKDLFKENYKPLLKEIKEDTNKWKNIPCSRVGRINIVKMAILPKVIYRFNAIPIKLPMTFFTELEKTTLKFIWNQNRARIAKSILSQKNKAGGITLPDFKLYYKATVTKTAWYWYQNRDIDQWNRTEPSEIMPHIYNCLIFDKPEKNKQWGKDSLFNKWCWENWLAICRKLKLDPFLTPYTKINSRWIKDLNVRPKTIKTLEENLGITIQDIGVGKDFMSKTPKAMATKAKIDKWDLIKLKSFCTAKETTIRVNRQPTTWEKIFATYSSDKGLISRIYNELKQIYKKKTNNPIKTWAKDMNRHFSKEDIYAAKKHMKKCSSSLAIREMQIKTTMRYHLTPVRMAIIKKSGNNRCEYWWTCPQVKLXFKETLRKRGKAY

SEQ ID NO: 34351 - protein, 917 aa, Homo sapiens
  DOMAIN (204)..(250): kw TRANSCRIPTASE REVERSE II ORF2 domain identified by eMATRIX, accession number DM01354O, p-value=1.000e-40, raw score of 8.73
  DOMAIN (237)..(512): Reverse transcriptase domain identified by PFam, accession name rvt, E-value=5.3e-86, PFam score of 299.1
KPRLENYMKNAEASRADAINWKKGYLVMEDKMNEMKREGKFREKRIKRNKQSLQEIWDYVKRPNLRLISVPESDRENGTKLENTLQDIIQENFPNLARQANIQIQEIQRTPQRYSSRRATPRHIIVRFSKVEMKEKMLRAAREKEIQTNIREYYKHRYANKLENLEEMDKFLNIYTLRRLNQEEVESLNRPIRGSEIVAIINSLPTKKSPGPDGFTAEYYQRYKEELVPFLLKLFQSIEKEGILPNSFYEASIILIPKPGRDTTKKENFRTISLMNIDAKILNKILANRIQQHIKKLIHHDQVGFIPGMQGWFNIRKSINVIQHINRTKDKNHVIISIDAEKAFDKIQQLFLLKTLNKLGIDGTYLKIKRAIYDKPTANIILNGQKLEAFPLKTGTRQGCPLSPLLFNIVLEVLARAIRQEKEIKGIQLGKEEVKLSLFADDMIVYLENPIVSAQNLLKLISNFSKVSGYKINVQKSQAFLYTNNRQTETQIMSELPFTIASKRIKYLGIQLTRDVKDLFKENYKPLLNEIKEDTKKWKNIPCSWVGRINIMKMAILHKVIYRFNAIPIKLPMTFFTELEKTTLKFTWNQKRARIAKSILSQKNKAGGIMLPDFKLYYKATVTKTAWYWYQNRDIDQWNRTEPSEITPHIYNYLIFDKPEKNKQWGKDSLFNKWCWENWLAIWRKLKLDPFFTPYTKINSRWIKDLNVRPKTIKTLEENLGITIQDIGMGKDFMSKTPKAIATKAKIDKLDLIKLKSFCTAKETTIRVNRQPTEWEKIFATYSSDKGLISRIYNELKQIYKKKTNNPIKKWAKDMNRHFSKEDIYAAKKHMKKCSPSLAIREMQIKNTMRYHLTPLRMAIIKKSGNNRASRSARGESLGPSQSFPEHVHCPGPLHTALHRPMTFQIPRDMLEVSSAH

SEQ ID NO: 34352 - protein, 1096 aa, Homo sapiens
  DOMAIN (272)..(317): kw TRANSCRIPTASE REVERSE II ORF2 domain identified by eMATRIX, accession number DM01354N, p-value=1.000e-40, raw score of 13.17
  DOMAIN (356)..(631): Reverse transcriptase domain identified by PFam, accession name rvt, E-value=4e-87, PFam score of 302.9
  misc_feature (1)...(1096): Xaa = X or * as defined in Table 2
MGELITPLSTLDRSTRQKVNKDTQELNSALHQGDLIDIYRTLHPKSTEYTFFSAPHHTYSKIDHILGSKALLSKCKRTEIITNYLSDHSAIKLELRIKNLTQNRSTTWKLNNLLLNDYWIHNEMKAEIKMFFETNENKDTTYQNLWDAFKAVCRGKFIALNAHKRKQERSKIDTLTSQLKELEKQEQTHSKASRRQEITKIRAELKEIETQKTLQKINESRSWFFERINKIDRPLARLIKKKREKNQIDTIKNDKGDIATNPTEIQTTIREYYKHLYANKLENLEEMDKFLDTYTLPRLNQEEVESLNRPITGAEIVAIINSLPTKKSPGPDGFTAESYQRYKEELVPFLLKLFQSIEKEGILPNSFYEASIILIPKPGRDTTKKENFRLISLMNIDAKILNKILANRIQQHIKKLIHHDQVGFIPGMQGWFNIRKSINVIQHINRAKDKNHMIISIDAEKAFDKIQQPFMLKTLNKLGIDGTYFKIIRAIYDKPTANIILNGQKLEAFPLKTGTRQGCPLSPLLFNIVLEVLARAIRQEKEIKGIQSGKEEVKLSLFADDMIVYLENPIVSDQNLLKLISNFSKVSGYKINVQKSQAFLYTNNRQTESQIMSELPFTIASKRIKYLGIQLTRDVKDLFKENYKPLLKEIKEDTNKWKNIPCSWVGRISIVKMAILPKVIYRFSAIPIKLPMTFFTELEKTTLKFIWNQKRARIAKAILSQKNKAGGITLPDFKLYYKATVTKTARYWYQNRDIDQWNRTEPSEITPHIYNYLIFDKPEKNKQWGKDSLFNKWCWENWLAICRKLKLDPFLTPYTKINSRWIKDLNIRPKTIKTLEENLGSTIQDIGMGKDFMSKTPKAMATKDKIDIWDLIKLKSFCTAKETTIRVNGQPTKWEKIFATYSSDKGLISRICNELKQIYKKKTNNPIKKWAKDMNRHFSKEDIYAAKKHMKKCSSSLAIRQMQIKTTMRYHLTPVKFRSTSHQSPXREARGPGPLANAGSPGLRQIPETCHLKHPLGMLLLSHHSALSATHNPTPCKLQSSVMFTTSAAMLSDPWGLRKGLGREMFSCKTTEGNQLEAGAAEQSLYALPKPSDLQT

SEQ ID NO: 34353 - protein, 1191 aa, Homo sapiens
  DOMAIN (110)..(151): kw TRANSCRIPTASE REVERSE II ORF2 domain identified by eMATRIX, accession number DM01354I, p-value=1.000e-40, raw score of 15.55
  DOMAIN (356)..(631): Reverse transcriptase domain identified by PFam, accession name rvt, E-value=6.5e-79, PFam score of 275.6
MGDFNTPLSTLDRSTRQKVKKDNQELNSALHQVDLIDIYRTLHPKSTEYTFFSAPHHTYSKIDHIVGSKALLSNCKRTEIITSYLSDHSAIKLELRIKNLTQNRSTTWKLNNLLLNDYWVHNEMKAEIKMFFETNENKDTTYQNLWDAFKAVCRGKFIALNAHKRKQERSKIDTLTSQLKELEKQEQTHSKASRRQEITKIRAELKEIETQKTLQKINESRSWFFERINKIDRPLARLIKKKREKNQIDAIKNDKGDTTNDPTETQTTIREYYKHLYANKLENLEEMDKFLDTYTLPRLNQEEVEYLNRPITGSEIVAIINSLPTKKSPGPDGFTAEFYQRYKEELVPFLLKLFQSIEKEGILPNSFYEASIILIPKPGRDTTKKENFRPISLMNMDAKILNKILANRIQQHIKKLIHHDQVGFIPGMQGWFNIRKSRNVIQHINRAKDKNHMIFSIDAEKPFDKIQQPFMLKTLNKLGIDGTYFKIIRAIYDKPTANIILNGQKLEAFPLKTGTRQGCPLSPLLFNIVLEVLARAIRQEKEIKGIQLGKEEVKLSLFADDMIVYLENPIVSAQIFFKLISNFSKVSGNKINVQKSQAFLYTNNRQTESQIMSQLPYTIASKRIKYLGIQLTRDVKDLFKENYKPLLKEIKEDTNKWKNIPCSWVGRINIVKMAILPKVIYRFNAIPIKLPMTFFTELEKTTLKFIWNQKRAHIAKSILSQKNKAGGITLPDFKLYYKATVAKTAWYWYQNRDIDQWNRTEPSEITPHIYNYLIFDKPEKNKQWGKDSLFNKWCWENWLTICRKLKLDPFLTPYTKINSRWIKDLNVRPKTIKTLEENLGITIQDIGMGKDFMSKTPKAMATKDKIDKRDLIKLKSFCTAKETTIRVNRQPTKWEKIFATYSSDKGLISRIYNELKQIYKKKTNNPIKKWAKDMNRHFSKEDIYAAKKHMKKCSSSLAIREMQIKTTMRYHLTPVRMAIIKKSGNNSYSASGFSIMTVKVPFTLASKVCPSKSFLLQVFPDSQCNEGDKDESTGFDDNNLLLPWISPVSSAHYSPNPSRSGPSLVEDALTASWLSGLRHNTGRSWSGTLPQWTKGADGGKAVPGCTLKEHLRLTVKVSESFTEKVFERRVKRCKGIFKTIEEARVWREYLQEEGRSWAGTELCEDMSCSEASSVGDEAKKRLWQQEFDRVF

SEQ ID NO: 34354 - protein, 1416 aa, Homo sapiens
  DOMAIN (373)..(418): kw TRANSCRIPTASE REVERSE II ORF2 domain identified by eMATRIX, accession number DM01354N, p-value=1.000e-40, raw score of 13.17
  DOMAIN (378)..(1277): Reverse transcriptase domain identified by PFam, accession name rvt, E-value=3e-130, PFam score of 446.1
MARSRLTATSASRVQAILLPHPPNPVSFPAVGGPRRAAAMGNTTSDRVSGERHGAKAARSEGAGGHAPGKEHKIMVGSTDDPSVFSLPDSKVEEPMIPRLVYSSVVLQNVAWLKKRQPTAALKTLLSIPRTFRKRTTCFHSLPGDKEFVSWQQDLEDSVKPTQQARPTVIRWSEGGKEVFISGSFNNWSTKIPLIKRIKKPTQNRSTTWKLNNLLLNDYWVLNKMKAEIKMFFETNENKDTTYQNLWDTFKAVCRGKFIALNAHKRKQERSKIDTLTSQLKELEKQEQTHSKASRRQEITKIRAELKEIETQKTLQKINESRSWFFEKINKIDRLLARLVKKKRERNQIDAIKNDKGDITTNPTEIQTTIREYYKHLYANKLENLEEMDKFLNTYTLPRLNQEEVESLNRPITGSEIVAIINSLPTKKSPGPDGFTAEFYQRYKEELHINRAKDKNHMIISIDAEKAFDKIQQPFMLKTLNKLGIDGTYLKIIRAIYDKPTANIILNGQKLEVFPLKTGTRQGCPLSPLLFNIVLEVLARAIRQEKEIKGIQLGKEEVKLSLFAHDMIVYLENPIVSAQNLLKLISNFSKVLGYKINVQKSQAFLYTNNRQTETQIMSELPFTIASKRIKYLGIQLTRDVKDLFKENYKPLLKEIKEDTNKWKNIPCSWVGRINIVKMAILPKVIYRFNVIPIKLPMAFFTELGKTTLKFTWNQKRACIAKSILSKKNKARGVTLPDFKLYYKATVTKTEWYWYQNRHIDQWNRTEPSEIMPHIYNHLIFDKPEKNKKWGKDSLFNKWCWENWLAICTKLKLDPFLTPYTKVNSRWIKDLHVRPKTIKNLEENLGNTIQDIGMGKDFMSKTPKAMATKAKIDKWDLIKLKSFCTAKETTIRVNRKPTEWEKIFANYSSDKGLISRIYNELKQIYKKKTNNPIKKWTKDMNRHFSKEDFYAAQRHMKKCSSSLAIREMQIKTTYHAGPDGFTAEFYQRYKEELVPFLLKLFQSIEKEGILPNSFYEASIILIPKPGRDTTKKENFRPISLMNIDAKILNKILAKRIQQHIKKLIHHDQVGFIPGMQGWFNICKSINVIQHINRTKDKNHMIISIDAEKAFDKIQQLFMLKTLNKLGIDGTYLKIIRAIYDKPTANIILNGQKLEAFPLKTGTRQGCPLSPLLFNIVWEVLARAMRQEKEIKGIQLGKEEVKLSLFADDMIVYLENPIVSAQNLLKLISNFSKVSGYKINVQKSQAFLYTNNRQTESQIMSELPFTTASKRIKYLGIQLTRDEKDLFKENYKPLLNEIRGYKQMEEHSMLTGRKNQYRENAHTAQAKANHRPATSKKVYLITAMKPLSSPIPEGLGLENRTGKEIKSREWTTMLRLAVAAELTFRDWKERSRRTLDTHETKGIPLSKSRAGILVIDIR

SEQ ID NO: 34355 - protein, 1022 aa, Homo sapiens
  DOMAIN (198)..(239): kw TRANSCRIPTASE REVERSE II ORF2 domain identified by eMATRIX, accession number DM01354I, p-value=1.000e-40, raw score of 15.55
  DOMAIN (444)..(724): Reverse transcriptase domain identified by PFam, accession name rvt, E-value=8.3e-81, PFam score of 281.9
MYDVSRFQTYQSLAAEWRRNYQKSLSLKRSYYESLPQVLLGYTRKEGSGAATISLMTDEPGLDNPAYVSSAEDGQPAISPVDSGRSNRTRARPFERSTIRSRSFKKINRALSVLRRTKSGSAVANHADQGRENSENTTAPEAPHHTYSKIDHIVGSKALLSKCKRTEIITNYLSDHSAIKLELRIKNLTQNHSTTWKLNNLLLNDYWVHNEMKAEIKMFFETNENKDTTYQNLWDACKAVCRGKFIALSAHKRKQERSKIDTLTSQLKELEKQEQTHSKASRRQEITKIRAELKEIETQKTLQKIDESRSWFIERINKIDRLLTRLIKKKREKNQIDAIKNDKGDITTDPTEIQTTIREYYKHLYANKLENLEEMDKFLDTYTLPRLNQEEVESLNRPITGSEIVAIISSLPPKRSPGPDGFTAEFYQRYKEELVPFLLKLFQLIEKEGILPNSFYEASFILIPKPGRDTTKKENFRPISLMNIDAKILNKILANQIQQHIKKPLHHDQVGFIPGMQGWFNIRKSINVIQHINRAKDKNHMIISIDAEKAFDKIQQPFMLKTLNKLGIDGTYFKIIRAIYDKPTANIILNGQKLEAFPLKTGTRQGGTRQGCPLSPLLFNIVLEVLARAIRQEKEIKGIQLGKKEVKLSLFADDMIVYLENPIVSAQNLLKLISDFSKVSGHKINVQKSQAFLYTNNRQTESQIMSELPFTIASKRIKYLGIHLTRDVKDLFKENYKPLLKEIKEDTNKWKNIPCSWVGRINIVKMAILPKVIYRFSAIPIKLPMPFFTELEKTTLKFIWNQKRAPIAKSILSQRNKAGGITLPDFKLYYKATVTKTAWYWYQNRDIDQWNRTEPSEITPHIYNYLIFDKPEKNKQWGKDSLFNKWCWENWLAICRKLKLDPFLTPYTKINSRWIKDLNVRPKTIKTLEENLGITIQDIGMGKDFMFKTPKAMATKDKIEKWDLIKLKSFCTAKETTIRVNRQPTKWEKIFATYSSDKGLISRIYNELKQIYKKKTNNPIKN

SEQ ID NO: 34356 - protein, 1042 aa, Homo sapiens
  DOMAIN (115)..(156): kw TRANSCRIPTASE REVERSE II ORF2 domain identified by eMATRIX, accession number DM01354I, p-value=1.000e-40, raw score of 15.55
  DOMAIN (361)..(636): Reverse transcriptase domain identified by PFam, accession name rvt, E-value=2.1e-85, PFam score of 297.1
TWKGTTSTSRCKIMPKYRSTRQKVNKDTQELNSALHQADLIDIYRTLHTKSTEYTFFLAPHHTYSKIDHIVGSKALLSKCKRTEIITNYLSDHSAIKLELRIKNLNQSRSTTWKLNNLLLNDYWVHNEMKAEIKMFFETNENKDTTYQNLWDAFKAVCRGKFIALNAHKRKQERSKIDTLTSQLKELEKQEQTHSKASRRQEITKIRAELKEIETQKTLQKINESRSWFFERINKIDRPLARLIKKKREENQIDTIKNDKGDITTDPTEIQTTIREYYKHLYANKLENLEEMDKFLDTYTLPRLNQEEVESLNRPITGAEIVAIINSLPTKKSPGPDGFTAEFYQRYKEELVPFLLKLFQSIEKEGILPNSFYEASIILIPKPGRDTTKKENFRPISLMNIDAKILNKILANRIQQHIKKLIHHDQVGFIPGMQGWFNIRKSINVIQHINRAKDKNHMIISIDAEKAFDKIQQPFMLKTLNKLGIDGTYFKIIRAIYDKPTANIILNGKKLEAFPLKTGTRQGCPLSLLLFNIVLEVLARAIRQEKEIKGIQLGKEEVKLSLFADDMIVYLENPIVSAQNLLKLISNFSKVSGYKINVQKSQAFLYTNNRQTESQIMSELPFTIASKRIKYLGIQLTRDVKDLFKENYKPLLKEIKEDTNKWKNIPCSWVGRINIVKMAILPKVIYRFNAIPIKLPMTFFTELEKTTLKFIWNQKRARIAKSILSQKNKAGGITLPDFKLYYKATVTKTAWYWYQNRDIDQWNRIEPSEITPHTYNYLIFDKPEKNKQWGKDSLFNKWCWENWLAICRKLKLDPFLTPYTKINSRWIKDLNVRPKTIKTLEENLGITIQDIGVGKDFMSKTPKAMATKAKIGKWYLIKLKSFCTAKETTIRVNRQPTTWEKIFATYSSDKGLISRIYNELKQIYKKKTNNPIKKWAKDMNRHFSKEDIYAAKKYVKKCSSSLAIREMQIKTTMRYHLTPVRMAIIKKSGNNSDLYLMSAGTSCLMGRHWDSGQETCVQNVVLDTCSPSEQLLRAIADLVPQP

SEQ ID NO: 34357 - protein, 1153 aa, Homo sapiens
  DOMAIN (267)..(312): kw TRANSCRIPTASE REVERSE II ORF2 domain identified by eMATRIX, accession number DM01354N, p-value=1.000e-40, raw score of 13.17
  DOMAIN (351)..(626): Reverse transcriptase domain identified by PFam, accession name rvt, E-value=5.8e-89, PFam score of 309.0
AWKGTTDRSTRQKVNKDTQELNSALHQADLIDIYRTLHPKSTEYTFFSAPHHTYSKIDHIVGSKALLSKCKRTEIITNYLSDHSAIKLELRIKNLTQSRSTTWKLNNLLLNDYWVHNEMKTEIKMFFETNENKDTTYQNLWDAFKAVCRGKFIALNAYKRKQERSKIDTLTSQLKELEKQEQTHSKASRRQEITKIRAELKEIETQKALQKINESRSWFFERINKIDRPLARLIKKKREKNQIDTIKNDKGDITTDPTEIQTTIREYYKHLYANKLENLEEMDTFLDTYTLPRLNQEEVESLNRPITGSEIVAIINSLPTKKSPGPDGFTAEFYQRYKEELVPFLLKLFQSIEKEGILPNSFYEASIILIPKPGRDTTKKENFRPISLMNIDAKILNKILANRIQQHIKKLIHHDQVGFIPGMQGWFNIRKSINVIQHINRAKDKNHMIISIDAEKAFDKIQQPFMLKTLNKLGIDGTYFKIIRAIYDKPTANIILNGQKLEAFPLKTGTRQGCPLSPLLFNIVLEVLARAIRQEKEIKGIQLGKEEVKLSLFADDMIVYLENPIVSAQNLLKLISNFSKVSGYKINVQKSQAFLYTNNRQTESQIMSELPFTIASKRIKYLGIQLTRDVKDLFKENYKPLLKEIKEDTNKWKNIPCSWVGRINIVKMAILPKVIYRFNAIPIKLPMTFFTELEKTTLKFIWNQKRARIAKSILSQKNKAGGITLPDFKLYYKATVTKTAWYWYQNRDIDQWNRTEPSEIMLRIYNYLIFDKPEKNKQWGKDSLFNKWCWENWLAICRKLKLDPFPTPYTKINSRWIKDLNVRPKTIKTLEENLGITIQDIGVGKDFMSKTPKAMATKAKIDKWDLIKLKSFCTAKETTIRVNRQPTKWEKLFATYSSDKGLISRIYNELKQIYKKKTNNPIKKWAKDMNRHFSKEDIYAAKKHMKKCSSSLAIREMQIKTTMRYHLTPVRMAIIKKSGNNRKEEKGARDINKQFTEEATLMANQPMKRCLTFPAITERQTPALSPQPHGIFLVNLIKAFIASPVSVQPSRVLMALRPTTPVQVCNKEAGNMALARTSGSLELKGFQGQTNPCGQTHGDMTMCGSLDRLAGLYLLQALARYLKNERIHFQDASLMSMSAGRLSSSPAAPSKAA

SEQ ID NO: 34358 - protein, 1143 aa, Homo sapiens
  DOMAIN (110)..(151): kw TRANSCRIPTASE REVERSE II ORF2 domain identified by eMATRIX, accession number DM01354I, p-value=1.000e-40, raw score of 15.55
  DOMAIN (356)..(631): Reverse transcriptase domain identified by PFam, accession name rvt, E-value=9.2e-89, PFam score of 308.3
MGDFNTPLSTLDRSTRQKVNKDTQELNSALHQADLIDIYRTLHPKSTEYTFFSAPHHTYSKIDHILGSKALLSKCKRTEIIANYLSDHSAIKLELRIKNLTQNRSTTWKLNNLLLNDYWVHNEMKAEIKMFFETNENKDTTYQNLWDAFKAVCRGKFIALSAHKRKQERSKIDTLTSQLKELEKQEQTHSKASRRQEITKIRAELKEIETQKTLQKINESRSWFFERINKIDRPLARLIKKKREKNQIDAIKNDKGDITIDPTEIQTTIREYYKHLYANKLENLEEMDKFLDTYTLPRLNQEEVKSLNRPITGAEIVAIINSLAIKKSPGPDGFTAEFYQRYKEELVPFLLKLFQSIEKEGILPNSFYEASIILIPKPGRDTTKKENFRPISLMNIDAKILNKILANRIQQHIKKLIHHDQVGFIPGMQGWFNIHKSINVIQHINRARDKNHMIISIDAEKAFDKIQQPFMLKTLNKLGIDGTYLKIIRAIYDKPTANIILNGQKLEAFPLKTGTRQGCPLSPLLFNIVLEVLARAIRQEKEIKGIQLGKEEVKLSLFADDMIVYLENPIVSAQNLLKLISNFSKVSGYKINVQKSQAFLYTNNRQTESQIMSELPFTIASKRIKYLGIQLTRDVKDLFKENYKPLLKEIKEDTNKWKNMPCSWVGRINIVKMAILPKVIYRFNAIPIKLPMAFFTELEKTTLKFIWNQKRARIAKSILSQKNKAGGITLPNFELYYKATVTKTAWYWYQNRYIDQWNRTEPSEITPHIYNYLIFDKPGKNKQWGKDSLFNKWCWENWLAICRKLQLDPFLTPYTKINSRWIKDLNVRPKTIKTLEEDLGITIQDIGMGKDFMSKTPKAMATKDKIDKWDLIKLKSFCTAKETTIRVNRQPTKWEKIFATYSFDKGLISRIYNELQQIYKKKTNNPIKKWAKDMNRHFSKEDIYAAKKHMKKYSSSLAIREMQIKTTMRYHLTPVRMATIKNSGNNRSLCFYKENLSLCLAILLSVPVQEGGARSFLAPAGGVAGRATSHYGGHMATAERLSVELSGQALKEFQKGPLSPKQFKGHHSQQLRWTHRLNPSYGQSKTPKNTLLKMRGPTTWALGGTDVAASTDNNGNAHFETLQVMDMPRPWCCLLDGALLVSV

SEQ ID NO: 34359 - protein, 1052 aa, Homo sapiens
  DOMAIN (383)..(408): 7 kw REVERSE TRANSCRIPTASE RNA POLYMERASE domain identified by eMATRIX, accession number DM00895E, p-value=3.333e-11, raw score of 15.72
  DOMAIN (354)..(629): Reverse transcriptase domain identified by PFam, accession name rvt, E-value=4.9e-88, PFam score of 305.9
MVKGSIQQEELTILNIYAPNTGAPRFIKQLLSDLQRDLDSHTLIMGDFNTPLSTLDRSTRQKVNKDTQELNSALHQADLIDIYRTLHPKSTEYTLFSAPHHTYSKIDHILGSKALLSKCKRTEIITNYLSDHSAIKLELRIKNLTQSRSTTWKLNNLLLNDYWRKQERSKTDTLTSQLKELEKQEQTHSKASRRQEITKIRAELKEIETQKTLQKINESRSWFFERINKIDRPLARLIKKKEKNQIDTIKNDKGDITTDPTEIQTTIREYYKHLYANKLENLEEMDTFLDTYTLPRLNQEEVESLNRPITGSEIVAVINSLPTKKSPGPDGFTAEFYQRYKEELVPFLLKLFQSIEKEGILPNSFYEASIILIPKSGRDTTKKENFRPISLMNIDAKILNKILANRIQQHIKKLIHHDQVGFIPGMQGWFNIRKSINVIQHINRAKDKNHMIISIDAEKAFDKIQQPFMLKTLNKLGIDGTYFKIIRAIYDKPTANIILNGQKLEAFPLKTGTRQGCPLSPLLFNIVLEVLARAIRQEKEIKGIQLGKEEVKLSLFADDMIVYLENPIVSAQNLLKLISNFSKVSGYKINVQKSQAFLYTNNRQTESQIMSELPFTIASKRIKYLGIQLTRDVKDLFKENYKPLLKEIKEDTNKWKNIPCSWVGRINIVKMAILPKVIYRFNAIPIKLPMTFFTELEKTTLKFIWNQKRARIAKSILSQKNKAGGITLPDFKLYYKATVTKTAWYWYQNRDIDQWNRTEPSEIMPHIYNYLIFDKPEKNKQWGKDSLFNKWCWENWLAICRKLKLDPFLTPYTKINSRWIKDLNVRPKTIKTLEENLGITIQDIGVGKDFMSKTPKAMATKAKIDKWDLIKLKSFCTAKETTIRVNRQPTTWEKIFATYSSDKGLISRIYNELKQIYKKKTNNPIKKWAKDMNRHFSKEDIYAAKKHMKKCSSSLAIREMQIKTTMRYHLTPAKIQNGSRNIVKSNMNCLISQNSPQVPCTTVAKYHPNSRVTPEPRSGTPKEDRRWILMTSGKLYFLIQKSTEHMLSGRKD

SEQ ID NO: 34360 - protein, 1647 aa, Homo sapiens
  DOMAIN (203)..(244): kw TRANSCRIPTASE REVERSE II ORF2 domain identified by eMATRIX, accession number DM01354I, p-value=1.000e-40, raw score of 15.55
  DOMAIN (449)..(724): Reverse transcriptase domain identified by PFam, accession name rvt, E-value=3.6e-89, PFam score of 309.6
DTHRLKIKGWRKIYQANGKQKKAGVAILVSDKTEFKPTKIKRDKEGHYIMVKGSIQQEELTILNIYAPNTGAPRFTKQVLRDLQRDLDSNTIITGDFNTPLSTLDRSMRQKVNKDIQELNSALHQADLIDIYRTLHPKSTENTFFSAPHHTYSKIDHIVGSKALLSKCKRKEIITNCLSDHSAIKLELRIKKLPQNCSTIWKLNNLLLNDYWVHNEMKAEIKMLFETNENKDTTYQNLWDTLKAVCRGKFIALNAHGRKQERSKIDTLTSQLKELAKQEQTHSKASRRQEITKIRAELKEIETQKTLQKINESRSWFFERINKIDRPLARLIKKKREKNQIDTIKNDKGDITTDPTEIQTTIREYYKHLYANKLENLEEMDTFLDTYTLPRLNQEEVESLNRPITGSEIVAIINSLPTKKSPGPDGFTAEFYQRYKEELVPFLLKLFQSIEKEGILPNSFYETSIILIPKPGRDTTKKENFRPISLMNIDAKILNKILANRIQQHIKKLIHHDQVGFIPGMQGWFNIRKSINVIQHINRAKDKNHMIISIDAEKAFDKIQQPFMLKTLNKLGIDGTYFKIIRAIYDKPTANIILNGQKLEAFPLKTGTRQGCPLSPLLFNIVLEVLARAIRQEKEIKGIQLGKEEVKLSLFADDMIVYLENPIVSAQNLLKLISNFSKVSGYKINVQKSQAFLYTNNRQTESQIMSELPFTIASKRIKYLGIQLTRDVKDLFKENYKPLLKEIKEETNKWKNIPCSWVGRINIVKMAILPKVIYRFNAIPIKLPMTFFTELEKTTLKFIWNQKRARIAKSILSQKNKAGGITLPDFKLYYKATVTKTAWYWYQNRDIDQWNRTEPSEIMPHIYNYLIFDKPEKNKQWGKDSLFNKWCWENWLAICRKLKLDPFLTPYTKINSRWIKDLNVKPKTIKTLEENLGITIQDIGVGKDFMSKTPKAMATKDKIDKWDLIKLKSFCTAKETTIRVNRQPTTWEKIFATYSSDKGLISRIYNELKQIYKKKTNNPIKKWAKDMNRHFSKEDIYAAKKHMKKCSSSLAIREMQIKTTMRYHLTPVRMAIIKKSGNNRPEKTKSFLPPLPTQSSIHSGFLEHCVEQDSEALSGEAGKSLMFAMGVGSERAKHSLSDDGQLRGAKVATALTPSPTPHSDADDNTHLALRHDEQMSASEGMKFKFHSGEKVLCFEPDPTKARVLYDAKIVDVIVGKDEKGRKIPEYLIHFNGWNRSWDRWAAEDHVLRDTDENRRLQRKLARKAVARLRSTGRKKKRCRLPGVDSVLKGLPTEEKDENDENSLSSSSDCSENKDEEISEESDIEEKTEVKEEPELQTRREMEERTITIEIPEVLKKQLEDDCYYINRRKRLVKLPCQTNIITILESYVKHFAINAAFSANERPRHHHVMPHANMNVHYIPAEKNVDLCKEMVDGLRITFDYTLPLVLLYPYEQAQYKKVTSSKFFLPIKESATSTNRSQEELSPSPPLLNPSTPQSTESQPTTGEPATPKRRKAEPEALQSLRRSTRHSANCDRLSESSASPQPKRRQQDTSASMPKLFLHLEKTSPAVLTPSGVLLSIILLELPKVIPVPFCVQVPISLCTSCPCHIHKLLRERFLAEYHDDFFPESAYVAACEAHYSTKNPRAIY

SEQ ID NO: 34361 - protein, 3524 aa, Homo sapiens
  DOMAIN (154)..(195): kw TRANSCRIPTASE REVERSE II ORF2 domain identified by eMATRIX, accession number DM01354I, p-value=1.000e-40, raw score of 15.55
  DOMAIN (400)..(3159): Reverse transcriptase domain identified by PFam, accession name rvt, E-value=4.5e-227, PFam score of 767.8
MVKGSIQQEELTILNIYAPNTGAPRFIKQVLSDIQRDLDSHTLIMGDFNTPLSTLDRSTRQKVNKDTQELNSALHQADLIDIYRTLHPKSTEYTFFSAPHHTYSKIDHIVGSKALLSKCKRTEIITNCLSDHGAIKLELRIKNLTQSRSTTWKLNNLLLNDYWVHNEMKAEIKMFFETNENKDTTYQNLWDAFKAVCRGKFIALNAYKRKQERSKIDTLTSQLKELEKQEQTHSNASRRQEITKIRAELKEIETQKTLQKINESRSWFFERINKIDRPLARLIKKKREKNQIDTIKNDKGDITTDPTEIQTTIREYYKHLYANKLENLEEMDTFLDTYTLPRLDQEEVESLNRPITGSEIVAIINSLPTKKSPGPDGFTAEFYQRYKEELVPFLLKLFQSIEKEGILPNSFYEASIILIPKPGRDTTKKENFRPISLMNIDAKILNKILAKRIQQHIKKLIHHDQVGFIPGMQGWFNICKSINVIQHINRAKDKNHMIISIDAEKAFDKIQQPFMLKTLNKLGIDGTYFKIIRAIYDKPTANIILNGQKLEAFPLKTGTRQGCPLSPLLFNIVLEVLARAIRQEKEIKGIQLGKEEVKLSLFADDMIVYLENPIVSAQNLLKLISNFSKVSGYKINVQKSQAFLYTNNRQTESQIMSELPFTIASKRIKYLGIQLTRDVKDLFKENYKPLLKEIKEDTNKWKNIPCSWVGRINIVKMAILPKVIYRFNAIPIKLPMTFFTELEKTTLKFIWNQKRARIAKSILSQKNKAGGITLPDFKLYYKATVTKTAWYWYQNRDIDEWNRTEPSEIMPHIYNYLIFDKPEKNKQWGKDSLFNKWCWENWLAICRKLKLDPFLTPYTKINSRWIKDLNVRPKTIKTLEENLDITIQDIGVGKDFMSKTPKAMATKDKIDKWDLIKLKSFCTAKETTIRVNRQPTTWEKIFATYSSDKGLISRIYNELKQIYKKKTNNPIKKWVKDMNRHFSREDIYAAKKHMKKCSSSLAIREMQIKTTMRFYWDLIMLIMMVGNLVIIPVGITFFTEQTTTPWIIFNVASDTVFLLDLIMNFRTGTVNEDSSEIILDPKVIKMNYLKSWFVVDFISSIPVDYIFLIVEKGMDSEVYKTARALRIVRFTKILSLLRLLRLSRLIRYIHQWEEERSSSPATEQSWTENDFDELREEGFRRSNYSELREDIQTKGKEVENFEKNLEECITRITNTEKCLKELMELKTKARELREECRSLRSRCDQLEERVSAMEDEMNEMKQEGKIKRDKEGHYIMVKGSIQQEELTILNIYAPNTGAPRFIKQVLSDIQRDLDSHTLIMGDFNTPLSTLDRSTRQKVNKDTQELNSALHQADLIDIYRTLHPKSTEYTFFSAPHHTYSKIDHIVGSKALLSKCKRTEIITNCLSDHGAIKLELRIKNLTQSRSTTWKLNNLLLNDYWVHNEMKAEIKMFFETNENKDTTYQNLWDAFKAVCRGKFIALNAYKRKQERSKIDTLTSQLKELEKQEQTHSNASRRQEITKIRAELKEIETQKTLQKINESRSWFFERINKIDRPLARLIKKKREKNQIDTIKNDKGDITTDPTEIQTTIREYYKHLYANKLENLEEMDTFLDTYTLPRLDQEEVESLNRPITGSEIVAIINSLPTKKSPGPDGFTAEFYQRYKEELVPFLLKLFQSIEKEGILPNSFYEASIILIPKPGRDTTKKENFRPISLMNIDAKILNKILAKRIQQHIKKLIHHDQVGFIPGMQGWFNICKSINVIQHINRAKDKNHMIISIDAEKAFDKIQQPFMLKTLNKLGIDGTYFKIIRAIYDKPTANIILNGQKLEAFPLKTGTRQGCPLSPLLFNIVLEVLARAIRQEKEIKGIQLGKEEVKLSLFADDMIVYLENPIVSAQNLLKLISNFSKVSGYKINVQKSQAFLYTNNRQTESQIMSELPFTIASKRIKYLGIQLTRDVKDLFKENYKPLLKEIKEDTNKWKNIPCSWVGRINIVKMAILPKVIYRFNAIPIKLPMTFFTELEKTTLKFIWNQKRARIAKSILSQKNKAGGITLPDFKLYYKATVTKTAWYWYQNRDIDEWNRTEPSEIMPHIYNYLIFDKPEKNKQWGKDSLFNKWCWENWLAICRKLKLDPFLTPYTKINSRWIKDLNVRPKTIKTLEENLDITIQDIGVGKDFMSKTPKAMATKDKIDKWDLIKLKSFCTAKETTIRVNRQPTTWEKIFATYSSDKGLISRIYNELKQIYKKKTNNPIKKWVKDMNRHFSREDIYAAKKHMKKCSSSLAIREMQIKTTMRFYWDLIMLIMMVGNLVIIPVGITFFTEQTTTPWIIFNVASDTVFLLDLIMNFRTGTVNEDSSEIILDPKVIKMNYLKSWFVVDFISSIPVDYIFLIVEKGMDSEVYKTARALRIVRFTKILSLLRLLRLSRLIRYIHQWEEERSSSPATEQSWTENDFDELREEGFRRSNYSELREDIQTKGKEVENFEKNLEECITRITNTEKCLKELMELKTKARELREECRSLRSRCDQLEERVSAMEDEMNEMKQEGKIKRDKEGHYIMVKGSIQQEELTILNIYAPNTGAPRFIKQVLSDLQRDLDSHTLIMGDFNTSLLTLDRSMRQKVNKDTQELNSSLHQADLIDIYRTLHPKSIEYTFFSAPHHTYSKIDHIVGSKALLSKCKRTEIITNYLSDHSAIKLELRIKNLTQSRSTTWKLNNLLLNDYWVHNEMKAEIKMFFETNENKDTTYQNLWDAFKAVCRGKFIALNAHKRKQERSKIDTLTSQLKELEKQEQTHSKASRRQEITKIRAELKEIETQKTLQKINESRSWFFERINKIDRPLARLIKKKREENQIDTIKNDKGDITTDPTEIQTTIREYYKHLYANKPENLEEMDKFLDTYTLPRLKQEEVESLNRPITGAEIVAIINSLPTKKSPGPDGFTAEFYQRYKEELVPFLLKLFQSIEKEGILPNSFYEASIILIPKPGRDTTKKENFRPISLMNIDAKILNKILANRIQQHIKKLIHHDQVGFIPGMQGCQYHTEWAKTGSIPLKTGTRQGCPLSPLLFNTVLEVLARAIRQEKEIKGIQLGKEEVKLSLFADDMIVYLENPIVSAQNLLKLISNFSKVSGYKINVQKSQAFLYTNNRQTESQIMSELPFTIASKRIKYLGIQFTRDVKDLFKENYKPLLKEIKEDTNKWKNIPCSWVGRINIVKMAILPKVIYRFNAIPIKLPMTFFTELEKTTLNFIWNQKRARIAKSILSQKNKAGGITLPDFKLYYKATVTKTAWYWYQNRDIDQWNRTEPSEITPHTYNYLIFDKPEKNKQRGKDSLFNKWCWENWLAICRKLKLDPFLTPYTKINSRWIKDLNVRPKTIKILEENLGITIQDIGVGKDFMSKTPKAMATKAKIDKWDLIKLKSFCTAKETTIRVNRQPTTWEKIFATYSSDKGLISRIYNELKQIYKKKTNNPIKKWAKDMNRHFSKEDIYAAKKYMKKCSSSLAIREMQIKTTMRYHLTPAPVCDVRLPVSKCSHCSVPTYE

SEQ ID NO: 34362 - protein, 1308 aa, Homo sapiens
  DOMAIN (627)..(652): 7 kw REVERSE TRANSCRIPTASE RNA POLYMERASE domain identified by eMATRIX, accession number DM00895E, p-value=3.333e-11, raw score of 15.72
  DOMAIN (598)..(873): Reverse transcriptase domain identified by PFam, accession name rvt, E-value=1.6e-88, PFam score of 307.5
  misc_feature (1)...(1308): Xaa = X or * as defined in Table 2
MAAWNLLLKSYAYWGGLRKEDFHCLDRKTLRTVSFLAALLSYESIGGKGKLTTRKDIYTENPSVHHHHQRPKVDKTTKMGKKQNRKTGNSKMQSASPPPKERSSSPATEQSWMENDFEELREEGFRRSNYSELREDIQTKGKEVENFEKNLEECITRITNTEKCLKELMELKTKARELREECRSLRSRCDQLEERVSAMEDEMNEMKREGKFRDKRIKRNEQSLQEIWDYVKRPNLRLIGVPESDVENGTKLENTLQDIIQENFPSLARQANVQIQEIQRTPQRYSSRRATPRHIIVRFTKVEMKEKMLRAAREKGRVTLKGKPIRLTADLSAETLQARREWGPIFNILKEKNFQPRISYPAKLSFISEGEIKYFIDKQMLRDFVTTRPALKELLKEALNMERNNRRKQERSKIDTLTSQLKELEKQEQTHSKASRRQEITKIRAELKEIETQKTLQKINESRSWFFERINKIDRPLARLIKKKREKNQIDTIKNDKGDITTDPTEIQTTIREYYKHLYANKLENLEEMDTFLDTYTLPRLNQEEVESLNRPITGSEIVAIINSLPTKKSPGPDGFTAEFYQRYKEELVPFLLKLFQSIEKEGILPNSFYEASIILIPKPGRDTTKKENFRPISLMNIDAKILNKILANRIQQHIKKLIHHDQVGFIPGMQGWFNIRKSINVIQHINRAKDKNHMIISIDAEKAFDKIQQPFMLKTLNKLGIDGKYFKIIRAIYDKPTANIILNGQKLEAFPLKTGTRQGCPLSPLLFNIVLEVLARAIKQEKEIKGIQLGKEEVKLSVFADDMIVYLENPIVSAQNLLKLISNFSKVSGYKINVQKSQAFLYTNNRQTESQIMSELPFTIASKRIKYLGIQLTRDVKDLFKENYKPLLKEIKEDTNKWKNIPCSWVGRINIVKMAILPKVIYRFNAIPIKLPMTFFTELEKTTLKFIWNQKRARIAKSILSQKNKAGGITLPDFKLYYKATVTKTAWYWYQNRDIDQWNRTEPSEIMPHIYNYLIFDKPEKNKQWGKDSLFNKWCWENWLAICRKLKLDPFLTPYTKINSRWIKDLNVRLKTIKTLEENLGITIQDIGVGKDFMSKTPKAMATKAKIDKWDLIKLKSFCTAKETTIRVNRQPTTWEKIFATYSSDKGLISRIYNELKQIYKKKTNNPIKKWAKDMNRHFSKEDIYAAKKHMKKCSSSLAIREMQIKTTMRYHLTPVRMAIIKKSGNNSPGVKASSRPSLVLQQPAACLLFPFNMTDAAVSFTKDFLEVEWQQPSPRWGXRPSRGSSCCWRYSMPASRSPQICNTRAL

SEQ ID NO: 34363 - protein, 1212 aa, Homo sapiens
  DOMAIN (294)..(335): kw TRANSCRIPTASE REVERSE II ORF2 domain identified by eMATRIX, accession number DM01354I, p-value=1.000e-40, raw score of 15.55
  DOMAIN (540)..(815): Reverse transcriptase domain identified by PFam, accession name rvt, E-value=7.7e-89, PFam score of 308.6
MGKKQNRKTGNSKTQSASPPPKERSSSPATEQSWMENDFDELREEGFRRSNYSELWEDIQTKGKEVENFEKNLEECITRITNTEKCLKELMELKTKARELHEECRSLRSRCDQLEERVSAMEDEMNEMKREGKFREKRIKRNEQSLQEIWDYVKRPNLRLIGVPESDVENGTKLENTLQDIIQENFPNLARQANVQIQEIQRMPQRYSSRRATPRHIIVRFTKVEMKEKMLRAARQKAPHHTYSKIDHIVGSKALLSKCKRTEIITNYLSDHSAIKLELRIKNLTQSRSTTWKLNNLLLNDYWVHNEMKAEIKMFFETNENKDTTYQNLWDTFKAVCRGKFIALNAYKRKQETSKIDTITSQLKELEKQEQTHSKASRRQEITKIRAELKEIETQKTLQKINESRSWFFERINKIDRPLARLIKKKREKNQIDTIKNDKGDITTDPTEIQTTIREYYKHLYANKLENLEEMDTFLDTYTLPRLNQEEVESLNRPITGSEIVAIINSLPTKKSPGPDGFTAEFYQRYKEELVPFLLQLFQSIEKEGILPNSFYEASIILIPKPGRDTTKKENFRPISLMNIDAKILNKILANRIQQHIKKLIHHDQVGFIPGTQGWFNIRKSINVIQHINRAKDKNHMIISIDAEKAFDKIQQPFMLKTLNKLGIDGTYFKIIRAIYDKPTANIILNGQKLEAFPLKTGTRQGCPLSPLLFNIVLEVLARAIRQEKEIKGIQLGKEEVKLSLFADDMIVYLENPIVSAQNLLKLISNFSKVSGYKINVQKSQAFLYTNNRQTESQIMSELPFTIASKRIKYLGIQLTRDVKDLFKENYKPLLKEIKEDTNKWKNIPCSWVGRINIVKMAILPKVIYRFNAIPIKLPMTFFTELEKTTLKFIWNQKRACISKSILSQKNKAGGITLPDFKLYYKATVTKTAWYWYQNRDIDQWNRTEPSEIMPHIYNYLIFDKPEKNKQWGKDSLFNKWCWENWLAICRKLKLDPFLTPYTKINSRWIKDLNVRPKTIKTLEENLGITIQDIGVGKDFMSKTPKAMATKAKIDKWDLIKLKSFCTAKETTIRVNRQPTTWEKIFTTYSSDKGLISRIYNELKQIYKKKTNNPIKKWAKDMNRHFSKEDIYAAKKHMKKCSSSLAIREMQIKTTMRYHLAPVRMAIIKKSGNNRDQRAGKISERLVITSEMIENIQSVKAYCWEEAMEKMIENLR

SEQ ID NO: 34364 - protein, 1194 aa, Homo sapiens
  DOMAIN (411)..(456): kw TRANSCRIPTASE REVERSE II ORF2 domain identified by eMATRIX, accession number DM01354N, p-value=1.000e-40, raw score of 13.17
  DOMAIN (5)..(235): AP endonuclease family 1 domain identified by PFam, accession name AP_endonucleas1, E-value=7e-83, PFam score of 288.8
SNSHITILTLNVNGLNAPIKRHRLANWIKSQDPSVCCIQETHLTCRDTHRIKIKGWREIYQANGKQKKAGVAILVSDKTDFKPTKIKRDKEGHYMMVKGSIQQEELTTLNIYAPNTGAPRFIKQVLRDLQRDLDSHTLIMGDFNTPLSTLDRSTRQKVNKDIQDLNSALHQVDLIDIYRTLHPKSTEYTFFSALHHIYSKIDHIVGSKALLSKYKTTEIITNCLSDHSAIKLELRIKKLTQNRSTTWKLNNLLLNDYWVHNKMKAEINTLFETNENKDTTYQNLWDTFKAVCRGKFIALNAHKRKQERSKIDTLTSQLKELEKQEQTHSKASRRQEITKIRAKLKEIETQKILQKINESRSWFFEKINKIDRPLARPIKKKREKNQIDAIKNDKGDITTDPTEIQTTIREYYKHLYANKLENLEEMDKFLNTYTLPRLNQEEVESLNKPITGSEIEAIINSLPIKKSPGPDGFIAKFHQRYKEELEASIILIPKPGRDTTKKENFRPISLMNIDAKILNKILANRIQQHIKKLIHHDQVGFIPGMQGWFNIRKSINVIQHINRAKDKNHMIISIDAEKAFDKIQQPFMLKTLKKLGIDGTYFKIIRAIYDKPTANIIPNGQKLEAFPLKTGTRQGCPLSPLLFNIVLEVLARAIRQEKEIKGIQLGKEEVKLSLFADDMILYLENPIVSAQNLLKLISNFSKVSGYKINVQKSQAFSYTNNRQTESQIMSELPFTIASKRIKYLGIQLTRDVKDLFKENYKPLLKEIKEDTNKWKNIPCSWVGRINIVKMAILPKVIYRFNAIPIKLPMTFFTELEKTTLKFIWNQKRARITKSILSQKNKAGGITLPDFKLYYKITVTKTAWYWYQNRDIDQWNRTEPSEIMPHTYNYLIFDKPEKNKQWGKDSLFNKWCWENWLAICRRKLKLDPFLTPYTKINSRWIKDLNVRPKTIKTLEENLGNTIQDIGMGKDFMSTTPKAMATKAKIDKWDLIKLKSFCTAKETTITVNRQPTEWEKIFTIYPSDKGLISRIYKELKQIYKKRTNNPINKWVKDMNRHFSKEDIYTAKRHMKKCSSSLAIREMQIKTTLRYHLIPVRMAIIKKSGNNSKARMISAENCSPKLTEKIELSDWNSPNIQTCTDPLFLCPTERAVTLTVKVCGFTPEVIETTNPPGGTNNSGRDTLKSCNTHCEGLRLHS

SEQ ID NO: 34365 - protein, 1979 aa, Homo sapiens
  DOMAIN (358)..(403): kw TRANSCRIPTASE REVERSE II ORF2 domain identified by eMATRIX, accession number DM01354N, p-value=1.000e-40, raw score of 13.17
  DOMAIN (1229)..(1950): Zinc finger, C2H2 type domain identified by PFam, accession name zf-C2H2, E-value=2.8e-168, PFam score of 572.5
MGKKQNRKTGNSKTQSTSPPPKERSSSPATDQSWMENDFDELREEGFRRSNYSELREDIQTKGKEVENFEKNLEECITRITNTEKCLKELMELKTKARELREECRSLRSQCDQLEERVSAMEDEMNEMKQEGKFREKRIKRNEQSLQEIWDYVKRPNLRLIGVPESDAENGTKLENTLQDIIQETFPNLARQANVQIQEIQRTPQRYSSRRATPRHIIVRFTKVEMKEKMLRAAREKGRVTLKGKPIRLTADLSAETLQARREWGPILNILKEKNFQPRISYPAKLSFISEGEIKYFTDKQMLTDFVTSRPALKELLKEALNMERNNRYQPLQNHAKMMIKGISTTDLTEIQTTIREYYKHLYANKLENLEEMDKFLDTYTLPRLNQEEVESLNRPITGAEIVAIINSLPTKRSAGPDGFTAEFYQRYKEELVPFLLKLFQSIEKEGILPNSFCEASIILIPKPGRDTTKKENFRPISLMNIDAKILNKILAKRIQQHIKKLIHHDQVGFIPGMQGWFNIRKSINVIQHINRAKDKNHMIISIDAEKAFDKIQQHFMLKTLNRLGIDGTYFKIIRAIYDKPTANIILNGQKLEAFPLKTGTRQGCPLSPLLFNIVLEVLARAIRQEKEIKGIQLGKEEVKLCLFADDMIVYLENPIVSAQNLLKLISNFSKVSGYKINGQKSQAFLYTNNRQTESQIMSELPFTIASKRIKYLGIQLTRDVKDLFKENYKPLLNKIKEDTKKWKNIPCSWVGRINIMKMAILPKVIYRFNAIPIKLPMTFFTELENTTLKFIWNQKRARISKAVLSQKNKAGGVTLPDFKLYYKATVTKTAWYWYQNRDIDQWNRTEPSEITAHNYNYLIFDKPEKNKQWGKDSLFNKWCWENWLAICRKLKLDPFLTPYTKINSRWIKDLNVRPKTIKTLEENLGITIQDIGMGKDFMSKTPKAMATKANIDKWDLIKLKSFCTAKETTIRVNRQPTKWEKIFATYSSDKGLISRIYNELKQIYKKKNKQPHQKVGEGHEQTLLKRRHLCSQKTHEKMLIITGHQRNANQNHYEISSHTSMGKDFMSKTPKAMATKAKIDKWDLIKLKSFCTAKETTIRVNRQPTKWEKIFTTYSSDKGLISRIYNELKQIYKKKTTPSKNLESKYGPEKISPENDIFEINLPKHVIKQISKTLGLEAFYFRNDSEYRSRFEGRQGHQEGYINQKIISYEEMPAYTHASPIHNTHKPYECKECGKYFSCGSNLIQHQSIHTGEKPYKCKECGKAFQLHIQLTRHQKFHTGEKTFECKECGKAFNLPTQLNRHKNIHTVKKLFECKECGKSFNRSSNLTQHQSIHAGVKPYQCKECGKAFNRGSNLIQHQKIHSNEKPFVCRECEMAFRYHYQLIEHCRIHTGEKPFECKECRKAFTLLTKLVRHQKIHMGEKPFECRECGKAFSLLNQLNRHKNIHTGEKPFECKECGKSFNRSSNLIQHQSIHADVKPYECKECGKGFNRGANLIQHQKIHSNEKPFVCRECEMAFRYHYQLIQHCQIHTGGKPFECKECGKAFSLLTQLARHKNIHTGEKPFECKDCGKAFNRGSNLVQHQSIHTGEKPYECKECGKAFRLHLQLSQHEKTHTGEKPFECKECGKFFRRGSNLNQHRSIHTGKKPFECKECGKAFRLHMHLIRHQKFHTGEKPFECKECGKAFSLHTQLNHHKNIHTGEKPFKCKECGKSFNRVSNLVQHQSIHAGVKPYECKECGKGFSRVSNLIQHQKTHSSAKPFVCKECRKTFRYHYQLTEHYRIHTGEKPFECKECGKAFGLLTQLAQHQIIHTGEKPFKCKECGKAFNRGSNLVQPQSIHTGEKPYECKECGKAFRLHLQLSLHQKLVQKIHTWVKTFECKECGKAFQYHYQFHGHYRFHIRENPYECQGCGKCFTSGRNLRVHQRIHTGEKPYQCEECGKAFSHSSNLLNMLKFILMRNPMNVRNVKRPLAVIMILLYI

SEQ ID NO: 34366 - protein, 150 aa, Homo sapiens
  misc_feature (1)...(150): Xaa = X or * as defined in Table 2
QGSPSGSREXNSQSSAGPQCALPPAMAXVPLSWRSMGKWWKRTSCTSDSTXPPSERRHWRSRKSPSAMPASFRCSSASAREMLPXKKGRCAAGSGIAPGPPETWGRTGGCPGKQATCGVSGPNANGEPVLKYPSSSSEAHGGPGRNGRSD

SEQ ID NO: 34367 - protein, 173 aa, Homo sapiens
FPSSRMWLGQTQTLRTFRDTVPRQPSEVLRTYVPTPLNARNHALGSGWTGETRHAPSPRGGCRQQGKPLGQDSVRQKEGRKEGRKVGRKEGRKEIMEFYSAVSGTAYGDTQFRKRIAKASGWMKETRDWIQIMESWTHHMVTVQPQQRVKLARPPPESRASEGVQHWGCRDSL

SEQ ID NO: 34368 - protein, 29 aa, Homo sapiens
  misc_feature (1)...(29): Xaa = X or * as defined in Table 2
MDKDFDHHDSPALEVFTEQPPSPLPKSKX

SEQ ID NO: 34369 - protein, 1805 aa, Homo sapiens
GGLLQTETTLGLSSYQQKSISLYRGNCRPIRFEPPMLDFHEQPVGMPKMEKVYLHNPSSEETITLVSISATTSHFHASFFQNRKILPGGNTSFDVVFLARVVGNVENTLFINTSNHGVFTYQVFGVGVPNPYRLRPFLGARVPVNSSFSPIINIHNPHSEPLQVVEMYSSGGDLHLELPTGQQGGTRKLWEIPPYETKGVMRASFSSREADNHTAFIRIKTNASDSTEFIILPVEVEVTTAPGIYSSTEMLDFGTLRTQDLPKVLNLHLLNSGTKDVPITSVRPTPQNDAITVHFKPITLKASESKYTKVASISFDASKAKKPSQFSGKITVKAKEKSYSKLEIPYQAEVLDGYLGFDHAATLFHIRDSPADPVERPIYLTNTFSFAILIHDVLLPEEAKTMFKVHNFSKPVLILPNESGYIFTLLFMPSTSSMHIDNNILLITNASKFHLPVRVYTGFLDYFVLPPKIEERFIDFGVLSATEASNILFAIINSNPIELAIKSWHIIGDGLSIELVAVERGNRTTIISSLPEFEKSSLSDQSSVTLASGYFAVFRVKLTAKKLEGIHDGAIQITTDYEILTIPVKAVIAVGSLTCFPKHVVLPPSFPGKIVHQSLNIMNSFSQKVKIQQIRSLSEDVRFYYKRLRGNKEDLEPGKKSKIANIYFDPGLQCGDHCYVGLPFLSKSEPKVQPGVAMQEDMWDADWDLHQSLFKGWTGIKENSGHRLSAIFEVNTDLQKNIISKITAELSWPSILSSPRHLKFPLTNTNCSSEEEITLENPADVPVYVQFIPLALYSNPSVFVDKLVSRFNLSKVAKIDLRTLEFQVFRNSAHPLQSSTGFMEGLSRHLILNLILKPGEKKSVKVKFTPVHNRTVSSLIIVRNNLTVMDAVMVQGQGTTENLRVAGKLPGPGSSLRFKITEALLKDCTDSLKLREPNFTLKRTFKVENTGQLQIHIETIEISGYSCEGYGFKVVNCQEFTLSANASRDIIILFTPDFTASRVIRELKFITTSGSEFVFILNASLPYHMLATCAEALPRPNWELALYIIISGIMSALFLLVIGTAYLEAQGIWEPFRRRLSFEASNPPFDVGRPFDLRRIVGISSEGNLNTLSCDPGHSRGFCGAGGSSSRPSAGSHKQCGPSVHPHSSHSNRNSADVENVRAKNSSSTSSRTSAQAASSQSANKTSPLVLDSNTVTQGHTAGRKSKGAKQSQHGSQHHAHSPLEQHPQPPLPPPVPQPQEPQPERLSPAPLAHPSHPERASSARHSSEDSDITSLIEAMDKDFDHHDSPALEVFTEQPPSPLPKSKGKGKPLQRKVKPPKKQEEKEKKGKGKPQEDELKDSLADDDSSSTTTETSNPDTEPLLKEDTEKQKGKQAMPEKHESEMSQVKQKSKKLLNIKKEIPTDVKPSSLELPYTPPLESKQRRNLPSKIPLPTAMTSGSKSRNAQKTKGTSKLVDNRPPALAKFLPNSQELGNTSSSEGEKDSPPPEWDSVPVHKPGSSTDSLYKLSLQTLNADIFLKQRQTSPTPASPSPPAAPCPFVARGSYSSIVNSSSSSDPKIKQPNGSKHKLTKAASLPGKNGNPTFAAVTAGYDKSPGGNGFAKVSSNKTGFSSSLGISHAPVDSDGSDSSGLWSPVSNPSSPDFTPLNSFSAFGNSFNLTGEVFSKLGLSRSCNQASQRSWNEFNSGPSYLWESPATDPSPSWPASSGSPTHTATSVLGNTSGLWSTTPFSSSIWSSNLSSALPFTTPANTLASIGLMGTENSPAPHAPSTSSPADDLGQTYNPWRIWSPTIGRRSSDPWSNSHFPHEN

SEQ ID NO: 34370 - protein, 511 aa, Homo sapiens
  DOMAIN (381)..(396): SH2 DOMAIN SIGNATURE domain identified by eMATRIX, accession number PR00401A, p-value=8.800e-11, raw score of 14.00
  DOMAIN (387)..(448): Src homology domain 2 domain identified by PFam, accession name SH2, E-value=1e-18, PFam score of 57.6
  misc_feature (1)...(511): Xaa = X or * as defined in Table 2
KQPSGLLKFGNLILKCHPPSLTHMLSQPCAEAPTPDPNWELALYIHPSSGIMSATVSFWSIGTAYLEAQGIWEPFRRRLSFEASNPPFDVGRPFDLRRIVGISSEGNLNTLSCDPGHSRGFCGAGGSSSRPSAGSHKQXGPSGHPHSSHSNRNSADVDDVRAYNSGRTSSMTSAQAASSQPANKTRPLVLDSNTGAQGHSAGRKSKGAKQSQHGSQHHAHSPLEQHPQPPLPPPVPQPQEPQPERLSPAPLAHPSHPERASSARHSSEDSDITSLIEAMDKDFDHHDSPALEVFTEQPPSPLPKSKGSTEGGPASTFTQAVDGGIQFFTDCWTEGPSSSLLAVAREVQLALCIHELLIHGFSQLQVSGGPGAMPDPAAHLPFFYGSISRAEAEEHLKLAGMADGLFLVRQCLRSLGGYRQLNGTYAIAGGKAHCGPAELCEFYSRDPDGLPCNLRKPCIPPSGLEPQPGSSTACETPWARPRSRPSSARPRRWRSSLLRRTTSGCPGTTAA

SEQ ID NO: 34371 - protein, 591 aa, Homo sapiens; identical to SEQ ID NO: 33763

SEQ ID NO: 34372 - protein, 274 aa, Homo sapiens
  DOMAIN (205)..(274): Integrase core domain identified by PFam, accession name rve, E-value=1.7e-08, PFam score of 33.4
  misc_feature (1)...(274): Xaa = X or * as defined in Table 2
MALWTLRPTPLLVTCMLICAPGVMGAVVAPLTILGGPLLIRAAWYTAGIVGGLSTVAMCAPSEKFLNMGAPLGVGLGLVFVSSLVDQMGRWFVAGGAAVGLGALCYYGLGLSNEIGAIEKAVEYWFNSFVCHSNQQNACSHELHDERLLGDMGLPILHAMLLRRLPSVDSQNALSSIMLLHTALPXQSAERLFSXTSXXEALGXYGFAYPACNASAKTTIRGLTECLIQHHVTPHSIASDQGTHFTAKEVQQWAHAHGIHWPYHVPHHPEAAGL

SEQ ID NO: 34373 - protein, 62 aa, Homo sapiens
  misc_feature (1)...(62): Xaa = X or * as defined in Table 2
XPITKLKSWRAPGGEIESVTCEEGNDQTFQGLLDTGFELTLIPGDPKRHCGPPVKVGADGGQ

SEQ ID NO: 34374 - protein, 361 aa, Homo sapiens
  DOMAIN (273)..(284): dUTPase domain identified by eMATRIX, accession number PF00692B, p-value=5.304e-09, raw score of 8.14
  DOMAIN (34)..(190): Integrase core domain identified by PFam, accession name rve, E-value=4.5e-19, PFam score of 70.0
  misc_feature (1)...(361): Xaa = X or * as defined in Table 2
GEGYKADLAAATVECPICQQQRLTLSPQYSHIPQGDQPTTWXQVDCIGPLPSWEGQRFVLTGIDTYFRYGFAYPACNASVKTTIHGLTECLVHHHGVPHGIASVQGTHFMAXEVQQWAHAHGIHWSYHVPHHLEAAGLIEQWNGLLMSQLQHQLGDNTLQGWGKVLQKGVYALNQCSIYGTVSPIARIHGSRNQGVEVAPLKITPSDPLAKCLLPFPKALHSACLEVLVPEGGTLPPGDTTTIPLNWKLRLPPRHFGLLLPLSQKAKKGATVLAGVIDPDYQDEISLLLHIGGKEEYAWNTGDPLGRLLVFPCHVIKVNGKLQQPNPGKTANDPDPSGMKVXVTPPGKKNPRPAEVLAEGK

SEQ ID NO: 34375 - protein, 161 aa, Homo sapiens
  misc_feature (1)...(161): Xaa = X or * as defined in Table 2
MKTGKPIFYTPADSVFQIACHEETFGLDKLYELCEIARKELTNGGYNIGRVIARPLIGDKAGNFQRTGNRHDLAVEPPAPTVLQKLVDEKHGQVVSVGKIADIYASCGITKKVKATGLNALFDAPIKEMKEAGDTPMVFPNFVDFDSSWGHRRDVAGYAAX

SEQ ID NO: 34376 - protein, 750 aa, Homo sapiens
  DOMAIN (239)..(281): Flavivirus glycoprotein domain identified by eMATRIX, accession number PF00869O, p-value=8.114e-10, raw score of 11.59
  DOMAIN (548)..(635): ParB-like nuclease domain identified by PFam, accession name ParBc, E-value=6e-11, PFam score of 49.8
MVLTHSIGNCPHNPVTSHQAPSPTLRIPIDQETGGGANSSEVRKHRAVYSRKAKVPPPTYPFLKDKTQDRSGLATFTMDGQIPFILPGIFPVTIPANQSLPPAQVIVSNSVDHLKITGVEDHKPIFAGAGKPYQNLRQFIDEGNYTSGDNHTLRDPHYVEDKAHKYLVSKPTREQKTDTKAKNLYLTKRTTAAARTSSGDPLESTCRHAEEHIDSTTTTNLSYTDKHTAQNDSHPGTAKTQTTITDHHDHSHKQWLQLPSRAGLAADQSGRTVLRERVRIENCIQTHYSRSASNAQAPRPVRGNEPKPYAIQTYQGDGAEEDDETYSPNLDRVTTKKTHRGCQAKMAGVSPEFNHSDPLCLMPPEVSVSLGVPNQYLWTSQTTNPPRTGDGRAEGSKAHKDLDEEISLIPTVNVRKNLFFLEMPTLADTNIFPPRGGPISLRHTKGPCDNLKTCHTSHGSVMAETAVINHKKRKNSPRIVQSNDLTEAAYSLSRDQKRMLYLFVDQIRKSDGTLQEHDGVMARANAITCPVCGRDVKFTREVLRGDSVEKSSRVWSGNERDQELLTEDALDDLIPSFLLTGQQTPAFGRRVSGVIEIADGSRRRKAAALTESDYRVLVGELDDEQMAALSRLGNDYRPTSAYERGQRYASRLQNEFAGNISALADAENISRKIITRCINTAKLPKSVVALFSHPGELSARSGDALQKAFTDKEELLKQQASNAGILLRVDLAGMQEPPINFVEPTPLQLR

SEQ ID NO: 34377 - protein, 442 aa, Homo sapiens
  DOMAIN (396)..(442): kw TRANSCRIPTASE REVERSE II ORF2 domain identified by eMATRIX, accession number DM01354V, p-value=1.295e-27, raw score of 12.97
  DOMAIN (215)..(319): ParA family ATPase domain identified by PFam, accession name ParA, E-value=4.6e-22, PFam score of 86.7
MVDSLIARVGVMARGNAITLPVCGRDVKFTLEVLRGDSVEKTSRVWSGNERDQELLTEDALDDLIPSFLLTGQQTPAFGRRVSGVIEIADGSRRRKAAALTESDYRVLGGELDDEPMAALSRLGNDYRPTSAFERGQRFCSSCVDLALRGLRVLLVEGNDPQGTASMYHGWVPDLHIHAEDTLLPFYLGEKDDVTYAIKPTCWPGLDIIPSCLALHRIETELMGKFDEGKLPTDPHLMLRLAIETVAHDYDVIVIDSAPNLGIGTINVVCAADVLIVPTPAELFDYTSALQFFHMLRDLLKNLIFKVLEVLARAIRQEKEIKGIQLGKEEVKLSLFADDMICYLENRVVSAQNLLKLISNFSKVSGYKINVQKSQAFLYTNNRQTESQIMSELPFTIALKRRKYLGIQLTRDVKDLFKKNYKPLLKEIKQDTNKRRTFHAHE

SEQ ID NO: 34378 - protein, 538 aa, Homo sapiens
  DOMAIN (142)..(229): ParB-like nuclease domain identified by PFam, accession name ParBc, E-value=1.7e-10, PFam score of 48.3
MKLMETLNQCINAGHEMTKAIAIAQFNDDSPEATPITRRWRIDETADLDRVSSQAIRDAEKAGRLPGTRDMEIRGRLEQRVGYTIEEINHMRDDTSLSTPAAPMVDSLIARVGVMARGNAITLPVCGRDVKFTLEVLRGDSVEKTSRVWSGNERDQELLTEDALDDLIPSFLLTGQQTPAFGRRVSGVIEIADGSRRRKAAALTESDYRVLVGELDDEQMAALSRLGNDYRPTSAYERGQRYASRLQNEFAGNISALADAENISRKIITRCINTAKLPKSVVALFSHPGELSARSGDALQKAFTDKEELVKQQASNLQSRKKYSKMARPLYTVFKETQRATTHLVESHTSGRNSLQNNKAGPSTSASLKLSHRTKLLLFVIERAGVALALLTQTCGTTPEPVAYLNYYPLYQHRQNALNQLCFFFLTPGELSARSGDALQKAFTDKEELLKQQASNLHEQKKAGVIFEAEEVITLLTSVLKTSSASRTSLSSRHQFAPGATVLYKGDKMVLNLDRSRVPTECIEKIEAILKELEKPAP

SEQ ID NO: 34379 - protein, 1266 aa, Homo sapiens
  DOMAIN (491)..(983): ParB-like nuclease domain identified by PFam, accession name ParBc, E-value=6.4e-23, PFam score of 89.6
EPRWLLRGRLGPLLLQLAPRPPLAAPSRPRPSHARNPPTHRATTPGPRGPTRQHRKGQRPRARPQSASAAAHRENPPAGGRPQPQQDNNASRTRAPTNTGPPAKTPPAVPRRPSHTAVGSGGFSARKAPKTGQDKKDCQENPRICSRGSPAQGTRSQVKEFGDFADFGTTIKQDFRLLGQTSVDRLLQLSQGQAVKGNQLLPVSLVKRKTTLAPNTQTASLRALADSLMQLARQVSRLESGQDFADFGTTIKQDFRLLGQTSVDRLLQLSQGQAVKGNQLLPVSLVKRKTTLAPNTQTASPRALADSLMQLARQVSRLESGQFPMKYKPFKGFKESKVCTSRHFQAYSAGTLIPPSFPNCHIWDFADFGTTIKQDFRLLGQTSVDRLLQLSQGQAVKGNQLLPVSLVKRKTTLAPNTQTASPRALADSLMQLARQVSRLESGQKFRNGHQCARRGDWLIAREGEKARGKANTWLVRGGDVKFTLEVLRGESVKKTFRVRPGNERDQELLTEDALDDLIPSFLLTGHQTPAFGRRVSGVIEIADGSRRRKAAALTESDYRVLVGELDDEQMAALSRLGNDYRPTSAYERGQRYASRLQNEFAGNISALADAENISRKIITRCINTAKLPKSVVALFSHPGELSARSGICRISEPTIKQDFRLLGQTSVDRLLQLSQGQAVKGNQLLPVSLVKRKTTLAPNTQTASPRALADSLMQLARQVSRLESGQFPMKYKPFKGFKESKVCTSRHFQAYSAGTLIPPSFPNCHIWDFADFGTTIKQDFRLLGQTSVDRLLQLSQGQAVKGNQLLPVSLVKRKTTLAPNTQTASPRALADSLMQLARQVSRLESGQKFRNGHQCARRGDWLIAREGEKARGKANTWLVRGGDVKFTLEVLRGESVKKTFRVRPGNERDQELLTEDALDDLIPSFLLTGHQTPAFGRRVSGVIEIADGSRRRKAAALTESDYRVLVGELDDEQMAALSRLGNDYRPTSAYERGQRYASRLQNEFAGNISALADAENISRKIITRCINTAKLPKSVVALFSHPGELSARSGICRISEPTIKQDFRLLGQTSVDRLLQLSQGQAVKGNQLLPVSLVKRKTTLAPNTQTASPRALADSLMQLARQVSRLESGQDFADFGTTIKQDFRLLGQTSVDRLLQLSQGQAVKGNQLLPVSLSLLRDVPTTPPSSGHRHSHHGLQFRQPEIDMGPQLPPTRHPLRARLGKQRKNHMLFVTRIKLVKLGRKPPATATVTAGVILFVCITFPDLISA

SEQ ID NO: 34380 - protein, 652 aa, Homo sapiens
  DOMAIN (435)..(478): 1 kw MIND INHIBITOR DIVISION CONTROL domain identified by eMATRIX, accession number DM01756B, p-value=4.822e-15, raw score of 22.91
  DOMAIN (400)..(494): ParA family ATPase domain identified by PFam, accession name ParA, E-value=1.5e-18, PFam score of 75.1
  misc_feature (1)...(652): Xaa = X or * as defined in Table 2
MKLMETLNQCINAGHEMTKAIAIAQFNDDSPEARKITRRWRIGEAADLVGVSSQAIRDAEKAGRLPHPDMEIRGRVEQRVGYTIEQINHMRDVFGTRLRRAEDVFPPTPAFGRRVSGVIEIADGSRRRKAAALTESDYRVLVGELDDEQMAALSRLGNDYRPTSAYERGQRYASRLQNEFAGNISALADAENISRKIITRCINTAKLPKSVVALFSHPGELSARSGDALQKAFTDKEELLKQQASNLHEQKKAGAIRDAEKAGRLPHPDMEIRGRVEQRVGYTIEQINHMRDVFGTRLRRAEDVFPPVIGVAAHKGGVYKTSVSVHLAQDLALKGLRVLLVEGNDPQGTASMYHGWVPDLHIHAEDTLLPFYLGEKDDVTYAIKPTCWPGLDIIPSCLALHRIETELMGKFDEGKLPTDPHLMLRLAIETVAHDYDVIVIDSAPNLGIGTINVVCAADVLIVPTPAELFDYTSALQFFNMLRDLLKKGSFYSKSCRXVEKTSRVWSGNERDQELLTEDALDDLIPSFLLTGQQTPAFGRRVSGVIEIADGSRRRKAAALTESDYRVLVGELDDEQMAALSRLGNDYRPTSAYERGQRYASRLQNEFAGNISALADAENISRKIITRCINTAKLPKSVVALFSHPGELSARSX

SEQ ID NO: 34381 - protein, 235 aa, Homo sapiens
  DOMAIN (89)..(176): ParB-like nuclease domain identified by PFam, accession name ParBc, E-value=1.7e-10, PFam score of 48.3
MYHGWVPDLHIHAEDTLLPFYLGEKDDVTYAIKPTCWPGLDIIPSCLALHRIETELMGKFDEGSTLEDPLPVCGRDVKFTLEVLRGDSVEKTSRVWSGNERDQELLTEDALDDLIPSFLLTGQQTPAFGRRVSGVIEIADGSRRRKAAALTESDYRVLVGELDDEQMAALSRLGNDYRPTSAYERGQRYASRLQNEFAGNISALADAENISRKIITRCINTAKLPKSVVALFSHP

SEQ ID NO: 34382 - protein, 611 aa, Homo sapiens
  DOMAIN (39)..(126): ParB-like nuclease domain identified by PFam, accession name ParBc, E-value=1.7e-10, PFam score of 48.3
MVDSLIARVGVMARGNAITLPVCGRDVKFTLEVLRGDSVEKTSRVWSGNERDQELLTEDALDDLIPSFLLTGQQTPAFGRRVSGVIEIADGSRRRKAAALTESDYRVLVGELDDEQMAALSRLGNDYRPTSAYERGQRYASRLQNEFAGNISALADAENISHSDKFDANDPILKDQTQEWSGSATFTSDGKIRLFYTDYSGKHYGKQSLTTAQVNVSKSDDTLKINGVEDHKTIFDGDGKTYQNVQQFIDEGNYTSGDNHTLRDPHYVEDKGHKYLVFEANTGTENGYQGEESLFNKAYYGGGTNFFRKESQKLQQSAKKRDAELANGALVNTQSTTTRRPGSNSLSHLMWPVDHQKFQSVTEMCGSILSRDFADFGTTIKQDFRLLGQTSVDRLLQLSQGQAVKGNQLLPVSLVKRKTTLAPNTQTASPRALADSLMQLARQVSRLESGQDFADFGTTIKQDFRLLGQTSVDRLLQLSQGQAVKGNQLLPVSLVKRKTTLAPNTQTASPRALADSLMQLARQVSRLESGQDFADFGTTIKQDFRLLGQTSVDRLLQLSQGQAVKGNQLLPVSLVKRKTTLAPNTQTASPRALADSLMQLARQVSRLESGQ

SEQ ID NO: 34383 - protein, 848 aa, Homo sapiens
  DOMAIN (501)..(530): kw REPLICATION REPB REPA INITIATION domain identified by eMATRIX, accession number DM00653A, p-value=7.207e-27, raw score of 20.40
  DOMAIN (28)..(115): ParB-like nuclease domain identified by PFam, accession name ParBc, E-value=1.7e-10, PFam score of 48.3
GSPGNAITLPVCGRDVKFTLEVLRGDSVEKTSRVWSGNERDQELLTEDALDDLIPSFLLTGQQTPAFGRRVSGVIEIADGSRRRKAAALTESDYRVLVGELDDEQMAALSRLGNDYRPTSAYERGQRYASRLQNEFAGNISALADAENISRKIITRCINTAKLPKSGVALFSHPGELSARSGDALQKAFTDKEELLKQQASNLHEQKKAGAPFLDVLNTMMDTTLPLTLEELEEWGNPSSDEKHKNYIKRYCPYQNIKPQDLQPVKQENEKPLPENMDAFEKVRTKLETQPQERYEIINVGTQNLLKLISNFSKVSRYKINVQKSQAFLYTNNRQTESQIMSELPFTIASKRIKYLGIQLTRDLKDLFKENYKPLLNEIKEDTNKWKNIPCSWVGRINIVKMAILPKWLQVAKRAGLGRGQSGRTALRERVLIEIASTHIALATRHSDWGCCRNGRYPARGPAVPAYPSLCLQHAWVTVDSDTLAWDAALLTCRHGLSNQNRFTQFRLSETKEITNPYAMRLYESLCQYRKPDGSGIVSLKIDWIIERYQLPQSYQRMPDFRRRFLQDGKLVPMTVFHKTDSEDLQKKPLLVHVYGAYGMDLKMNFRPERPVLVDDGWILAYWHGSVSQYILPGLTLRSHTGTENGYQGEESLFNKAYYGGGTNFFRKESQKLQQSAKKRDAELANGALGIIELNNDYTLKKVMKPLITSNTVTDEIERANVFKMNGKWYLFTDSRGSKMTIDGINSNDIYMLGYVSNSLTGPYKPLNKTGLVLQMGLDPNDVTFTYSHFAVPQAKGNNVVITSYMTNRGFFEDKKATFAPSFLMNIKGNKTSVVKNSILEQGQLTVN

SEQ ID NO: 34384 - protein, 476 aa, Homo sapiens
  DOMAIN (28)..(115): ParB-like nuclease domain identified by PFam, accession name ParBc, E-value=1.7e-10, PFam score of 48.3
MARGNAITLPVCGRAVKFTLEVLRGDSVEKTSRVWSGNERDQELLTEDALDDLIPSFLLTGQQTPAFGRRVSGVIEIADGSRRRKAAALTESDYRVLVGELDDEQMAALSRLGNDYRPTSAYERGQRYASRLQNEFAGNISALADAENISHKAHKYFVFEANTGTETGYQGEESLFNKAYYGGGTNFFRKESQKLQQSAKKRDAELANGALGIIELNNDYTLKKVMKPLITSNTVTDEIERANVFKMNGKWDFADFGTTIKQDFRLLGQTSVDRLLQLSQGQAVKGNQLLPVSLVKRKTTLAPNTQTASPRALADSLMQLARQVSRLESGQQSSKQKKAIQTAIRKNKEANAVLARLNSELQQQLKGFADFREPPIKQDFRLLGQTSVDRLLQLSQGQAITELCGAKRVGYFGPTQFYIALKLIAAAQSGLPVRIESIKCGNSYDHDYEFELGTLVLPRSLEGFALSLNCGEHYWL

SEQ ID NO: 34385 - protein, 345 aa, Homo sapiens
  DOMAIN (59)..(155): ParB-like nuclease domain identified by PFam, accession name ParBc, E-value=0.002, PFam score of 19.3
NKRNHQSVCHAFIRIPAAPMVDSLIARVGVMARGNAITLPVCGRDVKFTLEVLRGDSVEKTSRVWSGNERDQELLTEDALDDLIPSFLLTGQQTPAFGRRVSGVIEIADGSRRRKAAALTESEGTPAFGRRVSGVIEFADGSRRRKAAALTESDYRVLVGELDDEQMAALSRLGNDYRPTSAYERGQRYASRLQNEFAGNISALADAENISRKIITRCINTAKLPKSVVALFSHPGELSARSGDALQKAFTDKEELLKQQASNLHEQKKAGVIFEAEEVITLLTSVLKTSSASRTSLSSRHQFAPGATVLYKGDKMVLNLDRSRVPTECIEKIEAILKELEKPAP

SEQ ID NO: 34386 - protein, 576 aa, Homo sapiens
GFEPDVRILLTKYSNSNGSQSPWMEEQIRDAWGSMVLKNVVRETDEVGKDTSLSTPAAPMVDSLIARVGVMARGNAITLPVCGRDVKFTLEVLRGDSVEKTSRVWSGNERDQELLTEDALDDLIPSFLLTGQQTPAFGRRVSGVIEIAGGSSRVDKRVATKLYNMLLIGPVSGTAVQPPPHPSPGCMAIPPPQNPWSYGRCTPSHRCPLSVAILNVAPPTSSHYGRKLLYMSEEVSMGRGKEEKGPHKEKRWAQEESNSRSASHRSPLIPKNFDLGEGSRGGAIALERRFFALDGWSPRSLIVDSGSKLGTTLQPYLGLSFDLKGILPISDPPIKQDFRLLGQTSVDRLLQLSQGQAVKGNQLLPVSLVKRKTTPGAQYANRLSPRVGRFINAAGTTGFPTGKRAVRDALKLQDQLKSPVKTLSEGKRERYGQGLVLLCKCHRWEPDGLFLPLQLCFVLSILGNPSVVLLDEPSTGMDPEGQQQMWTGQQTQALGRRVSGVIEQSDGSGSRIADALADRDNGVLVGELDDEQTGALSRLGHDYRAPREQFVRSADASRKASPDKKEKVSHQASYRS

SEQ ID NO: 34387 - protein, 653 aa, Homo sapiens
  DOMAIN (313)..(327): Phage integrase family domain identified by eMATRIX, accession number PF00589B, p-value=1.621e-11, raw score of 16.17
  DOMAIN (163)..(359): "Phage" integrase family domain identified by PFam, accession name Phage_integrase, E-value=9.3e-13, PFam score of 55.8
MVDSLIARVGVMARGNAITLPVCGRDVKFTLEVLRGDSVEKTSRVWSGNERDQELLTEDALDDLIPSFLLTGQQTPAFGRRVSGVIEIADGSRRRKAAALTESDYRVLVGELDDEQMAALSRLGNDYRPTSAYERGQRYASRLQNEFAGNISALADAENISRKIITRCINTAKLPKSVVALFSHPGELSARSDKEELLKQQASNLHEQKKAGVIFEAEEVITLLTSVKLGLNPVGDSRRPPVEGHQDLFILRSDLPSQVFIRDKLMERRNRRTGRTEKARIWEVTDRTVRTWIGEAVAAAAADGVTFSVPVTPHTFRHSYAMHMLYAGIPLKVLQSLMGHKSISSTEVYTKVFALDVAARHRNVDSNVKGRKTVYQGDGPLREPSPKSSFLGSRCRKALNRNPKGSPRLELDGESRERARKEGRSERAALGPTGLEALFGTLKTPDGRSPRCDNLKTCHTSHGSVMAETAVINHKKRKNSPRIVQSNDLTEAAYSLSRDQKRMLYLFVDQIRKSDGTLQEHDGICEIHVAKYAEIFGLTSAEASKDIRQALKSFAGKEVFIRDKLMERRNRRTGRTEKARIWEVTDRTTKAIIYLVFEANTGTENGYQGEESLFNKAYYGGGTNFFRKESHKLQQSAKKLDAELSNGALGFIE

SEQ ID NO: 34388 - protein, 773 aa, Homo sapiens
  DOMAIN (172)..(217): kw TRANSCRIPTASE REVERSE II ORF2 domain identified by eMATRIX, accession number DM01354N, p-value=8.740e-40, raw score of 13.17
  DOMAIN (67)..(154): ParB-like nuclease domain identified by PFam, accession name ParBc, E-value=1.7e-10, PFam score of 48.3
MKRAPVIPKHTLNTQPVEDTSLSTPAAPMVDSLIARVGVMARGNAITLPVCGRDVKFTLEVLRGDSVEKTSRVWSGNERDQELLTEDALDDLIPSFLLTGQQTPAFGRRVSGVIEIADGSRRRKAAALTESDYRVLVGELDDEQMAALSRLGNDYRPTSAYERGIQTTIREYYKHLYANKLENLEEKDKFLDTYTIPILNQEEVESLNRPIIGSEIEAIITNQKKSRTGRIHSRIQTEKPGLTVQEMENSPKGILEIIWGYPSHHKCIIQGRGGQNGGTTAQYNLTLLALLPKFCCHTPWLPKCDSAKPDSATQLVLLSQGSVRAEPPVINHKKRKNSPRIVQSNALTEAANSLSRDQKRMLYLFVDQIRKSDGTLQEHDGICEIHVAKYAEIFGLTSAEASKDIRQALKSFAGKEVVFYRPEEDAGDEKGYESFPWFIKRAHSPSRGLYSVHINPYLIPFFIGLQNRFTQFRLSETKEITNPYAMRLYESLCQYRKPDGSGIVSLKIDWIIERYQLPQSYQRMPDFRRRFLQSHGSVMAETAVINHKKRKNSPRIVQSNDLTEAAYSLSRDQKRMLYLFVDQIRKSDGTLQEHDGICEIHVAKYAEIFGLTSAEASKDIRQALKSFAGKEVVFYRPEEDAGDEKGYESFPWFIKRAHSPSRGLYSVHINPYLIPFFIGLQNRFTQFRLSETKEITNPYAMRLYESLCQYRKPDGSGIVSLKIDWIIERYQLPQSYQRMPDFRRRFLQVCVNEINSRTPMRLSYMRKRKAGIL

SEQ ID NO: 34389 - protein, 529 aa, Homo sapiens
  DOMAIN (243)..(330): ParB-like nuclease domain identified by PFam, accession name ParBc, E-value=1.7e-10, PFam score of 48.3
MDDIPQEARQYRHNQAYAYSIQGDGAEDDDERIVRFHTRVTVDSDTLASDAARLTCRHGLGNQVFCPHNRAQNVVDKQDTAAIHSRHTTAHRGYSVLQVTTGFFRVDSRLHGGSDDGYGFPKNDYELHRARREEGVPNPPRRPMGYFVLLLKHIYQGPDNGTSSGKCGKELHRAQIMKRAPVIPKHTLNTQPVEDTSLSTPAAPMVDSLIARVGVMARGNAITLPVCGRDVKFTLEVLRGDSVEKTSRVWSGNERDQELLTEDALDDLIPSFLLTGQQTPAFGRRVSGVIEIADGSRRRKAAALTESDYRVLVGELDDEQMAALSRLGNDYRPTSAYNTRLQNEFAGNISALADAENISRKIITRCINTAKLPKSVVALFSHPGELSARSGDALQKAFTDKEELLKQQASNLHEQKGDPLESTSSYATKFPIRSPFAILKEIKHGSPRPKGKTSNARPLPESNIGTASRYKLPNHRSENLMAPLQEHDGICEIHVAKYAEIFGLTSAEASKDIRQALKSFAGKEVVFYR

SEQ ID NO: 34390 - protein, 264 aa, Homo sapiens
  DOMAIN (74)..(161): ParB-like nuclease domain identified by PFam, accession name ParBc, E-value=1.7e-10, PFam score of 48.3
  misc_feature (1)...(264): Xaa = X or * as defined in Table 2
GYSGSKPDVITLLEQGKEPCVVARDVTRRQCPAAPMVDSLIARVGVMARGNAITLPVCGRDVKFTLEVLRGDSVEKTSRVWSGNERDQELLTEDALDDLIPSFLLTGQQTPAFGRRVSGVIEIADGSRRRKAAALTESDYRVLVGELDDEQMAALSRLGNDYRPTSAYERGQRYASRLQNEFAGNISALADANNISRKNITRCINTAKLPKSVVALFSHPGELSARAASQRQQCGYHKLHDKQRLLRGXKGNICAKLLNEHQRQ

SEQ ID NO: 34391 - protein, 879 aa, Homo sapiens
  DOMAIN (158)..(606): ParB-like nuclease domain identified by PFam, accession name ParBc, E-value=4.9e-25, PFam score of 96.6
MTLPKEHNSSNIHQRKGVFLESHEEACKPEVASIITRLSRDLYNGFPGIKGKKENPAQEVDISAVLTAAQIKEEKQRDFADFGTTIKQDFRLLGQTSVDRLLQLSQGQAVKGNQLLPVSLVKRKTTLAPNTQTASPRALADSLMQLARQVSRLESGHVEKTSRVWSGNERDQELLTEDALDDLIPSFLLTGQQTPAFGRRVSGVIEIADGSRRRKAAALTESDYRVLVGELDDEQMAALSRLGNDYRPTSAYERGQRYASRLQNEFAGNISALADAENISRKIITRCINTAKLPKSVVALFSHPGELSARSGDALQKAFTDKEELLKQQASNLHEQKKAGVIFEAEEVITLLTSVLKTDFADFGTTIKQDFRLLGQTSVDRLLQLSQGQAVKGNQLLPVSLVKRKTTLAPNTQTASPRALADSLMQLARQVSRLESGQDFADFGTTIKQDFRLLGQTSVDRLLQLSQGQAVKGNQLLPVSLVKRKTTLAPNTQTASPRALADSLMQLARQVSRLESGHVEKTSRVWSGNERDQELLTEDALDDLIPSFLLTGQQTPAFGRRVSGVIEIADGSRRRKAAALTESDYRVLVGELDDEQMAALSRLGNDYRPTSAYERGQRYASRLQNEFAGNISALADAENISRKIITRCINTAKLPKSVVALFSHPGELSARSGDALQKAFTDKEELLKQQASNLHEQKKAGVIFEAEEVITLLTSVLKTDFADFGTTIKQDFRLLGQTSVDRLLQLSQGQAVKGNQLLPVSLVKRKTTLAPNTQTASPRALADSLMQLARQVSRLESGQDFADFGTTIKQDFRLLGQTSVDRLLQLSQGQAVKGNQLLPVSLVKRKTTLAPNTQTASPRALADSLMQLARQVSRLESGQ

SEQ ID NO: 34392 - protein, 532 aa, Homo sapiens
  DOMAIN (190)..(232): Chloramphenicol acetyltransferase proteins domain identified by eMATRIX, accession number BL00100C, p-value=1.000e-39, raw score of 23.60
  DOMAIN (145)..(320): Chloramphenicol acetyltransferase domain identified by PFam, accession name CAT, E-value=1.7e-125, PFam score of 430.3
MLQILKQQQNEKYQVPQFDQSTIKNIESAKGLDVWDSWPLQNADGTVAEYNGYHVVFALAGSPKDADDTSIYMFYQKVGDNSIDSWKNAGRVFKDSDKFDANDPILKDQTQEWSGSATFTSDGKIRLFYTDYSGKHYGKQSLTTAQTVQLDITAFLKTVKKNKHKFYPAFIHILARLMNAHPEFRMAMKDGELVIWDSVHPCYTVFHEQTETFSSLWSEYHDDFRQFLHIYSQDVACYGENLAYFPKGFIENMFFVSANPWVSFTSSHLNVANMDNFFAPVFTMGKYYTQGDKVLMPLAIQVHHAVCDGFHVGRMFNEFPQPCDEWQGGAHTLNTQPVEDNSLSTPAAPMVDSLIARVGVMARGNAITLPVCGRDVKFTLEVLLGDSVEKTSRVWSGNERDQELLTEDALDDLIPSFLLTGQQTPAFGRRVSGVIEIADGSRRRKADALTESDYRLLVGELHDEQMAALSRLGNDYRSTSAYERVLQSLMGHKSISSTEVYTKVFALDVAARHRVQFAMPESDAVAMLKQLS

SEQ ID NO: 34393 - protein, 226 aa, Homo sapiens
  DOMAIN (67)..(154): ParB-like nuclease domain identified by PFam, accession name ParBc, E-value=4.2e-08, PFam score of 40.4
MKRAPVIPKHTLNTQPVEDTSLSTPAAPMVDSLIARVGVMARGNAITLPVCGRDVKFTLEVLRGDSVEKTSRVWSGNERDQELLTEDALDDLIPSFLLTGQQTPAFGRRVSGVIEIADGSRRRKAAALTESDYRVLVGELDDEQMAALSRLGGATQAFAKENNQKHTKKRTASLILHAMICCRSLNSSKTKNTKCLNSINQRLKILSLQKDLMCGTAGRCKTLTEQ

SEQ ID NO: 34394 - protein, 816 aa, Homo sapiens
  DOMAIN (707)..(736): kw REPLICATION REPB REPA INITIATION domain identified by eMATRIX, accession number DM00653A, p-value=4.732e-21, raw score of 20.40
  DOMAIN (440)..(554): ParA family ATPase domain identified by PFam, accession name ParA, E-value=1.9e-25, PFam score of 98.0
MRGGKSWLISGFLLLCNVQQFIDEGNYTSGDNHTLRDPHYVEDKGHKYLVFEANTGTENGYQGEESLFNKAYYGGGTNFFRKESQKLQQSAKKRDAELANGALGIIELNNDYTLKKVMKPLITSNTEDQDSDIPILMLPVPQSPCVTWNLWCQLSHTVPVTPFLPPVDSGAHISFKPLPVCGRDVKFTLEVLRGDSVEKTSRVWSGNERDQELLTEDALDDLIPSFLLTGQQTPAFGRRVSGVIEIADGSRRRKAAALTESDYRVLVGELDDEQMAALSRLGNDYRPTSAYERGQRYASRLQNEFAGNISALADAENISRKIITRCINTAKLPKSVVALFSHPGELSARSGDALQKAFTDKEELLKQQASNLHEQKKAGLVEGNDPQGTASMYHGWVPDLHIHAEDTLLPFYLGEKDDVTYAIKPTCWPGLDIIPSCLALHRIETELMGKFDEGKLPTDPHLMLRLAIETVAHDYDVIVIDSAPNLGIGTINVVCAADVLIVPTPAELFDYTSALQFFGMLRYLLKNVDLEGFEPDVRILLAKYSSSNGSQSPWLEEQIRDAWGSMVLKNVVPENGEGPDTRQSGAAPRPQNPLKLLKLANPNCFFFSMFPFTNHNIATYWQVPLSCLLAKPVLPLSDPPASKDIRQALKSFAGKEVVLYRPEEDAGDEKGYESFPWFIKRAHSPSRGLYSVHINPYLIPFFIGLQNRFTQFRLSRAEEITNPYAMRLYQSLGQYRKPDGVGIVSLKIDLVIERFPLPPRFLASLRWVQTPSFSLEKFVITDLLKPTSVNSSKSFSIQLCSIAGEELRSFGGEEAL

SEQ ID NO: 34395 - protein, 847 aa, Homo sapiens
  DOMAIN (783)..(821): Chloramphenicol acetyltransferase proteins domain identified by eMATRIX, accession number BL00100D, p-value=7.677e-36, raw score of 17.22
  DOMAIN (737)..(834): Chloramphenicol acetyltransferase domain identified by PFam, accession name CAT, E-value=1.9e-58, PFam score of 207.6
MVDSLIARVGVMARGNAITLPVCGRDVKFTLEVLRGDSVEKTSRVWSGNERDQELLTEDALDDLIPSFLLTGQQTPAFGRRVSGVIEIADGSRRRKAAALTESDYRVLVGELDDEQMAALSRLGNDYRPTSAYERGQRYASRLQNEFAGNISALADAENISPAPMVDSLIARVGVMARGNAITLPVCGRDVKFTLEVLRGDSVEKTSRVWSGNERDQELLTEDALDDLIPSFLLTGQQTPAFGRRVSGVIEIADGSRRRKAAALTGGDYRVLVGELDDEQMAALSRLGNDYRPTSAYERGQRYASRLQNEFAGNISALADAENISRKIITRCINTAKLPKSVVALFSHPGELSARSGDALQKAFTDKEELLKQQASNLHEQKKAGVIFEAEEVITLLTSVLKTSSASRTSLSSRHQFAPGATVLYKGDKMVLNLDRDFADFGPTIKQDFRLLGQTSVDRLLQLSQGQAVKGKQLLPVSLALQNFQRYTGIQHVHRIGMAERMWCDRNRERHTVSSSGGNRLPNPGVMARGNAITLPVCGRDVKFTLEVLRGDSVEKTSRVWSGNERDQELLTEDALDDLIPSFLLTGQQTPAFGRRVSGVIEIADGSRRRKAAALTESDYRVLVGELDDEQMAALSRLGNDYRPTSAYERGQRYASRLQNEFAGNISALADAENISRKIITRCINTAKLPKSVVALFSHPGELSARSGDALQKAFTDKEELLKQQASNLHEQKKAGTVQLDITAFLKTVKKNKHKFYPAFIHILARLMNAHPEFRMAMKDGFIENMFFVSANPWVSFTSFDLNVANMDNFFAPVFTMGKYYTQGDKVLMPLAIQFARYARLHGCGER

SEQ ID NO: 34396 - protein, 276 aa, Homo sapiens
  DOMAIN (28)..(115): ParB-like nuclease domain identified by PFam, accession name ParBc, E-value=2.2e-10, PFam score of 47.9
MAPGNAITCPVCGRDVKLLLKVLRGDSVEKTSRVWSGNERDQELLTEDALDDLILSFLLTGQQTPAFGRRVSGVIEIADGSRRRKAAALTESDYRVLVGELDDEQMAALSRLGNDYRPTSAYERGQRYASRLQNEFAGNISALADAENISRKIITRCINTAKLPKSVVALFSHPGELSARSGDALQKAFTDKEELLKQQASNLHEQKKAGVIFEAEEVITLLTSVLKTSSASRTSLSSRHQFAPGATVLYKGDKMTPAFGRRVSGVIEIADGSRRR

SEQ ID NO: 34397 - protein, 633 aa, Homo sapiens
  DOMAIN (230)..(273): 1 kw MIND INHIBITOR DIVISION CONTROL domain identified by eMATRIX, accession number DM01756B, p-value=4.822e-15, raw score of 22.91
  DOMAIN (195)..(309): ParA family ATPase domain identified by PFam, accession name ParA, E-value=2.7e-28, PFam score of 107.5
MKLMETLNQCINAGHEMTKAIAIAQFNDDSPEARKITRRWRIGEAADLVGVSSQAIRDAEKAGRLPHPDMEIRGRVEQRVGYTIEQINHMRDVFGTRLRRAEDVFPPVIGVAAHKGGVYKTSVSVHLAQDLALKGLRVLLVEGNSLNVSRMGTRSSYSCRRHSPALLLGEKTDVTYAIKPTCWPGLDIIPSCLALHRIETELMGKFDEGKLPTDPHLMLRLAIETVAHDYDVIVIDSAPNLGIGTINVVCAADVLIVPTPAELFDYTSALQFFDMLRDLLKNVDLKGFEPDVRILLTKYSNSNGSQSPWMEEQIRDAWGSMVLKNVVRETNEVGKAAPMVDSLIARVGVMARGNAITLPVCGRDVKFTLEVLRGDSVEKTSRVWSGNERDQELLTEDALDDLIPSFLLTGQQTPAFGRRVSGVIEIADGSRRRKAAALTESDYRVLVGELDDEQMAALSRLGNDYRPTSAYERGQRYASRLQNEFAGNISALADAENISRKIITRCINTAKLPKSVVALFSHPGELSARSGDALQKAFTDKEELLKQQASNLHEQKKAGVIFEAEEVITLLTSVLKTSSASRTSLSSRHQFAPGATVLYKGDKMVLNLDRSRVPTECIEKIEAILKELEKPAP

SEQ ID NO: 34398 - protein, 561 aa, Homo sapiens
  DOMAIN (39)..(373): ParB-like nuclease domain identified by PFam, accession name ParBc, E-value=4.9e-25, PFam score of 96.6
MVDSLIARVEVMARGNAITLPVCGRDVKFTLEVLRGDSVEKTSRVWSGNERDQELLTEDALDDLIPSFLLTGQQTPAFGRRVSGVIEIADGSRRRKAAALTESDYRVLVGELDDEQMAALSRLGNDYRPTSAYERGQRYASRLQNEFAGNISALADAENISRKIITQCINTAKLPKSVVALFSHPGELSARSGDALQKAFTDKEELLKQQASNVHEQKKTGVIFEAEEGSFSTIPRDILSLSTPAAPMVDSLIARVGVMARGNAITLPVCGRNVKFTLEVLRGDSVEKTSRVWSGNERDQELLTEDALDDLIPSFLLTGQQTPAFGRRVSGVIEIADGSRRRKAAALTESDYRVLVGELDDEQMAALSRLGNDYRPTSAYERGQRYASRLQNEFAGNISALADAENISRKIITRCINTAKLPKSVVALFSHPGELSARSGDALQKAFTDKEELLKQQASNLHEQKKAGQNTYIRLEPFKINVLEQITKHIEKLQCGGVVKQLSRRGNNQHISSTYDINRADTQVRRAVNNYDIIVMSNSFNGQSEHQVWIGGQFTFIKFAH

SEQ ID NO: 34399 - protein, 479 aa, Homo sapiens
  DOMAIN (39)..(126): ParB-like nuclease domain identified by PFam, accession name ParBc, E-value=1.7e-10, PFam score of 48.3
MVDSLIARVGVMARGNAITLPVCGRDVKFTLEVLRGDSVEKTSRVWSGNERDQELLTEDALDDLIPSFLLTGQQTPAFGRRVSGVIEIADGSRRRKAAALTESDYRVLVGELDDEQMAALSRLGNDYRPTSAYERGQRYASRLQNEFAGNISALADAENISRKIITRCINTAKLPKSVVALFSHPGELSARSGDALQKAFTDKEELLKQQASNLHEQKKAGVIFEAEEVITLLTSVLKTDFADFGTTIKQDFRLLGQTSVDRLLQLSQGQAVKGNQLLPVSLVKRKTTLAPNTQTASPRALADSLMQLARQVSRLESGQDFADFGTTIKQDFRLLGQTSVDRLLQLSQGQAVKGNQLLPVSLVKRKTTLAPNTQTASPRALADSLMQLARQVSRLESGQDFADFGTTIKQDFRLLGQTSVDRLLQLSQGQAVKGNQLLPVSLVKRKTTLAPNTQTASPRALADSLMQLARQVSRLESGQ

SEQ ID NO: 34400 - protein, 1139 aa, Homo sapiens
  DOMAIN (657)..(682): Glycosyl hydrolases family 2 proteins domain identified by eMATRIX, accession number BL00719B, p-value=5.333e-22, raw score of 17.24
  DOMAIN (39)..(419): ParB-like nuclease domain identified by PFam, accession name ParBc, E-value=4.9e-25, PFam score of 96.6
MVDSLIARVGVMARGNAITLPVCGRDVKFTLEVLRGDSVEKTSRVWSGNERDQELLTEDALDDLIPSFLLTGQQTPAFGRRVSGVIEIADGSRRRKAAALTESDYRVLVGELDDEQMAALSRLGNDYRPTSAYERGQRYASRLQNEFAGNISALADAENISRLPSAYHSSLPGSLIYITRFKFMDLALEFSRYSHIYQLIQSLKCSYKRGNTEIKISFYSSGRWQSKINVRTGLVSPEASPLGPQMAVFWLSPHGVSALTKDRIRFWVEDKPPFMRMTLLSLDFGGRREEAAPMVDSLIARVGVMARGNAITLPVCGRDVKFTLEVLRGDSVEKTSRVWSGNERDQELLTEDALDDLIPSFLLTGQQTPAFGRRVSGVIEIADGSRRRKAAALTESDYRVLVGELDDEQMAALSRLGNDYRPTSAYERGQRYASRLQNEFAGNISALADAENISRKIITRCINTAKLPKSVVALFSHPGELSARDFADFGTTIKQDFRLLGQTSVDRLLQLSQGQAVKGNQLLPVSLVKRKTTLAPNTQTASPRALADSLMQLARQVSRLESGQDFADFGTTIKQDFRLLGQTSVDRLLQLSQGQAVKGNQLLPVSLVKRKTTLAPNTQTASPRALADSLMQLARQVSRLESGQYPKGYFVQNTDFDFFNYAGLQRSVLLYTTPTTYIDDITITTGVEHDSAESLCLEYQGPPLMFTEEYQKSLPEQYHLGLDQKRRKYVVGELIGNSADFTTMQYADDTSIYMFYQKVGDNSIDSWKNAGRVFKDSDKFDANDPILKDQTQEWSGSATFTSDGKIRLFYTDYSGKHYGKQSLTTAQVNVSKSDDTLKINGVEDHKTIFDGDGKTYQNVQQFIDEGNYTSGDNHTLRDPHYVEDKGHKYLVFEANTGTENGYQGEESLFNKAYYGGGTNFFRKESQKLQQSAKKRDAELANGALGIIELNNDYTLKKVMKPLITSNTVTDEIERANVFKMNGKWYLFTDSRAPQTAAERWRGKCDPRHGGGCALALQGWTLYPRESPSRESKELGGLWSFRADLDSRRQGFEEQWYPRPLRELRGRGGRRPEARRWEGGSPGPCRLLPLSAPELAPYRKLKVNGLRGAGLGDGETGGTGEGRGGRRRKRCCRTLSRDEG

SEQ ID NO: 34401 - protein, 1566 aa, Homo sapiens
  DOMAIN (601)..(628): Mrp family proteins domain identified by eMATRIX, accession number BL01215A, p-value=4.964e-11, raw score of 9.75
  DOMAIN (777)..(1446): ParB-like nuclease domain identified by PFam, accession name ParBc, E-value=1.7e-39, PFam score of 144.6
MGLALDLDSGLLGTLMPLCLRCHRTQTKHAAACQGQHPRVQAEDVTFLYHPCAHPWLKLQLALLAYACMANPSLTPDFSLTQDRALALSFALRSWRSPWHREVEGQPVSELILALNQPFRQLMVPRLPVRRGYGSDLQQQPSPTPPPTHTAPFSRPSPGIVNGCAAINIRGARSKELQIKKQFQDTCKIQTRQYKALRNHLLETTPKSEHKAVLKRLKEEQTRKLAILAEQYDHSINEMLSTQAASLELLGVPGAARVQLVGGEVRSRNAYSLHTLLLLATTLERADRQPGDMSAPALPGFFASQHNSLEDPPPHQGNPQPWEWLPQKQQPQASESQSEKRTHSGALDRDARPTYKERLVNRGHTDKSEAGLPGECTRLPQPVPPGSQGFQFPTLKFAPTISSKRCKQRHNKLWRSHSDSDLSDHHEPICKPGLELNKKDITTSADQIAEVKTMESHPPIPPVFVEHMVPQDANQKGLCTKERMICLEFTSREFHAGQIEDELNLNDINGCSSGSTLEDPQFNDDSPEARKITRRWRIGEAADLVGVSSQAIRDAEKAGRLPHPDMEIRGRVEQRVGYTIEQINHMRDVFGTRLRRAEDVFPPVIGVAAHKGGVYKTSVSVHLAQDLALKGLRVLLVEGNDPQGTASMYHGWVPDLHIHAEDTLLPFYLGEKDDVTYAIKPTCWPGLDIIPSCLALHRIETELMGKFDEGKLPTDPHLMLRLAIETVAHDYDVIVIDSAPNLEDPRVGVMARGNAITLPVCGRDVKFTLEVLRGDSVEKTSRVWSGNERDQELLTEDALDDLIPSFLLTGQQTPAFGRRVSGVIEIADGSRRRKAAALTESDYRVLVGELDDEQMAALSRLGNDYRPTSAYERGQRYASRLQNEFAGNISALADAENISRKIITRCINTAKLPKSVVALFSHPGELSARSGDALQKAFTDKEELLKQQASNLHEQKKAGVIFEAEEVITLLTSVLKTSSASRTSLSSRHQFAPGATVLYKGDKMVLNLDRSTLEGSPIEDTSLSTPAAPMVDSLIARVGVMARGNAITLPVCGRDVKFTLEVLRGDSVEKTSRVWSGNERDQELLTEDALDDLIPSFLLTGQQTPAFGRRVSGVIEIADGSRRRKAAALTESDYRVLVGELDDEQMAALSRLGNDYRPTSAYERGQRYASRLQNEFAGNISALADAENISRKIITRCINTAKLPKSVVALFSHPGELSARSGDALQKAFTDKEELLKQQASNLHEQKKAGVIFEAEEVITLLTSVLKTSSASRTSLSSRHQFAPGATVLYKGDKMVLNLDRSTLEGSPIEDTSLSTPAAPMVDSLIARVGVMARGNAITLPVCGRDVKFTLEVLRGDSVEKTSRVWSGNERDQELLTEDALDDLIPSFLLTGQQTPAFGRRVSGVIEIADGSRRRKAAALTESDYRVLVGELDDEQMAALSRLGNDYRPTSAYERGQRYASRLQNEFAGNISALADAENISRKIITRCINTAKLPKSVVALFSHPGELSARSGDALQKAFTDKEELLKQQASNLHEQKKAGVIFEAEEVITLLTSVLKTSSASRTS

SEQ ID NO: 34402 - protein, 588 aa, Homo sapiens
  DOMAIN (353)..(440): ParB-like nuclease domain identified by PFam, accession name ParBc, E-value=1.7e-10, PFam score of 48.3
FIRDFADFGTTIKQDFRLLGQTSVDRLLQLSQGQAVKGNQLLPVSLVKRKTTLAPNTQTASPRALADSLMQLARQVSRLESGHSNGNGQVSPIFHQTSSSTIRSCSCHLLTLNFLTLQLNTSDIAVFHSTPKLLLVTSTITHMGLNTSQAQSVPVINSVAGSLAALQPVQFSQQLHSPHQQPLMQQSPGSHMAQQPFMAAVTQLQNSHKFSHRSHGPGQSNDACSEPTNKKMRRNRFKWGPASQQILYQAYDRQKNPSKEEREALVEECNRVWQARRLGAFGKEDVHVSFAARRGAKFRHQTLLGRRSSIPAAPMVDSLIARVGVMARGNAITLPVCGRDVKFTLEVLRGDSVEKTSRVWSGNERDQELLTEDALDDLIPSFLLTGQQTPAFGRRVSGVIEIADGSRRRKAAALTESDYRVLVGELDDEQMAALSRLGNDYRPTSAYERGQRYASRLQNEFAGNISALADAENISRKIITRCINTAKLPKSVVALFSHPGELSARSGDALQKAFTDKEELLKQQACKLHEQKKAGVGDNSIDSWKNAGRVFKDSDKFDANDPILKDQTQEWSGSATFTSDGKIRFILH

SEQ ID NO: 34403 - protein, 630 aa, Homo sapiens
  DOMAIN (563)..(577): Phage integrase family domain identified by eMATRIX, accession number PF00589B, p-value=1.621e-11, raw score of 16.17
  DOMAIN (434)..(611): "Phage" integrase family domain identified by PFam, accession name Phage_integrase, E-value=2.7e-13, PFam score of 57.6
REEGANSECLGRHGFKKMLYVKRDEVGKGQIRLETVFEQAIDQRFSTDTSLSTPAAPMVDSLIARVGVMARGNAITLPVCGRDVKFTLEVLRGDSVEKTSRVWSGNERDQELLTEDALDDLIPSFLLTGHKTPAFGQRVSGVIEIADGSRRRKAAALTESDYRVLVGELDDEQMAALSRLGNDYRPTSAYERGQRYASRLQNEFAGNISALADAENISRKIITRCINTAKLPKSVVALFSHPGELSARSGKCMVPTESAPHVTVLGCQCGPLGLENGLKEGYLGRSTLDMEAWQPLQEFYLHNLITGQMFEIAVTQNNSKINSSSPTTEQSWMENDFDELTEVGFRRSVITNFSELKEHVLTHRKEAKNLEKSDGENGTKLENTFQDIIQENFPNLARQVNIQIQEIQKTPQRYSSRRATPGHIIVRFTKVEMKEKVLRAAREKASLAPENLDNSKIRPVVILFHYGESWNLLRADQRLIFAKSWPRASRYQQGHQDLFILRSDLPSQVFIRDKLMERRNRRTGRTEKARIWEVTDRTVRTWIGEAVAAAAADGVTFSVPVTPHTFRHSYAMHMLYAGIPLKVLQSLMGHKSISSTEVYTKVFALDVAARHRVQFAMPESDAVAMLKQLS

SEQ ID NO: 34404 - protein, 1147 aa, Homo sapiens
  DOMAIN (120)..(137): kw REPLICATION REPB REPA INITIATION domain identified by eMATRIX, accession number DM00653B, p-value=3.250e-15, raw score of 16.63
  DOMAIN (223)..(337): ParA family ATPase domain identified by PFam, accession name ParA, E-value=2.7e-28, PFam score of 107.5
  misc_feature (1)...(1147): Xaa = X or * as defined in Table 2
RVSRGRKWFFIALKRMPAMKKAMNLFLGLSNVRTVHPEGFTVYISTHISFPSLSGYRTGLRSFGLVKQKKSPIRMPCVYTNTLCQYRKPDGSGIVSLKIDWIIERYQLPQSYQRMPDFRRRFLQVCVNEINSRTPMRLSYIEKKKGRQTTHIDLALKGLRVLLVEGNDPQGTASMYHGWVPDLHIHAEDTLLPFYLGEKDDVTYAIKPTCWPGLDIIPSCLALHRIETELMGKFDEGKLPTDPHLMLRLAIETVAHDYDVIVIDSAPNLGIGTINVVCAADVLIVPTPAELFDYTSALQFFDMLRDLLKNVDLKGFEPDVRILLTKYSNSNGSQSPWMEEQIRDAWGSMVLKNVVRETDEVGKAAPMVDSLIARVGVMARGNAITFPVCGRDVKFTLXIVRGGDSVKKTSRVWSGNARDQELLTEDALDDLIPSFLLTGQQTRPFGRRVSGVIEIADGSRRRKAAALTESDYRVLVGELDDEQMAALSRLGNDYRPTSAYERGQRYASRLQNEFAGNISALADAENISRKIITRCINTAKLPKSVVALFSHPGELSARSGDALQKAFTDKEELLKQQASNLHEQKKAGVIFEAEEVITLLTSVLKTSSASRTSLSSRHQFAPVATPPLLIPRQTGSEVDLQQTPTDLQLRVLTLRRKTNKQKGHPHENLICTSPSSKTKGFFNQRVEYSKRFLEKSEDFSEPWCHSFLHQIRMFPELLWCCRGRLTPHTAGYSSETKLPEERSGSNICCSPVSPVLQPPLLIPRQTGSEVDLQQTPTDLQLRVLTLRRKTNKQKGHPHENLICTSPSSPTKVLEVLPRAIRQEKEIKGIQLGKEEVKLSLFADDMIVYLENPIVSAQNLLKLIGNFSKVSGYEINVQKSQAFLYMNNRQTESQIMSELPFTIASKRIKYLGIQLKRDVKDLFKENYKPLLNEIKEDTNKCKNIPCSWIGIINIVKMAILPKPPLLIPRQTGSEVDLQQTPTDLQLRVLTLRRKTNKQKGHPHENLICTSPSPKTKGLGLAWESLLREIRNERRYVQSCMACFQRVGYQSMGPSVMMMDLWVKRYPGRRYVTHTAARLRLEKSRPYRGHLSVVGVDEAGVSLPELQLPATCSRVCAAPKKDSPPKTSVKVDELSRGQIAVCGGVKEPA

SEQ ID NO: 34405 - protein, 858 aa, Homo sapiens
  DOMAIN (195)..(209): ubiH/COQ6 monooxygenase family proteins domain identified by eMATRIX, accession number BL01304A, p-value=7.097e-10, raw score of 8.05
MQRLMMLLATSGACLGLLAVAAVAAAGSSPRTGEAISSWPIVTSGGGDGDGGKGGNRYCGGCRSGDDKGEGGSYSGRGRGGRSSGGNGSMVVVVIVMVVRMGEARWWWEYGVWEVEPEIILNAPQQYLLAGIGDTLAKWYEAVVLAPQPETLPLTVRLGINNAQAIRDVLLNSSEQALSDQQNQQLTQSFCDVVDAIIAGGGMVGGLGDRFTRVAAAHAVHNGLTVLPQTEKFLHGTKVAYGILVQSALLGQDDVLAQLTGAYQRFHLPTTLAELEVDINNQAEIDKVIAHTLRPVESIHYLPVTLTPDTLRAAFKKYSQSCFVIRLGGDFIHQLAENHIVIFVNNHNGTRCQTFQWAISNCHTVSLQKFSVRKFLSDLFAIGGRRGVRPPTEAPGHQKSDNQAHVSVSFDGLDLVFFVVNQWAGVVFCFDLFSRKRGRFSVWRNKGFGRYCQRLANFRDRQAFQLLNQIHFTRCKQVDNGGTEFKATHFLAFQQCHRTVVFPGRPAIKTRVERLDRYRNRMEKSNGQANLRVHGGTWEKLVLQLDSAGMVNRVSSVGAPLREPIPTEGKGAKEDTWGNLSSNDPLLEAFGGQFGIAISMHQTLATRGGKRNARPTTRPRFHRGTNPRGIAPHIGTANARYSTGHCPVALPFGLRGPPLARENVATATKGHESASRETEVVAVAKLTSRVLLICDATHALPIQVLRNDIRVIAAGNGCTDDLQLEHLPANTDIRVGNVLWKVGESAWDNNKITDTLKALPTYGPLLPAAVTSANPQQATAMLADGSTVALSMEGVRWARPYRSDTQQGPTPRKVTDVLQTGSSGPTKVPMCPAAWADYMLPTIFVDTKLGHQKSTFQG

SEQ ID NO: 34406 - protein, 178 aa, Homo sapiens
  DOMAIN (92)..(146): Sodium:dicarboxylate symporter family proteins domain identified by eMATRIX, accession number BL00713E, p-value=5.800e- 35, raw score of 19.73
  DOMAIN (1)..(178): Sodium:dicarboxylate symporter family domain identified by PFam, accession name SDF, E-value=1.2e-92, PFam score of 321.2
MRLAPIGAFGAMAFTIGKYGVGTLVQLGQLIICFYITCILFVVLVLGSIAKATGFSIFKFIRYIREELLIVLGTSSSESALPRMLDKMEKLGCRKSVVGLVIPTGYSFNLDGTSIYLTIAAVFIAQATNSQMDIVHQITLLIVLLLSSKGAGGVTGSGFIVLAATLSAGGHLPVAGLA

SEQ ID NO: 34407 - protein, 361 aa, Homo sapiens
LKSTNLITFLRLFVPQMPLAYMKFTPSGLVAACAPWLRQRRVVQLGQIAFSAPYLSQMVRQEMYNRYGESAYEDGYRIYTTITRKVQQAAQQAVRNNVLDYDMRHGYRGPANVLWKVGESAWDNNKITDTLKALPTYGPLLPAAVTSANPQQATAMLADGSTVALSMEGVRWARPYRSDTQQGPTPRKVTDVLQTGQQIWVRQVGDAWWLAQVPEVNSALVSINPQNGAVMALALLNNARPWYLGAQPRDSTIIFCQFGAHPLLDPKTQPVGCRNAARKSCAEIRLVPDARANSGKLVRRYRKYRRQYHKSKSRHQPLRQQQPVRLDWRNVDNQYALTTRFLYQSLQRHAQLNVPLFHVLK

SEQ ID NO: 34408 - protein, 141 aa, Homo sapiens
VQHVITYRLLRGPANVLWKVGESAWDNNKITDTLKALPTYGPLLPAAVTSANPQQATAMLADGSTVALSMEGVRWARPVLPVPRHSVGSTMVRVALAVMRPGMCRHGDGEKDQPQAMGAHQKHAAHQDRSGDDQSDQRFAV

SEQ ID NO: 34409 - protein, 314 aa, Homo sapiens
  misc_feature (1)...(314): Xaa = X or * as defined in Table 2
GRIRVHIHKDGRADGGSQPGVTAIQQQLPFAFAFPNXSYXTESAWAQSIKGPWWLRDQVDGPAGRLAALPQRSLINAVSTRMEGISGAFNTANPACSTXFLCSLLILPSLFSTALPNFRLSAMVSDCTISNMVWSTSAVTDWSCTPLDXERKHRGTARLTTGKGVGMDRDKQVSTLFLGFCYAHLQWNEDVFIARHVHLHIALFLDQRAQTASYLQYHIFFARFVFPHRTGVFATVARLKHNDNRTIAPCFTRLWTTLRWRHLLFEVAFVVILQQRQQRVLHILCIGRIEVHHQTLFKPGDRRKGKQLRFYVLL

SEQ ID NO: 34410 - protein, 218 aa, Homo sapiens
  misc_feature (1)...(218): Xaa = X or * as defined in Table 2
MRHGYPARANVLVKVGESAWDNNKDYRYAKALPTYGPLLPAAVTSANPQQATAMLADGSTVALSMEGVRWARPYRSDTQQGPTPRKVTDVLQTGQQIWVRQVGDAWWLAQVPEVNSALVSINPQNGAVMALVGGFDFNQSKFNRATQALRQAGAHLPAHSQSGHHQQTARXKSNFCARMXTPDQLSWXXKNCPFRLSPTXQRQWSLRRYRPVSQRTSF

SEQ ID NO: 34411 - protein, 184 aa, Homo sapiens
  misc_feature (1)...(184): Xaa = X or * as defined in Table 2
WRAAGPEPCPTGRQLRPAGDLACSAAAGPGAEPFTAPLALAGRSKCGAAEPAPTQNSRWPMSPHLSLHASPQAEGAGSGLVPAPRAAAGXRAPQMRPVVGAEAEEAPGPXEPCRHPAPHASQHRYGCHPSAAEPCRHPAPHASQHRYGCHPSGLNPAGTQHPMPASTGTAAIHRGXTLPAPSSP

SEQ ID NO: 34412 - protein, 342 aa, Homo sapiens
MAQEIEGDRLFRARLTRRVQGKGPCGPLKAPLGMVPECHSVKPSRDTFDSTKSFKALLLSFLKIPAIDVHKPIDHPINFTFPDPGHRAPARHRHSTAAAVTMSPSGPLPLHHRLVPPSPAMAEDLSGPHPTAPSPGNRSKTLSQTNKQTNKQKQQKRRVLEVGGLETKFRGSLRGRGLGCAFGCRLLAKAVASKLLRAVILNPPARARAPSARASPRTWLPGFLQWALLVGEHQDKLFAFGNKPGRRGYSSSSEIWVSVEAVSLVVLCFLEPSGRTRIDHVLLTKEYTSCVNPSSAVFRACTSASSNFDRRKDLRVNRLEHHIGTDHLGRQWVHRRSRPCPW

SEQ ID NO: 34413 - protein, 719 aa, Homo sapiens
  DOMAIN (572)..(585): ROK family proteins domain identified by eMATRIX, accession number BL01125D, p-value=2.161e-12, raw score of 13.61
  DOMAIN (468)..(587): ROK family domain identified by PFam, accession name ROK, E- value=2.9e-10, PFam score of 38.1
MNDVDRVGGKNASLGEMITNLSGMGVSVPNGFATTADAFNQFLDQSGVNQRIYELLDKTDIDDVTQLAKAGAQIRQWIIDTPFQPELENAIREAYAQLSADDENASFAVRSSATAEDMPDASFAACTLVPGQNLSTSNKDVIELPDNQYDLDKMVNIYPVTPGLIDQLRAKPIMSQANPELEQQIANYEYRIGIGDVLMVTVWDHPELTTPAGQYRSASDTGNWVNADGAIFYPYIGRLKVAGKTLTQVRNEITARLDSVIESPQVDVSVAAFRSQKAYVTGEVSKSGQQPITNIPLTIMDAINAAGGLTADADWRNVVLTQNGVKTKVNLYALMQRGDLRQNKLLHPGDILFIPRNDDLKVFVMGEVGKQSTLKMDRSGMTLAEALGNAEGMNQDVADATGIFVIRATQNKQNGKIANIYQLNAKDASAMILGTEFQLEPYDIVYVTTAPLARWNRVISLLKKLERLTSIAITLPGIIDTENGIVHRMPFYEDVKEMPLGEALEQHTGVPGEAKGLVGAPPGARDVIQVVSIPNVGRAVIPNGHLLPQGSSSLVEIAHTQGGPLMGKRCYCGNHGCLETIASVDSILELAQLRLNQSMSSMLHGQPLTVDSLCQAALRGDLLAKDIITGVGAHVGRILAIMVNLFNPQKILIGSPLSKAADILFPVISDSIRQQALPAYSQHISVESTQFSNQGTMAGAALVKDAMYNGSLLIRLLQG

SEQ ID NO: 34414 - protein, 193 aa, Homo sapiens
TQVVFITSAWGLGEMVVQGAVNPDEFYVHKPTLAANRPAIVRRTMGSKKIRMVYAPTQEHGKQVKIEDVPQEQRDIFSLTNEEVQELAQQAVQIEKHYGSPMDIEWAKDGHTGNGHVQALRNRCPEARQHRMRIPGRILPRPIGRMAGPKTRIEHTSVTVISNRRKIKTENRGHKGYEDRKLHEDLQLRHQSH

SEQ ID NO: 34415 - protein, 245 aa, Homo sapiens
  DOMAIN (71)..(104): TPR Domain domain identified by PFam, accession name TPR, E- value=0.012, PFam score of 22.3
RSRFHTLFLVDLNSPAPSACQHRAVAYQAYQVEDYATALAAWQKISLHDMSNEDLLAAANTAQAAGNGAARDRWVARATIYRQRHNVPAAVSDLRAALELEPNNSNTQAALGYALWDSGDIAQSREMLEPAHKGLPDDPALIRQLAYVNQRLDDMPATQHYARLVIDDIDNQALITPLTPEQNQQRFNFRRLHEEVGRRWTFSFDSSIGLRSGAMSTANNNVGGAAPGKSYRSRRVLAGVLPPLE

SEQ ID NO: 34416 - protein, 416 aa, Homo sapiens
MKAGKHYDLDHLFLVLLLTLPSHCHQEGNPFSTPSRGSDWGLSLSSPAGPWDGAGLWLWEVSGLHAVYIIGSTGLALRIRGPEPFAPSVSRLSPVQVIAQRPLRAVPACPWAAAPVFPGQDSDGPCDCDASSGWAFAEVVIYPNAKWVVESNQMIRAGNVEISRVSVLPLQRRQFDRQKIARNRLEHHIGTDHLGKRAGISRRLAGHVSFALYDSEKDAYLIGRDIWGSSHCIWGMTNTVSVCGLRNESAAHSPDARSRRYRPDRTTATFVTMADAFFISVPSPGRSLSVYARKTHPVNRTLHDHLTKAPCGSVNTTWSKPDSVSMENITQMMREKQIHVSLPRERLKTLNVEEGFLLTGKRRSGISSAVAEERTAKEAFRHRRKAVHRLRGWRFQLRLEGSVDNPLADLRAAFAS

SEQ ID NO: 34417 - protein, 235 aa, Homo sapiens
  misc_feature (1)...(235): Xaa = X or * as defined in Table 2
GLSSVGQSVNDHLPWTXGLSSVGQSVNDHLPWTXGLSSVGQSVNDHLPWTXGLSSVGQSINDHLPWAXVLSSVRQSIDDHLPWTXVLSSVRQSIDDHLPWTXGLSSVGQSVDDHLPWTXGLSSVGQSIDDHLPWTXVLSSVRQSIDDHLPWTXGLSSVGQSVDDHLPXMXGLSSVRQXVTXAKVNPKISAVTRNRGSVESPHLEGRSLKVQVFIPQVEDMSWGPPWLWVEGESWT

SEQ ID NO: 34418 - protein, 93 aa, Homo sapiens
  misc_feature (1)...(93): Xaa = X or * as defined in Table 2
VLGGGSEEKAPLWWSGPMVLPGAHSMKTXLPHTHVEFGFACLASAGAQDVGMEGPRHTTENSVTGSPSHFPPRASQHRRGICRPHAGRATADF

SEQ ID NO: 34419 - protein, 272 aa, Homo sapiens
  misc_feature (1)...(272): Xaa = X or * as defined in Table 2
GLSSVGQSIDDHLPWTXVLSSVRQSIDDHLPWTXGLSSVGQSVDDHLPWTXGLSSVGQSVDDHLPWTXGLSSVGQSVDDHLPWSXGLSSVGQSVDDHLPWTXGLSSVGQSIDDHLPWAXVLSSVRQSIDDHLPWTXVLSSVRQSIDDHSSMDVRSVXCRTISRXPSSMDVRAVXCRTINRXPSSMDVSAVXCKTINRXPSSMDVRSVXCRTISRXPSPXTXGLSMSLIPSQLCGLSAVTPFSAVTRNRGSENHPILKAAASRSKSSFPRLKT

SEQ ID NO: 34420 - protein, 396 aa, Homo sapiens
  misc_feature (1)...(396): Xaa = X or * as defined in Table 2
SLGPRSHSCCRSDYRSGTTVPLVLLPVCGVPALLVFALLSPLCVVCSALCGGLLPVLRASLFLWCVAFLAGLVFVFGFAFFGSLVRGRFLVVVPFFLLFALCRLLFLVCWLRSFGACPVSVCVAGFACFAGLFLVLVSLLSSGFGFRLSFSCVVGSLCLPGFAFRAFCLFFLPCVGPALLAFPGFCGPSSPSLSYGGLFAPWSCALLGFFGCLGWSAPGFLSSFGLSVRVLSLPCASGLRSLSGCALVPGLFLPWVFSPRSLRPLVSFGCLLCSFVSHNMDWIKESAGKVIQGNPXWLPVILFFGSVPLTSKAATAKPLMRMGRALTVSQLTAVASFAAVYGLFILPTXPTLVGAVQMDDTGTTRIGKLVSNHPFFIRVLLGVALTVCFGFVLGSF

SEQ ID NO: 34421 - protein, 627 aa, Homo sapiens
MRDLFEKLKITLGLLHSSKVSKSLILTRAFSEIQGLTDQADKLIGQKNLLTRKRNILIRKVSSLSGKTEEVVLKKLEYIYAKQQALEAQKRKKKMGSDEFDISPRISKQQEGSSASSVDLGQMFINNRRGKPLILSRKKDQATENTSPLNTPHTSANLVMTPQGQLLTLKGPLFSGPVVAVSPDLLESDLKPQVAGSAVALPENDDLFMMPRIVNVTSLATEGGLVDMGGSKYPHEVPDSKPSDHLKDTVRNEDNSLEDKGRISSRGNRDGRVTLGPTQVFLANKDSGYPQIVDVSNMQKAQEFLPKKISGDMRGIQYKWKESESRGERVKSKDSSFHKLKMKDLKDSSIEMELRKVTSAIEEAALDSSELLTNMEDEDDTDETLTSLLNEIAFLNQQLNDDSVGLAELPSSMDTEFPGDARRAFISKVPPGSRATFQVEHLGTGLKELPDVQGESDSISPLLLHLEDDDFSENEKQLAEPASEPDVLKIVIDSEIKDSLLSNKKAIDGGKNTSGLPAEPESVSSPPTLHMKTGLENSNSTDTLWRPMPKLAPLGLKVANPSSDADGQSLKVMPCLAPIAAKVGSVGHKMNLTGNDQEGRESKVMPTLAPVVAKLGNSGASPSSAGK

SEQ ID NO: 34422 - protein, 1361 aa, Homo sapiens
  DOMAIN (1303)..(1322): SPECTRIN PLECKSTRIN HOMOLOGY DOMAIN SIGNATURE domain identified by eMATRIX, accession number PR00683D, p-value=4.194e- 10, raw score of 15.87
  DOMAIN (50)..(1217): Spectrin repeat domain identified by PFam, accession name spectrin, E-value=2.7e-89, PFam score of 310.1
MEQRRAQLERARLLGPLSTAVRDYASWAARVRQDLQVEESSQEPSSGLLKLSAHQWLRAELEAREKLWQQATQLGQQALLAAGTPTKEVQEELRALQDQRDQVYQTWARKQERLQAEQQEQLFLRECGRLEEILAAQEAAPCQAQWALLRPCHTQSAHGHRLQLEGLAGWKAWWPLTFLWIQVSLKTSALGSSVEEVEQLIRKHEVFLKVLTAQDKKEAALRERLKTLRRPRVRDRLPILLQRRMRVKELAESRGHALHASLLMASFTQAATQAEDWIQAWAQQLKEPVPPGDLRDKLKPLLKHQAFEAEVQAHEEVMTSVAKKGEALLAQSHPRAGEVSQRLQGLRKHWEDLRQAMALRGQELEDRRNFLEFLQRVDLAEAWIQEKEVKMNVGDLGQDLEHCLQLRRRLREFRGNSAGDTVGDACIRSISDLSLQLKNRDPEEVKIICQRRSQLNNRPVGEFPWQLAPVPAAARRGLEIHVLSRELDNVTKRIQEKEALIQALDCGKDLESVQRLLRKHEELEREVHPIQAQVESLEREVGRLCQRSPEAAHGLRHRQQEVAESWWQLRSRAQKRREALDALHQAQKLQAMLQELLVSAQRLRAQMDTSPAPRSPVEARRMLEEHQECKAELDSWTDSISLARSTGQQLLTAGHPFSSDIRQVLAGLEQELSSLEGAWQEHQLQLQQALELQAGTVPSPACILPPRTGPALTPQPLLFLSSVEKMERWLCSKEDSLASEGLWDPLAPMEPLLWKHKMLEWDLEVQAGKISALEATARGLHQESRSESQPAPTNAMAPCAGVLAVVAATPSPFLQVDHTWTLSPKTLLEKEVQSLGQAKVYALRKLAGTLERGAPRRYPHIQAQRSRIEAAWERLDQAIKARTETHIITFTEGCSMEDGFCTWGHIKPHDPPCSKGGGPEGHVSREKGILGAENSPEQNLAAAHEVHSFQQAAAELQGRMQEKTALMKGEDGGHSLSSVRTLQQQHRRLERELEAMEKEVARLQTEGCRLGQLHPAAPGGLAKVQEAWATLQAKAQERGQWLAQAAQGHAFLGRCQELLAWAQERQELASSEELAEDVAGAEQLLGQHEELGQEIRECRLQAQDLRQEGQQLVDNSHFMSAEVTECLQELEGRLQELEEAWALRWQRCAESWGLQKLRQRLEQAEAWLACWEGLLLKPDYGHSVSDVELLLHRHQDLEKLLAAQEEKFAQMQKTEDAKGTPTMEGSLEFKQHLLPGGRQPSSSSWDSCRGTLQGSSLSLFLDERMAAEKVASIALLDLTGARCERLRGRHGRKHTFSLRLTSGAEILFAAPSEEQAESWWRALGSTAAQSLSPKLKAKPVSSLNECTTKDARPGCLLRSDP

SEQ ID NO: 34423 - protein, 152 aa, Homo sapiens
ESRHEAFSTCVIKVPLGRCERHGKCKKTCIASRDPYCGWIKEGGACSHLSPNSRLTFEQDIERGNTDGLGDCHNSFVALNGHSSSLLPSTTTSDSTAQEGYESRGGMLDWKHLLDSPDSTDPLGAVSSHNHQDKKGVIRESYLKGHDQLVPV

SEQ ID NO: 34424 - protein, 147 aa, Homo sapiens
  misc_feature (1)...(147): Xaa = X or * as defined in Table 2
QPTERGLCASLKPSRAAIKSQSSKVISFDSMSHIQGTVVQGVGSQGLEQQYRSGVAVFRLHSFSHRLLSACEFSRCRVQAVSRSIILGSGRWQPPSHSSTREWPSGHTVWGLQPHISPLHCPSKDSLXGLCLCNKLPPENLGFSYVL

SEQ ID NO: 34425 - protein, 863 aa, Homo sapiens
  DOMAIN (145)..(302): Sema domain identified by PFam, accession name Sema, E-value= 1.8e-65, PFam score of 230.9
  misc_feature (1)...(863): Xaa = X or * as defined in Table 2
MVWFLKNVNHGTHTNAKKYNDVENKERTGWKWGSTEYLLCARPLRKGNVGLSGDVFLTVFVMKTGHSSSLLPSTTTSDSTAQEGYESRGGMLDWKHLLDSPDSTDPLGAVSSHNHQDKKAMLKDGEERPFNEPGVFHLLADHQLTQKVASIPGSAVCAYDMLDIASVFTGRFKEQKSPDSTWTPVPDERVPKPRPGCCAGSSSLERYATSNEFPDDTLNFIKTHPLMDEAVPSIFNRPWFLRTMVRYRLTKIAVDTAAGPYQNHTVVFLGSEKGIILKFLARIGNSGFLNDSLFLEEMSVYNSEKKWSTAKPVRVTIILNPGQASFCITLRETVCXRRKHIWCPPYRCTLQXHFCPCHCLSGKETLCRVTGGMKVKADRDESLPYAAMLAAQDMAQRCKELGITALHIKHRATGGNRTKTPGPGASRPSSPCPLGCLKWQTLFPRRRLRWPQGGRRKRSQLEAQRVIRESYLKGHDQLVPVTLLAIAVILAFVMGAVFSGITVYCVCDHRRKDVAVVQRKEKELTHSRRGSMSSVTKLSGLFGDTQSKDPKPEAILTPLMHNGKLATPGNTAKMLIKADQHHLDLTALPTPESTPTLQQKRKPSRGSREWERNQNLINACTKDMPPMGSPVIPTDLPLRASPSHIPSVVVLPITQQGYQHEYVDQPKMSEVAQMALEDQAATLEYKTIKEHLSSKSPNHGVNLVENLDSLPPKVPQREASLGPPGASLSQTGLSKRLEMHHSSSYGVDYKRSYPTNSLTRSHQATTLKRNNTNSSNSSHLSRNQSFGRGDNPPPAPQRVDSIQVHSSQPSGQAVTVSRQPSLNAYNSLTRSGLKRTPSLKPDVPPKPSFAPLSTSMKPNDACT

SEQ ID NO: 34426 - protein, 433 aa, Homo sapiens
  DOMAIN (252)..(347): Sema domain identified by PFam, accession name Sema, E-value= 3.5e-34, PFam score of 127.0
MDGRKTEGTPTKDSPQFRGGGGNDDDEDECKSRHQQRYCHLRDRDFECDTQLCKFKLDTTWDKGDSVLLVLSSCVILLLTNIKISPMWWCPPSTYPVVAFRAQRGLCTWSQRAPREHVSALTPMEDVTGCNREFKIAVLRKLEDNTENEFRILSDTVKKIEIIKKNQERILEFKNAIDIPASDVLHCGCSPSSKLHGVPDGVKSCDLPKPITCSPGAKRACELERASVGGKIQNVTSGKGEVPGQSRLRKRYATSNEFPDDTLNFIKTHPLMDEAVPSIFNRPWFLRTMVRYRLTKIAVDTAAGPYQNHTVVFLGSEKGIILKFLARIGNSGFLNDSLFLEEMSVYNSEKTCIASRDPYCGWIKEGGACSHLSPNSRTQDGRSTDSLHCALQKAAGTLCQPMKAAKGSVPCRATEAELPKTLETHHLHQCGLD

SEQ ID NO: 34427 - protein, 136 aa, Homo sapiens
  misc_feature (1)...(136): Xaa = X or * as defined in Table 2
FPEIPQSCREGAPGPAKPGGPRAREPCPNRTAASWGVHCEDGGSTVRTGGPLXGRGVHREDGASSPQHPPRRGRGLGHLGPRPLXGQGDAAAAPGHRGKSGGKGFLPALRVQRGERGRVSRRAVCMWTSLCASVPS

SEQ ID NO: 34428 - protein, 217 aa, Homo sapiens
  DOMAIN (152)..(165): PROTEIN ZINC-FINGER METAL-BINDI domain identified by eMATRIX, accession number PD00066, p-value=2.200e-14, raw score of 13.92
  DOMAIN (22)..(213): Zinc finger, C2H2 type domain identified by PFam, accession name zf-C2H2, E-value=1.1e-55, PFam score of 198.4
DSFGSMSVLIKNPRTLFGGKPYVCRECGRGFTWKSNLITHQRTHSGEKPYVCKDCGRGFTWKSNLFTHQRTHSGLKLYVCKECGQSFSLKSNLITHQRAHTGEKPYVCRECGRGFRQHSHLVRHKRTHSGEKPYICRECEQGFSQKSHLIRHLRTHTGEKPYVCTECGRHFSWKSNLKTHQRTHSGVKPYVCLECGQCFSLKSNLNKHQRSHTGEKP

SEQ ID NO: 34429 - protein, 127 aa, Homo sapiens
  DOMAIN (92)..(106): C2H2-TYPE ZINC FINGER SIGNATURE domain identified by eMATRIX, accession number PR00048A, p-value=2.421e-11, raw score of 10.52
  misc_feature (1)...(127): Xaa = X or * as defined in Table 2
LPASASQSVGTTGVISFENTCNICHFFFLLLLFFSSSSSFFFLPFSFSFRVSLFXIQPLKTTASTVQGRQHSGGYRASPERRADQRAHTGEKPYVCRECGRGFRQHSHLQLSVYPHSFWTQDKRSNH

SEQ ID NO: 34430 - protein, 248 aa, Homo sapiens
  DOMAIN (111)..(144): PROLINE-RICH PROTEIN 3 domain identified by eMATRIX, accession number DM00215, p-value=4.356e-09, raw score of 19.43
  misc_feature (1)...(248): Xaa = X or * as defined in Table 2
EGKRGRPFRIPRPAHPFPHELQSRLCILKPLHHPTPSSCPSSXTPVAPLPSHPCAPHSARSCPVSDEAALPXSMALWARAGLLEAPTTLLPAAPDASSPAMPPSRKLPPPLPLCPEPLGPSPAAPSPPAPPGPNAAARPPLPPSPSAAPGPRRPGARPVGPSRGPGPRNSRSLRAPDVHTAPMRCLPSVRPPLPVLSALPDPLPRPPSFVPSLPSPPSSGPSCPPTSAPPGSPRPGFVRLPCLLFWGS

SEQ ID NO: 34431 - protein, 75 aa, Homo sapiens
MDGKEEARFLMVKERHLCVSDGKEEARFLMVKERHLCVSDGKEEARFLMVKERHLCVSDGKEEARFLMVKERHLC

SEQ ID NO: 34432 - protein, 207 aa, Homo sapiens
  DOMAIN (79)..(99): kw TRANSCRIPTASE REVERSE II ORF2 domain identified by eMATRIX, accession number DM01354U, p-value=5.368e-14, raw score of 12.24
  misc_feature (1)...(207): Xaa = X or * as defined in Table 2
CPLSPLLFNIVLELLARAIRKEKXLKGIQIGEEEVKLSLFGDDLIVYLENPKYSSKKLLELVNEFNKVSGYKIYVHKSVALLYTNSDQAENQIKNSTPFTTATSSSSSSSSSSPQGIFLTKRLKNFXRGKFKTLVKKNQGDPKKGKNPPGPKMGKNNFGKTPFWAKKIXKFHSIPKKTPPFFFQKLKKTGVKFFWAPKGPKGFLSKK

SEQ ID NO: 34433 - protein, 334 aa, Homo sapiens
  DOMAIN (205)..(218): PROTEIN ZINC-FINGER METAL-BINDI domain identified by eMATRIX, accession number PD00066, p-value=2.500e-13, raw score of 13.92
  DOMAIN (77)..(324): Zinc finger, C2H2 type domain identified by PFam, accession name zf-C2H2, E-value=6.6e-62, PFam score of 219.1
  misc_feature (1)...(334): Xaa = X or * as defined in Table 2
QKQPVWQRCREIGTLGYCGWKWTLDIHGRGHRILSGGVEIPGPWTEGFIQGRDVGELQEPGLSGRESIHXGKSYEYECSEDGEVFRVRASLTNHQVIHTAEKPYKCTECGKVFSRNSHLVEHWRIHTGQKPYKCSECDKVFNRNSNLARHQRIHTGEKPHKCNECGKAFRECSGLTTHLVIHTGEKPYKCNECGKNFRHKFSLTNHQRSHTAEKPYKCNECGKVFSLLSYLARHQIIHSTEKPYKCNECGRAFHKRPGLMAHLLIHTGEKPYKCNECDKVFGRKFNLTNHQRIHTGERPYKCNACGKVFNQNPHLSRHRKIHAGENSLRTLQME

SEQ ID NO: 34434 - protein, 312 aa, Homo sapiens
  DOMAIN (193)..(206): GLIADIN domain identified by eMATRIX, accession number DM00406, p-value=3.200e-09, raw score of 7.73
  misc_feature (1)...(312): Xaa = X or * as defined in Table 2
QQHQQQQHFVGQVAIQQQQQQGPGVQTNQALGPKPQGLMPPSSHQDLLVQQVSPRPPQGPQGMVGPAQVGVLQHQLHGALGPQGLHXQVFMPQSRVFSSPQLAQQGQGLMGHRLVTAQQQQQQQQHQQQGSMAGLSHLQQSLMSHSGQPKLSAQPMCSLLQLLQQQQLLSXQQHLQQQQQQQLQQQQQLXQPQLHQQQQQQQLQQQQPQQLQQQHQQLQQPQINSQHLFPSRRPPNHMGLLTHSPNLTASLRLTSTHKAALGPGLQAALGHPKDGLLWKTLGTWRARGLICTGGIISYFTQHSWEVKVFTTL

SEQ ID NO: 34435 - protein, 751 aa, Homo sapiens
  DOMAIN (503)..(520): Zinc finger C2H2 type, domain proteins. domain identified by eMATRIX, accession number BL00028, p-value=9.229e-09, raw score of 16.07
  DOMAIN (314)..(697): Zinc finger, C2H2 type domain identified by PFam, accession name zf-C2H2, E-value=1e-20, PFam score of 82.2
  misc_feature (1)...(751): Xaa = X or * as defined in Table 2
MEKNKVVKREAEANSINLSVYEPFKVRKAEDKLKENSDNVLENRVLDGKLSSEKNDTCLPGTAPSKTKSSSKLSSCSSAIMALSAKKAASDSCKEPVANSRESSPLPKEVNDSQARAPLQSTVMTNAVSPAELTPKQVTIKPVATAFLPVSAVNEMKTAGSRVINLKLANNTTVKATVISAASVQSASSAIIKAANAIQQQTVVVPAPSRANAKLVPKTVHLANINLLPQGAQATSELRQVLTKAQQQIKQAIINAAASQPPKKVSRVQVVSSLQSSVVEAFNKVLSSVNPVPVYIPNLSPPTNAGITLPTRGYKCLECGDSFAVEKSLTQHYDRQSMRIEVTCNHGTKNLIFYNKCSLLSHARGHKEKGVAADTRGQKTCTICQMLLPNQCSYASHQRIHQHKSLYTCPECGAICRSVHFQTHVTKNCLHYMRRVGFRCVHCNVVYSDVAALQSHIQGSHCEVFYKCPICPMACKSAPSTHSHTYTQHPGIKIGEPEIIYKCSMCDTVFTLQTLLYRHFDQHIENQKLSVFKCPDCYLLYAQKQLMMDHIKSMHGTLKSIEGPPNLGINLPLSIKPATQNSANQNKEDTKSMNGKEKLEKKSPSPVKKSVETKKVASPGWTCWECDRLFIQRDVYISHVRKEQGKQMKKHPCRHLCQHNRIKHKGIRKVYACSHCPDSRRTFTKRLMLEKHVQLMHSLKDPDLKETDRCHQXGGNRNKRRHQVPQSQAPLHCTQVKGTSASVQAKWSWGR

SEQ ID NO: 34436 - protein, 137 aa, Homo sapiens
MEKNKVVKREAEANSINLSVYEPFKVRKAEDKLKENSDNVLENRVLDGKLSSEKNDTCLPGTAPSKTKSSSKLSSCSSAIMALSAKKAASDSCKEPVANSRESSPLPKEVNDSQARAPLQSTVMTNAVSPAELTPKQ

SEQ ID NO: 34437 - protein, 30 aa, Homo sapiens
MELGKITNRRTNPAMRMNPPMAPCQTESAK

SEQ ID NO: 34438 - protein, 645 aa, Homo sapiens
  DOMAIN (494)..(511): Zinc finger C2H2 type, domain proteins. domain identified by eMATRIX, accession number BL00028, p-value=9.229e-09, raw score of 16.07
  DOMAIN (305)..(634): Zinc finger, C2H2 type domain identified by PFam, accession name zf-C2H2, E-value=1.8e-18, PFam score of 74.8
MVGDQWPREKKKAAVRLPCDGSLGITPGKRRVSAINEPGSAPAILKVRIKTIKMSSGEIKRTVTRVLPEVDLDSGKKSSEQTASVMASVTFLLSSPASAAILSSLLRAPLQSTVMTNAVSPAELTPKQVTIKPVATAFLPVSAVNEMKTAGSRVINLKLANNTTVKATVISAASVQSASSAIIKAANAIQQQTVVVPAPSRANAKLVPKTVHLANINLLPQGAQATSELRQVLTKAQQQIKQAIINAAASQPPKKVSRVQVVSSLQSSVVEAFNKVLSSVNPVPVYIPNLSPPTNAGITLPTRGYKCLECGDSFAVEKSLTQHYDRQSMRIEVTCNHGTKNLIFYNKCSLLSHARGHKEKGVAADTRGQKTCTICQMLLPNQCSYASHQRIHQHKSLYTCPECGAICRSVHFQTHVTKNCLHYMRRVGFRCVHCNVVYSDVAALQSHIQGSHCEVFYKCPICPMACKSAPSTHSHTYTQHPGIKIGEPEIIYKCSMCDTVFTLQTLLYRHFDQHIENQKLSVFKCPDCYLLYAQKQLMMDHIKSMHGTLKSIEGPPNLGINLPLSIKPATQNSANQNKEDTKSMNGKEKLEKKSPSPVKKSVETKKVASPGWTCWECDRLFIQRDVYISHVRKEQGKQMKKHPCR

SEQ ID NO: 34439 - protein, 609 aa, Homo sapiens
  DOMAIN (242)..(256): C2H2-TYPE ZINC FINGER SIGNATURE domain identified by eMATRIX, accession number PR00048A, p-value=5.320e-09, raw score of 10.52
  DOMAIN (214)..(432): Zinc finger, C2H2 type domain identified by PFam, accession name zf-C2H2, E-value=1.1e-07, PFam score of 39.0
  misc_feature (1)...(609): Xaa = X or * as defined in Table 2
MCIEVTCNHCTKNLIVYNKCNLLSQARGHKEKGVVMQCSYSILKPVSAGHIIVSPSSNSSSSSSTLQSPVGTGIHTVTKIQSGITGTVISAPSSTPSTTAMPLDEDPSKLCRHNLKCLKCNEIFQDKRSLATHFQQAADMSGQKTCTICQMLLPNQCQRIHQHKSPYTCPECRAICRKKRTQIHEWERETGKEISISFEKKSMETKKVASPGWTCWECDHLFMQRDVYISHLRKEHGKQMKKHPCRQCDKPFSSSHRLCWHNRIKHKGIRKVYACSHCPDSTGTFTKGLMLEKHVHXCMASRTLTXKKXQTPPMRRKQKXKXTSRSAVPSGVERTGSGVQASQRSNNSTTEKAENQCFXGSQAPLCCTQVKGTSASAQAKWGWRRXPTGEQTQPRGRISQWVMSDRKCKVCAKTFETKAALNTHMQTHGHAEGCLKQPCRSLLSQPRIKTEARNLIRNADFLNSILRNGEGYSKEKKNGTGFLGRSARLALGAQGGKSWRFLFWVLLPNVLVLRVGMHDVNHRLINAAGCVSQLAVTLSTEPHGISSAISRVPRHCHPSGENSMATSLNVNRSISRLAAGSGVLAMDLPIPAGHRAIETGLLGTEDTEQ

SEQ ID NO: 34440 - protein, 97 aa, Homo sapiens
MPKKNPNQTQKIGLSQRTINERDRRVPLLHFNKAELPTLNILLEMAELIPCGSVLKVTANCDTQPAALISRWLTSCIPPLSTRTFGSSTQNRKRQLF

SEQ ID NO: 34441 - protein, 23 aa, Homo sapiens
FHHKQLHNPVLECHQPAGPCHYL

SEQ ID NO: 34442 - protein, 225 aa, Homo sapiens
  DOMAIN (65)..(120): Domain present in ZO-1 and Unc5-like netrin receptors domain identified by eMATRIX, accession number PF00791B, p-value=6.091e- 11, raw score of 28.49
  DOMAIN (60)..(158): Ank repeat domain identified by PFam, accession name ank, E- value=6.1e-16, PFam score of 66.4
MGVGRPAGHLPLCVLLLVLSTTPLAWPKLLPTTLAAYWMVLTHITDWKKAKTSIKEQRRNKWTALHLASANGNSGVVKLLLDRRCQLNVLDNKKRTALTKAVQCQEDECALMLLEHGTDPNIPDEYGNTTLHYAIYNEDKLMAKALLLYGADIESKNKVEEEMKKHESNNVGLLENLSNGVTAGNGDDGLIPQRKSRTPENQQFPDNESEEYHSHTEFLPSRIYP

SEQ ID NO: 34443 - protein, 102 aa, Homo sapiens
MQKQILPAGGGRLQRWLVALSASLALSGFPSNEPQIEVTDNGRGLLADGIPVLGCEVACGEISIWPPQSSRKWSWNFRGCQDLESHFAPVAGIEVTRRTVVD

SEQ ID NO: 34444 - protein, 419 aa, Homo sapiens
  misc_feature (1)...(419): Xaa = X or * as defined in Table 2
WERREAGGEDEGINIHEPXVEEEMKKHESNNVGLLENLTNGVTAGNGDNGLIPQRKSRTPENQQFPDNESEEYHSLGDKSKTSFQNSNNNNNKQQEQQQQNPTFSNTRKLTKLYKAPIPPSIILSGCPNINDSNWQEIEHGMQTAGLPTRPLSHGLQQKGAAFRCLGCKCSEPFTGSLILQKAKTNTQKWQATYPKSQNEQLVPSVGKSYRCSTPAQPMKTAVGHKPCKATGAELPKALGAQPLHPCALDVGQGFKKGNFGAVGLNGLLGLEFHGVSGVLLVGPGDGGLISEGVVREDLMCGVWSAGTWSVGTAERCLEKPGALHVIEGPLDSWDGPVMPNGPVKSRQSSCLDGPGRCCSEILTGQSHGNKKPARASSKSSQSINDRPLAVLTNQYQCEQLASERQPSSNSCSIRIDSA

SEQ ID NO: 34445 - protein, 119 aa, Homo sapiens
  misc_feature (1)...(119): Xaa = X or * as defined in Table 2
GKLMLPGSTRKPQVPVDRKMGHEGVFVWQAGLRARPGPSLPFSHGLTLHLHWPLALPVGATSSPCEAGDLGVPLAAGTWCPWEAXRQEEAGWQAPGRAGPARVGWGGTGLTSAEVIITI

SEQ ID NO: 34446 - protein, 257 aa, Homo sapiens
  misc_feature (1)...(257): Xaa = X or * as defined in Table 2
MLISHKQLSPQLLSLTLPLSEGKAGWAGECPNPPSKDSPVQGIGGPPPGYQKCRXDTASMLTMAPCHGPVCPPHPGWRPRSGSRVILPAPPGHHPWPGPRARNGLGTFQGCSTGWQVQETCFGPGGWLGDRHLVGPAATGARCLPAARGPDGALHPAVPTGKLKGQPGPGARHQRTYDXLPRPCGAAGLGSPPAXHPISEETENQWGLHGPPQPAWARPDHGCQAPTLSPSLKRKPGRVTAGGPMPGCFSTSSVPTT

SEQ ID NO: 34447 - protein, 412 aa, Homo sapiens
  misc_feature (1)...(412): Xaa = X or * as defined in Table 2
MLISHKQLSPQLLSLTLPLSEGKAGWAGECPNPPSKDSPVQGIGDLHQLPKMQIRYSIHADDGSVPRAAHKRGLRKRTLKTISLPRQESAFPFHGQGGDPGVVPGSSFLHPLGTTPGQGPRARNGLGPSRAAPPAGRGVAGGSPSGGPAATGARCLPAARGPVGPYTQQSQRASXKGSLGPGARHQRTYDXLPRPCGAAGLGSPPAXHPISEETENQWGLHGPPQPAWARPDHGRQPLRCHPPXRGSQGGPQKAAVSQQIPRAGQEGTHXDPTEWGPPDGDQGGPRESCRGLQGGRGQCLCDWSPNTSEIXYPHAXNGDXKAGPPMDTKSQLQVSTPKSPASHGEDVARLEEPEASGDRSVPGLPGASLIPIWRPPFSRISVRTFLPSPWNLLRDCGFLGTSLASSSGRVTA

SEQ ID NO: 34448 - protein, 35 aa, Homo sapiens
MKGAGFGAGGATVKSQNSRPGRLGKGGLREEEGSV

SEQ ID NO: 34449 - protein, 150 aa, Homo sapiens
  misc_feature (1)...(150): Xaa = X or * as defined in Table 2
WWPVLSVPPECRLPGRLPSGXVRGPAPWWPEPASQDKSQLSSRGFPGKVSLGKGMAFSPLQTAPXKWLGLSPPLSSTENTASRGHTSPSSRNGFDSQPRDSRTGRECQATQLPAQHSHAEVLHFGGAMSGQLSLVGPQDSKRTARLTDSQ

SEQ ID NO: 34450 - protein, 592 aa, Homo sapiens
  DOMAIN (310)..(343): PROLINE-RICH PROTEIN 3 domain identified by eMATRIX, accession number DM00215, p-value=6.294e-11, raw score of 19.43
  misc_feature (1)...(592): Xaa = X or * as defined in Table 2
KGWLEGAPEAXERYPGPPCVVCSLSDAPWVGHPAPSLGVXEPNPPXSRGESQGPTSSICRQSSGDLGXKLESPIHTVIPRHTSQARQGHTAPFPPFQVPSXLLVXLKAVSLAPAEAPXPASGLHAPWPVAPRVTCAIPAKGTTVPAGPAELRPVSPPPILLPPDSRSSAFPSRKGPASPYETCSPPTSXEVPSXTYKSMGPGIRLPALPASPRVPSEGPGLSEHPEGPPALPPAIPFSSPSWFKQCSFSIRPGWLLHGAPQGKGWPQASWVGKTGXPEKRGSPRGPEHSALNLRVALPGVAVXEGPACVGWGGPPQPPGAICEATAPPSIVPPLSLPAPFPGTLPPPTPAASPPPALPPLLRRGRPRPCAALALPALSSLFSPPVFSLLSLQLPADRVRQVHPVLRAPGPPFRPPKQIPPSSSGDLPFPSLPGRPVLXLEKWLPPAPKASPPSSVNLILLVVVKLNTFRCGPLVKNLVPPSVVCPCPCSYKYLXILIYIHTLHMGQPPSPSSAGNQSLCYPCGGLVAQPTKRTLVPPTIQLQSVPPPVKPPCHARPVDSQPPPSLPPPTKHGGAVQAAVWPDSFYPVLLSLG

SEQ ID NO: 34451 - protein, 518 aa, Homo sapiens
  DOMAIN (473)..(499): Nuclear transition protein 2 proteins domain identified by eMATRIX, accession number BL00970B, p-value=6.172e-10, raw score of 10.09
  misc_feature (1)...(518): Xaa = X or * as defined in Table 2
TFLGYLETAHGPSAQQCPTGLFAFRSLGRGLLLTSLPKQPARSPPREDVPRSTTQEMTRPRHPPRKPAQPGLGARRRGAPVRGLSKSRELNSGNTSDSGNSFTPPHPRTRGPCWRISPPPAGAESQGDAMLLARMCQMPSLGLMSRTFPHSSTGKARGFQSPCLECAEVKKSSLVPSTARSSPMKGCSRSSSYASTRSSSHSSQSPNPRASPRVRTIITCILXTRKRPRETKSSAKVTHYYSSKSGKRSPPSRSSRSRRSPSYSRYSPSSPNSPADIPQNSHPQPSASTDRPHIQSPQFLPTHQGLRNIHVLTPAAPALLXCPPANADTPAQAQPPPLRYXQPSQTLTAAPSSSLRSPLRQRADPIPXPSGGAGSQIQWKDSQQRERERARRRRRSYSPMRKRRRDSPSHLEARRITSARKRPIPYYRPSPSSSGSLSSTSSWYSSSSSRSASRSYSRSRSRSRSRRRSRTRTSSSSSSRSPSPGSRSRSRSRSRSRSRSRSQSRSYSSADSYSSTRR

SEQ ID NO: 34452 - protein, 354 aa, Homo sapiens
MLLLELNAPEHVLETINFQTLTAFCNTFHILRPTKAPGFVYAWLELISHRIFIARMLAHTPQQKGWPMYAQLLIDLFKYLAPFLRNVELTKPMQILYKGTLRVLLVLLHDFPEFLCDYHYGFCDVIPPNCIQLRNLILSAFPRNMRLPDPFTPNLKVDMLSEINIAPRILTNFTGVMPPQFKKDLDSYLKTRSPVTFLSDLRSNLQVSNEPGNRYNLQLINALVLYVGTQAIAHIHNKGSTPSMSTITHSAHMDIFQNLAVDLDTEGRYLFLNAIANQLRYPNSHTHYFSCTMLYLFGRRANSGRPFQEQITRVLLERLIVNRPHPWGLLITFIELIKNPAFKFWNHEFVHCAP

SEQ ID NO: 34453 - protein, 328 aa, Homo sapiens
  misc_feature (1)...(328): Xaa = X or * as defined in Table 2
MQANLEMAGNGVTSMGMEPLAIPHIYCCSEGTCNFSNTENHCLRAALSMLLNGTPFAFVIDLAALASRREYLKLDKWLTDKIREHGPSVHGLFPSRVLSPALGPGAFPGRHNCGSCVAPQSGLPGVHPVELPWSISKLFRLRSPANFSDVLGSRSKVLLLMCTLKYCGMQLGADATRVDMLTFLPTLGFIRNNDYTDDTKASELTELSHNLHAYDSVTGVPGDETECSKTVSTWAYTAESLQGYMAAKLLGRNLTVPSRYLFLNAIANQLRYPNSHTHYFSCTMLYLFAEANTEAIQEQITRLVRERIXSXANAYWHSEKFYQFTCEL

SEQ ID NO: 34454 - protein, 132 aa, Homo sapiens
MAWEKRKENWGASEKPSVWGRRESIHGGWEDRDSTLAARGVTCDVRRRQAKVVVLPQPLQESCAAIHAAVLGTGDEPQADEVSLLERARKSEARRSGSCWKYCRPFLLDCRHSDRVHKSQSAALNPVGVAVF

SEQ ID NO: 34455 - protein, 288 aa, Homo sapiens
  DOMAIN (122)..(174): RECEPTOR CELL NK GLYCOPROTEIN IMMUNOGLOB domain identified by eMATRIX, accession number PD01652B, p-value=6.838e-16, raw score of 8.50
  DOMAIN (53)..(204): Immunoglobulin domain identified by PFam, accession name ig, E-value=0.00049, PFam score of 18.0
  misc_feature (1)...(288): Xaa = X or * as defined in Table 2
MANVCNPSTLGGRGGRITRRPEDPGSPVYSVPPASYHPKPWLGAQPATVVTPGVNVTLRCRAPQPAWRFGLFKPGEIAPLLFRDVSSELAEFFLEEVTPAQGGIYRCCYRRPDWGPGVWSQPSDVLELLVTEELPRPSLVALPGPVVGPGANVSLRCAGRLRNMSFVLYREGVAAPLQYRHSAQPWADFTLLGARAPGTYSCYYHTPSAPYVLSQRSEVLVISWETLAPPTTPGGTXSAWGWPGWSSSPWARWSLLTGAVRTALLLFPQVPHRATTPWVTSYDWVWLP

SEQ ID NO: 34456 - protein, 90 aa, Homo sapiens
  DOMAIN (45)..(73): MYOSIN HEAVY CHAIN SIGNATURE domain identified by eMATRIX, accession number PR00193C, p-value=1.409e-31, raw score of 12.60
  DOMAIN (1)..(90): Myosin head (motor domain) domain identified by PFam, accession name myosin_head, E-value=2.6e-53, PFam score of 186.1
CVIISGESGAGKTVAAKYIMGYISKVSGGGEKVQHVKDIILQSNPLLEAFGNAKTVRNNNSSRFGKYFEIQFSRGGEPDGGKISNFLLEK

SEQ ID NO: 34457 - protein, 240 aa, Homo sapiens
  DOMAIN (11)..(37): MYOSIN HEAVY CHAIN SIGNATURE domain identified by eMATRIX, accession number PR00193B, p-value=8.085e-20, raw score of 11.69
  DOMAIN (12)..(67): Myosin head (motor domain) domain identified by PFam, accession name myosin_head, E-value=2.1e-28, PFam score of 99.9
MCRKMLIVCQTQCVIISGESGAGKSVAAKYIMGYISKVSGGGEKVQHVKDIILQSNPLLEAFGNAKTGLPGAKAEPGPHDTGLLYYLNQSDTYQVDGTDDKATLANHNLRELDLSFTTWETGACGCWLRGCNIRLQTPETVASRRLGPLNGYGHPSPEGDSPSVKGGKSVQIGEIVEKRHKTKREKKRQLGLGDTTTKTWRPVVAPNAWPAVIYCIRGKRAGRRSQVCERNVKVDQERDR

SEQ ID NO: 34458 - protein, 154 aa, Homo sapiens
  misc_feature (1)...(154): Xaa = X or * as defined in Table 2
GRALCPPRLLAAGRVLGPGRRSPGPGPGVPGGXRXGGAEPRPGAPRGRVLPPSAGSGQFSAATPAQNGLPALRGPGSRPGIRSKAVRPVPLGRVGVYFRDALRASGQSGRKLCCIGNTLSPTSFSVGKEVPRKHETNQKHEKGILCMEAVKPQK

SEQ ID NO: 34459 - protein, 548 aa, Homo sapiens
  DOMAIN (415)..(457): Peptidase family M20/M25/M40 domain identified by PFam, accession name Peptidase_M20, E-value=3.1e-05, PFam score of 21.5
  misc_feature (1)...(548): Xaa = X or * as defined in Table 2
MWRWLYAGARMTVRDKQPLEQMLAGCTHASLVPTQLWRLLVNRSSVSLKAVLLGGAAIPVELTEQARDMGIRCFCGYGLTEFASTVCAKEADGLADVGSPLPGREVKIVNNEVWLRAASMAEGYWRNGQLVSLVNDEGWYATRDRREMHNGKLTIVGRLDNLFFSGGEGIQPEEVERVIAAHPAVLQVFIVPVADKEFCHRPVAVMEYDHESVDLSEWVKDKLARFQHLVRWLTLPAEPKNGGIKFHVSAKRVGALTTRMEAAQQHADDKIRQMINSEQRLSEQFENLANRIFEHSNRRVDEQNRQSLNSLLSPLREQLDGFRRQFRTASLMKVAGWDYLMNSLYNANSSALVNRVRYKWIAAFEGGFTGIVATLDTGRPGPVMAFRVDMDALDLSEEQDVSHRPYRDGFASCNAGMMHACGHDGHTAIGLGLAHTLKQFESGLHGVIKLIFQPAEEVRVARGRWSMQVSXMMLIILLPCTLALAYLRALLCAAVIILWQPPNLTRTSPVPPLTQAQNQKTVTMPCWRHTSHSCTACNRPAQRRSFQS

SEQ ID NO: 34460 - protein, 88 aa, Homo sapiens
TGRSTIRRQRREPRRKAATLRFDRNGCRARCTPPGRKEQRYQQTADGDKGAEFYRRPEGVEIVAVMEQRDEVIQADKLAGETKRIDAL

SEQ ID NO: 34461 - protein, 161 aa, Homo sapiens
HSNAAPTARSSFVQNTPSSCGYSRRAWRISSIPEETDRTSYRNIQCGNHPPVPARLPAGQTGDGDIPPRPRWQSPQTAPRKPPDLPLIRKNKIPMFRSATTQPGLTGTIAKASSSEVKAIIGARVKMTRSENFGIQSSLKNILIMSATSWSEPPQPTRLGP

SEQ ID NO: 34462 - protein, 265 aa, Homo sapiens
  misc_feature (1)...(265): Xaa = X or * as defined in Table 2
VGGGRNRSPGVACWVEDGNGDAVRDGWALDADWQASQAMRRKQQPEYWQHDAATADADRQMNMPVLHRALVAGRAQEMNGAQGKTLLKGWDEASARRGTKTEDFCEEDTRDDAMIAWMPRXPGVLPRADAWANVLNHGVGWKKAQLKSTWMPQVQQXWRGDKAANSNAAVAHTVVLLNSGGDATQTAAFPISSPLSVEEVCVTMVIAXFWMWDSGSGGVVLCSSSGRSLTSWSATKVRGSGHKGRWCSRQGVTCQVRHGGHVAPH

SEQ ID NO: 34463 - protein, 297 aa, Homo sapiens
  DOMAIN (43)..(80): 4 kw PHOSPHATASE TRANSFORMING 61K PDF1 domain identified by eMATRIX, accession number DM01111B, p-value=1.000e-40, raw score of 9.44
QERDGAKMAAADGDDSLYPIAVLIDELRNEDVQLRLNSIKKLSTIALALGVERTRSELLPFLTDTIYDEDEVLLALAEQLGTFTTLVGGPEYVHCLLPPLESLATVEETVVRDKAVESLRAISHEHSPSDLEAHFVPLVKRLAGGDWFTSRTSACGLFSVCYPRVSSAVKAELRQYFRNLCSDDTPMVRRAAASKLGEFAKVLELDNVKSEIIPMFSNLASDEQDSVRLLAVEACVNIAQLLPQEDLEALVMPTLRQAAEDKSWAVRYMVADKFTELPESQWGLRSPRQTWSLPSRT

SEQ ID NO: 34464 - protein, 380 aa, Homo sapiens
  misc_feature (1)...(380): Xaa = X or * as defined in Table 2
KHTYMLSILKPVRTSALPPPAPAQTLCTQLSRVSSRLLXDHPSRWGLRPSTGMSQARACSPGSLGWMQRSSFTPGAGRVRHIPNSAGSTRRPACGSRSAAAPVRPCRRTRXGRSSVVERFMTALSLACRALPGPXAAPGPSITRRFTISAELKDTRLPREHVVPLVCTHAIAVPDRGAAVRPTRRRDAAAPPSPLVGDVTLQCPSQXRGSNAPDQVRLPCVGXRPRSSLQRSGLSVFSADGSTSGPEPASGRKDAGWPARVLRFGTLSRGAPEAGADWGPYSPGSPGAAASGAPWLGQPQALQGAGGQLVGSENGERGTGTKPRVSVSVAYGEIALPADTSWSSRAGAAVLLGLSRSTGGEGPGNMGHGGQSQMLTLEVL

SEQ ID NO: 34465 - protein, 192 aa, Homo sapiens
  misc_feature (1)...(192): Xaa = X or * as defined in Table 2
PLEMELNLISIEVWGERLGISTGTEKMPTLKHRTWPVECSKASSLEGDLRSLSXLEVISAFSADPASADDSPGCWKKKDDCSMVHLHRQEWQQQQCCQXKXRKQPPGERRNKCGSHPVCGTVLWQPXQTHQISSCPTVGCPPSHSSFSILDGANAGQEKQSTTEPEPALFLLPPSRGAFGPFGLLSDLRRQL

SEQ ID NO: 34466 - protein, 158 aa, Homo sapiens
MLGGSRPLFFVVHQALALGRVLFRCQQPPPLFPKPDCKWLLTIDDNFCGLDMNAPLGVSDMVRGIPVFTEDRDRMTSVIAYVYKNHSLAFVGTKSGKLKKRRHTQTMHIRDLLERLCGGLQGGGSNTENTTMILALIRLCNRCASVSSLLICVQCYPM

SEQ ID NO: 34467 - protein, 51 aa, Homo sapiens
  misc_feature (1)...(51): Xaa = X or * as defined in Table 2
ASCMASVDISVLTCMWRCTIEQSSSFLCLLTPLWEXSWCHVTRICPFISLG

SEQ ID NO: 34468 - protein, 276 aa, Homo sapiens
  misc_feature (1)...(276): Xaa = X or * as defined in Table 2
MGRPDLILSSILGLRWLLLPQSSRAGRRGAIREASDAEQVTFSGGTVPARTSSGREWRSLLGPDMETTSLFCIDTKTTFLFVYRYGDHIPLVPEQSGLEPLLIWADPGLFHVRLFHLLTIDDNFCGLDMNAPLGVSDMVRGIPVFTEDRDRMTSVIAYVYKNHSLAFVGTKSGKLKKVRSSAAPXVWDQDTPRSLGQQGAQRQPILRQCVYTFFQLNXRCPHSTARRELRTGGFIPTRSHQDGLRSAARCTQGTTQXASWSCVHVCASVRAMCSYC

SEQ ID NO: 34469 - protein, 77 aa, Homo sapiens
  misc_feature (1)...(77): Xaa = X or * as defined in Table 2
NFGAMTRIRDLPWEINPLSSCSSLCEKDPPTTSSPQTNXPKEHHTNFQSETGDEFYPWTQNFSTGHGLGKTVFPWCL

SEQ ID NO: 34470 - protein, 21 aa, Homo sapiens
SFGSTDKTHLLSWAVWPFSRY

SEQ ID NO: 34471 - protein, 89 aa, Homo sapiens
RNFGAMTRIRDLPWEINPLSSCSLLREKDPPTTSGPQTNQPKKHLTNFKSGKRPLLTLFSNLSHCPSTTFFFPFFNLSLLLISIPFIFW

SEQ ID NO: 34472 - protein, 109 aa, Homo sapiens
  DOMAIN (74)..(83): Vesiculovirus phosphoprotein domain identified by eMATRIX, accession number PF00922D, p-value=9.514e-09, raw score of 7.11
  misc_feature (1)...(109): Xaa = X or * as defined in Table 2
ASHSWQTLQHSGRYSRSSGSAGSPRDCAARAPTISPGCAMAWLNLDSISPSSQSKASPLSQLTCPETSYTGCPXSAPHSPPPPWCPQERCACKGHCLHHRDGCCGYGYN

SEQ ID NO: 34473 - protein, 111 aa, Homo sapiens
  DOMAIN (56)..(105): Eukaryotic RNA polymerase II heptapeptide repeat proteins domain identified by eMATRIX, accession number BL00115Z, p-value= 2.515e-18, raw score of 3.12
SILTRKCKYGMEIPTNIPGLGAAGPTGMFFGSAPSPMGGISPAMTPWNQGATPAYGAWSPSVGSGMTPGAAGFSPPKAPTYSPTSPGYSPTSPTYSLTSPAISPDDSDEEN

SEQ ID NO: 34474 - protein, 419 aa, Homo sapiens
  DOMAIN (152)..(195): Eukaryotic RNA polymerase II heptapeptide repeat proteins domain identified by eMATRIX, accession number BL00115M, p-value= 1.000e-40, raw score of 19.19
  DOMAIN (73)..(339): RNA polymerase alpha subunit domain identified by PFam, accession name RNA_pol_A, E-value=5.9e-130, PFam score of 365.9
  misc_feature (1)...(419): Xaa = X or * as defined in Table 2
MDNKFGVEQPEGDEDLTKEKGHGGCGRYQPRIRRSGLELYAEWKHVNEDSQEKKILLSPERVHEIFKRISDEDDDLTHKLADIVKINNQLRRNEQNGAAAHVIAEDVKLLQFHVATMXKQIFSLIIPGHINCIRTHSTHPDDEDSGPYKHISPGDTKVVVENGELIMGILCKKSLGTSAGSLVHISYLEMGHDITRLFYSNIQTVINNWLLIEGNTLRQTFENQVNRILNDARDKTGSSAQKSLSEYNNFKSMVVSGAKGSKINISQDDYGPESRGFVENSYLAGLTPTEFFFHAMGGREGLIDTAVKTAETGYIQRRLIKSMESVMVKYDATVRNSINQEDLVKDVLSNAHIQNELEREFERMREDREVLRVIFPTGDSKVVLPCNLLRMIWNAQKIFHINPRLPSDLHPIKVVEEIY

SEQ ID NO: 34475 - protein, 61 aa, Homo sapiens
  misc_feature (1)...(61): Xaa = X or * as defined in Table 2
SFQQSAPWXASGQSCASDPAPPATARGRFGPHQSQAFHSRHSPIPDPLPPPCSGGWGHSRW

SEQ ID NO: 34476 - protein, 1089 aa, Homo sapiens
  DOMAIN (47)..(83): Eukaryotic RNA polymerase II heptapeptide repeat proteins domain identified by eMATRIX, accession number BL00115X, p-value= 5.500e-35, raw score of 21.13
  DOMAIN (428)..(992): Neurotransmitter-gated ion-channel domain identified by PFam, accession name neur_chan, E-value=4.2e-07, PFam score of 26.8
  misc_feature (1)...(1089): Xaa = X or * as defined in Table 2
MDDDVXPALHSSPXMLTDMTLQGIEQISKVYMHLPQTDNKKKIIITEDGEFKALQEWILETDGVSLMRVLSEKDVDPVRTTSNDIVEIFTVLGIEAVRKALERELYHVDVLMEAAAHGSGMTPGAAGFSPSAASDASGFSPGYSPAWSPTPGSPGSPGPSSPYIPSPGLVHRRDPRFSPQAELLVLRDGIREGSLDLGHAPLGPYARGPHYDAGFTLLVPMFSLDGTELQLDLESCYAQVCLPEMVCGTPIREMWQDCLGPPVPGARDSIHRTESEESSKDWQSSVDQPHSYVTEHEAPRRVCPRGTKSLCQKQLLILLSKLPRQPALYAPSSCDLRFKNGAGHPSHNPRATPKSGPLPPPISLPHFTAECRFKECVFENYYVLYASALYRQRRSGRAWYLGLDKEGQTSQTPPALTGSLAALVTLSSIQVTYFPFDWQNCTMVFSSYSYDSSEVRRYPEAYTSPPASSPPRVLELPGVPAAAFSDVLNFIYSARLALPGGGGDGAAVAEIGALGRRLGISRLQGLGEGGDAWCGKSFIHPKRLQTHEAQCRRGASTRGSTGLGAGGAGPGGPAGVDASALPPPVGFRGGPEHVVKRSYVTLSSLKRHSNVHSWRRKYPCRYCEKVFALAEYRTKHEVWHTGERSEKTPNGGYKPKLNTLKLYRLLPMRAAKRPYKTYSQGAPEAPLSPTLNTPAPVAMPASPPPGPPPAPEPGPPPSVITFAHPAPSVIVHGGSSSGGGGSGTASTGGSQAASVITYTAPPRPPKKREYPPPPPEPAATPTSPATAVSPATAAGPAIATTTEEAKGRNPRAGRTLTYTAKPVGGIGGGGGPPTGAGRGPSQLQAPPPLCQITVRIGEEAIVKRRISETDLRPGELSGEEMEESEEDEEEEDEEEEEEDEEESKAGGEDQLWRPYYSYKPKRKAGAAGAALSRHGQRHAAERPGGTPTPVIAYSKGSAGTRPGDVKEEAPQEMQVSSSSGGEEPPVVASGGSYVYPPVQEFPLALIGGGREPGGGRGKSGSEGPVGAGEGDRMEGIGAAKVTFYPEPYPLVYGPQLLAAYPYNFSNLAALPVALNMVLPDEKVLRRDGQ

SEQ ID NO: 34477 - protein, 437 aa, Homo sapiens
  DOMAIN (349)..(395): Eukaryotic RNA polymerase II heptapeptide repeat proteins domain identified by eMATRIX, accession number BL00115W, p-value= 1.000e-40, raw score of 21.01
  DOMAIN (1)..(123): RNA polymerase alpha subunit domain identified by PFam, accession name RNA_pol_A, E-value=6.1e-31, PFam score of 87.4
  misc_feature (1)...(437): Xaa = X or * as defined in Table 2
GKQIFSLIIPGHINCIRTHSTHPDDEDSGPYKHISPGDTKTVINNWLLIEGHTIGIGDSIADSKTYQDIQNTIKKAKQDVIEVIEKAHNNELEPTPGNTLRQTFENQVIAVVGQQNVEGKRIPXLPPPLXWGAGRREGVGXCGRFSEHSRSSAAGYRGGRPCCPSWEDDPGAPPDPPASAQIPAPTRSGCVRCSARPSPGPPAECAAGPSHWYNQSGTSSQKPCWKAXAYPGSGTQRSRGSQARSHPXXSEAESGAXSQMESACPRRSAVQRQQXPDSQTSAAECSLGWAPAHCCVPSRXPLLRPAWPSXXCSECPGKSXNQQWSPQCQXYDPNPQSTVVAEDQEWVNVYYEMPDFDVARISPWLLRVELDRKHMTDRKLTMEQIAEKINAGFGDDLNCIFNDDNAEKLVLRIRIMNSDENKMQEVMGVLEVSVSHV

SEQ ID NO: 34478 - protein, 161 aa, Homo sapiens
  DOMAIN (96)..(116): INHIBIN ALPHA CHAIN SIGNATURE domain identified by eMATRIX, accession number PR00669D, p-value=2.779e-10, raw score of 7.36
HLPGGGVPGREGGSPDQHVAPGAVSGGAGGGSTRGRGSRRRRPGRPRPGPRQPRRGALPGGEHGLRASARCAARAQQRDPGTPSCSSWACPTPRRPWAPAASSRLRRPPRGPACATPPPCRPPARRTCTGRCPPSCCLCGSPTTWRRPPPTGGALESPKRR

SEQ ID NO: 34479 - protein, 376 aa, Homo sapiens
  DOMAIN (208)..(244): Synapsins proteins domain identified by eMATRIX, accession number BL00415B, p-value=3.978e-09, raw score of 9.91
  misc_feature (1)...(376): Xaa = X or * as defined in Table 2
SSRCQPVCESGHPGYGQSPAYTTAGRTESGGTGSTGDNHPLWPCIGGAPCPAQNTPHLRCVXRSHALALDSAGSSSPESPHXRASIPHTTLGQKRRSWAGTAHSPMAPCAAASISTSTXLSHHHSPAAQSVCPSSHTTPSFCPIQKFHCFRSPQRNTSXVVLCPGGXLRVGXWPSSGHDRSWYHTREPSVGNXHRSHQRRXRGTAPAPGPSARLQCPARGSRSSHSAPASSSRRPFPGSTPAGLGFPSARFPVGKPVVPAALMNRPTRGERRFAYWAPGWFFFSPVRRATADCPSPSWPXESCSKRSTLVCPSRRKSCLMVVPKSAKSPVLAKYGPVGHDHGTEHDVVLGEVQGKRPVAPTMGTPKHKAVHPRAPH

SEQ ID NO: 34480 - protein, 104 aa, Homo sapiens
  DOMAIN (3)..(31): Eukaryotic RNA polymerase II heptapeptide repeat proteins domain identified by eMATRIX, accession number BL00115G, p-value= 2.000e-34, raw score of 11.65
  DOMAIN (1)..(104): RNA polymerase alpha subunit domain identified by PFam, accession name RNA_pol_A, E-value=7.2e-73, PFam score of 205.3
MGKRVDFSARTVITPDPNLSIDQVGVPRSIAANMTFAEIVTPFNIDSVTTPYNADFDGDEMNLHLPQSLETRAEIQELAMVPRMIVTPQSNRPVMGIVQDTLTA

SEQ ID NO: 34481 - protein, 161 aa, Homo sapiens; identical to SEQ ID NO: 34478
  DOMAIN (96)..(116): INHIBIN ALPHA CHAIN SIGNATURE domain identified by eMATRIX, accession number PR00669D, p-value=2.779e-10, raw score of 7.36

SEQ ID NO: 34482 - protein, 82 aa, Homo sapiens
CGRFSEHSRSSAAGYRGGRPCCPSWEDDPGAPPDPPASAQIPAPTRSGCVRCSARPSPGPPAECAAGPSHWYNQSGTWKCKG

SEQ ID NO: 34483 - protein, 171 aa, Homo sapiens
  DOMAIN (107)..(156): Eukaryotic RNA polymerase II heptapeptide repeat proteins domain identified by eMATRIX, accession number BL00115Z, p-value= 1.000e-40, raw score of 3.12
  misc_feature (1)...(171): Xaa = X or * as defined in Table 2
SPSVGSGMTPGAAGFSPSAASDASGFSPGYSPAWSPKPGVPGVPQVPSKPLKSLHPGGVVRHLSGQVCFLHSSGXVCPLLISFVGCFPTGGAMSPSYSPTSPAYEPRSPGGYTPQSPSYSPTSPSYSPTSPSYSPTSPNYSPTSPSYSPTSPSYSPTSGSYSPTSPSYSPT

SEQ ID NO: 34484 - protein, 1395 aa, Homo sapiens
  DOMAIN (147)..(188): Eukaryotic RNA polymerase II heptapeptide repeat proteins domain identified by eMATRIX, accession number BL00115D, p-value= 1.000e-40, raw score of 19.94
  DOMAIN (169)..(818): RNA polymerase alpha subunit domain identified by PFam, accession name RNA_pol_A, E-value=0, PFam score of 1249.9
MTECPGHFGHIELAKPVFHVGFLVKTKKDLRCVCFFCSKLLVDSNNPKIKDILAKSKGQPKKRLTHVYDLLKGKNICEGGEEMDNKFGVEQPEGDEDLTKEKGHGGCGRYQPRIRRSGLELYAEWKHVNEDSQEKKILLSPERVHEIFKRISDEECFVLGMEPRYARPEWMIVTVLPVPPLSVRPAVVMQGSARNQDDLTHKLADIVKINNQLRRNEQNGAAAHVIAEDVKLLQFHVATMVDNELPGLPRAMQKFWASPQSLKQWLKGKEGRVRGNLMGKRVDFSGRTVITADPNLSIDQVGVPRSIAANMTFAEIVTPFNIDRLQELVRRGNSQYPGAKYIIRDNGDRIDLRFHPKPSDLHLQTGYKVKRHMCDGDIVIFNRQPTLHKMSMMGHRVRILPWSTFRLNLSVTTPYNADFDGDEMNLHLPQSLETRAEIQELAMVPRMIVTPQSNRPVMGIVQDTLTAVRKFTKRDVFLERGEVMNLLMFLSTWDGKVPQPAILKPRPLWTGKQIFSLIIPGHINCIRTHSTHPDDEDSGPYKHISPGDTKVVVENGELIMGILCKKSLGTSAGSLVHISYLEMGHDITRLFYSNIQTVINNWLLIEGHTIGIGDSIADSKTYQDIQNTIKKAKQDVIEVIEKAHNNELEPTPGNTLRQTFENQVNRILNDARDKTGSSAQKSLSEYNNFKSMVVSGAKGSKINISQVIAVVGQQNVEGKRIPFGFKHRTLPHFIKDDYGPESRGFVENSYLAGLTPTEFFFHAMGGREGLIDTAVKTAETGYIQRRLIKSMESVMVKYDATVRNSINQVVQLRYGEDGLAGESVEFQNLATLKPSNKAFEKKALRRTLQEDLVKDVLSNAHIQNELEREFERMREDREVLRVIFPTGDSKVVLPCNLLRMIWNAQKIFHINPRLPSDLHPIKVVEGVKELSKKLRSVRLSGEAFDWLLGEIESKFNQAIAHPGEKVGALAAQSLGEPATQMTLNTFHYAGVSAKNVTLGVPRLKELINISKKPKTPSLTVFLLGQSARDAERAKDILCRLEHTTLRKVTANTAIYYDPNPQSTVVAEDQEWVNVYYEMPDFDVARISPWLLRVELDRKHMTDRKLTMEQIAEKINAGFGDDLNCIFNDDNAEKLVLRIRIMNSDENKMQEEEEVVDKMDDDVFLRCIESNMLTDMTLQGIEQISKVYMHLPQTDNKKKIIITEDGEFKALQEWILETDGVSLMRVLSEKDVDPVRTTSNDIVEIFTVLGIEAVRKALERELYHVISFDGSYVNYRHLALLCDTMTCRGHLMAITRHGVNRQDTGPLMKCSFEETVDVLMEAAAHGESDPMKGVSENIMLGQLAPAGTGCFDLLLDAEKCKLNLLLPLPLFIGPTSHHYNSHKAAFSAPDDSDEEN

SEQ ID NO: 34485 - protein, 146 aa, Homo sapiens
  misc_feature (1)...(146): Xaa = X or * as defined in Table 2
MYGRVLPILPKLRDAQLAKISQTNLLQYLQSPQQVQDIILPLVRGTHPNPIPEQTGPCHSFPPGDLLFVKKFQREGLPPAWKRPHTVITMPTALKVDGXXXXXXXXXXXXXXXXXXXXXXXXXXXXXXXXXXXXXXXXXXXXXLIL

SEQ ID NO: 34486 - protein, 1015 aa, Homo sapiens
  DOMAIN (371)..(552): Gag P30 core shell protein domain identified by PFam, accession name Gag_p30, E-value=1.9e-59, PFam score of 210.9
  misc_feature (1)...(1015): Xaa = X or * as defined in Table 2
MDSETRRTAKVRLLMTVLRDQDRVSGVQAHPEQFQQAICPLCGVSLTRSGTTFGSPSEIYSPLGESRASSGLPRRDGRLIGEEPPEKKFSRSPKGDLSSGGQRIDYRVCVPTKFNLXVLSFXPRGQGAGGQSPGFSVRRLLVLVWSSGTFVXNGKXQKLLXTLCECVHDXGVQGPASGSPVCSSTAKATEFEKDPSGPFSSSSLPLTPYISFSRVTASSASPGLGSALTPQTLKRKGRIXAICLXVVETPKVFRLQVQGKRERRLGPSSQGDLRSFWSQTALPPGPSVCSAHPVLPPSEEEESLPHSVPPPYNRPAPLESSHCLLDYIPCRLAAYCLRLRPRQEEVAPPLPRKEAQVPPGDERSAPFLVYVPFSPSDLCNWKAHNPPFSEKPQVLISLMESVLRTHRPTWDDCQQLLLTLFTSEEREHIRREARKYFLTSANRPEEEARDFLEEVFPSTRPRLAHEFLGXEESCWTIFTGISLQNASRRPIGLTPLLYPAAPENSRALNLAFVAQAAPDIKRKLQKLEGFPGMNITQLLEIAQKVFDNREFEKRKQTAQAAADKAYKRQAKILAAAIGEEPTVTATVRGQPVRFLVATGAEHSVLQTPLGSVSNKRVAVQRSTGAIQEYPVTALTRRARVSSLSQEGPALSSHSVLPRIRHKPRKKGTHQCPERSHPTNPHSHHQETGGSSFLKTGRRKAGAAITTKTDVLWAQALPANTSAQKAELIALTQALRWGKDKLINIYTDSRSVGTSAGKTIKNKEEILALLEAVWLPQQVAVIHCKGHPGENTAIARGNQKADSAARDAARLPVMPLNLLPTVSFPQPDLPYNPAYSTEEKKLASDLRANKNQEVLVDTFSVWTEAFATKNETATMVVRFLLNEIIPRHGLPAAIGSDNGLAFTSSIAQSVSKALHIQWKLHCAYRPQSSGQVQDIIQPLFRGAHPNPVPDQMGPCHSFQPGDLVFVKKFQREGLTPAYIGPHTVILTMPTALKVDGIPAWIRHSRIKKANKAQQET

SEQ ID NO: 34487 - protein, 257 aa, Homo sapiens
  DOMAIN (32)..(197): GTPase-activator protein for Ras-like GTPase domain identified by PFam, accession name RasGAP, E-value=1.1e-07, PFam score of 20.1
MVARAFLWSQVIRRLGRKGGLSQGDRGCNTALAEGRLDPDLTRGHPALCLPRRPAPRPAEVRREGEAEQPEAGQPPGAAPRRARDNGAAAAAAGGRLLQSVRPAVVCPHPGPQASYGLRYIAKVLKNSIHEKFPDATEDELLKIVGNLLYYRYMNPAIVAPDGFDIIDMTAGGQNNSDQRKNLRSTAKVLQHAASNKLFEGENEHLSSMNNYLSETYQEFRFKNVTFDIIATEDVGIFDVRSKFLGVEMEKVQLNIQ

SEQ ID NO: 34488 - protein, 90 aa, Homo sapiens
  misc_feature (1)...(90): Xaa = X or * as defined in Table 2
YHRHDSWRNTRRXIKLDGKGEPKGAEESEATSKYTAAKLHEKGVLLDIDDLQTNQNAVNDFSVGPQDEVIVEDITNCYLCEIFKRYEWVT

SEQ ID NO: 34489 - protein, 204 aa, Homo sapiens
  misc_feature (1)...(204): Xaa = X or * as defined in Table 2
GTSHRGASQRRCCPPLSKTGPKTPCGKGAPSAPXQGGLDVQGEPGGKGDSSGECVGGNVAGLHKGGGTRADSQVPGGMRGGRMSYGGHLTAEGPMGRSGPRGAVPSLYPPGFSRGSCSRQYSGAHMPILTGHVGWSESSLDPPRAGQDRFLGTARPXGTSHRGASQRRCCPPLSKTGPKTPCGKGAPSAPFIPAGPTFDHKALM

SEQ ID NO: 34490 - protein, 114 aa, Homo sapiens
HCLSRASYKVREVQVCKSESASWSLNAHFNPAPLRDTPLLSVSKATPTSFLSGIPFPGAVSFLSSPAGSPPRLRGLPQASPRSFQLARGSSDSDSDSGSSGGSESYAGPGSTPL

SEQ ID NO: 34491 - protein, 693 aa, Homo sapiens
  misc_feature (1)...(693): Xaa = X or * as defined in Table 2
WIGGCPGSQPDATAIMGWTLAPHSSRCHRCCHYRCHCRCCLCPAEMTVGRPEGAPGGAEGSRQIFPPESFADTEAGEELSGDGLVLPRASKLDEVLSPQEEIDPTSDSTGSIYHTLLDLAQKGRWLSVWSLSFSLTQRVMKTSLKMRRTWRVSSKTRTGGWCRSSARRLXGVAPQGAADSLNNLPSNIPRPQTQPPSGSRPPSQHRSVSSWASSITVPRPFRMTLREARKKAEWLGSPASFEQERQRAQRQGEEEAECHRQFRAQPVPAHVYLPLYQEIMERSEARRQAGIQKRKELLLSSLKPFSFLEKEEQLKEAARQRDLAATAEAKISKQKATRRIPKSILEPALGDKLQEAELFRKIRIQMRALDMLQMASSPIASSSNRANPQPRTATRTQQEKLGFLHTNFRFQPRVNPVVPDYEGLYKAFQRRAAKRRETQEATRNKPFLLRTANLRHPQRPCDAATTGRRQDSPQPPATPLPRSRSLSGLASLSANTLPVHITDATRKRESAVRSALEKKNKADESIQWLEIHKKKSQAMSKSVTLRAKAMDPHKSLEEVFKAKLKENRNNDRKRAKEYKKELEEMKQRIQTRPYLFEQVAKDLAKKEAEQWYLDTLKQAGRRKTLXETRVKAPGLFKRKRPKSRIFPGSKKLQNSASEIQSRRLEGSLEQPASPRKVLEELSHQSPENLVSLA

SEQ ID NO: 34492 - protein, 129 aa, Homo sapiens
  DOMAIN (93)..(117): Myb DNA-binding domain proteins repeat proteins proteins domain identified by eMATRIX, accession number BL00037A, p-value= 6.400e-10, raw score of 16.68
NRLRQIIYLFSIALLSFWSQLQTFLFYFRSHKNLFLSKLQHGTQQQDLNKKERRVGTPQSTKKKKESRRATESRIPVSKSQPVTPEKHRARKRQAWLWEEDKNLRSGVRKYGEGNWSKILLHYKFNNRT

SEQ ID NO: 34493 - protein, 447 aa, Homo sapiens
  DOMAIN (384)..(408): Myb DNA-binding domain proteins repeat proteins proteins domain identified by eMATRIX, accession number BL00037A, p-value= 6.400e-10, raw score of 16.68
  DOMAIN (391)..(439): Myb-like DNA-binding domain identified by PFam, accession name myb_DNA-binding, E-value=3.4e-08, PFam score of 40.6
  misc_feature (1)...(447): Xaa = X or * as defined in Table 2
PGRTTRSMAEDVFLSAPIPRGCADGRDADPTEEHMAQTERNDEEQFECQELLXCHVQVGAPEEEEEEEEDAVLVAEAEAVAAGWMLNFLCLSLCRAFREGRSEDFRRTRNSAEAIIHGLCSLTACQLRTIYICQFLTRIAAGKTLDAQFENDERITPLESALMIWGSIEKEHDKLHEEIQNLIKIQAIAVCMENGNFKGAEEVFERIFGDPNSHMPFKSKLLMIISQKDTFHSFFQHFSYNHMMEKIKSYVNYVLSEKSSTFLMKAAAKVVESKRTRTITSQDKPSGNDVEMETEANLGYKKKCXLTNSLRXLNPQRVQYPYXGSHKNLFLSKLQHGTQQQDLNKKERRVGTPQSTKKKKESRRATESRIPVSKSQPVTPEKHRARKRQAWLWEEDKNLRSGVRKYGEGNWSKILLHYKFNNRTSVMLKDRWRTMKKLKLISSDSED

SEQ ID NO: 34494 - protein, 446 aa, Homo sapiens
  DOMAIN (380)..(404): Myb DNA-binding domain proteins repeat proteins proteins domain identified by eMATRIX, accession number BL00037A, p-value= 6.400e-10, raw score of 16.68
  DOMAIN (381)..(432): Myb-like DNA-binding domain identified by PFam, accession name myb_DNA-binding, E-value=0.00086, PFam score of 26.0
IPGSTISCLKGQYPSEPFNMAEDVSSAAPSPRGCADGRDADPTEEQMAETERNDEEQFERQELLECQVQVGAPEEEEEEEEEDAGLVAEAEAVAAGWMLDFLCLSLCRAFRDGRSEDFRRTRNSAEAIIHGLSSLTACQLRTIYICQFLTRIAAGKTLDAQFENDERITPLESALMIWGSIEKEHDKLHEEIQNLIKIQAIAVCMENGNFKEAEEVFERIFGDPNSHMPFKSKLLMIISQKDTFHSFFQHFSYNHMMEKIKSYVNYVLSEKSSTFLMKAAAKVVESKRTRTITSQDKPSGNDVEMETEANLDTRKRSHKNLFLSKLQHGTQQQDLNKKERRVGTLQSTKKKKESRRATESRIPVSKSQPVTPEKHRARKRQAWLWEEDKNLRSGVRKYGEGNWSKILLHYKFNNRTSVMLKARWRTMKKLKLISSDSEDWIVFVKL

SEQ ID NO: 34495 - protein, 126 aa, Homo sapiens
LTSGSRADQGEGQEEGAEGGRASSSSSSSSPRGPQHHPHLHGDPAEHRPGHPLCSPPDLTVAYQMPEVPAEDMSDPSFCSARQGGQRGLDSGPGAPWSSSHSPHSRFQEASHGACAGWRWCRQEEL

SEQ ID NO: 34496 - protein, 349 aa, Homo sapiens
  DOMAIN (187)..(198): BRAIN NATRIURETIC PEPTIDE SIGNATURE domain identified by eMATRIX, accession number PR00712B, p-value=8.773e-10, raw score of 5.39
  misc_feature (1)...(349): Xaa = X or * as defined in Table 2
SGQEVNKEDGQADVQQDHHADEDGVGDLARQPHLFHLHLRLCRQCGLLPRLLLGPRLGQPSSLSLAGLGPGLGFGDDGLGLQLGGGLACRLGASERGGLQRGGGRGRGRGLGPGGPRARAGPQRVGARAAWCAQHSCGSPGKAPPPAPATGAGGACRASMAMRSVAGRAGLRRPAPSDGVTDRLPSPLGSPFQAPEAQQAVLGHPGPGPLGLRGRPGRXRGATLGPRGLTPRAAAGSRGAAVGGPLRRRPGRGAPAGSPSSPGSPAAAGASDIPDLAGRSPEPAPWPKCEQCWTPGWQPGRPVPLPQLWPWRGLSISGSMPLGEGLEDGSDPMTPSCCLPGTTSEPGPS

SEQ ID NO: 34497 - protein, 244 aa, Homo sapiens
  DOMAIN (1)..(244): Myo-inositol-1-phosphate synthase domain identified by PFam, accession name Inos-1-P_synth, E-value=9.9e-29, PFam score of 108.9
SLTQAGTVSLGLDAEGQEVFVPFSAVLPMVAPNDLVFDGWDISSLNLAEAMRRAKVLDWGLQEQLWPHMEALRPRPSVYIPEFIAANQSARADNLIPGSRAQQLEQIRRDIRDFRSSAGLDKVIVLWTANTERFCEVIPGLNDTAENLLRTIELGLEVSPSTLFAVASILGGLCLSFNGSPQNTLVPGALELAWQHRVFVGGDDFKSGQTKVKSVLVDFLIGFRLQRPVSIVSYNHLGNNDGEN

SEQ ID NO: 34498 - protein, 237 aa, Homo sapiens
  DOMAIN (1)..(237): Myo-inositol-1-phosphate synthase domain identified by PFam, accession name Inos-1-P_synth, E-value=3.9e-07, PFam score of -73.9
  misc_feature (1)...(237): Xaa = X or * as defined in Table 2
MEKAPPQTQHEGLKSKEHLPEQTDEGKTEYRRVPSLRAVVLFRQRSCIENILRACVGLPPQNHMLLEHKMERPGPSLKRVGPVAATYPMLNKKGPLVWEVSPATLFAVASILEGCAFLNGSPQNTLVPGALELAWQHRVFVGGDDFKSGQTKVKSVLVDFLIGSGLKTMSIVSYNHLGNNDGENLSAPLQFRSKEVSRSNVVDDMVASNPMLYTPGEEPDHCRMGRNLPEXGSSLRS

SEQ ID NO: 34499 - protein, 148 aa, Homo sapiens
  misc_feature (1)...(148): Xaa = X or * as defined in Table 2
ECGARPGSSTRPPARLSPRLFCSAIRAALKTRPAPALACTWRTGXRASLPTTRCAGSGLGTCTAEGSEGCSHPGPLTGTGRQEACPGTAPAGSPSCLHPRGRPRPCPPGTLAPRMSCPWPRSPPLTRYLPSGENLQSKLESLNTSEKF

SEQ ID NO: 34500 - protein, 36 aa, Homo sapiens
  misc_feature (1)...(36): Xaa = X or * as defined in Table 2
MGIXXXXXXXXXXXXXXXXXXXXXXXXXXPXXXXPK

SEQ ID NO: 34501 - protein, 168 aa, Homo sapiens
  DOMAIN (113)..(130): Zinc finger C2H2 type, domain proteins. domain identified by eMATRIX, accession number BL00028, p-value=5.765e-14, raw score of 16.07
  DOMAIN (1)..(136): Zinc finger, C2H2 type domain identified by PFam, accession name zf-C2H2, E-value=1.6e-14, PFam score of 61.7
  misc_feature (1)...(168): Xaa = X or * as defined in Table 2
YKCEVCDKVFNQNXFLVCHNRCHTGKKPYSCYECGKTFSQTSSFTCYRRLHTGGKPYKCSEHNKTFGXNSALVIHKAIHTGENPCKCNECGKVFNQKAHLARHHRLHTREKPYKCEECEKVFSRKSHLERHKLKRGGVALVCXECPTVYQNTSCLRSLSCSYPMSLNG

SEQ ID NO: 34502 - protein, 2064 aa, Homo sapiens
  DOMAIN (1754)..(1774): w LOW TRANSPOSASE SAPA 12K domain identified by eMATRIX, accession number DM00475B, p-value=1.300e-15, raw score of 12.12
  DOMAIN (640)..(888): Rap/ran-GAP domain identified by PFam, accession name Rap_GAP, E-value=1.4e-99, PFam score of 344.3
MTTYRAIPSDGVDLAASCGARVGDVLPGPHTGDYAPLGFWAQNGSMSQPLGESPATATATATATTRPSPTTPAMPKMGVRARVADWPPKREALREHSNPSPSQDTDGTKATKMAHSMRSIQNGQPPTSTPASSGSKAFHRLSRRRSKDVEFQDGWPRSPGRAFLPLRHRSSSEITLSECDAEDAGEPRGARHTGALPLFREYGSTSSIDVQGMPEQSFFDILNEFRSEQPDARGCQALTELLRADPGPHLMGGGGGAKGDSHNGQPAKDSLLPLQPTKEKEKARKKPARGLGGGDTVDSSIFRKLRSSKPEGEAGRSPGEADEGRSPPEASRPWVCQKSFAHFDVQSMLFDLNEAAANRVSVSQRRNTTTGASAASAASAMASLTASRAHSLGGLDPAFTSTEDLNCKENLEQDLGDDNSNDLLLSCPHFRNEIGGECERNVSFSRASVGSPSSGEGHLAEPALSAYRTNASISVLEVPKEQQRTQSRPRQYSIEHVDLGARYYQDYFVGKEHANYFGVDEKLGPVAVSIKREKLEDHKEHGPQYQYRIIFRTRELITLRGSILEDATPTATKHGTGRGLPLKDALEYVIPELNIHCLRLALNTPKVTEQLLKLDEQGLCRKHKVGILYCKAGQSSEEEMYNNEEAGPAFEEFLSLIGEKVCLKGFTKYAAQLDVKTDSTGTHSLYTMYQDYEIMFHVSTLLPYTPNNRQQLLRKRHIGNDIVTIIFQEPGALPFTPKNIRSHFQHVFIIVRVHNPCTDNVCYRAKITSQAWALGFKDQEARVMAQRKVGGKQGLPVECAISEWPPASSLQPVDSQNPVPPAGNMAVTRSKDAPPFGPPIPSGTTFRKSDVFRDFLLAKVINAENAAHKSDKFHTMATRTRQEYLKDLAENCVSNTPIDSTGKFNLISLTSKKKEKTKARAGAEQHSAGAIAWRVVAQDYAQGVEIDCILGISNEFVVLLDLRTKEVVFNCYCGDVIGWTPDSSTLKIFYGRGDHIFLQATEGSVEDIREIVQRLKVMTSGWETVDMTLRRNGLGQLGFHVKYDGTVAEVEDYGFAWQAGLRQGSRLVEICKVAVVTLTHDQMIDLLRTSVTVKVVIIPPFEDGTPRRGKSRPDNPTGKCPGGYAPRGRTCTPLHTLPRVHTISQLAHRMTLTPNMQALIDVHIVIVPHLVPGETLAAASPKGQPEDTAKCQFQPWRYRGVRGWPETYDMNTSEPKTEQESITPGGRPPYRSNAPWQWSGPASHNSLPASKWATPTTPGHAQSLSRPLKQTPIVPFRESQPLHSKRPVSFPETPYTVSPAGADRVPPYRQPSGSFSTPGSATYVRYKPSPERYTAAPHPLLSLDPHFSHDGTSSGDSSSGGLTSQESTMERQKPEPLWHVPAQARLSAIAGSSGNKHPSRQDAAGKDSPNRHSKGEPQYSSHSSSNTLSSNASSSHSDDRWFDPLDPLEPEQDPLSKGGSSDSGIDTTLYTSSPSCMSLAKAPRPAKPHKPPGSMGLCGGGREAAGRSHHADRRREVSPAPAVAGQSKGYRPKLYSSGSSTPTGLAGGSRDPPRQPSETGGKVSEGAEAWICMGGRGPELEDKATVDVAAGGIARNDMGSRVGYPAQVYKTASAETPRPSQLAQPSPFQLSASVPKSFFSKQPVRNKHPTGWKRTEEPPPRPLPFSDPKKLVIGEQMIDVLGPEKRRRRTTQEKIAIVQQSFEPGMTVSLVARQHGVAASQLFLWPIPGRKFYLLSPAGKQVVPASELAAAMKQIKELQRLLGKKTMENELLKEAVEYGRAKKWIAHAPLLPGDGERTDDWMDGRRSRHTDDTDVLLRIHHVIGELPTYGYRRVWALLRRQAELDGMPAINAQRVYRIMRQNALLLERKPAVPPSKRAHTGRVPVKESNQRWCSDGFEFCCDNGERLRVTFALDCCDREALHWAVTTGGFNSETVQDVMLGAVERRFGNDLPSSPVEWLTDNGSCYRANETRQFARMLGLEPKNTAVRSPESNGIAESFVKTIKRDYISIMPKPDGLTAAKNLAEAFEHYNEWHPHSALGYRSPREYLRQRACNGLSDNRCLEI

SEQ ID NO: 34503 - protein, 1129 aa, Homo sapiens
  DOMAIN (1076)..(1116): HSF-type DNA-binding domain proteins domain identified by eMATRIX, accession number BL00434C, p-value=7.111e-09, raw score of 23.85
  DOMAIN (1)..(176): Rap/ran-GAP domain identified by PFam, accession name Rap_GAP, E-value=9.9e-106, PFam score of 364.7
FLSLIGEKVCLKGFTKYAAQLDVKTDSTGTHSLYTMYQDYEIMFHVSTLLPYTPNNRQQLLRKRHIGNDIVTIIFQEPGALPFTPKNIRSHFQHVFIIVRVHNPCTDNVCYSMAVTRSKDAPPFGPPIPSGTTFRKSDVFRDFLLAKVINAENAAHKSDKFHTMATRTRQEYLKDLAENCVSNTPIDSTGKFNLISLTSKKKEKTKARAGAEQHSAGAIAWRVVAQDYAQGVEIDCILGISNEFVVLLDLRTKEVVFNCYCGDVIGWTPDSSTLKIFYGRGDHIFLQATEGSVEDIREIVQRLKVMTSGWETVDMTLRRNGLGQLGFHVKYDGTVAEVEDYGFAWQAGLRQGSRLVEICKVAVVTLTHDQMIDLLRTSVTVKVVIIPPFEDGTPRRGWPETYDMNTSEPKTEQESITPGGRPPYRSNAPWQWSGPASHNSLPASKWATPTTPGHAQSLSRPLKQTPIVPFRESQPLHSKRPVSFPETPYTVSPAGADRVPPYRQPSGSFSTPGSATYVRYKPSPERYTAAPHPLLSLDPHFSHDGTSSGDSSSGGLTSQESTMERQKPEPLWHVPAQARLSAIAGSSGNKHPSRQDAAGKDSPNRHSKGEPQYSSHSSSNTLSSNASSSHSDDRWFDPLDPLEPEQDPLSKGGSSDSGIDTTLYTSSPSCMSLAKAPRPAKPHKPPGSMGLCGGGREAAGRSHHADRRREVSPAPAVAGQSKGYRPKLYSSGSSTPTGLAGGSRDPPRQPSDMGSRVGYPAQVYKTASAETPRPSQLAQPSPFQLSASVPKSFFSKQPVRNKHPTGWKRTEEPPPRPLPFSDPKKQVDTNTKNVFGQPRLRASLRDLRSPRKNYKSTIEDDLKKLIIMDNLGPEQERDTGQSPQKGLQRTLSDESLCSGRREPSFASPAGLEPGLPSDVLFTSTCAFPSSTLPARRQHQHPHPPVGPGATPAAGSGFPEKKSTISASELSLADGRDRPLRRLDPGLMPLPDTAAGLEWSSLVNAAKAYEVQRAVSLFSLNDPALSPDIPPAHSPVHSHLSLERGPPTPRTTPTMSEEPPLDLTGKVYQLEVMLKQLHTDLQKEKQDKVVLQSEVASLRQNNQRLQEESQAASEQLRKFAEIFCREKKEL

SEQ ID NO: 34504 - protein, 294 aa, Homo sapiens
  misc_feature (1)...(294): Xaa = X or * as defined in Table 2
GEEAALSLCMHSTDDATRLGARDTEPLWHVPAQARLSAIAGSSGNKHPSRQDAAGKDSPNRHSKGSKPSAGSLRLSSREGEDRTAWTGPRGAVEQEVTGPDLCXGRGQQGLLVGWTXXEQKRGQGKPQYSSHSSSNTLSSNASSSHSDDRWFDPLDPLEPEQDPLSKGCMSLAKAPRPAKPHKPPGSMGLCGGGREAAGRSHHADRRREVSPAPAVAGQSKGYRPKLYSSGSSTPTGLAGGSRDPPRQPSTLWHRTWYLYHTASAAVHRGLCRELEQADQIPPSWYGRRPMGNS

SEQ ID NO: 34505 - protein, 71 aa, Homo sapiens
  misc_feature (1)...(71): Xaa = X or * as defined in Table 2
XGCESQKTLRRGTSWGLDARGGGPGPGQVSAGRDGAEVWLSTCDRGHALSGSVEELLFLQNALGRNVRKAL

SEQ ID NO: 34506 - protein, 145 aa, Homo sapiens
  misc_feature (1)...(145): Xaa = X or * as defined in Table 2
RRGCESHKTLRRGTSWGLDARGGGPGPGQVSAGRDGAEVWLSTCDRGHALSGSVEELLFLQNGARTERXEGPGEWPRPPPPGLASPALWRFWAEQVGGSFQELESPSCRTARGSSRTWGSILQNSSWLFQDLGLHLAEGCFLETP

SEQ ID NO: 34507 - protein, 288 aa, Homo sapiens
  misc_feature (1)...(288): Xaa = X or * as defined in Table 2
KITRHCTAPGKIRIVPKESQESTPQQDGAPGPGRATSCSARWSPRSWKSHELFCKMEPQVLEEPRAVLQDGAPGPGRATSCSARKGRGPEKPVQGLPNGSVRAHSGGRAAPQPSPRGHGPGRGXTAAPLPHLCPLTPVLLQGXGPDXWPLGWATMRPLPLRAQPAPPPPHWMLLTPSAPPPGTGKPQGGRGQTSGSCVPATDPHCRLSAPSPGKLGPPCDFLEPPXQRTTNWGSSEAGSPKSRCPRGHVPSGGSKGGIFLSLHFPGAPQSLEFPGSQPHGLIGASVSA

SEQ ID NO: 34508 - protein, 209 aa, Homo sapiens
  misc_feature (1)...(209): Xaa = X or * as defined in Table 2
MGVLTPGSQLGDFSLQQAMPLTFLPCLGEAAGSCKREVPFLQASSLLCSQYPHLSPRPQGPSSSPTITSLVDSPSTAKQNSPGSPMPRLVLTVCVSQTQANARAIHRLRKQLVWQVQEKWHLVEDLSRLLPEPGPSDSPGPKYPASTSFAPAVLLPRMPIALAPRSTRPRVRAPPSWMPRDCVPLALDSTHLAAPKGTAYLEPGFASTX

SEQ ID NO: 34509 - protein, 328 aa, Homo sapiens
FASERMKVEPWRAGPGRRAWSEGAGQAPQKRARAGAEPQLPATPALPGGKMVARRTKLARGTRRTYPEPTVYAAIPIKFSEKQQASHYLYVRAHGVRQGTKSTWPQKRTLFVLNVPPYCTEESLSRLLSTCGLVQSVELQEKPDLAESPKESRSKFFHPKPVPGFQVAYVVFQKPSGVSAALALKGPLLVSTESHPVKSGIHKWISDYADSVPDPEALRVEVDTFMEAYDQKIAEEEAKAKEEEGVPDEEGWVKVTRRGRRLCSPGLRQPACGCWRGRDGSAAKRAAQLLRLAASREQDGASSAARKKFEEDKQRIELLRAQRKFRPY

SEQ ID NO: 34510 - protein, 119 aa, Homo sapiens
  misc_feature (1)...(119): Xaa = X or * as defined in Table 2
GTMVARRTKLARGTRRTGIPSPPCXAAIPIMCSEKQQASHYLYGRAHGIQQGTKSTWPHKRTIFAFNGPPYCSEQESLSCLQSTCGLVQSVKLKEKLELGWESRSKFFHPKPVPVTEEQ

SEQ ID NO: 34511 - protein, 70 aa, Homo sapiens
KSCGRRGMSLSKELALSSQPCRQRTGGPCREPQALAAMWPQGTASFSSEIRPQASPATPAVPATPAVPAP

SEQ ID NO: 34512 - protein, 221 aa, Homo sapiens
  misc_feature (1)...(221): Xaa = X or * as defined in Table 2
MAWQMMQLLLLALVTAAGSAQPRSARARTDLLNVCMNAKYHKTQPSPEDELYGQCSWRKNACSFTSTTQEAHKNTSHLYGFNWNHCGEMVPACKRHFIQDTCLYEXPPNLGPWIRRYAWLPGIQELAEELNFPGVSAGSNPSSSSIQGWVPGILEPEPFFSTKISQVDQSWRKEWVLNVPLCKEDCEQWWEDCRTSYTCKSNGHKGWNWTSGSNKCQVAAA

SEQ ID NO: 34513 - protein, 189 aa, Homo sapiens
  misc_feature (1)...(189): Xaa = X or * as defined in Table 2
MDMAWQMMQLLLLALVTAAGSAQPRSARARTDLLNVCMNAKHHKTQPSPEDEAVWPDPWMCKGSCRKTKSWNIHRKSKCEVGLAWEACSVSAGTGRGPGCGRWVGAPQGPCPRKCSSGXPTWVQRSQNMEEMAVVNQSWRKERILNVPLCKEDCERWWEDCRTSYTCKSNWHKGWNWTSAPSAVCDPLL

SEQ ID NO: 34514 - protein, 206 aa, Homo sapiens
QCRPWRKNACCSTNTSQEAHKDVSYLYRFNWNHCGKMAPDCKRHFHPGTPALYECAPHNLGAWDPAGWIQSWRKERVLNVPLCKEDCEQWWEDCRTSYTCKSNWHKGWNWTSGFNKCAVGAACPTFHFYFPTPTVLCNEIWTHSYKVSNYSRGSGRCIQMWFDASPGATPIEEVARFYVAAMSGAGPWAAWPFLLSLALMLLWLLS

SEQ ID NO: 34515 - protein, 89 aa, Homo sapiens
  misc_feature (1)...(89): Xaa = X or * as defined in Table 2
EQGRHGSSTPVGPRGGPRGAEHAPKHQGCGDRAGPQVGMDQRRRDPPRAPAAPRPWCGQRAALSSLGGSHLCDDAXVQPSAGLGKVLKF

SEQ ID NO: 34516 - protein, 1072 aa, Homo sapiens
  misc_feature (1)...(1072): Xaa = X or * as defined in Table 2
WKRCPGLPRAAATFPSGSGAGGARREAGGRAPTPGPASPRTARGHARNSPAPARTAGRTGSAGAWQTPCPAPLFPMSAGLPAACHWNPVXLRALKTGLEGVLGGSADTQHNRVTDGSLAPNAACVYTPKINGNRHPNTCTKMFIVSLDAKGKKWKQPTVHQQRKRETCGLHPRKCLQYTPSXWSTTTGILPSRTPRISCVQFVKKKLGQAGLLGHPGACLLCTLPXPAGVGTFLFPRGCXGVVHXLETHTCGSADGLRLSCPAPPSAGEGGRTSRATPCWSGMAXPRSAWLCPGPXPLPCGLPGCAGFVQCHRPQSPRNMDGMSKRPARXGCRLPGKXGLKGXRALGFVLSLFRTSPAMGSYFALTYKNPXACPRSRGWXVMHFPGARWPLRWPSLEKMDSAPLAFFTGPDPRLRSXNQEQPMGPLSTPRESXAAHGPLSTPRESGSARGLLSTPRVSGAAQGPLSTLRASGAAQGPPSTPRAPRSSPGTAVHTEGAKEQIVAQRPRGGSPSPRWNQNSXANRKEPQTDGTGRGVPGXGGDFPFWKRCRGRKARGRRAGAHSRTSFPADSPRTRAELSGASTHRRKNRISWCMANAMSSPFVSHERRAASCLSLEPSLAEGSQDRVEGVLGGSADTQHNRVTDGSLAPNCSLCVYTKDKWKQAPKYLYENVHRVTGRKRQKVETTHCPSTEEERNVWAPSTEVPTIYTKLMEYYDRHFTQPHAQDFLRAVCEEKIRTSWSFGPPRGVFALHSPMNLQAWERFFSLVAVEVWFTNWKRTRVAQLMVSGSAALPLPVLEKWKNITGHTLLERYGMTEIGMALSGPLTTAMRLPGCAGFVQCHRPQSPRNMDGMSKARLAEAAGCRQVRTERVTGSGLCPLFVPDIPCDGVIFCTHIQEPMSLPTVTRLVSDALPRSTVASSMALTREDGQCPPSLFYWTRSKAEKLKSGAAHGPTVYTEGVMSSPWTTVYTQGVRISPGTAVYTEGVRSSPGTTVYTESVRSSPGTAVHTKSAKEQPRDRRPHRGRQGADSSPETQGRLTFPTLESELLGEQEGAPDRWHRERSPRLRRGIQRP

SEQ ID NO: 34517 - protein, 28 aa, Homo sapiens
NKQPIWIPSRHLKPYHEPDAKEEIPGGS

SEQ ID NO: 34518 - protein, 95 aa, Homo sapiens
EPDAEEEILGGSRGPPRCSHVKIDAEDNPKRHKQHTSNTATHLGTDQEAVTDGGRKPGGLTTVLCPFIFQGSFPCSRQVTRSGLETAIPKKTRFL

SEQ ID NO: 34519 - protein, 58 aa, Homo sapiens
  misc_feature (1)...(58): Xaa = X or * as defined in Table 2
AWLLWLTSLPWGSLYALALLANKPALXSLLLLRYTLLPPHHQCEKVPRWNEPQPTLFP

SEQ ID NO: 34520 - protein, 311 aa, Homo sapiens
  DOMAIN (111)..(184): gag gene protein p24 domain identified by PFam, accession name gag_p24, E-value=3.3e-10, PFam score of 42.8
MGQVWALVRSTLELFHTDDEEEGEYNEVTEEVTEQVYLPAKAKAAKEGEVHPYSSAPPPYYFEEKEWPDPPDLSFLEDTGRKVVAPVTEQHLERLLSVLFRQEFSRLDERGPKELYADFIAWNLLRQESLKKVISDSAAQDIVLQLLAFGNVNLDCQAALRPIRGKAHLVDYIKACDGIGAKQDSERFAFTIPVVNNLQPAKHFHYFTDGSSNGKASYSGSKGQNQQPIWILSRHLKPYHEPDAKEEIPGGSRGPPGCSHVKTDAEEDPNCHEQHPLNTATHLGTDQEAVTDGGRKPEESGTTGHNDCLLE

SEQ ID NO: 34521 - protein, 332 aa, Homo sapiens
  DOMAIN (287)..(298): dUTPase domain identified by eMATRIX, accession number PF00692B, p-value=3.613e-11, raw score of 8.14
  DOMAIN (57)..(140): gag gene protein p24 domain identified by PFam, accession name gag_p24, E-value=4e-27, PFam score of 103.6
MGLVWALVRSTLEPFHTDDEEEGKYKEVTEEVTEQNSLEECALELGKKVTSGEEQYPSFSIVKQGPREPYTDFIAWLQESLKKVIADSAAQDIVLWLLAFDNANPDCQAALRPIRGKAHLVDYIKACDGIGDNLHKATLLAQHGYTKKECRNNQRVRPPDKGKKKTAEPEICPKCKKGKHWASHCHSKFDKDGNLISGNDMRGPSWAPFQTGHFQLRPFPHPCTISVPITASSATVDLCCTKAVSLLPGEPPQKVPTGVCGPLPAGTIGFLLGRSSLNLKGIQVQTGVIDSDYNGEIQIVISTSVPWKAEPGERIAQPLIMPYVEMGKSEIK

SEQ ID NO: 34522 - protein, 342 aa, Homo sapiens
  DOMAIN (108)..(214): gag gene protein p24 domain identified by PFam, accession name gag_p24, E-value=1.7e-17, PFam score of 70.0
  misc_feature (1)...(342): Xaa = X or * as defined in Table 2
VWALVRSTLELFHTDDEEEGEYDEVTEEVTEQVYLPAKAKVAQEEEVHPYPSAPPHYYFEEKEWPDPPDLSFLEDTGRKVVAPVTEQHLERLLSVLFRQEFSRLDERDDAVEQLRGVCIRAWEKITSGGEQYPSFSAVKQGPKELYADFIAWNLLRQESLKKVISDSAAQDIVLQLLAFGNVNLDCQAALRPIRGKAHLVDYIKACDGIGAKQDSERFAFTIPVVNNLQPAKHFHYFTDGSSNGKASYSGSKGQNQQPIWILSRHLKPYHEPDAKEEIPGGCPRTPWLQPCRDXCXGGPXPVTSNTRXTQPPTWGQIKKLSQMVEENLRKAGQLVTMTVYWN

SEQ ID NO: 34523 - protein, 49 aa, Homo sapiens
  misc_feature (1)...(49): Xaa = X or * as defined in Table 2
LVXEDCIAERAEVLRNESYGIIIDWSPXGMFSLNCTSQSACHGHTMFSW

SEQ ID NO: 34524 - protein, 135 aa, Homo sapiens
  DOMAIN (85)..(107): AAA-protein family proteins domain identified by eMATRIX, accession number BL00674B, p-value=4.886e-17, raw score of 4.46
CREAAMHALLHSEKDNPVIDEIDFLEAFKNIQPSSFRSVIGLMDIKPVDWEEIGGLEDVKLKLKQSIEWPLKFPWEFVRMGLTQPKGVLLYGPPGCAKTTLVRALATSCHCSFVSVSGADLFSPVVGDSEKVLSQ

SEQ ID NO: 34525 - protein, 284 aa, Homo sapiens
  DOMAIN (65)..(112): AAA-protein family proteins domain identified by eMATRIX, accession number BL00674D, p-value=2.286e-30, raw score of 23.41
  DOMAIN (1)..(162): ATPases associated with various cellular act domain identified by PFam, accession name AAA, E-value=1.9e-24, PFam score of 94.7
  misc_feature (1)...(284): Xaa = X or * as defined in Table 2
LLKVIMSAKIFTKKNENSTERLCGDGEKRGPDFRTERSVWLLRLEEAVAMVQRGSRAPESRVVAQVLTLLDGASGDREVVVVGATNRPDALDPALRRPGRFDREVVIGTPTLKQRKEILQVITSKMPISSHVDLGLLAEMTVGYVGADLTALCREAAMHALLHSEKNQDNPVIDEIDFLEAFKNIQPSLVFEASLGLMGIKPVDWEEIGGLEDVKPEVKTAHWSLRQKSGHCRSCARLPTGLLATLGSGSGSGRATEAVSGPAGXKRASIGGSSQRPRRFPTVP

SEQ ID NO: 34526 - protein, 34 aa, Homo sapiens
  misc_feature (1)...(34): Xaa = X or * as defined in Table 2
AERINSITVFSETLKRFLQASGKXFHRDIHNSRN

SEQ ID NO: 34527 - protein, 593 aa, Homo sapiens
  DOMAIN (520)..(533): PROTEIN ZINC-FINGER METAL-BINDI domain identified by eMATRIX, accession number PD00066, p-value=6.538e-15, raw score of 13.92
  DOMAIN (306)..(552): Zinc finger, C2H2 type domain identified by PFam, accession name zf-C2H2, E-value=3.2e-67, PFam score of 236.7
  misc_feature (1)...(593): Xaa = X or * as defined in Table 2
MGDVNQSVASDFILVGLFSHSGSRQLLFSLVAVMFVIGLLGNTVLLFLIRVDSRLHTPMYFLLSQLSLFDIGCPMVTIPKMASDFLRGEGATSYGGGAAQIFFLTLMGVAEGVLLVLMSYDRYVAVCQPLQYPVLMRRQVCLLMMGSSWVVGVLNASIQTSITLHFPYCASRIVDHFFCEVPALLKLSCADTCAYEMALSTSGVLILMLPLSLIATSYGHVLQAVLSMRSEEARHKAVTTCSSHITVVGLFYGAAVFMYMVPCAYHSPQQDNVVSLFYSLVTPTLNPLIYSLRNPEERSHRGVKLNECNQCFKVFSTKSNLTQHKRIHTGEKPYDCSQCGKSFSSRSYLTIHKRIHNGEKPYECNHCGKAFSDPSSLRLHLRIHTGEKPYECNQCFHVFRTSCNLKSHKRIHTGENHHECNQCGKAFSTRSSLTGHNSIHTGEKPYECHDCGKTFRKSSYLTQHVRTHTGEKPYECNECGKSFSSSFSLTVHKRIHTGEKPYECSDCGKAFNNLSAVKKHLRTHTGEKPYECNHCGKSFTSNSYLSVHKRIHNRWIXYYCRNFWRKALIDLSSLRXFERAHTGYISYLLQHNK

SEQ ID NO: 34528 - protein, 54 aa, Homo sapiens
  misc_feature (1)...(54): Xaa = X or * as defined in Table 2
MGGVKAEPRFSPGSIXTRWSTTSWQXWMDTGPTSWQPWLRXLXWLGHRPAPQKP

SEQ ID NO: 34529 - protein, 129 aa, Homo sapiens
IRSICICPLHGLSNGAMNMLEVFVSSLEEFQPDLVVLSGLHMMEGQSKELQRKRLLEVMALLQNFTDLSWWFSSGSSLSWHLLPCFLWKQQAALHGSSHPCLAEEPVYFCLCHFLKKSMYFQYSVAPFS

SEQ ID NO: 34530 - protein, 144 aa, Homo sapiens
  misc_feature (1)...(144): Xaa = X or * as defined in Table 2
MGKGAAAERFFSDKETFHDIAQVASEFPGAQHYVGGNAALIGQKFAANSDLKVLLCGPVGPKLHELLDDNVFVPPRXHLQEVDEFHLILEYQAGEEWGQLKAPHANRFIFSHDLSNGAMNMLEVFVSSLGGVSARPGWSSLDCT

SEQ ID NO: 34531 - protein, 205 aa, Homo sapiens
  DOMAIN (60)..(96): Phosphatidylinositol 3- and 4-kinases proteins domain identified by eMATRIX, accession number BL00915D, p-value=8.364e- 16, raw score of 27.02
  DOMAIN (37)..(91): Phosphatidylinositol 3- and 4-kinases domain identified by PFam, accession name PI3_PI4_kinase, E-value=4.6e-13, PFam score of 50.9
  misc_feature (1)...(205): Xaa = X or * as defined in Table 2
LRAQQQHNXVLTLHKPACTLSTTSXKXLHKIRKXLWHLRDRAPFIFTSEMEYFITEGGKNPQHFQDFVELCCRAYNIIRKHSQLLLNLLEMNSYNGYVGLLHNILQLEREGLATKEELQQNFPPLSVSLPFDQSINQISEHRSLIFNGQYPYGSCWFRQAVCKLIQKYAGEWGWIATAELRAEIDLNVLKFTIQVLSWKVQASLQ

SEQ ID NO: 34532 - protein, 1450 aa, Homo sapiens
  DOMAIN (1016)..(1055): Phosphatidylinositol 3- and 4-kinases proteins domain identified by eMATRIX, accession number BL00915C, p-value=8.147e- 32, raw score of 22.43
  DOMAIN (916)..(1137): Phosphatidylinositol 3- and 4-kinases domain identified by PFam, accession name PI3_PI4_kinase, E-value=1.2e-78, PFam score of 274.7
KMAYSWQTDPNPNESHEKQYEHQEFLFVNQPHSSSQVSLGFDQIVDEISGKIPHYESEIDENTFFVPTAPKWDSTGHSLNEAHQISLNEFTSKSRELSWHQVSKAPAIGFSPSVLPKPQNTNKECSWGSPIGKHHGADDSRFSILAPSFTSLDKINLEKELENENHNYHIGFESSIPPTNSSFSSDFMPKEENKRSGHVNIVEPSLMLLKGSLQPGMWESTWQKNIESIGCSIQLVEVPQSSNTSLASFCNKVKKIRERYHAADVNFNSGKIWSTTTAFPYQLFSKTKFNIHIFIDNSTQPLHFMPCANYLVKDLIAEILHFCTNDQLLPKDHILSVCGSEEFLQNDHCLGSHKMFQKDKSVIQLHLQKSREAPGKLSRKHEEDHSQFYLNQLLEFMHIWKVSRQCLLTLIRKYDFHLKYLLKTQENVYNIIEEVKKICSVLGCVETKQITDAVNELSLILQRKGENFYQSSETSAKGLIEKVTTELSTSIYQLINVYCNSFYADFQPVNVPRCTSYLNPGLPSHLSFTVYAAHNIPETWVHRINFPLEIKSLPRESMLTVKLFGIACATNNANLLAWTCLPLFPKEKSILGSMLFSMTLQSEPPVEMITPGVWDVSQPSPVTLQIDFPATGWEYMKPDSEENRSNLEEPLKECIKHIARLSQKQTPLLLSEEKKRYLWFYRFYCNNENCSLPLVLGSAPGWDERTVSEMHTILRRWTFSQPLEALGLLTSSFPDQEIRKVAVQQLDNLLNDELLEYLPQLVQAVKFEWNLESPLVQLLLHRSLQSIQVAHRLYWLLKNAENEAYFKSWYQKLLAALQFCAGKALNDEFSKEQKLIKILGDIGERVKSASDHQRQEVLKKEIGRLEEFFQDVNTCHLPLNPALCIKGIDHDACSYFTSNALPLKITFINANLMGKNISIIFKAGDDLRQDMLVLQLIQVMDNIWLQEGLDMQMIIYRCLSTGKDQRLVQMVPDAVTLAKIHRHSGLIGPLKENTIKKWFSQHNHLKADYEKALRNFFYSCAGWCVVTFILGVCDRHNDNIMLTKSGHMFHIDFGKFLGHAQTFGGIKRDRAPFIFTSEMEYFITEGGKNPQHFQDFVELCCRAYNIIRKHSQLLLNLLEMMLYAGLPELSGIQDLKYVYNNLRPQDTDLEATSHFTKKIKESLECFPVKLNNLIHTLAQMSAISPAKSTSQTFPQESCLLSTTRSIERATILGFSKKSSNLYLIQVTHSNNETSLTEKSFEQFSKLHSQLQKQFASLTLPEFPHWWHLPFTNSDHRRFRDLNHYMEQILNVSHEVTNSDCVLSFFLSEAVQQTVESSPVYLGEKKFPDKKPKVQLVISYEDVKLTILVKHMKNIHLPDGSAPSAHVEFYLLPYPSEVLRRKTKSVPKCTDPTYNEIVVYDEVTELQGHVLMLIVKSKTVFVGAINIRLCSVPLDKEKWYPLGNSIISPLL

SEQ ID NO: 34533 - protein, 1050 aa, Homo sapiens
MEKPRPLEAPSAWPQDDVQCGVTVGMDGAAVRANRTPWPQDLEQTKWIEIKKSAFTWSSQLSLNRGFLTCKDENNNAGLLRVSSYSSREDQLKNIASDSLFMLPGGLCQSPTGTSHCSNQMETQGQGSPGGAVRGDKALGPEKARQGCGMNGSGKYCKFRVLAIQGKPECLATLMQPDLGDSPGLREMNVVEHLRASFPVEQWYWRGGQRGEAEGARSSKAENNTSLICNFRLDYAPIEKQWDLHFADYFAEDLKLLAPLAKDGLVDVDEKGIQVTAKGRLLICNICMCFDTYLRQKARMQQFSRDLLGTPLVSTIPVDFTTEINSFSGADNTGSFHVACTVSTCTETSIGSAGLLWRRLTNQRVRATSTTPDIIIMSILLIQCLLGLSTIPFSAQYPDGSEMMKLVGWAQSIVTFRGGSSEMLNGVAFVFRLHLVLGMTIFLLFPFTRLVHVWSAPFEYFTRRYQIVYHVDAFTSQPFRGNSAGVVFPADNLSEAQMQLIARELGHSETAFLLHSDDSDVRIRYFTPTVEVPICAVMAEVKRKWGDRFVAVTQKNTGKGGALMNGLNYATCDQVFLSDADTYVPPDQDGMGYMLAEIERGADAVGGIPSTALKGAGLLPHIRATVKLPMIVMKRTLQQLLGGAPFIISGACGMFRTDVLRKFGFSDRTKVEDLDLTWTLVANGYRIRQANRCIVYPQECNSPREEWRRWRRWIVGYAPGGRSETLLEDPPDGSVTQSQFDAVGRLRAQTDAAGTTEYSPDVVTGLITRITTPDGRASAFYYNHHNQLTSATGPDGLELRREYDELGRLIQETAPDGDITRYRYDNPHSDLPCATEDATGSRKTMTWSRYGQLLSFTDCSGYVTRYDHDRFGQMTAVHREEGLSQYRAYDSRGQLIAVKDTQGHETRYEYNAAGDLTTVIAPDGSRNGTQYDAWGKAICTTQGGLTRSMEYDAAGRVIRLTSENGSHTTFRYDVLDRLIQETGFDGRTQRYHHDLTGKLIRSEDEGLVTHWHYDEADRLTHRTVNGETAERWQYDERGWLTDISHISEGS

SEQ ID NO: 34534 - protein, 401 aa, Homo sapiens
  DOMAIN (215)..(236): RHS PROTEIN SIGNATURE domain identified by eMATRIX, accession number PR00394B, p-value=1.000e-25, raw score of 10.76
MWPDNRIARDAHYLYRYDRHGRLTEKTDLIPEGVIRTDDERTHRYHYDSQHRLVHYTRTQYEEPLVESRYLYDPLGRRVAKRVWRRERDLTGWMSLSRKPQVTWYGWDGDRLTTIQNDRTRIQTIYQPGSFTPLIRVETATGELAKTQRRSLADALQQSGGEDGGSVVFPPVLVQMLDRLESEILADRVSEESRRWLASCGLTVEQMQNQMDPVYTPARKIHLYHCDHRGLPLASLVDRHFFSARVYVSWCLCFFIVVYAFIIWVMGSRFPRGEYRRPEGANRHEVNRTGGRRLWVSIVVCNPPVKVTNGGATKSEKNWMGVGYGLGLARCKYVEVLLDGTVVDAAGCCLVMLALAMVVLVPGGSTDDLLEDAHRCTNLHQGDGNVAGLVHCSNAMEGQCG

SEQ ID NO: 34535 - protein, 489 aa, Homo sapiens
MLHSRGFLAEVFGILARHNISVDLITTSEVSVALTLDTTGSTSTGDTLLTQSLLMELSALCRVEVEEGLALVALIGNDLSKACGVGKEVFGVLEPFNIRMICYGASSHNLCFLVPGEDAEQDGTGTSGIGAQKKKMYANNGAIDRKLLFEATFVTIEKCCDTNQKGDDTHALGQPIRGHDKSLAGSFCYACRSEEGLSQYRAYDSRGQLIAVKDTQGHETRYEYNIAGDLTAVIAPDGSRNGTQYDAWGKAVRTTQGGLTRSVEYDAAGRVIRLTSENGSHTTFRYDVLDRLIQETGFDGRTQRYHHDLTGKLIRSEDEGLVTHWHYDEADRLTHRTVKGETAERWQYDERGWLTDISHISEGHRVAVHYRYDEKGRLTGERQTVHHPQTEALLWQHETRHAYNAQGLANRCIPDSLPAVEWLTYGSGYLAGMKLGDTPLVEYTRDRLHRETLRSFGRYELTTAYTPAGQLQSQHLNSLLTYRHANFAL

SEQ ID NO: 34536 - protein, 311 aa, Homo sapiens
  DOMAIN (184)..(204): PHENOL HYDROXYLASE REDUCTASE FAMILY SIGNATURE domain identified by eMATRIX, accession number PR00410D, p-value=2.014e- 09, raw score of 12.97
  DOMAIN (184)..(294): Oxidoreductase FAD/NAD-binding domain identified by PFam, accession name oxidored_fad, E-value=6.4e-38, PFam score of 139.4
  misc_feature (1)...(311): Xaa = X or * as defined in Table 2
RRYCRITVRWQSMWADNRIAVDAHYPYRXCRSGRVTEKNDLIPKGVIRTDDERTHRYHYDSQHRLVHYTRTQYAEPLVESRYLYDPLGRRVAKRVWRRERDLTGWMSLSRKPQVTWYGWDGDRLTTIQNDRTRIQTIYQPGSFTPLIRVETATAVMDRILKDHQIVVDIPHGEAWLRDDEERPMILIAGGTGFSYARSILLTALARNPNRDITIYWGGREEQHLYDLCELEALSLKHPGLQVVPVVEQPEAGWRGRTGTVLTAVLQDHGTLAEHDIYIAGRFEMAKIARDLFCSERNAREDRLFGDAFAFI

SEQ ID NO: 34537 - protein, 1085 aa, Homo sapiens
  DOMAIN (721)..(742): RHS PROTEIN SIGNATURE domain identified by eMATRIX, accession number PR00394D, p-value=1.090e-28, raw score of 6.56
  DOMAIN (1)..(136): Thiolase domain identified by PFam, accession name thiolase, E-value=0.00051, PFam score of -177.7
MTQSNGQTLVVDTDEQPRTDASAEGLARLNPSFDSLGSVTAGNASSINDGAAAVMMMSEAKARALNLPVLARIRAFASVGVDPALMGIAPVYATRRCLERVGWQLAEVTPPEEAKEIPQVAGSLEEALNELDLDREFLKAGGVFTDEAIDAYIALRREEDDRVRLGSVASTSRRDATQMRLIRPTRVDDVVGRSSVALENQGKWAQAAALQRQRLALDPGSVWITYRLSQDLWQAGQRSQADTLMRNLAQQKSNDPEQVYAYGLYLSGHDQDRAALAHINSLPRAQWNSNIQELVNRLQSDQVLETANRLRESGKEAEAEAMLRQQPPSTRIDLTLADWAQQRGSSRVTSSSKLHGCGIGGLPCAGKTVQLYSRRWSPQRQREEMRGPGRALQSETHRRVIGHRSPEYSTAHGRLTAFTPRSESGYPHPYATDPAGNRLPDPELHPDSTLSMWPDNRIARDAHYLYRYDRHGRLTEKTDLIPEGVIRTDDERTHRYHYDSQHRLVHYTRTQYEEPLVESRYLYDPLGRRVAKRVWRRERDLTGWMSLSRKPQVTWYGWDGDRLTTIQNDRTRIQTIYQPGSFTPLIRVETATGELAKTQRRSLADALQQSGGEDGGSVVFPPVLVQMLDRLESEILADRVSEESRRWLASCGLTVEQMQNQMDPVYTPARKIHLYHCDHRGLPLALISKEGTTEWCAEYDEWGNLLNEENPHQLQQLIRLPGQQYDEESGLYYNRHRYYDPLQGRYITQDPIGLKGGWNFYQYPLNPVINVDPQGLVDINLYPESDLIHSVADEINIPGVFTIGGHGTPTSIESATRSIMTERYGVDEVERLLDSCHALMNYGVDRYKRPQKISLQEEKARQKSREEYLQSQVNMLWRTLPKREEEKTVAEARRYPSEPQENLLYFMEKNAPLLESWQREILRIVRKVSQYFYPQKQTQVMNEGWATFWHYTILNHLYDEGKVTERFMLEFLHSHTNVVFQPPYNSPWYSGINPYALGFAMFQDIKRICQSPTEEDKYWFPDIAGSDWLETLHFAMRDFKDESFISQFLSPKVMRDFRFFTVLDDDRPNIWGFPIFLMKKVSGDR

SEQ ID NO: 34538 - protein, 433 aa, Homo sapiens
  DOMAIN (307)..(327): RHS PROTEIN SIGNATURE domain identified by eMATRIX, accession number PR00394A, p-value=3.813e-09, raw score of 7.51
  misc_feature (1)...(433): Xaa = X or * as defined in Table 2
CQCPGAACPTTSCRVIPHWAYDEADRLTHRTVNGETAERWQYDERGWLTDISHISEGHRVAVHYRYDEKGRLTGERQTVHHPQTEALLWQHETRHAYNAQGLANRCIPDSLPAVEWLTYGSGYLAGMKLGDTPAANLDIRIPYATDPAGNRLPDPELHPDSTLSMWADNRIARDAHYLYRYDRHGRLTEKTDLIPEGVIRTDDERTHRYHYDSQHRLVHYTRTQYAEPLVESRYLYDPLGRRVAKRKDRTRIQTMYQPGSFTPLIRVETATGEQAKTQRRQLADTLQQSDGEDGGSVVFPPVLVQMLDRLESESSADRVRSFISLANQSKCVEHAYXRWQCHLGVCWWSSHQIPAVPLTGSVTRWHCHLASSSEAGSVAWLPHLSEGHSNRTSSPELLRSRMCAWHTLSAQSVHLVSLYILEILALMNSINSL

SEQ ID NO: 34539 - protein, 159 aa, Homo sapiens
MVLPRFSSRVFMVLGFTFKSLIHLELISSLLSVFSMKRCSVLLKAFSASIEIIMWFLSLVLWSLLLMSFSFRWSFCMVILFLDVDAIAFCLLVFLRTVRHFCRSPEVCWGSIPDPVCLGITSRGLGSMAIFTILILPTHEHGMFFHLFVSSFISLRSGL

SEQ ID NO: 34540 - protein, 121 aa, Homo sapiens
  DOMAIN (3)..(30): Mrp family proteins domain identified by eMATRIX, accession number BL01215A, p-value=8.568e-10, raw score of 9.75
  misc_feature (1)...(121): Xaa = X or * as defined in Table 2
RIFHSVIGVAAHKGGVYKTSVSVHLAQDVAEITLLEGNDPQGTVSXYQGPGRTLIPLEAALRNIAHSLSIPPPKIFAAPTLRHYFALFFCGHSLFAPHIELLEAGTVLQLPQGPWSSPTSF

SEQ ID NO: 34541 - protein, 343 aa, Homo sapiens
  DOMAIN (97)..(139): PROTEIN PMBA HOMOLOG TLDD TLDE AF0655 MT domain identified by eMATRIX, accession number PD02678B, p-value=5.429e-17, raw score of 24.50
  misc_feature (1)...(343): Xaa = X or * as defined in Table 2
MKMPEAIATKEKIDKWDLIKIKSFFSTPKETINRVNRHHTEWEDISAIHLSDKGPISYIYKNLTRFTRKKQPHYKVGKGNEQTRILESHPHLLKGLASTPFDSEGVRTERRDIIKDGILTQWLLTSYSARKLGLKSTGHAGGIHNWRIAGQGLSFEQMLKEMGTGLVVPGTAENARSCIRAYFYDIHETLCRQEEMALSVVDDHVREKLIWLRQHQEDMTILLSEVSAACLHCEKTLQQDDCRVVLAKQEITRLLETLQKQQQQFTEVADHIQLDASIPVTFTKDNRVHIGPKMEIRVVTLGIGMGAGKNLLSLFXVXNRVEFHGSPFPTIWFLTWETVGFLK

SEQ ID NO: 34542 - protein, 202 aa, Homo sapiens
MAAGALHKDWVRVRRWASPQVRKRGRGLLDGPTAETTFSWGQAQSGFLAPPGGLRGRGLHLSGAQAQPISEPSRHGSGTAKAPIGRNGCHAQGRRRSHLRAPRAVGGHIPLHRPGSFQTQELFAAEFRAADPGRPTWLPAYLADCSRRLSRTSRPQFPLKRQGNLQAQSLPVPRQRARARDAKGVRALSDWHQDRGEIAPSR

SEQ ID NO: 34543 - protein, 679 aa, Homo sapiens
  misc_feature (1)...(679): Xaa = X or * as defined in Table 2
NATTIRYEHQRVLKAAQYLHQQGITRCNSSSTLTSAAPGRVDSPPTSMIVAPALIIRFACFTASISELCVPPSEKESGVTLRIPITHLMRELTCRLIRDKSATVTGSHTLVVARHCCYAAPGGCCLLANWLKPGLFGPIGVLSRRGTSVILPIGGFYQWNPMICPNGVVPMQHGXRRGLAQERPLEEWLPVCRDMLNAFFLPDAETEAAMTLIEQQWQAIIAEGLGAQYGDAVPLSLLRDELAQRLDQERISQRFLAGPVNICTLMPMRSIPFKVVCLLGMNDGVYPRQLAPLGFDLMSQKPKRGDRSRRDDDRYLFLEALISAQQKLYISYIGRSIQDNSERFPSVLVQELIDYIGQSHYLPGDEALNCDESEARVKAHLTCLHTRMPFDPQNYQPGERQSYAREWLPAASQAGKAHSEFVQPLPFTLPETVPLKRYNDSVRAPTCAESRAIFTSTRNNTLQLFFNANFRRPWARGLATNVNDRRASVDHQIRMFHRIYQRVMRATIRKGIRRDVEDPHYSSDAGTYLSPNSRQISNGNWQSHIGRSPSLLLCRTWGLLFTGKLVETRFIWPNRGVIPTGNERYIAHRRFLPMEPDDMPQWRCPHATWLAEAKMFDSLAKAGKYLGQAAKLMIGMPDYDNYVEHMRVNHPDQTPMTYEEFFRERQDARYGGKGGARCC

SEQ ID NO: 34544 - protein, 247 aa, Homo sapiens
  DOMAIN (30)..(83): Clathrin light chain proteins domain identified by eMATRIX, accession number BL00224B, p-value=2.636e-09, raw score of 16.94
  misc_feature (1)...(247): Xaa = X or * as defined in Table 2
CFFLSPSPPSSPPSPNRSQTTEEETKRQEERERKREEEEEKKGRRKETKKRRNRQEGKQHRKEEKEGEKQTKQRTETERETKRRRENEQAKAHKGTRKRKEEQKKAKAARRRTHKRQNPSRGREGTHPKQRQGKEEVNRQNKEEAKQKREEAGRTRREDRGRKDDKKERRQQQTEKKAKPKAEHGQERTDTTTKKARQREGRPSERRRREREEMSKHDPQNRAEKTNEEKEEGRQHERXTQKSSTGI

SEQ ID NO: 34545 - protein, 231 aa, Homo sapiens
  DOMAIN (89)..(124): Troponin domain identified by eMATRIX, accession number PF00992A, p-value=1.150e-13, raw score of 16.67
  misc_feature (1)...(231): Xaa = X or * as defined in Table 2
MNALHAEALEMTSQFDQELAAKFEADHEMALLMNKDFDRDREEQRRLAEQARREHEERIKREAAEQARRDAEAKHKAEIEAAARREAEEKARAELAERQRIEAEQRAEREKKETEERARREKEEAVAAERRRQEEAEAARLVEEQRKAEEEARRAADKEHRRTVNRRGLRRSDCSGHPRRIRTESSAGDRWRQSAGRAHQILRQTXTHTSLTTASKNGAGLSSNSPTRKRS

SEQ ID NO: 34546 - protein, 372 aa, Homo sapiens
PTPGKRASPGGNPIFPPSPCCSRKAGLECEASSLLIPLANTITGGLWSNTPASRRSAFSKGCGRAGKNTRCHRTALGTFPTRAQGWSAPAVMDPNTLSMEQGKQFLKQCGIPQRDISKPLFILILTTGYDFELGTLAISASLTDKSLANRDQVVAAIFSYLNLLREKGIDKQYFDELANVLDIDFRYPSITRDMDYVEWLADTMIRVPVEHTLDAVNIADRYDAKAVKERLAMMTPHNARIWYISPKEPHNKTAYFVDAPYQVDKISAHTFADWQKKAADIALSLPELNPYIPDDFSLIKSEKKYDHAKLIGDESNLRVGYAPSRYFASEPKADVSLILRNPKAMASARNQVMFAINDYLAGLALDPRVPSS

SEQ ID NO: 34547 - protein, 277 aa, Homo sapiens
  misc_feature (1)...(277): Xaa = X or * as defined in Table 2
MVKARKIMETPQPAWEMRVRICTVDWSKLNPYIPDDFSLIKSEKKYDHPELIVDESNLRVVYAPSRYFASEPKADVSLILRNPKAMDSARNQALLEGYFSFTATEDQLEQAKSWYNQMMDSPEKGKAFEHGNMPAQMLLQVPYFLREEREHXIIITPILHMRKQEQSGXRNLPKAAQLSMMQDLQTLLMAASYCSELGHVATQFQGMLACTRNPNSWDRNSETSGKAEGFIPMQLGDVADPSVRCSSVSSLWGHSSPKLLRSVCMANRICVKLQRWT

SEQ ID NO: 34548 - protein, 501 aa, Homo sapiens
  DOMAIN (226)..(236): RNA polymerases beta chain proteins domain identified by eMATRIX, accession number BL01166B, p-value=7.882e-13, raw score of 10.06
  DOMAIN (129)..(251): RNA polymerase beta subunit domain identified by PFam, accession name RNA_pol_B, E-value=4.1e-42, PFam score of 152.7
MLNTCNSKIRSRIRIRIHLGKGIVMHQTGSWARHFAIRIRKAHTGIVTSSHRSARQTSPSAPIHIVATTRGNSPPTSSRASVATVYTLAHNRFILSQHTSSINNSLASIGTLAYSKTLFTKQSWIPRPYISETLRVDPTNDRLSALVEIYRMMRPGEPPTREAAESLFENLFFSEDRYDLSAVGRMKFNRSLLREEIEGSGILSKDDIIDVMKKLIDIRNGKGEVDDIDHLGNRRIRSVGEMAENQFRVGLSAVSFRIRQLENQLGVNLFTRHRNNIRLTAAGEKLLPYAETLMSTWQAARKEVAHTSRHNEFSIGASASLWECMLNQWLGRLYQNQDAHTGLQFEARIAQRQSLVKQLHERQLDLLITTEAPKMDEFSSQLLGYFTLALYTSAPSKLKGDLNYLRLEWGPDFQQHEAGLIGADEVPILTTSSAELAQQQIAMLNGCTWLPVSWARKKGGLHTVVDSTTLSRPLYAIWLQNSDKNALIRDLLKINVLDEVY

SEQ ID NO: 34549 - protein, 371 aa, Homo sapiens
  DOMAIN (263)..(297): ELEMENT TRANSPOSABLE INSERTION PROTEIN TRANSPOSITION DNA domain identified by eMATRIX, accession number PD02455B, p-value= 2.241e-28, raw score of 21.87
  DOMAIN (267)..(371): Integrase core domain identified by PFam, accession name rve, E-value=1.7e-31, PFam score of 112.9
MLDRLESEILADRVSEESRRWLASCGLTVEQMKNQMDPVYTPARKIHLYHCDHRGLPLALISTEGATAPRGSRDVPVPDSRESRASCEQRFPRPTRGRHTYSAVTLTATFRTELRVYRDARLKRQLQERKEELAILQKPAKYFAKRVFIEKHQAEFSIKAMCRVLRVARSGWYTWCQRRTRISTRQQFRQHCDSVVLAAFTRSKQRYGAPRLTDELRAQGYPFNVKTVAASLRRQGLRAKASRKFSPVSYRAHGLPVSENLLEQDFYASGPNQKWAGDITYLRTDEGWLYLAVVIDLWSRAVIGWSMSPRMTAQLACDALQMALWRRKRPRNVIVHTDRGGQYCSADYQAQLKRHNLRGSMSAKGCCYDNA

SEQ ID NO: 34550 - protein, 254 aa, Homo sapiens
  DOMAIN (183)..(193): RNA polymerases beta chain proteins domain identified by eMATRIX, accession number BL01166B, p-value=8.568e-09, raw score of 10.06
  DOMAIN (1)..(191): RNA polymerase beta subunit domain identified by PFam, accession name RNA_pol_B, E-value=1.3e-37, PFam score of 136.6
  misc_feature (1)...(254): Xaa = X or * as defined in Table 2
MELVPERLRGETASFDIEANGKVYVEKGRRITARHIRQLEKDDVKLIEVPVEYIAGKVVAKDYMDESTGELICAANMELSLDLLAKLSQSGHKRIETLFTNDLDHGPYISETLRVDPTNDRLSALVEIYRMMRPGEPATREAAESLFENLFFSEDRYDLSAVGRMKFKRSLVIGIRDGDGEVDEIDHLGNRGYRPQATRGNHGPLGAHVTCRQTARRERKPGPDIPPAFQQKHGARCYLTKAVIRRGPKRDKRX

SEQ ID NO: 34551 - protein, 584 aa, Homo sapiens
  DOMAIN (95)..(116): RHS PROTEIN SIGNATURE domain identified by eMATRIX, accession number PR00394D, p-value=1.090e-28, raw score of 6.56
MLDRLESEILADRVSEESRRWLASCGLTVEQMQNQMDPVYTPARKIHLYHCDHRGLPLALISKEGTTEWCAEYDEWGNLLNEENPHQLQQLIRLPGQQYDEESGLYYNRHRYYDPLQGRYITQDPIGLKGGWNLYGYQLNPISDIDPLGLSMWEDAKSGACTNGLCGTLSAMIGPDKFDSIDSTAYDALNKINSQSICEDKEFAGLICKDNSGRYFSTAPNRGERKGSYPFNSPCPNGTEKVSAYHTHGADSHGEYWDEIFSVKGEQFDRLSLLNDILPVYQQVLAELAKRGIEWVQIDEPALGLHVDLVHGKDDVAELHKRLPSDWLLSAGLINGRNVWRADLTEKYAQIKDIVGKRDLWVASSCSLLHSPIDLSVETRLDAEVKSWFAFALQKCHELALLRDALNSGDTAALAEWSAPIQARRHSTRVHNPAVEKRLAAITAQDSQRANVYEVRAEAQRARFKLPAWPTTTIGSFPQTTEIRTLRLDFKKGNLDANNYRTGIAEHIKQAIVEQERLGLDVLVHGEAERMTWWILWRALDGLFYAKRGSDYGPVGNPLPVHTTTIRMGFPPTNRGANWDARYG

SEQ ID NO: 34552 - protein, 1404 aa, Homo sapiens
  DOMAIN (964)..(1014): Sigma-70 factors family proteins domain identified by eMATRIX, accession number BL00715, p-value=3.800e-24, raw score of 24.82
  DOMAIN (795)..(883): Peptidase family M23/M37 domain identified by PFam, accession name Peptidase_M37, E-value=3.2e-23, PFam score of 90.6
  misc_feature (1)...(1404): Xaa = X or * as defined in Table 2
MRSDPDTSVNEIETKLSALLGSETTGEILFDLLCANGPEWNRFVTLEMKYGRIMLDTAKIIDEQDVPTHILSKLTFTLRNHPEGVVMKNFEVLQPLQNSLSGLPLWVSERILQQINQLTHYEPVIGIMGKTGAGKSSLCNALFAGEVSPVSDVAACTRDPLRFRLQIGEHFMTIVDLPGVGESGVRDTEYAALYREQLPRLDLILWLIKADDRALATDEHFYRQVIGEAYRHKMLFVISQSDKAEPTSGGNILSTEQKQNISRKICLLHELFQPVHPVCAVSVRLHPVVALLQQFRTDDERTHRYHYDSQHRLVDYTRTQYEEPLVESRYLYDPLGRRVAKRVWRRERDLTGWMSLSRKPQVTWYGWDGDRLTTIQNDRSRIQTIYQPGSFTPLIRVETATGELAKTQRRSLADALQQSGGEDGGSVVFPPVLVQMLDRLESEILADRVSEESRRWLASCGLTVEQMQNQMDPHGRDNSVVPEYDEWGNLLNEENPHQLQQLIRLPGQQYDEESGLYYNRHRYYDPLQGRYITQDPIGLKGGWNFYQYPLNPISDIDPLGLSMWEVARQMNAIASKLPEGFHIGINFSASHIISPTFVDECLNFRDSFTRRDLNLVLEVTERDLLNVDESLVQRLNILHENGFVIALDDFGTGYSGLSYLHDLHIDYIKIDHSFVGRVNADPESTRILDCVLDLARKLSISIVAEGVETKEQLDYLNQNYITFQQGYYFYKPVTYIDLVKIILSKPKKGIIAQIVVNPGVITVVFIYHRNNPHFGASEGGNKGIDIAGSKGQAIIATADGRVVYAGNALRGYGNLIIIKHNDDYLSAYAHNDTMLVREQQEVKAGQKIATMGITGRSHLMSQNTLKVHDLNEDAEFDENGVEVFDEKALVEQEPSDNDLAEEELLSQGATQRVLDATQLYLGEIGYSPLLTAEEEVYFARRALRGDVASRRRMIESNLRLVVKIARRYGNRGLALLDLIEEGNLGLIPRVEKFDPGRGFRFYTYATXFIDPDVRLISYSTRHPKHDMQHLLKEVDKMLQLNVDERPLICGVGLGGYWAERIGFLCDIRQVIFNPNLFPYENMEGKIDRPEEYADIATKCVTNFREKNRDRCLVILSRNDEALNSQRTSEELHHYYEIVWDEEQTHKFQDISPHLQRIKAFKTLGQPDDSCDWYRLRHEEAMTPDAVRVITLDPNGAWSLNEAIKIGKYLKSSLAYAEDPCGADNGFSGREVMAEFRRATGLPVATNMIATNWREMGHAVIAQCGRYSTCRSALLDAFRCIRVAQMCDDWGLTWGCHSNNHFDISLAMFTHVGAAAPGNPTAIDTHWIWQEGDCRLTQNPLEIKKGKIAVPDAPGLGVELDWEQVQKAHEAYKRLPGGARNDAGPMQYLIPGWTFDRKRPVFGRH

SEQ ID NO: 34553 - protein, 1080 aa, Homo sapiens
  DOMAIN (628)..(658): Tetrahydrofolate dehydrogenase/cyclohydrolase proteins domain identified by eMATRIX, accession number BL00766D, p-value=3.368e- 30, raw score of 17.05
  DOMAIN (904)..(1064): Ribosomal protein S2 domain identified by PFam, accession name Ribosomal_S2, E-value=6.2e-91, PFam score of 315.5
DLFFEKVIFEIRDNKLQMELVPERLRGETASFDIEANGKVYVEKGRRITARHIRQLEKDDVKLIEVPVEYIAGKVVAKDYIDESTGELICAANMELSLDLLAKLSQSGHKRIETLFTNDLDHGPYISETLRVDPTNDRLSALVEIYRMMRPGEPPTREAAESLFENLFFSEDRYDLSAVGRMKFNRSLLREEIEGSGILSKDDIIDVMKKPIDIRNGKGEVDDIDHLGNRRIRSVGEMAENQFRVGLGFNRNLRVSEIIGQVWRAAKIVGAAKVTGQRPITNVVMMGMGEPLLNLNNVVPAMEIMLDDFGFGLSKRRVTLSTSGVVPALDKLGDMIDVHWQFPCTRRTTKFVTKLCRSTKSTISKRSLLESNAIQARVTIEYVMLDHVYDGTEHAHQLAELLKDTPYHPDPVEPVPGCAVWTQLEQPYRPFLKSADELRFTTIVRKTRGDDIDAACGQLAGDVIDRTKRTLRKRMQGEAIDIKARMNTEATHDQNEALTTGARLRNAREQLGLSQQAVAERLCLKVSTVRDIEEDKAPADLASTFLPDISALMRVWYIFFRRMIPGRVASMTPRVSSRAERYTFDTSLQRRVIGASNIVAAPMSMELLLAVTHRFTKNLRHHVENADLLIVAVGKPGFIPGDWIKEGAIVIDVGINRLENGKVVGDVVFEDALNAPHTLRLFPAAMSNMATFSLGKHPHVELCDLLKLEGWSESGAQAKIAIAEGQVKVDGAVETRKRCKIVAGQTHRHFAEATIMPTVITHAAVPLCIGLGLGSKVIPPRLLFAGIILAMLPDADVLSFKFGVAYGNVFGHRGFTHSLVFAFVVPLLCVFIGRRWFRAGLIRCWLFLTVSLLSHSLLDSVTTGGKGVGWLWPWSDERFFAPWQVIKVAPFALSRYTTPYGHQGKILFVGTKRAASEAVKDAALSCDQFFVNHRWLGGMLTNWKTVRQSIKRLKDLETQSQDGTFDKLTKKEALMRTRELEKLENSLGGIKDMGGLPDALFVIDADHEHIAIKEANNLGIPVFAIVDTNSDPDGVDFVIPGNDDAIRAVTLYLGAVAATVREGRSQDLASQAEESFVEAE

SEQ ID NO: 34554 - protein, 51 aa, Homo sapiens
IHGGFAVERLCAPEAVHQPVSTRGVLPAAPARVRPAGTFIQFRHAAAHQPQ

SEQ ID NO: 34555 - protein, 401 aa, Homo sapiens; identical to SEQ ID NO: 34534
  DOMAIN (215)..(236): RHS PROTEIN SIGNATURE domain identified by eMATRIX, accession number PR00394B, p-value=1.000e-25, raw score of 10.76

SEQ ID NO: 34556 - protein, 1589 aa, Homo sapiens
  DOMAIN (58)..(90): Nickel-dependent hydrogenases large subunit proteins domain identified by eMATRIX, accession number BL00507D, p-value=8.297e- 26, raw score of 14.28
  DOMAIN (610)..(794): Bacterial type II secretion system prote domain identified by PFam, accession name GSPII_E, E-value=1.7e-121, PFam score of 410.8
MLKGVSTWHLNSPEEFTKVQNKIKDLVASGQLGIFANGYWGHPAMKLPPEVNLIAVAHYLQALECQRDANRVVALLGGKTPHIQNLAVGGVANPINLDGLGVLNLERLMYIKSFIDKLSDFVEQVYKGSVMGQVLPLVTRQGDRIAIVSGLRIVARCSGIGHKSSLLPAECNRLQGSKNTLRTSLEISHLVSFGQFINKRAYKGKLALVGGSGSGKSLTCAATLGILPAGVRQTAGEILADGKPVSPCALRGIKIATIMQNPRSAFNPLHTMHTHARETCLALGKPADDATLTAAIEAVGLENAARVLKLYPFEMSGGMLQRMMIAMAVLCESPFIIADEPTTDLDVVAQARILDLLESIMQKQAPGMLLVTHDMGVVARLADDVAVMSDGKIVEQGDVETLFNAPKHTVTRSLTTAELSSSSFLKHGKSLAGIPLRDTLRISSPGALTQPDGFIRPPIFPYDDVYRSLSKEKYTRYLQEQLQRIDGKSKALVGSEDLPLLDENTFNSHAPAPSSRWALAQRIGYLYSEGEIIYLADTPFERLLDIQRQVGQCQTMTSLSQADFEARLEAVFHQNTGESQQIAQDIDQSVDLLSLSEEMPANEDLLNEDSAAPVIRLINAILSEAIKETASDIHIETYEKTMSIRFRIDGVLRTILQPNKKLAALLISRIKVMARLDIAEKRIPQDGRISLRIGRRNIDVRVSTLPSIYGERAVLRLLDKNSLQLSLNNLGMTAADKQDLENLIQLPHGIILVTGPTGSGKSTTLYAILSALNTPGRNILTVEDPVEYELEGIGPNAEHKKPRHKGRKKKKKRNDTRKKTNREAKENTNRQNNERQKHKKNTNKQEKKTENNEKKKNTKHETENKETHGCDVQDRIQTIYQPGSFTPLIRVETATGELAKTQRRSLADALQQSGGEDGGSVVFPPVLVQMLDRLESEILADRVSEESRRWLASCGLTVEQMQNQMDPVYTPARKIHLYHCDHRGLPLALISTEGATAWCAEYDEWGNLLNEENPHQLQQLIRLPGQQYDEESGLYYNRHRYYDPLQGRYITQDPIGLKGGWNLYGYQLNPISDIDPLGYLWFIPSAVCADPFLNCNRLEAPRSLFNPKRLPKGIPSLGPDFPAVIPVILMAIAAVCEITLPKTNTVRLFFEFVGNPAVALFIAIVIAIFTLGRRNGRTIEQIMDIIGDSIGAIAMIVFIIAGGGAFKQVLVDSGVGHYISHLMTGTTLSPLLMCWTVAALLRIALGSATVAAITTAGVVLPIINVTHADPALMVLATGAGSVIASHVNDAGFWLFKGYFNLTVGETLRTWTDIATLAGVTKMTVSRYIRSPKKVAKETGERIAKIMEEINYIPNRAPGMLCSLPQCSWLLHPMGGNWRLGKCAGTRMATPLRYALIFLLWAMVAVIYAPLIPAALTLISPALSLTHWQALFADPQLPQALLATLVSTTIAAVGALLIALLVIVALWPGPKWQRMCARLPWLLAIPHVAFATSALLLFADGGLLYDYFPYFTPPMDRFGIGLGLTLAVKESAFLLWILAAVLSEKWLLQQVIVLDSLGYSRWQCLNWLLLPTVAPILHTSHLGCLTYPSL

SEQ ID NO: 34557 - protein, 160 aa, Homo sapiens
  misc_feature (1)...(160): Xaa = X or * as defined in Table 2
EYRKSPDIRPIVIQHGEEAEITHHFRXQELADKTLIFEITHREMQRFQPVGTGDIREPVFVFFRWRLTNPFNILEHGEPEGIRVDAAVPRAVIGGLEDHIGVAVQKLQHKTFRYFPFIIQMVKDGVVPEGRPAFVHHLSLFLRIKILAHLTHNTQDFTLP

SEQ ID NO: 34558 - protein, 185 aa, Homo sapiens
  DOMAIN (106)..(116): RNA polymerases beta chain proteins domain identified by eMATRIX, accession number BL01166B, p-value=7.882e-13, raw score of 10.06
  DOMAIN (16)..(138): RNA polymerase beta subunit domain identified by PFam, accession name RNA_pol_B, E-value=3.5e-41, PFam score of 149.4
  misc_feature (1)...(185): Xaa = X or * as defined in Table 2
RPGMSNPWRDLFRTGVDPTNDRLSALVEIYRMMRPGEPPTREAAESLFENLFFSEDRYDLSAVGRMKFNRSLLREEIEGSGILSKDDIIDVMKKLIDIRNGKGEVDDIDHLGNRRIRSVGEMAENQFRVGLVRCTGTVPPFLHQQKCEYHLPQRPVASTLSRYFXHFRLRNFSMPRANEIKKGMV

SEQ ID NO: 34559 - protein, 335 aa, Homo sapiens
  DOMAIN (249)..(268): Signal carboxyl-terminal domain proteins domain identified by eMATRIX, accession number PF00512, p-value=1.900e-16, raw score of 13.94
  DOMAIN (134)..(204): HAMP domain identified by PFam, accession name DUF5, E-value= 2e-05, PFam score of 31.5
  misc_feature (1)...(335): Xaa = X or * as defined in Table 2
SVVLKIVERVDGYFPSPPLFLGAAFGSHVRSRALPDPCVLFRVTIYLCVLASVARTFSPLLPVSRKKHITPLGGFQLHETHLCLQDCRTIILRPRLGEFGNKFSQLVDTIDLHNQHGLAHLXKESARGQYSLLLLGMVSLCALILILWRVVYRSVTCPLADQTQALHRLLDGDIVSPFPETAGVRELDTIGRLMDAFRSNVHALNRHREQLAAQVKARTAELQELVIEHRQARAEAEKASQAKSAFLAAMSHEIRTPLYGILGTAQLLADNPALNAQRDDLRAITDSGESLLTILNDILDYSAIEAGGKNVSVQSYVARLEPVAASGWHKYPWLN

SEQ ID NO: 34560 - protein, 167 aa, Homo sapiens
MRRRQTRKQEYPKALVSTCRKVFTLQFSILAIDLGCIPWAVMRIISISRLHFHFVSNVHALNRHREQLAAQVKARTAELQELVIEHRQARAEAEKANSNMNMTKGWLPNETLAKLVGPMITYLLPLLIGYTGGKLVGGERGGVVGAITTMGVIVGADMPMFLGSMIA

SEQ ID NO: 34561 - protein, 217 aa, Homo sapiens
GVNGMARDVVLSDAMMGYLHFIANIPVKGTRWLYSSKPYALATPPLSVINQWQLALDKGQLPTFVAGLAPQHPQYAAMHESLLALLCDTKPWPQLTGKATLRPGQWSNDVPALREILQRTGMLDGGPKITLPGDDTPTGAVISPSAVTVETAETKPMDKQTTSRSKPAPAVRAAYDNELVEAVKRFQAWQGLGAEGTIAPGRPDRGNESDRAEGGER

SEQ ID NO: 34562 - protein, 101 aa, Homo sapiens
  misc_feature (1)...(101): Xaa = X or * as defined in Table 2
YALATPPLSVINQWQLALDKGQLPTFVAGLAPQHPQYAAMHESYWPYSALREILQRTGMLDGGPKITLPGDDTPTDAVVSPSAVTNSHGRXVPTLGGVWGL

SEQ ID NO: 34563 - protein, 21 aa, Homo sapiens
MTNVGRALTRNLRISSVSVSV

SEQ ID NO: 34564 - protein, 57 aa, Homo sapiens
RKRVVLRSRNNVVFTLGRRHFVDVFALHPCVGMAGPASEKLTNVGLMRRINIASGNQ

SEQ ID NO: 34565 - protein, 277 aa, Homo sapiens
  DOMAIN (157)..(169): ABC transporters family proteins domain identified by eMATRIX, accession number BL00211A, p-value=7.300e-09, raw score of 12.23
  DOMAIN (155)..(277): ABC transporter domain identified by PFam, accession name ABC_tran, E-value=7.9e-05, PFam score of -6.5
  misc_feature (1)...(277): Xaa = X or * as defined in Table 2
RPGTGRCSAVQLPVLLLRGPHSSHTVGTHMVDLDSGQLCVYPGNSDESMPAATQARERLLADTAKKKAQIAELQSFVSRFSANAXKSRQATSRARQIDKIKLEEVKASSRQNPFIRFEQDKKLFRNALEVEGLTKGFDNGPLFKTLNLVLEVGENLPVLGTNGVGKSTLLKTLVGDLHPDSGTVKWSENARIGYYAQDHEYEFENDLPVFEWMSQWKQEGDDEQAVRSILGRLLFSQGDIKKPAKVLSGGEKGRMLFGKLMMQKPNILIMDEPPTHP

SEQ ID NO: 34566 - protein, 104 aa, Homo sapiens
  DOMAIN (57)..(91): kw TRANSCRIPTASE REVERSE II ORF2 domain identified by eMATRIX, accession number DM01354P, p-value=2.722e-10, raw score of 9.18
MVKKMARAPMILALANPEPEILACRHGRKEVRPDAIICTPGRSDYPNQSETNVLCFPANVHRIPQAASHLRAHQSRIPISLMSISAKILTYLLANQIQFLVKQH

SEQ ID NO: 34567 - protein, 360 aa, Homo sapiens
  DOMAIN (174)..(207): Malic enzymes proteins domain identified by eMATRIX, accession number BL00331I, p-value=8.279e-13, raw score of 16.81
MGGESSYEARNETDMFHIGQHKGTAIISTVAILNGLRVVEKNISDVRMVVSGAGAAAIACMNLLVALGLQKHNIVVCDSKGVIYQDREPNMAETKAAYAVVDDGKRTLDDVIEGADIFVGCSGPKVLTQEMKKKMDRAPMILALANPLFGNSAAAGERMRPDAIICTGRSDYPNQVNNVLCFPFIFRGALDVGATAINEEMKLAAVRAIAELAHAEQSEAVASAYGDQDLSFGPEYIIPKPFDPRLIVKIAPAVAKAAMESGVATRPIADFDVYIDKLTEFVYKTNLFMKPILSQARKAPKRVGLPEGEEARVLAATQELVTLGLAKPNLIGRPNVIEKAQFETGAWQIKSGRLIFENPS

SEQ ID NO: 34568 - protein, 107 aa, Homo sapiens
  DOMAIN (5)..(34): Regulator of chromosome condensation (RCC1) proteins domain identified by eMATRIX, accession number BL00625A, p-value=7.115e- 11, raw score of 16.21
MVVLCKFHSVFLSQKGQVYTWGHGPGGRLGHGDEQTCLVIEMSLHYLGCLLDPNGEKCVTAPRQVSALHHKDIALSLVAASDGATVCVTTRGDIYLLADYQCKKMAS

SEQ ID NO: 34569 - protein, 617 aa, Homo sapiens
  DOMAIN (89)..(136): kw TRANSCRIPTASE REVERSE II ORF2 domain identified by eMATRIX, accession number DM01354V, p-value=1.000e-40, raw score of 12.97
LEVMSRAIRKEKEIKGIQLGKEEVKLSLFADDMIVYLENPIVSAQNLLKLISNFSKVSGYKINVQKSQAFLYTNNRQTESQIMSELLFTIASKRIKYLGIQLTRDVKDLFKENYKPLLKEIKDDTNKWKNIPCSWVGRINIVKMAILPKCWDYRREPLRLAYWFIKKDIAKDTDEETRRASSCAALEMPIHSDILKVILDYLYTDEAVVIKESQNVDFICSVLVVADQLLITRLKEICEVALTEKLTLKNAAMLLEFAAMYSAKQLKLSCLQFIGLNMAALLEARSLDVLSDGVLKDLSEFYRKMIPAMDRRVITPYQDGPDISYLEVEDGDIFLKEEINMEQNHSETMFKKAKTKAKKKPRKRSDSSGGYNLSDIIQSPSSTGLLKSGKTNSVESLPELLTSDSEGSYAGVGSPRDLQSPDFTTGFHSDKIEAKVKPYVNGTSPVYSREDLKPWEKSPILKISAPQPIPSNRIDTTSSASWVAGSFSPVSPPVVDLRTIMEIEESRQKCGATPKSHLGKTVSHGVKLSQKQRKMIALTTKENNSGMNSMETVLFTPSKAPKPVNAWASSLHSVSSKSFRDFLLEEKKSVTSHSSGDHVKKVSFKGIENSQAPKIVR

SEQ ID NO: 34570 - protein, 320 aa, Homo sapiens
  DOMAIN (135)..(164): Regulator of chromosome condensation (RCC1) proteins domain identified by eMATRIX, accession number BL00625A, p-value=8.615e- 11, raw score of 16.21
  DOMAIN (37)..(177): Regulator of chromosome condensation (RCC1) domain identified by PFam, accession name RCC1, E-value=1e-05, PFam score of 25.2
  misc_feature (1)...(320): Xaa = X or * as defined in Table 2
LLKHGVSLYIQDKEGLSALDLVMKDRPTHVVFKNTDPTDVYTWGDNTNFTLGHGSQNSKHHPELVDLFSRSGIYIKQVVLCKFHSVFLSQKGQVYTWGHGPGGRLGTWEMNRHAWVPRLVGRDXMVIIVSPSWPAAKDHTVVLTEDGCVYTFGLNIFHQLGIIPPPSSCNVPRQGLHNRQNRRYPPVPGSAGPTSMEPSKIRPTGLKFSLTTQQQSEIDLGCSSLCWDYRREPLRLAYWFIKKDIAKDTDEETRRHGVSLYIQDKEGLSALDLVMKDRPTHVVFKNTGSLQFQSIPSCRESQILSEKQGDLFREEPMFGS

SEQ ID NO: 34571 - protein, 241 aa, Homo sapiens
  misc_feature (1)...(241): Xaa = X or * as defined in Table 2
FRVDPRVRKHFGLFYAMGIVLMMEGVLSACXHVCPNYSNFQFDTSFMYMIAGLCMLKLYQTRHPDINASAYSAYASFAVVIMVTVLGVVFGKNDVWFWVIFSAIHVLASLALSTQIYYMGRFKIDLGIFRRAAMVFYTDCIQQCSRPLYMDRMVLLVVGNLVNWSFALFGLIYRPRDFASYMLGIFICNLLLYLAFYIIMKLRSSXKVLPVPLFCIVATAGMWACALYFFFQNLSSWECLK

SEQ ID NO: 34572 - protein, 277 aa, Homo sapiens
  DOMAIN (128)..(163): Glycosyl hydrolases family 1 proteins domain identified by eMATRIX, accession number BL00572C, p-value=2.324e-25, raw score of 20.73
  DOMAIN (33)..(237): Glycosyl hydrolase family 1 domain identified by PFam, accession name Glyco_hydro_1, E-value=1.7e-84, PFam score of 294.1
  misc_feature (1)...(277): Xaa = X or * as defined in Table 2
MKPVWVATLLWMLLLVPRLGAARKGSPEEASFYYGTFPLGFSWGVGSSAYQTEGAWDQDGKGPSIWDVFTHSGKGKVLGNETADVACDGYYKVQEDIILLRELHVNHYRFSLSWPRLLPTGIRAEQVNKKGIEFYSDLIDALLSSNITPIVTLHHWDLPQLLQVKYGGWQNVSMANYFRDYANLCFEAFGDRVKHWITFSDPRAMAEKGYETGHHAPGLKLRGTGLYKAAHHIIKAHTLXVCFHAADKGIPETEKKRRLNWTYSSTWLGRFHNHGRG

SEQ ID NO: 34573 - protein, 224 aa, Homo sapiens
  misc_feature (1)...(224): Xaa = X or * as defined in Table 2
GTQNAVNGVIIFLSWGDAVKSFWIYRGGRKREGPLFHAXQFLIYTIIIRAVGSIINYVIANYKLKFITPGVIDFICTSLIAGILTIKLFLLINQFEKQQIKKGRDITSARIMSRIIKITIIVGLVLLYGEHFGMSLSGLLTFGGIGGLAVGMAGKDILSNFFSGIMLYFDRPFSIGDWIRSPDRNIEGTVAEIGWRITKITTFDNRPLYVPNSLFSSISVENPG

SEQ ID NO: 34574 - protein, 115 aa, Homo sapiens
  DOMAIN (4)..(39): Prion protein domain identified by eMATRIX, accession number BL00291A, p-value=1.000e-10, raw score of 4.49
  misc_feature (1)...(115): Xaa = X or * as defined in Table 2
PLRPGQPGPGGAGTRALRAPPLPSSSELCYGPGQPGRWPRCPQFPSLPPHSSXLLHTGHWPCTLGYCFIPILRAAPPLPCKCASPVLSCTYPLPAAPSLPVLVHTSIKCFCFHLQ

SEQ ID NO: 34575 - protein, 135 aa, Homo sapiens
  DOMAIN (42)..(69): C1q domain proteins domain identified by eMATRIX, accession number BL01113A, p-value=8.096e-09, raw score of 17.99
VLPAVPRPGQPPCVPAPVQAPEPPRPSPGWSQATGSPGPAGAAPSWRGLPAVPGHTAGVLGPGPPGQRQPGPGGAGTQLCGPHLFLRLLNVAYGPGQPALRNVPLQTAPALTPSPQHLLCPFLSTHLLNASVFIC

SEQ ID NO: 34576 - protein, 507 aa, Homo sapiens
  misc_feature (1)...(507): Xaa = X or * as defined in Table 2
RIPESRLPTTAFVQAPWARSGSSGLRRWEKHAGQQVGWWARGPGVRGRQAAGGGAAALTCRGGAGSAVRSCAGLPSLASGSAGCRLHPSYSFGFKVGSPTVPAALSSXSTSRGREHGGVTVVPVMTQNPRSPDGPARVEDCEAIAXGTGWLQQGIGTRPPGTGLGRARGAPAVPQWNPVKSCQGPGHPNRLPSHGPSSGEAGRGWRGLQITPQLPEVTHRRVLPGDHPATEAGGFGTGXPGLPGRVPGPGVGGTYQAKALTPLGPVGLLAPASCAQCLQQSADGPGATGHLXELAESQCRRQPTGPPGQLAVSGWATVPGVPAAPRPFGPAQQPASVPTPSYWAGSPGAAAWPESHRRXACDWAWXXVLPAVPRPGQPPCVPAPVQPQSHRGPAHDGARLYXGLPQAEQLHPGGGLPAVPGHTAGVLGPGPPGQRQPGPGGAGTQLCGPHLFLCFLNVAYGPGQPGRWPRCPQFPFLPPILSWNIFGVGTQKKKKKNQSFLKKKKKK

SEQ ID NO: 34577 - protein, 139 aa, Homo sapiens
  misc_feature (1)...(139): Xaa = X or * as defined in Table 2
RSLGLAVTEMVPWVRTMGQKLKQRLRLDVGREICRQYPLFCFLLLCLSAASLLLNRXRRSAEPGRRLSLLKVQTPGPCCLTVRRPRSCGTGDQWGERAPQRSGLGEHGGASRPEAQAGGVGLIASFPEASSPELPFSHP

SEQ ID NO: 34578 - protein, 354 aa, Homo sapiens
  DOMAIN (66)..(237): Domain associated with PX domains domain identified by PFam, accession name PXA, E-value=6.2e-15, PFam score of 63.0
  misc_feature (1)...(354): Xaa = X or * as defined in Table 2
DLILSHPTAWFTIKYKPKQLGLQELFPQGHSCAVCGKVKCKRHRPSLLLENYQPWLDLKISSKVEESLSKDLELVLENFVYPWYRDVTDDESFVDELRITLRFFASVLIRRIHKVDIPSIYNQETIKSSNESIXKWIVKARQKVKNTEFLQQAALEEYGPELHVALRSRRDELHYLRKLTELLFPYILPPKATDCRSLTLLIREILSGSVFLPSLDFLADPDTVNHLLIIFIDDSPAEKATEPASTLVPFLQKFAEPRNKKPSVLKLELKQIREQQDLLFRFMNFLKQEGAVHVLQFCLTVEEFNDRILRPELSNGXNAVSSWKNCRRFIKHTVWMKVLTKLDLIPSLVEEIPR

SEQ ID NO: 34579 - protein, 410 aa, Homo sapiens
  misc_feature (1)...(410): Xaa = X or * as defined in Table 2
FPGRRFRLVVRLRGAEAASERQVYSVTMKLLLLHPAFQSCLLLTLLGLWRTTPEAHASSPGAPAISAASFLXDLIHRYGEGDSLTLQQLKALLNHLDVGVGRGNVSQHVQGHRNPTTCFSSGDLFTAHNFSEQLRIGSSELHEFCPTILQQLDSRACTSENQENEENEQTEEGRPSAVEVWGFGFLSVSLINLASLLGVLVLPCTEKAFFSRVLTYFIALSIGTLLSNALFQLIPERSYKNKAQVDSLPTFLAQAGMLLWRVRIRRRVVDPIRESWMLPFTKIPLWGYGLLCVTVISLCSLLGASVVPFMKKTFYKRLLLYFIALAIGTLYSNALFQLIPENRRKWWQPVHNTFGGSTAWHTDKSIEQSIDTLFDEVKKESEKETPSLQIGDLGPQESLKTFNNTNSPHH

SEQ ID NO: 34580 - protein, 307 aa, Homo sapiens
  DOMAIN (229)..(247): CANNABINOID RECEPTOR TYPE 1 SIGNATURE domain identified by eMATRIX, accession number PR00522F, p-value=2.286e-09, raw score of 17.31
  misc_feature (1)...(307): Xaa = X or * as defined in Table 2
VGACTAAARPLPIPQLQPILHHRGEKSQLWAHSGSSWGFLAVAAVPPSHLCPPLQSRGWKRPPPLASAGVLPGCCCCACLVSPSLAQPAGLGPKPAAPLGPGPWVSVAPCSRPGPCPGTRSPAPXGHPAMGRGVHEPRVGPAPPEKAIITETGAGLAERRGQGLGGGSSFRSAEPQGCRSLGPQSPGGDPAHTILRPPSQNGDCAEMHACRLHPAILGTHGTGGLAAQSHAPRALLPSCPSSQQPADGWCSLHLCLPGLLLAPRIHGPSTREGGPGHGTPGPTNPASSGATRGTRRVRPSVPRSPTL

SEQ ID NO: 34581 - protein, 105 aa, Homo sapiens
  misc_feature (1)...(105): Xaa = X or * as defined in Table 2
VADPVGAARAGGQPLAGRVWPRAGGGHSPRVLGAAGPGPHVCTLRLPGTAIRTEPGAPLACARAWPGSSPAGPECLPTSCXPXEGQEPSSHVASLPWGPGVGETQ

SEQ ID NO: 34582 - protein, 240 aa, Homo sapiens
  DOMAIN (120)..(159): Tau and MAP proteins tubulin-binding domain proteins domain identified by eMATRIX, accession number BL00229A, p-value=7.242e- 10, raw score of 23.57
  misc_feature (1)...(240): Xaa = X or * as defined in Table 2
FFFFFFSFLCHLYWVSPTPGPHGKLANMANWAPWPSXGLSKLVGKHSCPAGXLPGHARAQASGAPGISPDSSAREAXECTPCGPGPAAPSTRGECPPPSSRPHSSQQDPGRCSFAPAVPQDAGGQGHWCCAPATGHSAPRGCPPARAAPTGSATPAPPPAACAASSLSMVSAPSRXTTGIASSGTSIPETKHQGTPGTAPAGTGPGGSTGPKAPGPAPAHPTRLAGTSGHTAPPTCPPAV

SEQ ID NO: 34583 - protein, 108 aa, Homo sapiens
  misc_feature (1)...(108): Xaa = X or * as defined in Table 2
RSGRTQRAAGVSGSALHQVQSWPHLKISADQRAGLLFXEHPFPPSASSGCLDVSISSYPVGSDXFINGMARANGRWKTFTGLHSGKPLGFSDAFCQHHNLIILCWKTW

SEQ ID NO: 34584 - protein, 294 aa, Homo sapiens
  DOMAIN (11)..(47): Synapsins proteins domain identified by eMATRIX, accession number BL00415Q, p-value=8.662e-09, raw score of 2.23
  misc_feature (1)...(294): Xaa = X or * as defined in Table 2
RGSGCSAELVPSSRWRPGSRAGAAAGTETPGXPRVYVPAGNGEAGGPGAAWARRAAALPGTAAGPPRPAARPGAAPARGGPAPGAPAQALPRTPTWPAARXAQRAPSPPSWGSAQPGHPGDLAAGVGRGAGGGHSRRGRHHHVRSLADLLQLPGAAEGAGDRGHLPGPDGERSXAASSFSAAGRAAGTASCCSAGGTPPSPCTILSTSSSSLAHVASSSRRRAEGDTKVSRGRAEGQDSETGREPGVLHRGSGRTQRAAGVSGSRSAPSPVVATTSRSLLTSVQGCFSENILSP

SEQ ID NO: 34585 - protein, 126 aa, Homo sapiens
  misc_feature (1)...(126): Xaa = X or * as defined in Table 2
QSPQEHFHPECGRRDILCQVRQEIRWPNPGEVHHLGLEICPVWILQLHLALRTRAPEHPLQVHRPGGGAVXRGVPPPLRLLQACDGPEVPAAGRPRPARSSPGQWPPXPAAVAPPVTERPPTPSAA

SEQ ID NO: 34586 - protein, 345 aa, Homo sapiens
  misc_feature (1)...(345): Xaa = X or * as defined in Table 2
TGRILDGWHWAKELRLDCPLGDSRRPPFSRVSTEGSPAFLALRLPNVTAGSXEVSMLASTETPLVITRPSPGGHDPGPAPRGAAASPAGSPAPXQKSPRPLSAAAPPLLASDPAPPRAAAPPADTESSVQPPAAPHAGPWTPSAPGPLDVHSPPPPSRGPFVQSSAEPHNRPSPGATRPRPPPRGAAASPAGSPAPXQKSPRPLSAAAPPLLASDPAPPRAAAPPADTESSVQPPAAPHAGPWTLERSWAPXRSLPTPIPVADPLCRAPLSHRYPXGDCQRSGLCHTSPGRASHLPGPGAHKRTPHACWLPLECHRRSPHPXTHPSGXPGPSPQSFFPEFLGSGP

SEQ ID NO: 34587 - protein, 192 aa, Homo sapiens
  DOMAIN (60)..(115): Sushi domain (SCR repeat) domain identified by PFam, accession name sushi, E-value=1.6e-12, PFam score of 55.1
  misc_feature (1)...(192): Xaa = X or * as defined in Table 2
CLVNSTTRRSFQLRLVPVPKFQPPHMTVRXLFNFGRQLTATTFSLRKSYAVREAYELQNCPDPPPFQNGYMINSDYSVGQSVSFECYPGYILIGHPVLTCQHGINRNWNYPFPRCDAPCGYNVTSQNGTIYSPGFPDEYPILKDCIWLITVPPGHGVYINFTLLHTEAVNDHIAVWYENLSSQNICDCDQQF

SEQ ID NO: 34588 - protein, 279 aa, Homo sapiens
  DOMAIN (71)..(100): Aminotransferases class-II pyridoxal-phosphate attachment sit domain identified by eMATRIX, accession number BL00599B, p-value= 9.043e-12, raw score of 18.93
  DOMAIN (78)..(279): Aminotransferases class-II domain identified by PFam, accession name aminotran_2, E-value=4.7e-17, PFam score of 70.1
MWAGNAWRAALSGVPCGRSAQSVLAQLRGILEGELEGIRGAGTWKSERVITSRQGPHIHVDGVSGGILNLTSVRFIRGTQSIHKNLEAKIARFHQREDAILYPSCCDANAGLFEVLLRPEDAVLSDELNCASIIHGICLCKAHKYHYCHLDVAYLETKLQEAQKHRLFLVATDGAFSMDGDIVPLQKICRLASRYGALVFVDECHATGFLGLTGQGTDELLGVMGQVTIINSTLGKALGGASGGYTTGPGPLVSLLRAQPYLFSNSLPPAVVGCTSKAL

SEQ ID NO: 34589 - protein, 713 aa, Homo sapiens
  DOMAIN (57)..(100): kw TRANSCRIPTASE REVERSE II ORF2 domain identified by eMATRIX, accession number DM01354T, p-value=1.000e-40, raw score of 9.48
  DOMAIN (1)..(179): Reverse transcriptase domain identified by PFam, accession name rvt, E-value=2.8e-15, PFam score of 64.2
MIILIDAEKAFDKIQQPFMLKTLNKLGIDGTYLKITRAIYDKPTANIILNGQKLEAFPLKTGTRQGCPLSPLLFNIVLEVLAQAIRQEKEIKGIQLGKEEVKLSLFADDMILYLENPIVSAQKLLKLISNVSKVSGYKINVQKSQAFLYTNNRQTESQIMSEFPFTIATKRIKYLGIQLTRDVKDLFKKYKPLLNKIKEDTNKWKNIACSWIGRINIMKMAFPRWELNNENTWTQEGEHHTLGPVVGWGKRGGIALVDIPNVNDKLMVLEVLARAIRQKKEIKGIQLGKEEVKLSLFADDMIVYLENSIVSAQNLKLISNFSKVSGYKINVQKSQAFLYTNNRQTESQIMSEFPFTIATKRIKYLGIQLTRDVKDLFKENYKPLLKEIREDTNKWKNIPCSRIGRINIMKMAILPKVIYRFNDIPIKLPMTFFTELEKTTLKFIWNQKRACIAKTILSKKNIAGGITLPDFKLYYKATVTKTAWYWYQNRDIDQWNRTEASEVTSHIYNHLIFYKPDKNKKWGNDSLFNKWCWENWLAICRKLKLDPFLTPYTKIHSRWIKDLNVRPKTIKTLEENLGNTIQDIGMGKDFMTKTPKAMATKAKVDKWDVIKLKSFCTAKETTIRVSRQPTEWEKIFAIYPSDKGLISRIYKELKQIYRKKTNNPIKKWAKNMNRHFSKEDIYAANRQMKKCSSSLVIREMQIKTTMRYHLTPV

SEQ ID NO: 34590 - protein, 663 aa, Homo sapiens
  DOMAIN (110)..(151): kw TRANSCRIPTASE REVERSE II ORF2 domain identified by eMATRIX, accession number DM01354I, p-value=1.000e-40, raw score of 15.55
  DOMAIN (284)..(481): Reverse transcriptase domain identified by PFam, accession name rvt, E-value=3.5e-05, PFam score of 3.9
MGDFNTPLSTLDRSMRQKVNKDIQELNSAVHQVDLIDIYRTLHPKSTEYTFFLAPHRTYSKIDHIVGSKALLSKCKRTEIIRNCLSDHSAIKLELRINKLTQNCSTTWKLNNMLLNDYWVHNEMKAEIKMFFETNENKDTTYKNLWDTFKAVCRGKFIALNAHKRKQERSKIDTLTSQFKELEKQEQTHSKASRRQEITKIRAELKEIETQKTLQKINESRSWFFEMISKIDRPLARLIKKKREKNQIDTIKNDKGDIITDPTEIQTTIREYYKHLYAIKLENLEEMDKFPYTNTLPRLNEEEIESLNRTITGSEIEAIIKSLPTKKSPGPDGFTAKFYQRYKEELVPFLLKLFQSIEKEGILPNSFYEASIILIPKPVLEVLARAIRQEKEIKGIHLGKEEVKLSLFADDMIVHLENPIFSAQNLLKLISNFSKVSGYKINVQKSQAFLYTTNKQTESQIMSELPFTIASKRIKYLGIQLTRDVKDLFKENYKPLLNEIKKDTNKWKNIPCSWIGRINIVKMAILPKVIYRFNAIPIKLPMTFFTELEKTTLKFIWNQKRAHIAKTLLSKKNKAGGIMLPDFKLYYKATVTKTAWCWYQNRDIDQWNRTEPSEIIPHIYNNLIFDKPDKKKKWGKDSQFNKWCWENWLAICRKLKRDPFFTS

SEQ ID NO: 34591 - protein, 368 aa, Homo sapiens
  DOMAIN (191)..(231): kw TRANSCRIPTASE REVERSE II ORF2 domain identified by eMATRIX, accession number DM01354Y, p-value=1.000e-40, raw score of 10.69
MDKFLDTYTLPRLNQEEVESLNRPITGSEIEALINSLPTKTSPELDGFTAEFYQWYKEELIPLLLKLFQSAEKEGILPNSFYKASIILIPKPGRVTIKKENFRPISLVNIDAGILKKILANQIQQHIQKLIHHDQVIYRFNAIPMKLPMAFFTELEKTTLNSTWNQKRACIAKTILSKKNKAGGIMLPDFKLYYKATITKTAWYWYQNREIDQWNRTEASEIIPHIYNHLIFEKPEKNKKWGKDSLFNKWCWETWLAICRKLKLPPFLTPYTKINSRWIKDLNVRPKTIKTVEENKGNTTQDIGMGKDFMSKTRKAMATKAKIDKWDLIKLKSFCTAKETTIGVNKLATEWEKIFGIYPSDKGLISRI

SEQ ID NO: 34592 - protein, 293 aa, Homo sapiens
  DOMAIN (128)..(175): kw TRANSCRIPTASE REVERSE II ORF2 domain identified by eMATRIX, accession number DM01354V, p-value=1.000e-40, raw score of 12.97
MTVFSTNGAQKLDIHKHLYANKLENLEEMDTFLDTYTLPRLNQEEVESLNRPITGAEIVATINSLPTKKSPGPDGFTAEFYQRYKEELLISNFSKVSGYKINVQKSQAFLYTNNRQTESQIMSELPFTIASKRIKYLGIQLTRDVKDLFKENYKPPLNKIKEDTNKWKNVPCSWVGIINIVKMAILPKVIYRFNAFPIKLPMIFFTELEKTTLKFIWNQRRDCIAKTILSQKNKAGGIMLPDFKLHYKATVTKTACYWYQNRHIDQWNSTEPSEIIPHIYNHLIFDKPDKNKK

SEQ ID NO: 34593 - protein, 553 aa, Homo sapiens
  DOMAIN (57)..(104): kw TRANSCRIPTASE REVERSE II ORF2 domain identified by eMATRIX, accession number DM01354V, p-value=1.000e-40, raw score of 12.97
MIVYLENPIVSAPNLLKLISNFSKVSGYKINVQKSQAFLYTNNRQTESQIMSGCPFTITAKRIKYLGIQLTRDVKDLFKENYKPVLNKIKEDTNKWKSISCSWIGRINIMKRAILPKVTYTFNAIPIKLPLTSFTELEKTTLKFIWNQKRARIAKTILSKKNKAGGITLPDFKLYYKCTVTKTAWCQYQNRYIDQWNRTEASEITPHIYNHLIFDKPDKNKQWHLSLFNTEVPIVWSPELSSKFAGDADAGRPETPLRTGLRRISFLRLAIFLIWVELNHSNFRDHLKCLLKLRRLGPIPRVSDWVGQVGDLEGKNGSMSQIQGQLLCVALGHGTPAAPAPAIAKRDQGVAWAMATPRCGVGPMGAQKARGEVWESLPRFQRMYGNAQMSRQKCAALVEPSWNTSTRAVQRRYGGLEPPCSMPTGALPSGAVRRGPPSSRPQNGRPTDSLHHAPGKVTGTQHQPVKAAKGAVPCRATGVELPKALGAHPLHWHDLEVRHGVKGDYFGALQLNDFPGGLQTCMGPVAPLFWPISPIKNGSIYPVPAPSLYLRSN

SEQ ID NO: 34594 - protein, 499 aa, Homo sapiens
  DOMAIN (342)..(389): kw TRANSCRIPTASE REVERSE II ORF2 domain identified by eMATRIX, accession number DM01354V, p-value=1.000e-40, raw score of 12.97
MGKKQSRKTENSKNQSASPPPEECSSSPAMEQSWMENDFHELREEGFRSNFSELKEDVRTHSKEAKNLEKRLDEWLTGITSVEKSLNDLMELKTMARELCDKCTSFSSKFHQLEERVSVTEDQMNEMKSWFFEKINKIDRLLARLIKKKREKNQIEAIKNDKGDITTDPTEIQTTIREYYKHLYTNKLENLEEMDTFTGTYTLPRLNQEEIESLNKPITGSEIEAIINSLPTKKSPGPDGFTAEFYQRYKEELLVQHTKIDKPYSAYKPNPRPVTATRLSRIGRRVHQYLENPIVSAQNLLKLKSNFSKVSGYKINVQKSQAFLYIKKRQTESQIMSELPFTIASKRIKYLGIQLIRDVKDLFKENYKPLLNEIKEGTNKWKNIPCSWIGRINIVKMAILPKVIYRFNAIPIKLPMTFFTELEKITLKFIWNQERACIAKTILSKKNKAGGIMLPDFKLYYKAYSNQNSMGLVPKQISRPMEQNRALRNNPTHLQPSDL

SEQ ID NO: 34595 - protein, 653 aa, Homo sapiens
  DOMAIN (458)..(498): kw TRANSCRIPTASE REVERSE II ORF2 domain identified by eMATRIX, accession number DM01354Y, p-value=1.000e-40, raw score of 10.69
MGRNQSRKAENSKHQSASSPPKECSSSPAMEQSWMENDSEELREEGFKRINSLEKTLNDLMELKTLAREPRDACTSFSSQFDHVEERVSVIEDQMNEMKREEKFREKIVKRNEQSLQEIWDYVKRPNLLLIGVPESDGENGTKLENTLQDVIQENVPNLARQANIQIQEIQRMPQKYSSRRATPRHIIVRFTKVEMREKMLRAERQKGRVTHKGKPIRLTADLSAETLQARREWGPIFNILKVKNLQPRISYPAKLSFISEGEIKSFTDNQMLRDSATTRPALQELLKEALNMERNNSSNLLKLISNFSKVSGYKINVQKSQAFLYTNNRQTESQIMSELPFTIASKSIKYLGIQLTRDVKDLFKENYKPLLNETKGHKKRKNLPCSWVGRINIVKTAILPKVIYRFNAIPIKLPMIFFTELEKTTLKFMWNQKRACIAKTILSQKNKAGGITLPDFKLYYKSTVTKTAWYWYQNRDIDPWNRTEPSEIIPHIYNHLIFDKPEKNKQWGKDSLFNKWCWENWLGIYRKLKLDLFLMPYTKINSRWIKDLNVRPKTIKTLEENLGNTIQDIGIGKDFMTKTPKAMATKAKIDKWDLIKLKSFCTAKETTIRVNRQPTEWQKIFTIYLSDKGLISRIYKELKQIYKKKSTPSKSG

SEQ ID NO: 34596 - protein, 571 aa, Homo sapiens
  DOMAIN (257)..(304): kw TRANSCRIPTASE REVERSE II ORF2 domain identified by eMATRIX, accession number DM01354V, p-value=1.000e-40, raw score of 12.97
  DOMAIN (16)..(270): Reverse transcriptase domain identified by PFam, accession name rvt, E-value=0.0039, PFam score of -25.0
MRPQGPAASPQRLRGLLLLLLLQLPAPSSASEIPKGKQKAQLRQREVVDLVSPREPSRDRRAGGGDLAARPTGRASVWLLGVSVCTAVCRVSCCAGVSCFLFTGEEGPGYACSESWNSEGRPKWEAIVERTCDMGPEHHSQATGENSFQETGNERPECFPGAHLWEVLEVLARAIRQEKEIKGIQIGREEVNKLSLFADDMIVYLENPIVSAKNFLKLISNFNKVSGYKINVPNSQAFLYTSNRQTESQVMSELPFTTATKRIKYLGIQLRRDVKDLFKENYKSLLKEIREDTNKWKNIPCSWIGRINIMKMAILPKVIYRFNDIPIKLPLTFFTELEKTTLNFIWNQKRTHIAKTILGKKNKAGGITLPDFKLYYKATVTKTAWYWYQNRYTDQWNRTEASEITPHIYNHLIFDKPDTNKQWEKDYLFNKWCWENWLAICRKLKLDPFLTPYTKLNSRWIKDLNVRLRTIKILEENLGNTIQDVGMGKDFMSKTPKAMATKTKIGKWDLIKLNSFCTAKETIIRVNRQPTEWEKIFAIYPSDKGLISRIYKELKQIYKKTTTPSKSGQRI

SEQ ID NO: 34597 - protein, 384 aa, Homo sapiens
  DOMAIN (219)..(266): kw TRANSCRIPTASE REVERSE II ORF2 domain identified by eMATRIX, accession number DM01354V, p-value=1.000e-40, raw score of 12.97
  DOMAIN (20)..(232): Reverse transcriptase domain identified by PFam, accession name rvt, E-value=0.00033, PFam score of -9.8
MFWGFRFQTSTDYKASSAFIQRGTQPLLKQPGLSITICDVRSWSARGSPTEGGRGTEIQPAAPLALKMPFSHEAIHLGGCIHLERGPFSNLHKGTGEVNGGLKAPPLDHQLTFLAPSCSRARLSPLRMIVLEVLARAIRQEREIKGIHIGKEEVKLCLFADDMIVYLENPIISAQSFLKLISNFSKFSGHKINVQKSQAFLYTNNKQTDSQIMSDLPFTIASKRIKYLGIQLTRDVKDLFKENYKPLLNEIKEDTNKWKDIPCSWIGRINIVKMAILPKVIYRFNAIPIKLPMTFFTELEKTTLKFIWNQKRAHITKTILSQKNKAGGIMLPDFKLYYKATVTKTAWYLYQNRDIDQWNRTEPSEITPHIYNHLIFDKPDKNKK

SEQ ID NO: 34598 - protein, 1584 aa, Homo sapiens
  DOMAIN (543)..(583): kw TRANSCRIPTASE REVERSE II ORF2 domain identified by eMATRIX, accession number DM01354Y, p-value=1.000e-40, raw score of 10.69
MAADESSQNTLRLQFKAMQEMQHKRLQKQMEKKREKELSLKSRADDQEEPLEVSDGLSLLHAGEPNSKNSFEKRVLEDEIEHLRNELRETVDENGRLYKLLKERDFEIKHLKKKIEEDRFAFTGTAGVAGDVVATKIVELSKKNRLLMAESEGAKTRVKQLTNRIQELEREHPHWGHIQTPPYSRDRELTTAQWNPVLYGAVHIMNTFPFVGLQIYRVKVAIGNGDLFPRAHFTKPVTVHETQELETPEVKALQDRLVATNLKMSDLRNQIQSVKQELRMAQKVLAREVGEDINVQQLLSSPGTWRGRAQQILVLQSKVQELEKQLGQARSQSAGTASDELSVYPDPRKLSAQEKNLLRIRSLEREKQEGLEKLASERDVLQRELEELKKKFEGMRSRNKLLSSEMKTLKSQMGTLVEKGRHDDELIDALMRIKYLGIQLKRDVKNLFKKNYKPLLNEIKEDTNKWKNIPCSWVGRVNIMKMAILPKVIYRFSAIPIKLPMTFFTELEKTTLKFIWNQKRAHIAKTILSKKNKAGGIIVPDFKLYYKATVTKTAWYWYQNRYIDQWNRTEASEITPHIYNHLIFDKPDKNKKWGKDSLFNKWCWENWLAICRKLKLDPFLTPYTKINSRWIKDLNVRPKTIKTLEEKLGNTIQDIGMGKDFMTKTPKAMAAKAKIDKWDLIKLKSFCMAKETTIRDQLKQLQEILGSLSLQEEKTRVSQHHLDQQLNSEAQRSNSLVAQLQAMVAEREAKVRQLEMEIGQLNVHYLRNKGVGEGSSGREVSPAYTQFLEDPGLTKSPASAGDHVGRLGSSRFSDSPEQKGWQAQVSEIKALWQAAEVERDRLTEFVTVLQKRVEESNSKLLESERKLQEERHRTVVLEQHLEKIRLEPGKASASQRAAPRTKTGLPTSNNRHNPTGSEKKDPSFAQLSDVPVESQMEELTTRLAIQVEENEMLKAALGSALRGKEEDFRMYHEILGQARKAEEKPWWDTAGDPGLAGLQQQGGPAAHWQRRELWDGKAAVNGQMQSLGQVFIALILGPCPYLAHDPSICTRRPSAAGGPRGDGYRAGDEDLGEDQGPVQAMGIKTALPAAELGLYSLVLSGALAYAGRGLLEASQDGAHRKAFRESVRPGWEYIGRKMDVADFEWVMWFTSFRNVIIFALSGHVLFAKLCTMVAPKLRSWMYAVYGALAVMGTMGPWYLLLLLGHCVGLYVASLLGQPWLCLGLGLASLASFKMDPLISWQSGFVTGTFDLQEVLFHGGSSFTVLRCTSFALESCAHPDRHYSLADLLKYNFYLPFFFFGPIMTFDRFHAQVSQVEPVRREGELWHIRAQAGLSVVAIMAVDIFFHFFYILTIPSDLKFANRLPDSALAGLAYSNLVYDWVKAAVLFGVVNTVACLDHLDPPQPPKCITALYVFAETHFDRGINDWLCKYVYNHIGGEHSAVIPELAATVATFAITTLWLGPCDIVYLWSFLNCFGLNFELWMQKLAEWGPLARIEASLSVQMSRRVRALFGAMNFWAIIMYNLVSLNSLKFTELVARRLLLTGFPQTTLSILFVTYCGVQLVKERERTLALEEEQKQDKEKPE

SEQ ID NO: 34599 - protein, 930 aa, Homo sapiens
  DOMAIN (195)..(240): kw TRANSCRIPTASE REVERSE II ORF2 domain identified by eMATRIX, accession number DM01354N, p-value=1.000e-40, raw score of 13.17
  DOMAIN (85)..(360): Reverse transcriptase domain identified by PFam, accession name rvt, E-value=5.2e-06, PFam score of 15.7
MEITTNCLSEHSAITLQLRIKKLTQNCTTTWKLNYLLLNDYWVNNEMKEEIKMFFETNENKDTTYQNLWDVFKAVCRGKFIALSAHKRKQERSKTDTLTSQLKELEKQEQTHSKASRRQEITKIRAELKEIETQKTLQEINDSRSSFSEKLNKIDRPLARLIKKKREKTQIDAIKNDKGEINTNPTEIQTTIREYYKYLYANKVENLEEMDTFLDTYTLPRLNQEEVESLNRPITGSEIEAIINSLPTKESPGPDGFTAEFYQRAIRKGKEIKGIQLGKEEVTLSLFADDMIVYLGNPIISAQNLMKLLSNFSKVSGYKINGQKSQACPYTNNRQTESQIMSELPFTIATKRIKYLGIQLTRDVKDLFKENYKPLLNKIKEDKKKWKNIQCSWIGRIIIMKMAILPMVICRFNAIPIKLPMTFFTELEKTTLTFIWNQKRACIAKKILSKENKAGGIMLPDFKLYYKATVTKTAWYWYQNRYIEQWNRTEASEITPHIYNHLIFDKSDKNKKWGNNSLFNKWCWENWLAICRKLKLGPFLTLYTKINSRWIKDLNVRPKTIKTLEENRGNTIQDIGMGKDFMTKTPEAMATKTKIDKWDLIKLKSFCMAKETTIRVHRQPTEWEKIFAIYPSDKGLISRIYKELKQIYKKKTNNPIKKWAKDMNRHFSKEDIYAANRHMKKCSSSLAIREMQIKTTMRLRYSRCLNVDAVSLKRVDSEVQEGSRTPLGRKWEKVMARVQPHWLFNSFVASAVLLQLRAEAHAALRLPATGTCDFAHQNLPVATVSGQDWCQQAPSIPGPLDAGDSSGLFGKPLELERHSQLPPFRPSPTAFSKPRSVRLTPSTQPFPSPRGLGVVTSAHQRGGGRRVGRSLVARQGSRLQDVLPGGLDPSGRHSVKGQRSAVEAPAGDSTRPDPRITGTPAPATALKSVE

SEQ ID NO: 34600 - protein, 1159 aa, Homo sapiens
  DOMAIN (283)..(328): kw TRANSCRIPTASE REVERSE II ORF2 domain identified by eMATRIX, accession number DM01354N, p-value=1.000e-40, raw score of 13.17
  DOMAIN (369)..(559): Reverse transcriptase domain identified by PFam, accession name rvt, E-value=9.5e-10, PFam score of 45.8
MGTSEVQNGEERAGTSGQGSVEQLSGSSVQLPPGLKLCFEPYFSSCASDCILHASPLSLMAASGSQNPNLWASWLCCKWVQCPERQLGCHLTSSVIYGLRYYPQAKRSELELRDCEGLCNQTSPLSSLDGMGWKAAAEESNSGIRNIWIPIPAFATHKQYNVRQVISPSPPYWSHRGNGNNSLCVTRLSGGLKQPVAGTGRGLEGGSGTRDLMPFLSAAPKEQPPILAPARRSWFFEKINKIDRLLARLIKKKREKNQIDAIKNGKGDITTDPTEIQTTIREYYKHLYANKLENLEEMDKFLDTYTLPRLNQEEAESLNRPITGSEIEAIINSLSTKKSPGPDGFTAEFYQRYKEELVPFLLKLFQSTEKEGILPNSFYEASIILIPKPGRDTTKKENFRPISLMNIDAKILNKILANRIQQHIKKLIHHDQVGFIPGMQGWFNIRKSINVIQHINRTKHKNHMIISIDAEKASDKIQQPFMLKTLRKLGIDETQTESQIMSELPFTIASKRIKYLGIQLTRDVKDLFKENYKPLLNEIKEDTNKWKNFPCSWVGRINIVKMAIVPKVIYRFNASPIKLPMTFFTELEKTTLKFIWNQKRACIAKSILSQKNKAGGIMLPDFKLYYKATVTKTAWYWYQNRDIDQWNRTEPSEITPHIYNYLFFDKPDKNKQWGKDSLFNKWCWENWLAICRKLKLDPVLTPYTKINSRWIKDLHVRPKTIKTLEENLGITIQDIGMGKDFMSKTPKAMATKAKIDKWDLIKLKSFCTAKETTIRVNRQPTEWEKIFATYSSDKGLISRIYNELKQIYKKKTNNPIKKWAKDMNRHFSKEDIYADKKHMKKCSSSLIIREMQVKTTMRYHLTPVRMAIIKKSGNNSLFRGHGAKESYVDKDKRGHLHSGVPFQKSPAGFAKAERGSRRSVVAAGLLPSLTSNMSRQTNDNTCTAATVPSYRMHRQYDAVLSCARCLLWPTLTGIMQKREFWEAQFSLAMVTCNNVAGQTPPHTTEPRKKKGVMAKLSGAFTGKSVFSGESSMGEESPAGMRNGTGARVGQEERVGVGKERQLRKKELEVGLPELESPGSEARVVSSCMSPSDAQAYLGHHSPPPAVGHLGTCLATSRYTDSCTFQWFCLLSGYIWSLPTQCEDGEDEDLYDGPLPFNEW

SEQ ID NO: 34601 - protein, 335 aa, Homo sapiens
  DOMAIN (170)..(217): kw TRANSCRIPTASE REVERSE II ORF2 domain identified by eMATRIX, accession number DM01354V, p-value=1.000e-40, raw score of 12.97
  DOMAIN (2)..(184): Reverse transcriptase domain identified by PFam, accession name rvt, E-value=0.0047, PFam score of -26.2
  misc_feature (1)...(335): Xaa = X or * as defined in Table 2
MLDASCHRTSDSKFFSFGVQTGFLTPELAHLVGPCDRDHNSSPAREQNWTENEFDELTEVGFRKWVITNSSELKEHVLTQSKEAKNLEKRAIKQEKEIKGIQLGKEEVKLSLFADDMIVYLENPIVSAQNLLKLISKFSKVSGYKINVQKSQALLYTNNRSQIMSELPFTIAMKRIKYLGIQLTRDVKDLFKDNYKPLLKEIREDTNKWKNIPCSWLGRINIMKMAILPKAIYRFNAIPIKLLXTFFTELEKTTLNFIWNQKRARIAKTILSKKNKAGGITLPDFKLYHKATVTKTAWYWYQNRYIDQWNRTEASEITPHIYNHLIFDKPEKNKQ

SEQ ID NO: 34602 - protein, 575 aa, Homo sapiens
  DOMAIN (112)..(152): kw TRANSCRIPTASE REVERSE II ORF2 domain identified by eMATRIX, accession number DM01354Y, p-value=1.000e-40, raw score of 10.69
  DOMAIN (439)..(458): Lipoxygenase domain identified by PFam, accession name lipoxygenase, E-value=0.011, PFam score of 11.0
RIKYLRIQLTRDVKDLFKENYKSLLNEIKEDTNKWKNIPCSWIGRMNIIKMAILPKVIYRFNVIPIKLPMTFFSELEKSTLKFIWNQKRARIAKTILSQKNKAGGIMLPDFKLYYKATVTKTAWYWYQNRDIDQWNRTEPSEMTPHIYNHLIFDKPDKNKQWGKDSLFNKWCWENWLAIGRQLKLDPFLTPYTKINSRWIKDLNVRPKTIKTLEENLGNTIQDISMGKDFMSKTPKAMATKAKMDKWDLIKLKSFCTAKETTIRVNRQPTEWEKNFAIYSSDKGLISRIYKQLKQIYKKKTNNPIKKWAKDMNRHFSKEDVYAANRHMKKCSSSLAIREMQIKTIMIYHLTPVTMAIIKKSGNNRCWRGCGEMGTLLYCWWDCKLVQPLWKTLWQFLRDLELGIPFDPAIPLLGIYPKDYKSCCYKDTCTPKLARDDQIHILKQHRRKELETRQKQYRAWYEINPFHSVWPVTAGKSPRHQLPVWVHNPQTSPYLQLQTRDGEESNENNFGSTILASDFFAEIDKLSILQIHMEMEGTQNSQNNLDKKKTKMEDLHFSISKLLHSYSIQDNVISA

SEQ ID NO: 34603 - protein, 117 aa, Homo sapiens
  misc_feature (1)...(117): Xaa = X or * as defined in Table 2
RQPVHLVHELPQQSWGICLNSSEQHGALQHSSLHLRMCSEPWSSADPQXRXTCRNLXLPVRGPPRRTDLFSVSSKSTLKEWPLLLMILAELGSYLILSGRREESYFTSLVLISIGDC

SEQ ID NO: 34604 - protein, 237 aa, Homo sapiens
  DOMAIN (97)..(128): Eukaryotic-type carbonic anhydrases proteins domain identified by eMATRIX, accession number BL00162A, p-value=2.324e- 23, raw score of 22.92
  DOMAIN (96)..(158): Eukaryotic-type carbonic anhydrase domain identified by PFam, accession name carb_anhydrase, E-value=6.6e-25, PFam score of 92.8
MARSWLTATSASRVQAILLPQPPRVFNKYFLNHLQGQGTVNSRHDHSVLVARQVQRRLRQMRMKSNRHVSAVLELERGQQQTGHNAQNPVSTCPIHWKEFFPIADGDQQSPIEIKTKEVKYDSSLRPLSIKYDPSSAKIISNSGHSFNVDFDDTENKSELEKTTSNFIGNQKRACIAKTILSKNNKAGGIMLPDFKLNYKATVTKTAWYWYQNRYIDQWNRTEASEINTTHLQPSDL

SEQ ID NO: 34605 - protein, 565 aa, Homo sapiens
  DOMAIN (57)..(100): kw TRANSCRIPTASE REVERSE II ORF2 domain identified by eMATRIX, accession number DM01354T, p-value=1.000e-40, raw score of 9.48
  DOMAIN (1)..(179): Reverse transcriptase domain identified by PFam, accession name rvt, E-value=7.8e-13, PFam score of 56.1
  misc_feature (1)...(565): Xaa = X or * as defined in Table 2
MIISIDTENAFEKIQQPFMLKTLNKLGIDGTYLKIIRAIYDKPTANIILNGQKLEAFPLKTGTRQGCPLSPLLFNIVLEVMARVIRQEKEIKGIQLGKEEVKLSLFVDDMIVYLENPIVSAQNLLKLISNLSKVSGYKINVQKSQAFSYTNNRQTESQIMNGLPFTTASKRIKYLGIQLTRDVKELFKENYKPLLNEKKVDTNKWKNIPCSWIGRINILKMAILPKELEKTTLKFIWNQKRACIAKSILSKKNKAGGITLPDFKLYYKATVTKTAWYWYQNRDIDQWNRTEPSEIIPHIYNHLIFDKPDKNKKWGMGSLFNKWCWENWLAICRKLKLDPFLTPYTKINSRWIKDLNVRPKTIKTLEENLGNTIQDIDMGKDFMSKTPKAMATKAKIDKWDLTKLRSFCTAKETTIRVNRQPKEWEKIFAIYSSDKGLISRIYKELKRIYKKKNNPIKKWAKDMNRYFXKEDIYAANRHMKKCSSSLAIREMQIKTTMRYHLTPVRMAIIKKSGNNRWEMNNENTWTQEGEHHTLGHCWWKARRSRSCLTWMAAGKKRMRKTLQMT

SEQ ID NO: 34606 - protein, 650 aa, Homo sapiens
  DOMAIN (149)..(194): kw TRANSCRIPTASE REVERSE II ORF2 domain identified by eMATRIX, accession number DM01354N, p-value=1.000e-40, raw score of 13.17
  DOMAIN (224)..(497): Reverse transcriptase domain identified by PFam, accession name rvt, E-value=4.8e-83, PFam score of 289.3
MKAEIKMFFETNENKDTTYQNLWDTFKALCRGKFIALNAHKRKQERSKIDTLTSQLKELEKQEQTHSKASRRQEITKIRAELKEIETQKTLQKINASRSWFFERINKIDRPLARLIKKKREKNQIDAIKNDKGDITTDPTEIQTTIREYYKHLYANKLENLEEMDKFLDIYTLPRLNQEEVESLNRPITGAETVAIINSLPTKKKPGTRQIHSQILPEVQGGAEKEGILPNSFYEASIILIPKLGRHTTIKENFRPISLMNIDAKILNKILANRIQQHIKKLIHHDQVGFIPGMQGWFNINKSINVIQHINRTKDKNHMIISIDAEKAFDKIQQRFMLKTLNKFGIDGTYLKIIRAIYDKPTANIILNGQKLEAFPLKTGTRQGCPLSPLLFNTVLEVLARAIRQEKEINGIQLGKEEVKLFLFADDMIVYLENPIVSAQNLLKLISNFSKVSGYKINVQKSQAFLRTNNRQTESKIMSELPFTTASKRIKYLGIQLTRDVKDLFKENYKPLLKEIKEDTNKWKNIPCSWIGRINIVKMAILPKVIYRFNAISIKLPMTFFTELEKTTLKFIWNQKRARIAKAILSQKNKAGGIMLPDFKLYYKANSNQNSMVLGTKTGDIDQWNRTEPSEIIPHIYNHLIFDKPDKNKK

SEQ ID NO: 34607 - protein, 888 aa, Homo sapiens
  DOMAIN (774)..(791): RNase H domain identified by eMATRIX, accession number PF00075A, p-value=5.600e-13, raw score of 14.44
  DOMAIN (221)..(382): RNA recognition motif. domain identified by PFam, accession name rrm, E-value=8.1e-44, PFam score of 159.0
  misc_feature (1)...(888): Xaa = X or * as defined in Table 2
MTMNFVADSHTGRNPLASAAGAKTGLRPLPRPCGARVWNPPDAGGGGVGSLKTSTPLGPLSAANSPVHQGSVPQTRARGGGTLFQEVVTSRTLAFRNSLSAFTEVTSGTVSGRKGGRSTHLAGRRVSGGEGSRKAAAAALAAVAAAPGPVRRCSSQSCFSSSGSSHYSARTSPVRVRPRRSLSSRSAAGNRAEATESAMEKTLETVPLERKKREKEQFRKLFIGGLSFETTEESLRNYYEQWGKLTDCVVMRDPASKRSRGFGFVTFSSMAEVDAAMAARPHSIDGRVVEPKRAVAREESGKPGAHVTVKKLFVGGIKEDTEEHHLRDYFEEYGKIDTIEIITDRQSGKKRGFGFVTFDDHDPVDKIVLQKYHTINGHNAEVRKALSRQEMQEVQSSRSGRGDGYGSGRGFGDGYNGYGGGPGGGNFGGSPGYGGGRGGYGGGGPGYGNQGGGYGGGYDNYGGGNYGSGNYNDFGNYNQQPSNYGPMKSGNFGGSRNMGGPYGGGIWKNTSITERKKSRKLDLIQSKKGSRTKEAPQPPVASLCMHLGHWSRLMVSPGAQLTGKNSHGLSVSSVRKSNVGPRRLCAAMKATGPDNAQSQVSPPGHAPSAEDPTGSRTVSSPCTDRPHPFLSRPKPPTQISLVLPLKTDGALERMPQQLHIASSGAKVPNPSTQTPPVLLAFFYPFNLPPXNVQPFACPPSIVNPAVWDTSTPSVAEHHTPIRITLKEPTQFLSQKQYPIPQAALVGLQPIISHLLASHLLRPTDSPFNTPILPVKKPNGTYRLVQDLRLINQAVLPRHAGLGRDLGSRRAARGPASASVAARGRLSRGCGDRPVNVAAAGQKMGKKQNGKSKKVEEAEPEEFVVEKVLDRRVVNGKVEYFLKWKGFTE

SEQ ID NO: 34608 - protein, 302 aa, Homo sapiens
  DOMAIN (232)..(249): RNase H domain identified by eMATRIX, accession number PF00075A, p-value=5.600e-13, raw score of 14.44
MRKVKGKNRQSFKCLPPPSGALQAHGAAAPHGSLLTLHLHLVPVSSAAMKATGPDNAQSQVSPPGHAPSAEDPTGSRTVSSPCEDRPHPFLSWPTWISLALLLKTDGALERMPQQLPSLHPSQGTQSIHPDPSSTSSFLLPFQPPTLKRAAFPCPPSIVNPAVWDTSTPSVAEHHTPIRITLKEPTQFLSQKQYPIPQAALVGLQPIISHLLASHLLRPTDSPFNTPILPVKKPNGTYRLVQDLRLINQAVLPLVQEDYSVLLYLPLNVTPGLPPATAFSYPPSPGPVARARLASRLHSHAA

SEQ ID NO: 34609 - protein, 305 aa, Homo sapiens
  DOMAIN (166)..(220): Heat shock hsp70 proteins family proteins domain identified by eMATRIX, accession number BL00297H, p-value=4.984e-17, raw score of 15.46
  DOMAIN (2)..(305): Hsp70 protein domain identified by PFam, accession name HSP70, E-value=7e-10, PFam score of -140.6
MPNYVTFTDTKQLISDTPNNQVPMNRASMAFDAKCLTGCRFDDAIVQFDMTYWPFTVVNDAGRPKVQVEYERDKKLLPIGGVFYGSDKDEGNCKSLPWEDCYQCCETSQNVQDFLFLDVTPLSLDIKTADGVMAVLIKCDATIPTRQTQTFTTYSDKPSMLIAKDKNLLRKFELTGVPPAHHGAHQIEVTFDINAKGILNVTLTDDKGHLSKEDIEPMVQETEKYKAEDEKQRDKVSSKNSLDPYVFNMKATAEDEKLQVKINNEHKQKILSKCHEIINWLDKNQTAEKEEFEHAQQELEKSSSP

SEQ ID NO: 34610 - protein, 331 aa, Homo sapiens
  DOMAIN (217)..(238): 70 KD HEAT SHOCK PROTEIN SIGNATURE domain identified by eMATRIX, accession number PR00301D, p-value=4.635e-16, raw score of 15.51
  DOMAIN (1)..(100): Transposase domain identified by PFam, accession name Transposase_15, E-value=3.3e-07, PFam score of 14.9
MHQTKKGNQWHFGMKAHIGVDAKSGLTHSLVTTRPNEHDLNQLGNLLHGEEQFVSADAGYQGAPQREELAEVDVDWLIAERPGKVRTLKQHPRKNKTAINIEYMKASIRARVEHPFRIIKRQFGFVKARYKGLLKNDNQLAMLFTLANLFRADQMIHCTRGEGLITTKIPKAPDNGSYCLPSKNDDSEEEDPEMSPMVVTKMKEIAEAYLGKTVTNAVLTVPAYFNDSQRQATKKDARTIAGLNGLRISNEPTAAAIAYGLNQKVGTERNVLIFDLGGSITPRIRTPETGSDDAIKSILEQAKKEIESQKGGECDPCRQSLRPPGPAANRR

SEQ ID NO: 34611 - protein, 225 aa, Homo sapiens
  DOMAIN (47)..(101): Heat shock hsp70 proteins family proteins domain identified by eMATRIX, accession number BL00297H, p-value=1.000e-40, raw score of 15.46
  DOMAIN (1)..(190): Hsp70 protein domain identified by PFam, accession name HSP70, E-value=3.5e-07, PFam score of -216.5
DAWVTVLIKRNTTIPTKQTQTFTTYSDNQPGVLIQVYEGERAMTKDNNLLGKFELTGIPPAPRGVPQIEVTFDIDANGILNVSAVDKSTGKENKITITNDKGRLSKEDIERMVQEAEKYKAEDEKQRDKVSSKNSLESYAFNMKATVEDEKLQGKINDEDQQKILDKCNEIINWLDKNQVCTSSSSSPSPPQGGGGGGKPKLGLNFRGGHKSGGSKNIGVPPKIR

SEQ ID NO: 34612 - protein, 111 aa, Homo sapiens
  DOMAIN (84)..(99): RIBOSOMAL PROTEIN L7A/RS6 FAMILY SIGNATURE domain identified by eMATRIX, accession number PR00881D, p-value=8.500e-16, raw score of 11.60
  DOMAIN (40)..(111): Ribosomal protein L7Ae domain identified by PFam, accession name Ribosomal_L7Ae, E-value=6.9e-16, PFam score of 66.2
EEAETVLVGQLKQLSSCLAVHKYRPETKQEKKQRLLARAEKKAAGKGDVPTKRPPVLRAGVNTVTTLVENKKAQLVCRKMGVPYCIIKGKARLGRLVHRKTCTTVAFTQVN

SEQ ID NO: 34613 - protein, 143 aa, Homo sapiens
  DOMAIN (90)..(130): Ribosomal protein L7Ae proteins domain identified by eMATRIX, accession number BL01082, p-value=7.750e-40, raw score of 20.37
  DOMAIN (58)..(143): Ribosomal protein L7Ae domain identified by PFam, accession name Ribosomal_L7Ae, E-value=2.1e-38, PFam score of 141.0
NSRVDDFVAAQDAKGKKVAPAPAVVKKQEAKKVVNPLFEKRPKNFGIGQQRLLARAEKKAAGKGDVPTKRPPVLRAGVNTVTTLVENKKAQLVVIAHDVDPIELVVFLPALCRKMGVPYCIIKGKARLGRLVHRKTCTTVAFT

SEQ ID NO: 34614 - protein, 51 aa, Homo sapiens
  DOMAIN (5)..(20): RIBOSOMAL PROTEIN L7A/RS6 FAMILY SIGNATURE domain identified by eMATRIX, accession number PR00881D, p-value=8.500e-16, raw score of 11.60
MGVPYCIIKGKARLGRLVHRKTCTTVAFTQVTKVLWLSWWKLSGPIQCPGS

SEQ ID NO: 34615 - protein, 265 aa, Homo sapiens
  DOMAIN (151)..(191): Ribosomal protein L7Ae proteins domain identified by eMATRIX, accession number BL01082, p-value=7.750e-40, raw score of 20.37
  DOMAIN (118)..(219): Ribosomal protein L7Ae domain identified by PFam, accession name Ribosomal_L7Ae, E-value=1.1e-40, PFam score of 148.6
PKGKKAKGKKVAPAPAVVKKQEAKKVVNPLFEKRPKNFGIGQDIQPKRDLTRFVKWPRYIRLQRQRAILYKRLKVPPAINQFTQALDRQTATQLLKLAHKYRPETKQEKKQRLLARAEKKAAGKGDVPTKRPPVLRAGVNTVTTLVENKKAQLVVIAHDVDPIELVVFLPALCRKMGVPYCIIKGKARLGRLVHRKTCTTVAFTQVNSEDKGALAKLVEAIRTNYNDRYDEIRRHWGGNDLRPKSVARIAKLEKAKAKELATKLG

SEQ ID NO: 34616 - protein, 91 aa, Homo sapiens
MACGEAYSTDFHAPSVESISRAFTLIQGSDTCLAGAGDTKKAGVDEKGEVGVEEALEAVKNATNEQDLANRFKEFGKEMVKLNYVAARRQQ

SEQ ID NO: 34617 - protein, 147 aa, Homo sapiens
  DOMAIN (31)..(50): Eukaryotic  RNA-binding region RNP-1 proteins domain identified by eMATRIX, accession number BL00030A, p-value=1.000e- 12, raw score of 14.39
  DOMAIN (31)..(101): RNA recognition motif. domain identified by PFam, accession name rrm, E-value=7.4e-22, PFam score of 86.0
PTRPSIVKVSLHPAVMSKSESPKEPEQLRKLFIGGLSFETTDESLRSHFEQWGTLTDCVVMRDPNTKRSRGFGFVTYATVEEVDAAMNARPHKVDGRVVEPKRAVSREDSQRPGAHLTVKKIFVGGSGSNFGGGGSYNDFGNYTISL

SEQ ID NO: 34618 - protein, 146 aa, Homo sapiens
  DOMAIN (16)..(35): Eukaryotic  RNA-binding region RNP-1 proteins domain identified by eMATRIX, accession number BL00030A, p-value=1.000e- 12, raw score of 14.39
  DOMAIN (58)..(128): RNA recognition motif. domain identified by PFam, accession name rrm, E-value=6.4e-24, PFam score of 92.9
  misc_feature (1)...(146): Xaa = X or * as defined in Table 2
MSKSESPKEPEQLRKLFIGGLSFETTDESLRSHFEQWGTLTDCVDSQRPGAHLTVKKIFVGGIKEDTEEHHLRDYFEQYGKIEVIEIMTDRGSGKKRGFAFVTFDDHDSVDKIVIQKYHTVNGHNCEVRKALSKQEMASASSSQRX

SEQ ID NO: 34619 - protein, 254 aa, Homo sapiens
  DOMAIN (16)..(35): Eukaryotic  RNA-binding region RNP-1 proteins domain identified by eMATRIX, accession number BL00030A, p-value=6.824e- 11, raw score of 14.39
  DOMAIN (16)..(86): RNA recognition motif. domain identified by PFam, accession name rrm, E-value=2.4e-17, PFam score of 71.0
MSKSESPKEPEQLRKLFIEGLSFETTNESLRGHFEQHGMLTGCVVMRDPNTKRSRGCGFVTCATVEEVDAAMNARPHKVDGRVVETKTAVSGDSQRPGAHLTMKKIFVGGFKEDTEEHHPRDYPEHHRGRSGSGNFGGGRGGGFGGNDNFGLGGNFSRRGGFGGSRGGGGYGGSGDGYNGFGNDGSNFGGGGSYNNFGNYNNQSSNFGPMKGGNFEDRSSGPYGGRGQYSAKPRNQGGYGGSSSSSNCGSGRIF

SEQ ID NO: 34620 - protein, 296 aa, Homo sapiens; identical to SEQ ID NO: 33725
  DOMAIN (16)..(35): Eukaryotic  RNA-binding region RNP-1 proteins domain identified by eMATRIX, accession number BL00030A, p-value=1.000e- 12, raw score of 14.39
  DOMAIN (16)..(153): RNA recognition motif. domain identified by PFam, accession name rrm, E-value=5.7e-33, PFam score of 123.0

SEQ ID NO: 34621 - protein, 558 aa, Homo sapiens
  DOMAIN (426)..(471): kw TRANSCRIPTASE REVERSE II ORF2 domain identified by eMATRIX, accession number DM01354N, p-value=6.550e-34, raw score of 13.17
  DOMAIN (62)..(132): RNA recognition motif. domain identified by PFam, accession name rrm, E-value=1.4e-23, PFam score of 91.8
MRDPNTKRSRGFGFVTYATVEEVDAAMNTTPHKVDGRVVEPKRAVSREDSQRPGAHLTVKKIFVGGIKEDTEEHHLRDYFEQYGKIEVIEIMTDRGSGKKRGFAFVTFDDHDSVDKIVIQKYHTVKGHNCEVRKALPKQEMASASSSQRGRRGSGNFGGGRGDGFGGNDNFGRGGNFSGRGGFGGSCGGGGYGGSGDGYNGFGNDGSNFGGGGSYSDFGNYNNQSSNFGPMKGGNFGGRSSGPYGGGGQYFAKPQNQAARCVAARWLFRTEARLVFLQKFPPWAVVEVVTVIVAAPAAATATTRDGGGCSRNCNIPEVFPELLGCPNRRGPPGGVREKQQQTNSKSTRRQEITKTIAELKEIETRKTLQKINESRSWFYEKINKVDRLLDRLIKKKREKSQIDAIKNDIGDIVTDPAEIQTTIKEYYKRLYANELENLEEMDKFLATYSLHSLNQEEVESLNKPVTSSEVEAVTNSLPTKKSPGPDGFTVLLEVLAPAIRQEKEIKHIPIGREEVKLSLFADDVIVYLENPIVSAQNLLKLISNFSKLSGYKINVQKS

SEQ ID NO: 34622 - protein, 169 aa, Homo sapiens
  DOMAIN (68)..(88): kw ALLERGEN POLLEN CIM1 HOL-LI domain identified by eMATRIX, accession number DM01724, p-value=8.579e-09, raw score of 8.14
  misc_feature (1)...(169): Xaa = X or * as defined in Table 2
KYHTVNGHNCEVRKALSKQEIASASCSQRGRSGSGNFGGDRGGGFGGNDNFGRGGNFSGHGGFGGSCCGGGYGGSGDGYNGFGNDASNFGGGGSYNEFGNYNNQSSHFGPLSGGNFGGRSSSPLGGAPASTYVKGPNSQRTQNEGWFEGXAPWRGDGGARGNKGGGANQ

SEQ ID NO: 34623 - protein, 470 aa, Homo sapiens
  DOMAIN (157)..(176): Eukaryotic  RNA-binding region RNP-1 proteins domain identified by eMATRIX, accession number BL00030A, p-value=1.000e- 12, raw score of 14.39
  DOMAIN (259)..(337): RNA recognition motif. domain identified by PFam, accession name rrm, E-value=9e-05, PFam score of 29.3
  misc_feature (1)...(470): Xaa = X or * as defined in Table 2
MKCLKFINHKEILEASERKQAESLDFPFKKLRWHLCEGWIEEERDESRKSETIFKDLFKVPVLKETIYYKFYGPPVYQIETVYFMALSPPKSKQFDKTKQNNNNKKTHQFVIVFFKTDEHLSARGRRRRSIVKVSLLPAVIGLKSKFLKKPDQLRKLFIGGLSFETTDESLEEPFSRQWGKRYTDSVVMRDPNTKRSRGFGFVTYATVEEVDAAMNARPHKVEWKELLEPKRAVSREDSQRPGCPHXLVKKIFVGGIKEDTEEHHLRDYFEQYGKIEVIEIMTDRGSGKKRGFAFVTFDDHDSVDKIVIQKYHTVNGHNCEVXKSPVKSKKMASASSKPKEGRSGFWETFGGGSWEVGFGGNDNFGRGGNFSWSVVAFGGSRGGGGYGGSGDGYNGFGNDGSNFGGGGSYNDFGNYNNQSSNFGPMKGGNFGGRSSGPYGGGGQYFAKPRNQGGYGGSSSSSNYGSGRRF

SEQ ID NO: 34624 - protein, 306 aa, Homo sapiens
  DOMAIN (153)..(196): kw TRANSCRIPTASE REVERSE II ORF2 domain identified by eMATRIX, accession number DM01354T, p-value=9.471e-39, raw score of 9.48
  DOMAIN (14)..(277): Reverse transcriptase domain identified by PFam, accession name rvt, E-value=2.8e-06, PFam score of 19.4
DPGDTPNTASAPNCRSGKGRSSSPEHIPPLEKLEDSMQTNPSTNPEPGRLAEWLDPEERQQSLQFGLQEATSIGKGGQYYIKGTPHGTKESEQQPSALDLPSDRAYPNEKEPENQLWRLVIKLIKEAPEKGAYLNVIKAVYDKPTNGEKLRAFPLRTGTKHRCPLSPLLFNILLEVLARAIRQEKEIKSIQIGKEEVKLSLFADDIIIYLESPKYSSRKLQELIKEFSKVSRYEINVHKSVALLYTNSNQAENQIKNSASFTIAAKNKIKYLGIYLTKDAKDGYKENYKTLMKEIIDDKNKQKYIP

SEQ ID NO: 34625 - protein, 398 aa, Homo sapiens
  DOMAIN (110)..(151): kw TRANSCRIPTASE REVERSE II ORF2 domain identified by eMATRIX, accession number DM01354I, p-value=1.000e-40, raw score of 15.55
MGDFNTPLSTLDRSTRQKVNKHTQELNSALHQADLIDIYRTLHPKSTEYTFFSAPHHTYSKIDHIVGSKALLSKYKRTEIVTNCLSDHSAIKLELRIKNLTQNRSTTWKLNNLLLNDYWVHNEMKAEIKMFFETNENKDTTYQSLWDTFKAVCRGKFIALNAHKRKQERSKIDTLTSQLKELEKQEQTHSKASRRQEITKIRVELKEIETQKTLQKINESRSWFFERIHKIEIRTAIREYYKHLYANKLENLEEMDKFLDTYTLPRLNQEEVESLNRPKTGAEIVAIINSLPTKKSAGPDGLTTEFYQRYKEEFVPFLLKLFQSIEKEGILPNSFYEASIILIPKPGRDTTKKENFRPISLMNIDVKILNKILANRIQQHIKKLIHHDQVGFIPGMQG

SEQ ID NO: 34626 - protein, 610 aa, Homo sapiens
  DOMAIN (496)..(537): kw TRANSCRIPTASE REVERSE II ORF2 domain identified by eMATRIX, accession number DM01354I, p-value=1.000e-40, raw score of 15.55
  DOMAIN (273)..(482): AP endonuclease family 1 domain identified by PFam, accession name AP_endonucleas1, E-value=8.5e-52, PFam score of 185.5
RKLTNRKDIHIKNPSVCHHHQRPKVDKTTKMGKKQSRKTGNSKNQSTSPTLKESSSSPATEQSWTENDFDELREEGFRRSDYSELQEEVQNNGKEVKNFGKKLDEWITRITNAKKSLKDLMELKTKARELCDERTSLSSQCNQLEERVSVMEDEMNEIKQEEKFREKRIKRNEQSLQEIWDYMKRPNLRLIGVPESDGENGTKLENTLQDIIQENFPNLARQANIQIQEIQRTPQRYSLRRATPRHIIVRFTKVEMKEKMLRVAREKGRVTHKGKPVRLTADLLAETLQARRQDTHRLKIKGWRKIYQANGKQKKAGVAILVSDKTEFKPTKIKRDKEGHYIMVKGSIQQEELTILNIYAPNTGAPRFTKQVLRDLQRDLDSNTIITGDFNTPLSTLDRSMRQKVNKDIQELNSALHQADLIDIYRTLHPKSTENTFFSAPHHTYSKIDHIVGSKALLSKCKRKEIITNCLSDHSAIKLELRIKKLPQNCSTIWKLNNLLLNDYWVHNEMKAEIKMLFETNENKDTTYQNLWDTLKAVCRGKFIALNAHGRKQERSKIDTLTSQLKELAKQEQTHSKASRRQEITKIRAELKEIETQKTLQKINESRSWF

SEQ ID NO: 34627 - protein, 72 aa, Homo sapiens
  DOMAIN (16)..(48): kw TRANSCRIPTASE REVERSE II ORF2 domain identified by eMATRIX, accession number DM01354J, p-value=9.763e-17, raw score of 15.12
RGEMNSRGRNNLSIINKTDFPFIALNAHKRKQERSKIGNLTSQLKELEKQEQTNSKASRRQEITKIRAELKT

SEQ ID NO: 34628 - protein, 375 aa, Homo sapiens
  DOMAIN (276)..(304): kw TRANSCRIPTASE REVERSE II ORF2 domain identified by eMATRIX, accession number DM01354D, p-value=7.882e-30, raw score of 10.59
  DOMAIN (196)..(375): AP endonuclease family 1 domain identified by PFam, accession name AP_endonucleas1, E-value=3.7e-07, PFam score of -7.6
MELKAKAQELREECRSLRSRCNQLEESVSVMEDEMNEMKREGKFREKRIKRNEQSLQEIWDYVKRPNLRLTGVHESDGENGTKLENTLQDIIQENFPNLARQANIQIQEIQRTPQRYSSRRATPRHIIVRFTKVEMKEKMLRAAREKGWVTHKGKPIRLTVDLSAETLQARREWGPIFNILKEKNFQPRISYPAKLSFISEGEIKSFTDKQMLTDFVTTRPALQELLKEALNMERKNRDTHRLKIKGWRKIYQANGKQTNAGVAILVSDKTDFKPTKIKKDKEGHYIMVKGSIQQEELTVLNIYAPNTGAPRFIKQVLRDLRRDLDSYAIIMGDFNTPLSTLDRSPRQKVNKDIQEIELSSAPSRPNRLLQNSPP

SEQ ID NO: 34629 - protein, 118 aa, Homo sapiens
EKALQQVQAAVQAVLPLGPYDPADPMVLEVPVADRDAVWSLCQAPIATPVIAQWAHEQSGHGGRDGGYTWAQQHGLPSSKAKLATATAECPICQQQRATLSPRCGTIPRGDQPATWWQ

SEQ ID NO: 34630 - protein, 394 aa, Homo sapiens
MGEERRWRPSSNGKHGAFAELDKGWLVWLEGKGVIGARRSWRAHSALIKICVQQIKDSLPGKMSKGLLQQQQKPKHLLHDLYKAMSTRWGVQKARLNCTALPPTGCVTLDPSFLTEPQFPRQLSEDLLLTREALEKEVQLRRQLQQEKEELLYRVLGANASPAFPLAPVTPTEVEKERELELRDRLDEQQRVLEGKNEEALQDPRLVDPLTSCTVHFEKPQMLNARLWKHAGREAVACKVRGSELPKTMGTYPLHQHDLDVRHGVKGDHFGALRFDCPAGFWTCMGPLAPSFWPISPIWNGPPLDISGYPATSTQKSTMCLRIIDTRLHPESRLKQQSNFALNAREKALQQVQAAVQAALPLGPYDPADPMVLEVSLADRDAVWSLWQAPLGES

SEQ ID NO: 34631 - protein, 664 aa, Homo sapiens
  DOMAIN (243)..(452): Reverse transcriptase domain identified by PFam, accession name rvt, E-value=0.0078, PFam score of -29.3
MDCDSCDGSGKSWMLPVLKHQTPGSSVSKFRLALLAPQSEDSLLWDLVIISNMGTAVTELQNLNTMGMIGSQSGSGQVAALNCQKQGGRSYHNRQQRQSSNQNSLTQETSGFLPEHICIGKGNDQTFRGLLDTGSELMLIPVDAKYHCGPPVKIQLTMGPVGPQSPPVVIYPVPECIIGIDILSSWQNPPPVGFLTGRVRAIMMGKAKWRPLEVSLPRKIVNQKQYHIHGGTVEISVTFKELKDAGVVIPTIFLFNSPIWPVQKTDGTCGSWRMTVDYCKLNQVVTPTVAAVLDVVSLLEQIYTSPGTWYVANDLTNAFFSITVHKAHQKQSAFSWQGQQYTFTVLPQGMSLVHLAPPTTKKEAQCLVGLFGFWGNTFLIWKKALQLVQAAMQAALPLGPYDPADPMVFEVSVADWDAVWSLWQGPIATKWVMHSTIPSSHGSGIHVIGLEQVLKAQGVPYDQLTEEEKTRAWFTDGSARYAGTIRRWTAAALQPLSRTSLKESGEGKSSQWAEVRAVHLVVHFTWKEKWPDLMVWLDDQGLGRSMIGKLVTNKFGEEMCGWTSLSEWPKTVKILVSRVSAHQRVTSAEENFNNQVDEISHSVDTTQPLSPATPVIAQWAHEQSGHGGRDRGYEWAQQHVLPLTKADLATATADAQFASSRDQQ

SEQ ID NO: 34632 - protein, 505 aa, Homo sapiens
  DOMAIN (159)..(343): Reverse transcriptase domain identified by PFam, accession name rvt, E-value=7.9e-07, PFam score of 27.3
MVNTERQLDWIERCQVLILALSEEINPELPEAIVMASSEVVTRQDNIDSPQEPPPTPLFASRPVTRLKSWRAPRVRPVGPRTHPVVISPVPECIISIDILRSWQNPHIGTLTGRVRAVMVRKAKWKPLELSLPRKIVNQKQYCVPGGIVEISATTKDLKDAKVVIPTISLFNYPIWLVQKNDGSWRMAVDYHKLTQGVTPIAAAVPNVISLLEQINTSSGTWYAAIYLVNVFFSIPVHKALKKQFAFSWQGQPYTFTILPWGHINSPTLCYNLIWRELDHFSLPQDITLVHYIDDIMLIGSSEQEVANTLDLLEKALQQVQAAVQAALPLGPYDPADPVVLEVSVADRDTVWSLCSCCYTPWFGTLSHVSNLQTWSPCPPPVSPVGSQRPQLSREKNKNTKRIHSIPEVLIMKPYFTAVAKPSLLSHKWLPLEKPENPCCYSSDHRTAVPNLLLYRRSTRRKTELTNKELTSAHFTGDLPRRAVWVLGDRTAVRPSLEQGMALWI

SEQ ID NO: 34633 - protein, 305 aa, Homo sapiens
  DOMAIN (183)..(305): dUTPase domain identified by PFam, accession name dUTPase, E- value=3.4e-05, PFam score of 22.1
MCPVGPWTHPVVISPVSECIVGIDILGSWQNLHIGSLTDITMVHYIDDMMLIGSSEQEVANSLDLLVRHLHARGCKINPTKIQGTSTSVKFLEFQWCGVCQDIPSKWVLEQKALQQVQAAVQAALPLEPYDPADPMVLEVSVADGVAVWSLWQAPIARIHGSRNQGVEVEVSPLTNIPSDPLAKFLFPAPSTLCSAGLELLVPEGGTLLPGNTTMIPLNWKLRLVPGYFGLLLALSPQAKNGVTVLAEVIDPDYQDEITLLFHNGGGEEYARNTGDPLRHLLVLPSPMIKVNGKLQHPNPGRTTN

SEQ ID NO: 34634 - protein, 532 aa, Homo sapiens
  DOMAIN (334)..(374): kw TRANSCRIPTASE REVERSE II ORF2 domain identified by eMATRIX, accession number DM01354Y, p-value=1.000e-40, raw score of 10.69
MKAEIKMFFETNENKETTYQNLWDTFKAVCRGKFIALNAHRRKQERSKVGTLTSQLKELEKQEQTNSKASRRQEITKIRAELEETETQKTLPKINESRSWFFEKINKIDRPLARPIKKREKNQMEAIKNDKGDITTDPTEIRTTIREYYKHLYTNKLESLEEMDKFLDTYTLPRLKQEEVESLIRPVTGSEIEAIINSLPTKKSPGPDGFTAEFFQRYKEELRIKYLGIQLTRDMKDLFKEHYKPLLNEIKEDTNKWKNIPCSWIGRINIMKMAILPKVIYRFNAIPFELPMTFFTDLEKTTLKFIWNQKRAHIAKSILSQKNKAGGITLPDFKLCYKATVTKTAWYWYQNRDIDQWNRTEPSEIIPHIYNYLNFDKPDKNKKWGKDSLFNKWCWENWLAICRKLKLDPFLTPYTKINSRWSKDLHVRPKTIKTLEENLGNTIQDIGMGKDFMTKTPKAMATKAKVDEWDLIKLKSFCTAKETTIRVNRQPTEWEKIFPIYSSDKGLISRIYKELKQICKKKTTPSTSGQRI

SEQ ID NO: 34635 - protein, 522 aa, Homo sapiens
  DOMAIN (37)..(83): kw TRANSCRIPTASE REVERSE II ORF2 domain identified by eMATRIX, accession number DM01354O, p-value=1.000e-40, raw score of 8.73
  DOMAIN (72)..(247): Reverse transcriptase domain identified by PFam, accession name rvt, E-value=1.1e-17, PFam score of 72.1
MDKFLDTYTLPRLNQEEVESLNRPITGSEIVAIINSLPTKKSPGPDGFTAEFYQTYKEELVPFLLKLFQSTEKEGILPSSFYEASIILIPKPGRDTTEKENFRPISLMSIDAKIFNKILANRIQQHIKKLSTMIKWASTLGCKAVLEVLARTIRQEKEIKGIQLGKEEVKLSLFVDDMIVYLENPIVSAQNLLKLISNFSKVSGYKINVQKSQAFLYTNNRQTESQIMSELPFTIASKRIKYLGIQLTRDVKDFFKENYKPLLNEIKEDTKKWKNIPCSWIGRINIIKMAILPKVIYRFNAIPIKLPMTFFTELEKTTLKFIWNQKRAHIAKSILSQKNKAGGITLPDFKLYYKATITKTAWYWYQNRDIDQWNRTEPSEIMPHSYNYLIFDKPEKNKQWGKDSLFNKWCWENWLAICRQLKLDPFLTPYTKINSRWIKDLNVRPKSIKTLEENLGITIQDIGMGKDFMSKTPKAMATKAKTDKWDLIKLKSFCTAKETTIRVNRQPTKCRKFSQPTHLTNG

SEQ ID NO: 34636 - protein, 140 aa, Homo sapiens
MQRPMEKRMMNREIISKRKIVCNWERYLDIEKEANNESGESQRGTDFSVLLSSAGDSFSQFRFAEEKEWDSEASCPKQNSPFYVDSELLVRALQELPLCLRLNVAAELVQGTVPLEVPQVKPKRTDDGKGLWMQLKGPLG

SEQ ID NO: 34637 - protein, 363 aa, Homo sapiens
  DOMAIN (199)..(246): kw TRANSCRIPTASE REVERSE II ORF2 domain identified by eMATRIX, accession number DM01354V, p-value=1.000e-40, raw score of 12.97
  DOMAIN (33)..(212): Reverse transcriptase domain identified by PFam, accession name rvt, E-value=7.2e-05, PFam score of -0.5
MLKLSKGPQLPVISLAYKRHSCHWRFQVFQGAVFQGPGMKTKYLLLPHLCYRSCIVIGCMPPINRSTVPAWSQEGRTPSRLLGSPTPGLDFWMAFLDLPWVRGEPTALKVLEVLTRAIRQEKEIKGIQLGKQEVKLSLFADDMIVYLENSIVSTQNLLKLIGNFSEVSGYKINVQKSQAFLYTNNRQTESQIMSELPFTIASKRIKYLGIQLTRDMKDLFKENYKPLLNEIKEDTNKWKNIPCSWVGRINILKMAILPKVIHRFNAIPIKLPMTFFTELEKTTLKFIWNQKRAHIAKSILSQKNKAGGITLPDFKLYYKAVTKTAWYWYQNRDIDQGNRTEPSEIMPHIYNYLIFDKLDKNKK

SEQ ID NO: 34638 - protein, 183 aa, Homo sapiens
  DOMAIN (55)..(102): kw TRANSCRIPTASE REVERSE II ORF2 domain identified by eMATRIX, accession number DM01354V, p-value=5.585e-33, raw score of 12.97
LKMTAMQRPMEKRMMNREIILKERLSLTGIDIKILKKRSIMKVESHRGEQISVSSLALQRIKYLGIQITRDVKDLFKENYKPLLNKLKEDTNKWRNVPCPRVGRISIVKMAILPKILKKKTTLKFIWNQKRAHIAKTILSKKNKAGGITLPDFKLYYKATKTAWCWYQNRDTDQWNRTKPSEI

SEQ ID NO: 34639 - protein, 889 aa, Homo sapiens
  DOMAIN (110)..(157): kw TRANSCRIPTASE REVERSE II ORF2 domain identified by eMATRIX, accession number DM01354V, p-value=1.000e-40, raw score of 12.97
  DOMAIN (295)..(624): Reverse transcriptase domain identified by PFam, accession name rvt, E-value=0.00018, PFam score of -6.1
LIAYQPKKVQDQMDSQPNSTRVLEVLARAIRQEKEIKGIQLGKEEVKLSMFADDITAYLENPIVSAPNLLKLISNFSKVSGYKINVQKSQAFLYTNKRQTEQIMSELPFTVASKRIKYLGIKLRRDVKDLFKENYKPLLNEIKEDTNKWKNIPCSWIGRINIVKMTILPKVIYRFNAIPIKLPMTFFAELEKTTLKFIWNQKRAHIAKTILSQKNKAGGIMLPDFKLYYKATVTKTAWYWYQNRDIDQWNRIEPSEIIPHICKHLIFDKPDKNKKWGKDSLFNKWCWENWLAICRKLHLDPFLTPYTKINSRWIKDLNVRHKTIKTLEENLGNTIQDIGMGKDFMTKTPKAMATKAKIDKWDLIKLKSFCTAKETTIRVNRQPTEWEKIFATYSSDKGLISRIYNELKQIYKKKTNNPIKKWAKDMNRHFSKEDIYAAKKHMKKCSSSLAIRETLYNDRRIGKLTQTCDETAFQPHVCTISRPMLSSPYRSSLTEKWSQDFSKPPYPFLFHKGYLNPREQDKEVLTRAIRQEKERKGIQLGKEEVKLSLFADDMIVYLENPIVSAQNPLKVVSNFSKVSGYKISVQKSQAFLYTNNRQTESQIMSELPFTIASKRIKYLRIQLTRDVKDLFKENCKPLLNEIEEDTNKWKNIPCSWIGRINIVKMAILPKVIYRFNAIPIKLPMTFFTVLEKTTLKFIWNQKRAHIAKTILSQKNKAGGITLPDFKLYYKATVTKTAWYWYQNRDIDQWNRTEPSEIIPHIYNHVIFDKSDKNKKWGKDSLFNKWKRKRDTKTDTQGDHDEAEARDHSDASMSQENLRTASHHQKLKEKPETNSASEPPGGIIPGDILISDFQPPKLHPGAYAMGSDEAAIVAEMHGSNGKRFFWQRVN

SEQ ID NO: 34640 - protein, 664 aa, Homo sapiens
  DOMAIN (10)..(65): kw TRANSCRIPTASE REVERSE II ORF2 domain identified by eMATRIX, accession number DM01354Q, p-value=1.000e-40, raw score of 9.23
  DOMAIN (1)..(238): Reverse transcriptase domain identified by PFam, accession name rvt, E-value=5.6e-46, PFam score of 166.2
MNIDAKILNKILANRIQQHIKKLIHHDQVGFIPEMQGWVNICKSINIIQHINRTKDKNHMIISIDAEKAFDKIQQRFMLKTLNKLGIDGTYLKIIRAIYDKPTANIILNGQKLEAFPLKTGTRQGCPLSPLLFNIVLEVLARAIMQEKEIKGIQLGKEEVKLSLFADDMIVYLENPIVSARNLLKLISNFSKVSGYKINVQKSQTFLHTNNRQRESQIMSELPFTIASKRIKYLEIQLTRDVKDLFKENYKPLLNEIKEDTSKWKNIPCLWIGRINIMKMSILPKVIHKFNAIPIKRPITFFTELEETTLKFIWNQKRARIAKTILSKKNKAGGITLPDFKLYYKATVAKTAWYWYQNRDIDQWNRTEPSEIIPHICNHLIFDKPDKNKKWGKDSLFNKWCWENWLAICRKLKLDPFLTPHTKTNSRWIKGLNVRPKTIKTLQENLSYTIQDIGTGKDFMSKTPKAMATKANIDKWDLIKLKSFCTAKETTIRVNRQPTEWEKIFAIYPSDKGLISRIYNELKQIYKKKTNNPIKKWVKDTNRHFSKEDIYAAKRHMTKCSSSLAVREMQIKTTMRYHLTPVEEVRAGEMAKTRRCQNVKGASEEGIRALALFLINLTVHMEGNHIDGDIEIQTNRSPLQAPGEICESFTALMAMQLLSKLFWS

SEQ ID NO: 34641 - protein, 182 aa, Homo sapiens
AVPRLLNRIYDKVQNEAKTPLKKFLLKLAVSSKFKELQKGIIRHDSFWDKLIFAKIQDSLGGRVRVIVTGAAPMSTSVMTFFRAAMGCQVYEAYGQTECTGGCTFTLPGDWTSGHVGVPLACNYVKLEDVADMNYFTVNNEGEVCIKGTNVFKGYLKDPEKTQEALDSDGWLHTGDIGRWLP

SEQ ID NO: 34642 - protein, 203 aa, Homo sapiens
EAYGQTECTGGCTFTLPGDWTSGQFINILEMCLELSPCKSFSADSARYVLGHVGVPLACNYVKLEDVADMNYFTVNNEGEVCIKGTNVFKGYLKDPEKTQEALDSDGWLHTGDIGRWLPDIENHNRLIVCTLTNTSWRSHKIIVLKTYQKADDTKTPKETTFQNIMNLFLKEKRATAVLIRGGVGETSTDLSKKKPAKLLANF

SEQ ID NO: 34643 - protein, 158 aa, Homo sapiens
MKLDLHLSPYTKINSRWIKDLNLRPETIKILEDIIRKTLLDIGLGKDFMIKNPKVNATKTKINKWDLIKLKNFCTAKEISSREIREPTEWEKIFANSASDKGLISRIYKELKQIRSTLQLLFGISELPASLFLGFGAIMKSKKASLNTSTAILRQLIW

SEQ ID NO: 34644 - protein, 374 aa, Homo sapiens
  DOMAIN (61)..(99): Chloramphenicol acetyltransferase proteins domain identified by eMATRIX, accession number BL00100D, p-value=7.677e-36, raw score of 17.22
  DOMAIN (14)..(111): Chloramphenicol acetyltransferase domain identified by PFam, accession name CAT, E-value=2.1e-57, PFam score of 204.1
MCHGIGAQIIPSHQTVQLDITAFLKTVKKNKHKFYPAFIHILARLMNAHPEFRMAMKDGFIENMFFVSANPWVSFTSFDLNVANMDNFFAPVFTMGKYYTQGDKVLMPLAIGGPLESPDRDGGPLESTNRDASPESWSCRKSTPRLVAWVSAAKVFIRDKLMERRNRRTGRTEKARIWEVTDRTVRTWIGEAVAAAAADGGGFRVDLARRSIRKDRNARSQNPVHTEGDMNMNIKKIVKQATVLTFTTAFLAGGATQAFAKENNQKAYKETYGVSHITRHDMLQIPKQQQNEKYQVPQFDQSTIKNIESAKGLDVWDSWPLQNADGTVAEYNGYHVVFALAGSPKDADDTSIYMFYQKVGDNSIDSWKNAGRVF

SEQ ID NO: 34645 - protein, 457 aa, Homo sapiens
  DOMAIN (105)..(132): Mrp family proteins domain identified by eMATRIX, accession number BL01215A, p-value=4.964e-11, raw score of 9.75
MKLMETLNQCINAGHEMTKAIAIAQFNDDSPEARKMGGGWRIGEAADLVGVSSQAIRDAEKAGRLPHPDMEIRGRVEQRVGYTIEQINHMRDVFGTRLRRAEDVFPPVIGVAAHKGGVYKTSVSVHLAQDLALKGLRVLLVEGNDPQGTASMYHGWVPDLHIHAEDTLLPFYLGEKDDVTYAIKPTCWPGLDIIPSCLALHRIETELMGKFDESKLPTDPHLGLPFFDMLLDLLKNVDLKGGEPDVRILLTKYSNSNGSQSPWMEEQIRDAWGSMVLKNVVRETDEVGKVLTFTRGGLAGGATQAFAKEKDQKAYKETYGVSHITRHDMLQIPKQQQNEKYQVPQFDQSTIKNIESAKGLDVWDSWPLQNADGTVAEYNGYHVVFALAGSPKDADDTSIYMFYQKVGDNSIDSWKNAGRVFKDSDKFEANDPILKDKTKNGPGLQPFNLKEKSVILH

SEQ ID NO: 34646 - protein, 431 aa, Homo sapiens
MLQIPKQQQNEKYQVPQFDQSTIKNIESAKGLDVWDSWPLQNADGTVAEYNGYHVVFALAGSPKDADDTSIYMFYQKVGDNSIDSWKNAGRVFKDSDKFDANDPILKDQTQEWSGSATFTSDGKIRLFYTDYSGKHYGKQSLTTAQVNVSKSDDTLKINGVEDHKTIFDGDGKTYQNVQQFIDEGNYTSGENHTLRDPHYVEDKSHKYLDERECQQTISGGKRAVWDHGPTRIVGLIISLGPRSHSCCRSDYRSGTTVPLVLSIRLSADKFDANDPILKDQTQEWSGSATFTSDGKIRLFYTDYSGKHYGKQSLTTAQVNVSKSDDTLKINGVEDHKTIFDGDGKTYQNVQQFIDEGNYTSGDNHTLRDPHYVEDKGHKYLVFEANTGTENGYQGEESLFNKAYYGGGTNFFRKESQKLQQSAKKRDAEVK

SEQ ID NO: 34647 - protein, 426 aa, Homo sapiens
MNMNIKKIVKQATVLTFTTALLAGGATQAFAKENNQKAYKETYGVSHITRHDMLQIPKQQQNEKYQVPQFDQSTIKNIESAKGLDVWDSWPLQNADGTVAEYNGYHVVFALAGSPKDADDTSIYMFYQKVGDNSIDSWKNAGRVFKDSDKFDANDPILKDQTQEWSGSATFTSDGKIRLFYTDYSGKHYGKQSLTTAQVNVSKSDDTLKINGVEDHKTIFDGDGKTYQNVQQFIDEGNYTSGDNHTLRDPHYVEDKGHKYLVFEANTGTENGYQGEESLFNKAYYGGGTNFFRKESQKLQQSAKKRDAELANGALGIIELNNDYTLKKVMKPLITSNTVTDEIERANVFKMNGKWYLFTDSRGSKMTIDVPQAKGNNVVITSYMTNRGFFEDKKATFAPSFLMNIKGNKTSVVKNSILEQGQLTVN

SEQ ID NO: 34648 - protein, 417 aa, Homo sapiens
MNMNIKKIVKQATVLTFTTALLAGGATQAFAKENNQKAYKETYGVSHITRHDMLQIPKQQQNEKYQVPQFDQSTIKNIESAKGLDVWDSWPLQNADGTVAEYNGYHVVFALAGSPKDADDTSIYMFYQKVGDNSIDSWKNAGRVFKDSDKFDANDPILKDQTQEWSGSATFTSDGKIRLFYTDYSGKHYGKQSLTTAQVNVSKSDDTLKINGVNGYYCEESLFNKAYYGGGTNFFRKESQKLQQSAKKRDAELANGALGIIELNNDYTLKKVMKPLITSNTVTDEIERANVFKMNGKWYLFTDSRGSKMTIDGINSNDIYMLGYVSNSLTGPYKPLNKTGLVLQMGLDPNDVTFTYSHFAVPQAKGNNVVITSYMTNRGFFEDKKATFAPSFLMNIKGNKTSVVKNSILEQGQLTVN

SEQ ID NO: 34649 - protein, 242 aa, Homo sapiens
MNMNIKKIVKQATVLTFTTALLAGGATQAFAKENNQKAYKETYGVSHITRHDMLQIPKQQQNEKYQVPQFDQSTIKNIESAKGLDVWDSWPLQNADGTVAEYNGYHVVFALAGSPKDADDTSIYMFYQKSMLMQELGSYSFGQLRPCGCAGYSPCDCFHRLALSACRFSRCTVQAVGGSTILGSEGCWPSSHSSTRQCPSEDPVWGLNRIFPLCVALVESLHKSSTPAADFCLDTEAFSYIL

SEQ ID NO: 34650 - protein, 350 aa, Homo sapiens
  DOMAIN (187)..(274): ParB-like nuclease domain identified by PFam, accession name ParBc, E-value=1.7e-10, PFam score of 48.3
MNMNIKKIVKQATVLTFTTALLAGGATQAFAKENNQKAYKETYGVSHITRHDMLQIPKQQQNEKYQVPQFDQSTIKNIESAKGLDVWDSWPLQNADGTVAEYNGYHVVFALAGSPKDADDTSIYMFYQKVGDNSIDSWKNAGRVFKDSDKFDANDPILKEQTQEWIPLPVCGRDVKFTLEVLRGDSVEKTSRVWSGNERDQELLTEDALDDLIPSFLLTGQQTPAFGRRVSGVIEIADGSRRRKAAALTESDYRVLVGELDDEQMAALSRLGNDYRPTSAYERGQRYASRLQNEFAGNISALADAENISRKIITRCINTAKLPKSVVALFSHPGELSARSGDALQKAFTD

SEQ ID NO: 34651 - protein, 395 aa, Homo sapiens
MNMNIKKIVKQATVLTFTTALLAGGATQAFAKENNQKAYKETYGVSHITRHDMLQIPKQQQNEKYQVPQFDQSTIKNIESAKGLDVWDSWPLQNADGTVAEYNGYHVVFALAGSPKDADDTSIYMFYQKVGDNSIDSWKNAGRVFKDSDKFDANDPILKDQTQEWSGSATFTSDGKIRLFYTDYSGKHYGKQSLTTAQVNVSKSDDTLKINGVEDHKTIFDGDGKTYQNVQQFIDEGNYTSGDNHTLRDPHYVEDKGHKYLVFEANTGTENGYQGEESLFNKAYYGGGTNFFRKESQKLQQSAKKRDAELANGALGIIELNNDYTLKKVMKPLITSNTVPQAKGNNVVITSYMTNRGFFEDKKATFAPSFLMNIKGNKTSVVKNSILEQGQLTVN

SEQ ID NO: 34652 - protein, 288 aa, Homo sapiens
MNMNIKKIVKQATVLTFTTALLAGGATQAFAKENNQKAYKETYGVSHITRHDMLQIPKQQQNEKYQVPQFDQSTIKNIESAKGLDVWDSWPLQNADGTVAEYNGYHVVFALAGSPKDADDTSIYMFYQKVGDNSIDSWKNAGRVFKDSDKFDANDPILKDQTQEWSGSATFTSDGKIRLFYTDYSRKHYGDPLESTCMAFIGGATQAFAKENNQKAYKETYGVSHITRHDMLQIPKQQQNEKYQVPQFDQSTIKNIESAKGLDVWDTGRCRGSSRVDLQACKLPNWKV

SEQ ID NO: 34653 - protein, 165 aa, Homo sapiens
MNMNIKKIVKQATVLTFTTALLAGGATQAFAKENNQKAYKETYGVSHITRHDMLQIPKQQQNEKYQVPQFDQSTIKNIESAKGLDVWDSWPLQNADGTVAEYNGYHVVFALAGSPKDADDTSIYMFYQKVGDNSIDSWKNAGRVFKDSDKFDANDPILKDRRKMV

SEQ ID NO: 34654 - protein, 464 aa, Homo sapiens
  DOMAIN (390)..(419): kw REPLICATION REPB REPA INITIATION domain identified by eMATRIX, accession number DM00653A, p-value=7.207e-27, raw score of 20.40
  DOMAIN (374)..(416): Initiator RepB protein domain identified by PFam, accession name RepB_protein, E-value=0.0091, PFam score of 12.3
GDMNMNIKKIVKQATVLTFTTALLAGGATQAFAKENNQKAYKETYGVSHITRHDMLQIPKQQQNEKYQVPQFDQSTIKNIESAKGLDVWDSWPLQNADGTVAEYNGYHVVFALAGSPKDADDTSIYMFYQKVGDNSIDSWKNAGRVFKDSDKFDANDPILKDQTQEWSGSATFTSDGKIRLFYTDYSGKHYGKQSLTTAQVNVSKSDDTLKINGVEDHKTIFDGDGKTYQNVQQFIDEGNYTGDPLEAETAVINHKKRKNSPRIVQSNDLTEAAYSLSRDQKRMLYLFVDQIRKSDGTLQEHDGICEIHVAKYAEIFGLTSAEASKDIRQALKSFAGKEVVFYRPEEDAGDEKGYESFPWFIKRAHSPSRGLYSVHINPYLIPFFIGLQNRFTQFRLSETKEITNPYAMRLYESLCQYRKPDGSGIVSLKIDWIIERYQLPQSYQRTPDFRRRFLQVCVNEING

SEQ ID NO: 34655 - protein, 331 aa, Homo sapiens
MVDSLIARVGVMARGNAITLPVCGRDVKFTLEVLRGDSVEKTSRVWSGNERDQELLTEDALDDLIPSFLLTGQQTPAFGRRVSGVIEIADGSRRQNNQKAYKETYGVSHITRHDMLQIPKQQQNEKYQVPQFDQSTIKNIESAKGLDVWDSWPLQNADGTVAEYNGYHVVFALAGSPKDADDTSIYMFYQKVGDNSIDSWKNAGRVFKDSDKFDANDPILKDQTQEWSGSATFTSDGKIRLFYTDYSGKHYGKQSLTTAQVNVSKSDDTLKINGVEDHKTIFDGDGKTYQNVQQFIDEGNYTSGDNHTLRDPHYVEDKSHKYLVFEATRED

SEQ ID NO: 34656 - protein, 256 aa, Homo sapiens
MNMNIKKIVKQATVLTFTTALLAGGATQAFAKENNQKAYKETYGVSHITRHDMLQIPKQQQNEKYQVPQFDQSTIKNIESAKGLDVWDSWPLQNADGTVAEYNGYHVVFALAGSPKDADDTSIYMFYQKVGDNSIDSWKNAGRVFKDSDKFDANDPILKDQTQEWSGSATFTSDGKIRLFYTDYSGKHYGKQSLTTAQVNVSKSDDTLKINGVEDHKTIFDGDGGYRARIRNHGHSCFLCEIVIRSQFHTTYEPEA

SEQ ID NO: 34657 - protein, 436 aa, Homo sapiens
MNMNIKKIVKQATVLTFTTALLAGGATQAFAKENNQKAYKETYGVSHITRHDMLQIPKQQQNEKYQVPQFDQSTIKNIESAKGLDVWDSWPLQNADGTVAEYNGYHVVFALAGSPKDADDTSIYMFYQKVGDNSIDSWKNAGRVFKDSDKFDANDPILKDQTQEWSGVCTFTSDGKIRLFYTDYSGKHYGKQSLTTAQGNYTSGDNHTLRDPRYVEDKGHKYLVFEANTGTENGYQGEESLFNKAYYGGGTNFFRKESQKLQQSAKKRDAELANGALGIIELNNDYTLKKVMKPLITSNTVTDEIERANVFKMNGKWYLFTDSRGSKMTIDGINSNDIYMLGYVSNSLTGPYKPLNKTGLVLQMGLDPNDVTFTYSHFAVPQAKGNNVVITSYMTNRGFFEDKKATFAPSFLMNIKGNKTSVVKNSILEQGQLTVN

SEQ ID NO: 34658 - protein, 231 aa, Homo sapiens
MNMNIKKIVKQATVLTFTTALLAGGATQAFAKENNQKAYKETYGVSHITRHDMLQIPKQQQNEKYQVPQFDQSTIKNIESAKGLDVWDSWPLQNADGTVAEYNGYHVVFALAGSPKDADDTSIYMFYQKVGDNSIDSWKNAGRSLKTAIRGDFADFGTTIKQDFRLLGQTSVDRLLQLSQGQAVKGNQLLPVSLVKRKTTLAPNTQTASPRALADSLMQLARQVSRLESGQ

SEQ ID NO: 34659 - protein, 137 aa, Homo sapiens
  misc_feature (1)...(137): Xaa = X or * as defined in Table 2
MNMNIKKIVKQATVLTFTTALLAGGATQAFAKENNQKAYKETYGVSHITRHDMLQIPKQQQNEKYQVPQFDQSTIKNIESAKGLDVWDSWPLQNADGTVAEYNGYHVVFALAGSPKDAHDTSIYMFYQKIRMAMKDX

SEQ ID NO: 34660 - protein, 306 aa, Homo sapiens
  DOMAIN (105)..(132): Mrp family proteins domain identified by eMATRIX, accession number BL01215A, p-value=3.202e-09, raw score of 9.75
MKLMETLNQCINAGHEMTKAIAIAQFNDDSPEARKITRRWRIGEAADLVGVSSQAIRDAEKAGRLPHPDMEIRGRVEQRVGYTIEHINHMRDVFGTRLRRAEDVYPPVIGVAAHKVGVYKTSVSVHLAQDLALRGYLFCSWKSIREDRNGRSQKTVHTEGDMNMNIKKIVKQATVLTFTTALLAGGATQAFAKENNQKAYKETYGVSHITRHDMLQIPKQQQNEKYQVPQFDQSTIKNIESAKGLDVWDSWPLQNADGTVAEYNGYHVVFALAGSPKDADDTSIYMFYQKVGDNSIYSWKNAAPCL

SEQ ID NO: 34661 - protein, 342 aa, Homo sapiens
MNMNIKKIVKQATVLTFTTALLAGGATQAFAKENNQKAYKETYGVSHITRHDMLQIPKQQQNEKYQVPQFDQSTIKNIESAKGLDVWDSWPLQNADGTVAEYNGYHVVFALAGSPKDADDTSIYMFYQKVGDNSIDSWKNAGRVFKDSDKFSANDPILKDQTQEWSGYPWVTIIAQQVLMNVVSVVQSRLQNEFAGNISALADAENISRKIITRCINTAKLPKSVVALFSHPGELSARSGDALQKAFTDKEELLKQQASNLHEQKKAGVIFEAEEVITLLTSVLKTSSASRTSLSSRHQFAPGATVLYKGDKMVLNLDRSRVPTECIEKIEAILKELEKPAP

SEQ ID NO: 34662 - protein, 314 aa, Homo sapiens
  DOMAIN (247)..(261): Phage integrase family domain identified by eMATRIX, accession number PF00589B, p-value=1.621e-11, raw score of 16.17
  DOMAIN (155)..(293): "Phage" integrase family domain identified by PFam, accession name Phage_integrase, E-value=1.3e-07, PFam score of 38.3
MNMNIKKIVKQATVLTFTTALLAGGATQAFAKENNQKAYKETYGVSHITRHDMLQIPKQQQNEKYQVPQFDQSTIKNIESAKGLDVWDSWPLQNADGTVAEYNGYHVVFALAGSPKDADDTSIYMFYQKVGDNSIDSWKNAGRVFKDSDKFDANDPILKDQTQEWSGSATFTSDGKIRLFYTDYSGKHYGKQSLTTAQLMERRNRRTGRTEKARIWEETDRTVRTWIGEAVAAAAADGVTFSVPVTPHTFRHSYAMHMLYAGIPLRVLQSLMGHKSISSTEVYTKVFALDVAARHRVQFAMPESDAVAMLKQLS

SEQ ID NO: 34663 - protein, 175 aa, Homo sapiens
  misc_feature (1)...(175): Xaa = X or * as defined in Table 2
MNMNIKKIVKQATVLTFTTALLAGGATQAFAKENNQKAYKETYGVSHITRHDMLQIPKQQQNEKYQVPQFDQSTIKNIESAKGLDVWDSWPLQNADGTVAEYNGYHVVFALAGSPKDADDTSIYMFYQKDQTQEWSGSATFTSDGKIRLFYTDYSGKHYGKQSLDTAQXNVVKSG

SEQ ID NO: 34664 - protein, 567 aa, Homo sapiens
MLQIPKQQQNEKYQVPQFDQSTIKNIESAKGLDVWDSWPLQNADGTVAEYNGYHVVFALAGSPKDADDTSIYMFYQKVGDNSIDSWKNAGRVFKDSDKFDANDPILKDQTQEWSGSATFTSDGKIRLFYTDYSGKHYGKQSLTTAQVNVSKSDDTLKINGVEDHKTIFDGERKTYQNVQQFIDEGNYTSGDNHTLRDPHYQNTYIRLEPFKINVLEQITKHIEKLQCGGVVKQLSRRGNNQHISSTYDINRADTQVRRAVNNYDIIVMSNSFNGQSEHQVWIDRKAGECLLHEYEDLVPIRDTLRLFPGGRYLPRAKHVAPSEPDPEQDEQKLSCCTYRKRYRVLVGELGDEQMAALSRLGNDYRPTSAYERGQRYASLLQNEFAGNISALADAENISRKIITRCINTAKLPKSVVALFSHPGELSARSGDALQKAFTDKEELLKQQASNLHEQKKAGVIFEAEEVITLLTSVLKTSSASRTSLSSRHQFAPGATVLYKGDKMVLNLDRLIIRPTIRVGPWSQTNNQTDDTSGTMVPVLIIRPTIRVGPWSQSDYQTDDTSGTVVPD

SEQ ID NO: 34665 - protein, 450 aa, Homo sapiens
  DOMAIN (372)..(401): kw REPLICATION REPB REPA INITIATION domain identified by eMATRIX, accession number DM00653A, p-value=7.207e-27, raw score of 20.40
  DOMAIN (356)..(398): Initiator RepB protein domain identified by PFam, accession name RepB_protein, E-value=0.0091, PFam score of 12.3
MLQILKQQQNEKYQVPQFDQSTIKNIESAKGLDVWDSWPLQNADGTVAEYNGYHVVFALAGSPKDADDTSIYMFYQKVGDNSIDSWKNAGRVFKDSDKFDANDPILKDQTQEWSGSATFTSDGKIRLFYTDYSGKHYGKQSLTTAQVNVSKSDDTLKINGVEDHKTIFDGDGKTYQNVQQFIDEGNYTSGDNHTLRDPHYVEDKGHKYLVFEAKCDNLKTCHTSHGSVMAETAVINHKKRKNSPRIVQSNDLTEAAYSLSRDQKRMLYLFVDQIRKSDGTLQEHDGICEIHVAKYAEIFGLTSAEASKDIRQALKSFAGKEVVFYRPEEDAGDEKGYESFPWFIKRAHSPSRGLYSVHINPYLIPFFIGLQNRFTQFRLSETKEITNPYAMRLYESLCQYRKPDGSGIVSLKIDWIIERYQLPQSYECILYQEIAVILYSSRRVMHEGRF

SEQ ID NO: 34666 - protein, 527 aa, Homo sapiens
SGPSAAGLLVFAGGPLQALCAWVSAVEAAEQWILSIREDRNGRSQKTVHTEGDMNMNIKKIVKQATVLTFTTALLAGGATQAFAKENNQKAYKETYGVSHITRHDMLQIPKQQQNEKYQVPQFDQSTIKNIESAKGLDVWDSWPLQNADGTVAEYNGYHVVFALAGSPKDADDTSIYMFYQKVGDNSIDSWKNAGRVFKDSDKFDANDPILKDQTQEWSGSATFTSDGKIRLFYTDYSGKHYGKQSLTTAQVNVSKSDDTLKINGVEDHKTIFDGDGKTYQNVQQFIDEGNYTSGDNHTLRDPHYVEDKGHKYLVFEANTGTENGYQGEESLFNKAYYGGGTNFFRKESQKLQQSAKKRDAELANGALGIIELNNDYTLKKVMKPLITSNTVTDEIERANVFKMNGKWYLFTDSRGSKMTIDGINSNDIYMLGYVSNSLTGPYKPLNKTGLVLQMGLDPNDVTFTYSHFAVPQAKGNNVVITSYMTNRGFFEDKKATFAPSFLMNIKGNKTSVVKNSILEQGQLTVN

SEQ ID NO: 34667 - protein, 512 aa, Homo sapiens
  DOMAIN (116)..(143): Mrp family proteins domain identified by eMATRIX, accession number BL01215A, p-value=4.964e-11, raw score of 9.75
  DOMAIN (211)..(302): ParA family ATPase domain identified by PFam, accession name ParA, E-value=0.011, PFam score of -1.9
  misc_feature (1)...(512): Xaa = X or * as defined in Table 2
MQFSLLWPFVHASQLTLEDPRINAGHEMTKAIAIAQFNDDSPEARKITRRWRIGEAADLVGVSSQAIRDAEKAGRLPHPDMEIRGRVEQRVGYTIEQINHMRDVFGTRLRRAEDVFPPVIGVAAHKGGVYKTSVSVHLAQDLALKGLRVLLVEGNDPQGTASMYHGWVPDLHIHAEDTLLPFYLGEKDDVTYAIKPTCWPGLDIIPSCLALHRIETELMGKFDEGKLPTDPHLMLRLGIETVAHDYDVLVIDSPPNLGIGTINVRWAADVQPLXIPKQQQNEKYQVPQFDQSTIKNIESAKGLDVWDSWPLQNADGTVAEYNGYHVVFALAGSPKDADDTSIYMFYQKVGDNSIDSWKNAGRVFKDSDKFDANDPILKDQTQEWSGSATFTSDGKIRLFYTDYSGKHYGKQSLTTAQVNVSKSDDTLKINGVEDHKTIFDGDGKTYQNVQQFIDEGNYTSGDNHTLRDPHYVEDKGHKYLVFEAHTGTENGYQGEESLFNKAYYGNTCMTRR

SEQ ID NO: 34668 - protein, 330 aa, Homo sapiens
  misc_feature (1)...(330): Xaa = X or * as defined in Table 2
SLPNLDNAAICSSSSSPTRTRXSLSEGATQAFAKEKYPHKHTKKRSGVFHITRHDMLQIPKQQQNEKYQVPQFDQSTIKNIESAKALDVWDSWPLQNADGTVAEYNGYHVVFALAGSPKDADDTSIYMFYQKVGDNSIDSWKNAGRVFKDSDKFDANDPILKDQTQEWSGSATFTSDGKIRLFYTDYSGKHYGKQSLTTAQVNVSKSDDTLKINGVEDHKTIFDGDGKTYQNVQQFIDEGNYTSGDNHTLRDPHYVEDKGHKYRGPLESPSTHQAEFNPTSCVSSLGTLQGFPAPAWLALAHPVHPLKHKSGGSNRLSAAIWGIKRKPAR

SEQ ID NO: 34669 - protein, 448 aa, Homo sapiens
  DOMAIN (105)..(132): Mrp family proteins domain identified by eMATRIX, accession number BL01215A, p-value=4.964e-11, raw score of 9.75
MKLMETLNQCINAGHEMTKAIAIAQFNDDSPEARKITRRWRIGEAADLVGVSSQAIRDAEKAGRLPHPDMEIRGRVEQRVGYTIEQINHMRDVFGTRLRRAEDVFPPVIGVAAHKGGVYKTSVSVHLAQDLALKGLRVLLVEGGATQAFGKENNQKAYKETSGVSHITRHDMLQIPKQQQNEKYQVPQFDQSTIKNIESAKGLDVWDSWPLQNADGTVAEYNGYHVVFALAGSPKDADDTSIYMFYQKVGDNSIDSWKNAGRVFKDSDKFDANDPILKDQTQEWSGSATFTSDGKIRLFYTDYSGKHYGKQSLTTAQVNVSKSDDTLKINGVEDHKTIFDGDGKTYQNVQQVKHSRQRMYLVPPVFSQLTEQHQAVIDAIFAGDADGARKAMMAHLSFVHTTMKRFDEDQARHARITRLPGFARPIGVLVHQVTVKATHPSRAFFRIV

SEQ ID NO: 34670 - protein, 571 aa, Homo sapiens
  DOMAIN (397)..(414): MALIC ENZYME SIGNATURE domain identified by eMATRIX, accession number PR00072G, p-value=5.500e-21, raw score of 10.45
  DOMAIN (305)..(552): Malic enzyme domain identified by PFam, accession name malic, E-value=4e-155, PFam score of 528.7
MVYCRNTGGRYGKATIEGYYQKLSKAFVELTKQASCSGDEYRSLKVDCANGIGALKLREMEHYFSQGLSVQLFNDGSKGKLNHLCGADFVKSHQKPPQGGATQAFAKENNQKAYKETYGVSHITRHDMLQIPKQQQNEKYQVPQFDQSTIKNIESAKGLDVWDSWPLQNADGTVAEYNGYHVVFALAGSPKDADDTSIYMFYQKVGDNSIDSWKNAGRVFKDSDKFDANDPILKDHTQEWSGSATFTSDGKIRLFYTDYSGKHYGQHSLTTGHVYASESDDPLEFDGLEDDTSIFDGTRSTISGALGIAHLIVMALEKEGLPKEKAIKKIWLVDSKGLIVKGRASLTQEKEKFAHEHEEMKNLEAIVQEIKPTALIGVAAIGGAFSEQILKDMAAFNERPIIFALSNPTSKAECSAEQCYKITKGRAIFASGSPFDPVTLPNGQTLYPGQGNNSYVFPGVALGVVACGLRQITDNIFLTTAEVIAQQVSDKHLEEGRLYPPLNTIRDVSLKIAEKIVKDAYQEKTATVYPEPQNKEAFVRSQMYSTDYDQILPDCYSWPEEVQKIQTKVDQ

SEQ ID NO: 34671 - protein, 638 aa, Homo sapiens
  DOMAIN (9)..(53): Ribosomal protein S2 proteins domain identified by eMATRIX, accession number BL00962D, p-value=7.889e-09, raw score of 22.51
LSSSLCFEPMVVITCDMDRLKIAVGSCFFIQLATLCLLSGSFSPFTFKVIIDIKSDVTERSSTSCGRLHGSEAHCQESLDQTTSGGAEPAFKQGRKRRKRTCNFVGMTGPSDADLFEFAGGLLQMLFAWVSAVGSCRTVDFGEPQILPPDRSSGSFVSEEYPACSIREDRNGRSQKTVHTEGDMNMNIKKIVKQATVLTFTTALLAGGATQAFAKENNQKAYKETYGVSHITRHDMLQIPKQQQNEKYQVPQFDQSTIKNIESAKGLDVWDSWPLQNADGTVAEYNGYHVVFALAGSPKDADDTSIYMFYQKVGDNSIDSWKNAGRVFKDSDKFDANDPILKDQTQEWSGSATFTSDGKIRLFYPDYSGKHSDNQSVTTAQVNVSKSDDTLKINGVEDHKTIFDGDGKTYQNVQQFIDEGNYTSGDNHTLRDPHYVEDKGHKYLVFEANTGTENGYQGEESLFNKAYYGGGTNFFRKESQKLQQSAKKRDAELANGALVPQAKGNNVVITSYMTNRGFFEDKKATFAPSFLMNIKGNKTSVVKNSILEQGQLTWLQVAKRARMCGGQAVGSASRTVRIKMHNAYALADALVTADAVEMEQIPGEARQVPALNKALLPNSNSRGDRVARGIDRIKPAIV

SEQ ID NO: 34672 - protein, 288 aa, Homo sapiens
  misc_feature (1)...(288): Xaa = X or * as defined in Table 2
RPPAFAKKXPKAYKETYGVSHITRHDMLQIPKQQQNEKYQVPQFDQSTIKNIESAKGLDVWDSWPLQNADGTVAEYNGYHVVFALAGSPKDADDTSIYMFYQKVGDNSIDSWKNAGRVFKDSDKFDANDPILKDQTQEWSGSATFTSDGKIRLFYTDYSGKHYGKQSLTTAQVNVSKSDDTLKINGVEDHKTIFDGDGKTYQNVQQFIDEGNYTSGDNHTLRDPHYVGGTSWEPGVFSVSCVFFGQQEGVHGXDEFLDFSYWFQGGXICLYQKASXQNTTSYKRYTGS

SEQ ID NO: 34673 - protein, 650 aa, Homo sapiens
  DOMAIN (429)..(450): Myc-type 'helix-loop-helix' dimerization domain proteins. domain identified by eMATRIX, accession number BL00038B, p-value= 1.837e-09, raw score of 16.97
  DOMAIN (403)..(450): Helix-loop-helix DNA-binding domain identified by PFam, accession name HLH, E-value=5.1e-05, PFam score of 30.1
MNMNIKKIVKQATVLTFTTALLAGGATQAFAKENNQKAYKETYGVSHITRHDMLQIPKQQQNEKYQVPQFDQSTIKNIESAKGLDVWDSWPLQNADGTVAEYNGYHVVFALAGSPKDADDTSIYMFYQKVGDNSIDSWKNAGRVFKDSDKFDANDPILKDQTQEWSGSATFTSDGKIRLFYTGSLNSSKTEKYQVPHIDQSTIKNIESAKGLDVWDSWPLQNADGTVAEYNGYHVVFALAGSPKDADDTSIYMFYQKVGDNSIDSWKNAGRVFKDSDKFDANDPILKDQTQEWSGSATFTSDGKIRLFYTDYSGKHYGKQSLTTAQVNVSKSDDTLKINGVEDHKTIFDGDGKTYQNVQQFIDEGNYTSGDNHTLRDPHYVEDKGHKYLVFQDHTGTEEHPQPQERPRTQSFTSAFAERRECIPNVPADTKLSKIKTLRLATSYIAYLMDLLAKDDQNGEAEAFKAEIKKTDVKEEKRKKELASKCLDLEQLGASVEPTGNLRTKITKEKPRHTGPPEVVVPGCCPHRSRAYKSDKYAHTLTVTASQHAPPPPTHMEGFELFHLPDLCSPSQDAQTTGRTQMKPDHSPRPSHRVPQAKGNNVVITSYMTNRGFFEDKKATFAPSFLMNIKGNKTSVVKNSILEQGQLTVN

SEQ ID NO: 34674 - protein, 343 aa, Homo sapiens
MLALPGALWLACFDEEHCHTEEAHFKELRVGNNSGAQLASPSGSRTGAAGGAACQSRAVRLHSSALGWSMGLGAVEQGVVLVREAGAAQEPMEWVGGSGMAGCRSRALPRGKAAKVRREIDHSAGGATQAFAKENNQKAYKETYGVSHITRHDMLQIPKQQQNEKYQVPQFDQSTIKNIESAKGLDVWDSWPLQNADGTVAEYNGYHVVFALAGSPKDADDTSIYMFYQKVGDNSIDSWKNAGRVFKDSDKKGRTPAAGVGIMSDRLALTCFASKVKEVPPRADVCKGAPVPVSHDATPLSARPAKKDARFHLRQDCKWLCDKCEIRERVNVQATKSQKRVFS

SEQ ID NO: 34675 - protein, 324 aa, Homo sapiens
CVWLGCRGYYPKAYKETYGVSHITRHDMLQIPKQQQNEKYQVPQFDQSTIKNIESAKGLDVWDSWPLQNADGTVAEYNGYHVVFALAGSPKDADDTSIYMFYQKVGDNSIDSWKNAGRVFKDSDKFDANDPILKDQTQEWSGSATFTSDGKIRLFYTDYSGKHYGKQSLTTAQQLLQLVQFQEVDTDFDFPEEDKKEEFEECLEKFFSTGPARPPTKEKVKRRVLIEPGMPLNHIEYCNHEIMGKNVYYKHRWVAEHYFLLMQYDELQKICYNEFVPSVIFLRYKSPGEAAGTCHLKQRRWVMPEAAAPVGTGSRYPLTGQLWT

SEQ ID NO: 34676 - protein, 80 aa, Homo sapiens
MNSIQIPKQQQNEKYQVPQFDQSTIKYIESPKELDVWDSWPLQNADGTVAEYNGYHVAFALAGSPKDADDTSIYMFYQKI

SEQ ID NO: 34677 - protein, 677 aa, Homo sapiens
  misc_feature (1)...(677): Xaa = X or * as defined in Table 2
MPYSPSCPCFVFVGAAGWCAPSPSVRFGRSLLGVAFVIYSFLSLCFQYLGGEGAIMAEIRGKPINFFLRLCSEVPILEDTLMRILVIGLSRELPLGPADAMELADHLVKRAAAVQADETPALARTSGALHKAALQLGPGSPGGSGTCLLHICRWEFRGSSPYRGATQAFAKENNQKAYKEACGVSHITRHDMLQIPKQQQNEKYQVPQFDQSTIKNIESAKGLDVWDSWPLQNADGTVAEYNGYHVVFALAGSPKDADDTSIYMFYQKVGDNSIDSWKNAGRVFKDSDKFDANDPILKDRRKNGPGLQPLHLTGKIRLFYTDYSRKHYGKQSLTTTQVGYNSIDSWKNAGRVFKDSDKFDANDPILKDQTQEWSGSATFTSDGKIRLFYTDYSGKHYGKQSLTTAQTKAINTLYSKPTRGTENGYQGEESLFNKAYYGGGTNFFRKESQKLQQSAKKRDAELANGALGRGWNSLEDSEEDRKMWESLELTRDLLNGFDQNSDNDMDNEIQAEVVSDGDEELLGSWSKGGATQAFAKENNQKAYKETYGVSHITRHDMLQIPKQQQNEKYQVPQFDQSTIKNIESAKGLDVWDSWPLQNADGTVAEYNGYHVVFALAGSPKDADDTSIYMFYQKVGDNSIDSWKNAGRVFKDSDKFDANDPILKDQTQEGFFRAPPAX

SEQ ID NO: 34678 - protein, 1351 aa, Homo sapiens
  DOMAIN (1111)..(1154): 1 kw MIND INHIBITOR DIVISION CONTROL domain identified by eMATRIX, accession number DM01756B, p-value=1.880e-10, raw score of 22.91
  DOMAIN (1080)..(1190): ParA family ATPase domain identified by PFam, accession name ParA, E-value=2.9e-09, PFam score of 44.2
MAVLQGALARCLRRLELCLQGMPWRCLCRRRAQARLPAKGQCHIGTRCALRKDEEKQRKIGTGLFAHEQGCRWTSIVVVVGSQLFLHLAEFTIVSEPGTMGGSDASFLRLGPNRSLHLGINQGGLPVGVDARVGPGGATQAFAKENNQKAYKETYGVSHITRHDMLQIPKQQQNEKYQVPQFDQSTIKNIESAKGLDVWDSWPLQNADGTVAEYNGYHVVFALAGSPKDADDTSIYMFYQKVGDNSIDSWKNAGRVFKDSDKFDANDPILKDQTQEWSGSATFTSDGKIRLFYTDYSGKHYGKQSLTTAQVNVSKSDDTLKINGVEDHKTIFDGDGKTYQNVQQFIDEGNYTSGDNHTLRDPHYVEDKGHKYLVFEANTGTENGYQGEESLFNKAYYGGGTNFFRKESQKLQQSAKKRDAELANGALGCCIIPCIHGLVQRLIETALTKTFNSPPPYSDKLLLLENQAEQQSQDMLKSLKRKNYENQEGEVVGNIEFLFKDPLSSIFKAYLPCLLAPSYGCSRLKKFRHPATCDYRKVKAKSGNGDSSRVRKDEGGATQAFAKENNQKAYKETYGVSHITRHDMLQIPKQQQNEKYQVPQFDQSTIKNIESAKGLDVWDSWPLQNADGTVAEYNGYHVVFALAGSPKDADDTSIYMFYQKVGDNSIDSWKNAGRVFKDSDKFDANDPILKDQTQEWSGSATFTSDGKIRLFYTDYSGKHYGKQSLTTAQVNVSKSDDTLKINGVEDHKTIFDGDGKTYQNVQQFIDEGNYTSGDNHTLRDPHYVEDKGHKYLVFEANTGTENGYQGEESLFNKAYYGGGTNFFRKESQKLQQSAKKRDAELANGALGCCIIPCIHGLVQRLIETALTKTFNSPPPYSDKLLLLENQAEQQSQDMLKSLKRKNYENQEGEVVGNIEFLFKDPLSSIFKAYLPCLLAPSYGCSRLKKFRHPATCDYRKVKAKSGNGDSSRVRKDEGGATQAFAKENNQKAYKETYGVSHITRHDMLQIPKQQQNEKYQVPQFDQSTIKNIESAKGLDVWDSWPLQNADGTVAEYNGYHVVFALAGSPKDADDTSIYMFYQKVGDNSIDSWKNAGRVFKDSDKFDANDPILKDQTQECIDSAPNLGIGTINVVCAADVLIVPTPAELFDYTSALQFFDMLRDLLKNVDLKGFEPDVRILLTKYSNSNGSQSPWMEEQIRDAWGSMVLKNVVRETDEVGKAAPMVDSLIARVGVMARGNAITLPVCGRDVKFTLEVLRGDSVEKTSRELNRSQEIGVKPLSCGSAQIWQHGTSLMNYLRMGKEMGPTRCENKSGHSAMWAERILTYCSNQVTLCTDQDSHYCPRSFPYSRCSSSL

SEQ ID NO: 34679 - protein, 495 aa, Homo sapiens
TVDLDACTKGVLTFTTALLAGGANQAFAKENTKKAYKETYGVSHITRHDMLQIPNQQQNEKYQVPQFDQSTIKNIESAKGLDVWDSWPLQNADGTVAEYNGYHVVFALAGSPKDADDTSIYMFYQKVGDNSIDSWKNAGRVFKDSDKFDANDPILKDQTQEWSGSATFTSDGKIRLFYTDYSGKHYGKQSLTTAQVNVSKSDDTLKINGVEDHKTIFDGDGKTYQNVQQFIDEGNYTSGDNHTLRDPHYVEDKGHKYLVSKPGRKVNVSKSDDTLKINEVEDHKTIFDGDGKTYQNVQQFIDEGNYTSGDNHTLRDPHYVEDKGHKYLVFEANTGTENGYQGEESLFNKAYYGGGTNFFRKESQKLQQSAKKRDAELANGALGIIELNNDYTLKKVMKPLITSNTVTDEIERANVFKMNGKWYLFTDSRGSKMTIDGINSNDIYMLGYVSNSLTGPYKPLNKTGLVLQMGLDPNDVTFTYSHFAVPQAKGNKGGL

SEQ ID NO: 34680 - protein, 1112 aa, Homo sapiens
  DOMAIN (1005)..(1034): kw REPLICATION REPB REPA INITIATION domain identified by eMATRIX, accession number DM00653A, p-value=7.207e-27, raw score of 20.40
  DOMAIN (1002)..(1101): Initiator RepB protein domain identified by PFam, accession name RepB_protein, E-value=0.0003, PFam score of 17.5
MNMNIKKIVKQATVLTFTTALLAGGATQAFAKENNQKAYKETYGVSHITRHDMLQIPKQQQNEKYQVPQFDQSTIKNIESAKGLDVWDSWPLQNADGTVAEYNGYHVVFALAGSPKDADDTSIYMFYQKVGDNSIDSWKNAGRVFKDSDKFDANDPILKDQTQELTAGYVVERALKLKSRYQLFDVAEELPEQLKYDFLMFWDHGPTRIVGLIISLGPRSHSYRRSDNQTGTTVPLVSSARAGTLNRGLRLKPVWWTLKNPRRRHSSTLENAGRVFKDSDKFDANDPILKDQTQEWSGSATFTSDGKIRLFYTDYSGKHYGKQSLTTAQVNVSKSDDTLKINGVEDHKTIFDGDGKTYQNVQQFIDEGNYTSGDNHTLRDPHYVEDKGHKYLVFEANTGTENGYQGEESLFNKAYYGGGTNFFRKESQKLQQSAKKRDAELANGALGIIELNNDYTLKKVMKPLITSNTCSASPDLPPVFSWTSADVTSKCDNLKTCHTSHGSVMAETAVINHKKRKNSPRIVQSNDLTEAAYSLSRDQKRMLVFGPTPLHPWGMSPLLFTWPPSCPLAFAWGVPAASAAVTSPRRASELWLPTMGVLWGAPEPCRVPAAGDSNAESAWPAERGCWGTQPHPTLLGKALRSPERTAVSHITRHDMLQIPKQQQNEKYQVPQFDQSTIKNIESAKGLDVWDSWPLQNADGTVAEYNGYHVVFALAGSPKDADDTSIYMFYQKVGDNSIDSWKNAGRVFKDSDKFDANDPILKDQTQEWSGSATFTSDGKIRLFYTDYSGKHYGKQSLTTAHVNVSKSDDTLKINGVEDHTTIFDGDGETYQNVQQFIDEGNYTSGDNHTLRDPHYVEDKGHKYLVFEANTGTENGLDYPAQKYFQQIHSAIGLHNADHVHKHLLGDNRYPIWIMQPSAHHPARQPEHDNHFRLEPFKINVLEQITKHIEKLQCGGVVKQLSRRGNNQHISSTYDINRADTQVRRAVNNYDIIVMSNSFNGQSEHQNRFTQFRLSETKEITNPYAMRLYESLCQYRKPDGSGIVSLKIDWIIERYQLPQSYQRMPDFRRRFLQVCVNEINSRTPMRLSYIEKKKGRQTTHIVFSFRDITSMTTG

SEQ ID NO: 34681 - protein, 469 aa, Homo sapiens
  DOMAIN (67)..(154): ParB-like nuclease domain identified by PFam, accession name ParBc, E-value=4.2e-08, PFam score of 40.4
MKRAPVIPKHTLNTQPVEDTSLSTPAAPMVDSLIARVGVMARGNAITLPVCGRDVKFTLEVLRGDSVEKTSRVWSGNERDQELLTEDALDDLIPSFLLTGQQTPAFGRRVSGVIEIADGSRRRKAAALTESDYRVLVGELDDEQMAALSRLGGATQAFAKENNQKAYKETYGVSHITRHDMLQIPKQQQNEKYQVPQFDQSTIKNIESAKGLDVWDSWPLQNADGTVAEYNGYHVVFALAGSPKDADDTSIYMFYQKVGDNSIDSWKNAGRVFKDSDKFDANDPILKDQTQEWSGSATFTSDGKIRLFYTDYSGKHYGKQSLTTAQVNVSKSDDTLKINGVEDHKTIFDGDGKTYQNVQQFIDGYLLEPDGGALQNFQRYTGIQHVHRIGMAERMWCDRNRERHTVSSSGGNRLPNPGPDRSVRHFPDPRFLCPSCATVTPLHELIANKYLSGKIGAKKLRKLLIKHVD

SEQ ID NO: 34682 - protein, 1314 aa, Homo sapiens
  DOMAIN (456)..(505): Granulins proteins domain identified by eMATRIX, accession number BL00799E, p-value=9.924e-09, raw score of 14.64
  DOMAIN (341)..(970): ParB-like nuclease domain identified by PFam, accession name ParBc, E-value=4.9e-25, PFam score of 96.6
MNIKKIVKQATVLTFTTALLAGGATQAFAKENNQKAYKETYGVSHITRHDMLQIPKQQQNEKYQVPQFDQSTIKNIESAKGLDVWDSWPLQNADGTVAEYNGYHVVFALAGSPKDADDTSIYMFYQKVGDNSIDSWKNAGRVFKDSDKFDANDPILKDQTQEWSGSATFTSDGKIRLFYTDYFGKHYGQQRLTTAQGVEQLLLVKQLIVPPKKEKVAINRIYLEEWSNLAWMNLRFFDMLRDLLKNVDLKGFEPDVRILLTKYSNSNGSQSPWMEEQIRDAWGSMVLKNVVRETDEVGKAAPMVDSLIARVGVMARGNAITLPVCGRDVKFTLEVLRGDSVEKTSRVWSGNERDQELLTEDALDDLIPSFLLTGQQTPAFGRRVSGVIEIADGSRRRKAAALTESDYRVLVGELDDEQMAALSRLGNDYRPTSAYELCLNKHVIRALIKQLKEKNEGQSMETLTGLRMALNSWAAVSKDKAPDFEDHRICCSGIYEYSSEKEGNRNLLLPKFKPWKYVIFPSIREDRNGRSQKTVHTEGDMNMNIKKIVKQATVLTFTTALLAGGATQAFAKENNQKAYKETYGVSHITRHDMLQIPKQQQNEKYQVPQFDQSTIKNIESAKGLDVWDSWPLQNADGTVAEYNGYHVVFALAGSPKDADDTSIYMFYQKVGDNSIDSWKNAGRVFKDSDKFDANDPILKDQTQEWSGSATFTSDGKIRLFYTDYFGKHYGQQRLTTAQGVEQLLLVKQLIVPPKKEKVAINRIYLEEWSNLAWMNLRFFDMLRDLLKNVDLKGFEPDVRILLTKYSNSNGSQSPWMEEQIRDAWGSMVLKNVVRETDEVGKAAPMVDSLIARVGVMARGNAITLPVCGRDVKFTLEVLRGDSVEKTSRVWSGNERDQELLTEDALDDLIPSFLLTGQQTPAFGRRVSGVIEIADGSRRRKAAALTESDYRVLVGELDDEQMAALSRLGNDYRPTSAYELCLNKHVIRALIKQLKEKNEGQSMETLTGLRMALNSWAAVSKDKAPDFEDHRICCSGIYEYSSEKEGNRNLLLPKFKPWKYVIFPSIREDRNGRSQKTVHTEGDMNMNIKKIVKQATVLTFTTALLAGGATQAFAKENNQKAYKETYGVSHITRHDMLQIPKQQQNEKYQVPQFDQSTIKNIESAKGLDVWDSWPLQNADGTVAEYNGYHVVFALAGSPKDADDTSIYMFYQKVGDNSIDSWKNAGRVFKDSDKFDANDPILKDQTQEWSGSATFTSDGKIRLFYTDYEFHHMLCWQISQNQSMSYFLTISCLSLAGKFSLLKGLSPSKASCGTEK

SEQ ID NO: 34683 - protein, 276 aa, Homo sapiens
AQTDAAEKSVSIAQLFQACLSIFSSGDVAGGATQAFAKENNQKAYKETYGVSHITRHDMLQIPKQQQNEKYQVPQFDQSTIKNIESAKGLDVWDSWPLQNADGTVAEYNGYHVVFALAGSPKDADDTSIYMFYQKVGDNSIDSWKNAGRVFKDSDKFDANDPILKDQTQEWSGSATFTSDGKIRLFYTDYSGKHYGKQSLTTAQVNVSKSNDTLKINGVGKYKTIFDGDGKTYQTVQQFIDEGNYTSGGHHTLKDPSYNPPLDLSGGNSGYQSQET

SEQ ID NO: 34684 - protein, 665 aa, Homo sapiens
  DOMAIN (591)..(646): ELEMENT INSERTION TRANSPOSABLE SEQUENCE TRANSPOSASE FOR domain identified by eMATRIX, accession number PD02662D, p-value= 3.973e-10, raw score of 21.71
MNMNIKKIVKQATVLTFTTALLAGGATQAFAKENNQKAYKETYGVSHITRHDMLQIPKQQQNEKYQVPQFDQSTIKNIESAKGLDVWDSWPLQNADGTVAEYNGYHVVFALAGSPKDADDTSIYMFYQKVGDNSIDSWKNAGRVFKDSDKFDANDPILKDQTQEWSGSATFTSDGKIRLFYTDYSGKHYGKQSLTTAQVNVSKSDDTLKINGVEDHKTIFDGDGKTYQNVQQFIDEGNYTSGDNHTLRDPHYVENKGHKYLGFETNTGTENGYQGEESLFNKAYYGGGTNFFRKESQKLQQSAKKRDAELANGALGIIELNNDYTLKKVMKPLITSNTVTDEIERANVFKMNGKWYLFTDSRGSKMTIDGINSNDIYMLGSDESPNDFGNRHLHKERLAVYRWHASFICSGNTMPIVLVDWSDIREQKRLMVLRASVALHGRSVTLYEKAFPLSEQCSKKAHDQFLADLASILPSNTTPLIVSDAGFKVPWYKSVEKLGWYWLSRVRGKVQYADLGAENWKPISNLHDMSSSHSKTLGYKRLTKSNPISCQILLYKSRSKGRKNQRSTRTHCHHPSPKIYSASAKEPWVLATNLPVEIRTPKQLVNIYSKRMQIEETFRDLKSPAYGLGLRHSRTSSSERFDIMLLIALMLQLTCWLAGVHAQKQ

SEQ ID NO: 34685 - protein, 442 aa, Homo sapiens
  DOMAIN (375)..(389): Phage integrase family domain identified by eMATRIX, accession number PF00589B, p-value=1.621e-11, raw score of 16.17
  DOMAIN (234)..(421): "Phage" integrase family domain identified by PFam, accession name Phage_integrase, E-value=6.1e-06, PFam score of 18.8
MIFFVLVIFVGSFYLVNLILAVVAMAYEEQNQATLEEAEQKEAEFKAMLEQLKKQQEEAQSIRRYRNGRCQKPVHTEGDMNMNIKKIVKQATVLTFTTALLAGGATQAFAKENNQKAYKETYGVSHITRHDMLQIPKQQQNEKYQVPQFDQSTIKNIESAKGLDVWDSWPLQNADGTVAEYNGYHVVFALAGSPKDADDTSIYMFYQKVGDNSIDSWKNAGRVFKDSDKFDANDPILKDQTQEWSGSATFTSDGKIRLFYTDYSGKHYGKQSLTTAQTQHQVVWVTKSGGVKGLRKRQFEREMWASGGHCDCGGCEGPELWESTLFIGNSTKKHMARTEKARIWEVTDRTGMTWIGEAGAAAAADGVTFSVPVTPHTFRHSYAMHMLYAGIPLKGLQSLMGHNSISSTEVYTKVFALDVAARHRVQFAMPESDAVAMLKQLS

SEQ ID NO: 34686 - protein, 946 aa, Homo sapiens
GKVTPLDFADFGTTIKQDFRLLGQTSVDRLLQLSQGQAVKGNQLLPVSLVKRKTTLAPNTQTASPRALADSLMQLARQVSRLESGQLSAKGHSQLQQIPKQQQNEKYQVPQFDQSTIKNIESAKGLDVWDSWPLQNADGTVAEYNGYHVVFALAGSPKDADDTSIYMFYQKVGDNSIDSWKNAGRVFKDSDKFDANDPILKDQTQEWSGSATFTSDGKIRLFYTDYSGKHYGKQSLTTAQVNVSKSDDTLKINGVEDHKTIFDGDGKTYQNVQQFIDEGNYTSGDNHTLRDPHYVEDKGHKYLVFEANTGTENGYQGEESLFNKAYYGGGTNFFRKVSQKLQQSAKKRDAELANGALGIIELNNDYTLKKVMKPLITSNTIPNQQQNEKYQVPQFDQSTIKIFESAKGLDVWDSWPLQNADGTVAEYNGYHVVFALAGSPKDADDTSIYMFYQKVGDNSIDSWKNAGRVFKDSDKFDANDPILKDQTQEWSGSATFTSDGKIRLFYTDYSGKHYGKQSLTTAQVNVSKSDDTLKINGVEDHKTIFDGDGKTYQNVQQFIDEGNYTSGDNHTLRDPHYVEDKGHKYLVFEANTGTENGYQGEESLFNKAYYGGGTNFFRKVSQKLQQSAKKRDAELANGALGIIELNNDYTLKKVMKPLITSNTIPNQQQNEKYQVPQFDQSTIKIFESAKGLDVWDSWPLQNADGTVAEYNGYHVVFALAGSPKDADDTSIYMFYQKVGDNSIDSWKNAGRVFKDSDKFDANDPILKDQTQEWSGSATFTSDGKIRLFYTDYSGKHYGKQSLTTAQVNVSKSDDTLKINGVEDHKTIFDGDGKTYQNVQQFIDEGNYTSGDNHTLRDPHYVEDKGHKYLVFEANTGTENGYQGEESLFNKPIDTVPVPVEVAEGAMDSMRVLSFGGLMLYFCADWPPASRWCFPETVSCSSVERDR

SEQ ID NO: 34687 - protein, 2386 aa, Homo sapiens
  DOMAIN (921)..(961): Chloramphenicol acetyltransferase proteins domain identified by eMATRIX, accession number BL00100B, p-value=4.333e-30, raw score of 25.01
  misc_feature (1)...(2386): Xaa = X or * as defined in Table 2
MNMNIKKIVKQATVLTFTTALLAGGATQAFAKENNQKAYKETYGVSHITRHDMLQIPKQQQNEKYQVPQFDQSTIKNIESAKGLDVWDSWPLQNADGTVAEYNGYHVVFALAGSPKDADDTSIYMFYHKIMKRAPVIPKHTLNTQPVEDTSLSTPAAPMVDSLIARVGVMARGNAITLPVCGRDVKFTLEVLRGDSVEKTSRVWSGNERDQELLTEDALDDLIPSFLLTGQQTPAFGRRVSGVIEIADGSRRRKAAALTESDYRVLVGELDDEQMAALSRLGNDYRPTSAYERGQRYASRLQNEFAGNISALADAENISQPPLESDSAFAKKIPKTYKETYGVSHITRHDMLQIPKQQQNEKYQVPQFDQSTIKNIESAKGLDVWDSWPLQNADGTVAEYNGYHVVFALAGSPKDADDTSIYMFYQKVGDNSIDSWKNAGRVFKDSDKFDANDPILKDQTQEWSGSATFTSDGKIRLFYTDYSGKHYGKQSLTTAQFFVSGIPRFVHNPWHIAVLEVLARAIRQEKEIKGIQLGKEEVKLSLFADDMIVYLENPIVSAQNLLKLISNFSKVSGYKINVQKSQAFLYTNNRQTENQIMSELPFTIASKRIKYLGIQLTRDVKDLFKENYKPLLKEIKEDTNKWKNIPCSWVGRINIVKMAILPKGSIGFCLPAEFRQKWDHWAGSTSNVTHLATGGGMSEVSCPAIWCFQYKRWLCTLTNSGRRKTAQLEALASINFLATRGRGGATQAFAKENNQKAYKETYGVSHITRHDMLQIPKQQQNEKYQVPQFDQSTIKNIESAKGLDVWDSWPLQNADGTVAEYNGYHVVFALAGSPKDADDTSIYMFYQKVGDNSIDSWKNAGRVFKDSDKFDANDPILKDQTQEWSGSATFTSDGKIRLFYTDYSGKHYGKQSLTTAQTVQLDITAFLKTVKKNKHKFYPAFIHILARLMNAHPEFRMAMKDVWDHDPTRVVGLIIGLGPRSHLYCRSDYQRETTIPSMPVKGKDFADFGTTIKQDFRLLGQTSVDRLLQLSQGQAVKGNQLLPVSLVKRKTTLAPNTQTASPRALADSLMQLARQVSRLESGQDFADFGTTIKQDFRLLGQTSVDRLLQLSQGQAVKGNQLLPVSLVKRKTTLAPNTQTASPRALADSLMQLARQVSRLESGQDFADFGTTIKQDFRLLGQTSVDRLLQLSQGQAVKGNQLLPVSLVKRKTTLAPNTQTASPRALADSLMQLARQVSRLESGHGKYYTQGDKVLMPLAIQIPKQQQNEKYQVPQFDQSTIKNIESAKGLDVWDSWPLQNADGTVAEYNGYHVVFALAGSPKDADDTSIYMFYQKVGDNSIDSWKNAGRVFKDSDKFDANDPILKDQTQEWSGSATFTSDGKIRLFYTDYSGKHHGKQSLTTAQVNVSKSDDTLKINGVEDHKTIFDGERKTYQNVQQFIDEGNYTSGDNHTLRDPHYQNTYIRLEPFKINVLEQITKHIEKLQCGGVVKQLSRRGNNQHISSTYDINRADTQVRRAVNNYDIIVMSNSFNGQSEHQXGRKTVLLADVKDLGPFPGSLKAVTWGGGPYKKKTLEVLTRGSTLEDPLLTFTTALLAGGATQAFAKENNQKAYKETYGVSHITRHDMLQIPKQQQNEKYQVPQFDQSTIKNIESAKGLDVWDSWPLQNADGTVAEYNGYHVVFALAGSPKDADDTSIYMFYQKVGDNSIDSWKNAGRVFKDSDKFDANDPILKDQTQEWSGSATFTSDGKIRLFYTDYSGKHYGKQSLTTAQEQYLPGAIALFNVNNSSNKDQGSPALLKNVDLKGFEPDVRILLTKYSNSNGSQSPWMEEQIRDAWGSMVLKNVVRETDEVGKDTSLSTPAAPMVDSLIARVGVMARGNAITLPVCGRDVKFTLEVLRGDSVEKTSRVWSGNERDQELLTEDALDDLIPSFLLTGQQTPAFGRRVSGVIEIADGSRRRKAACTYRNDYRVLVGELDDEQMAALSRLGNDYRPTSAYERGQRYASRLQNEFAGNISALADAENISRKIITRCINTAKLPKSVVALFSHPGELSAREIAERYLHYNFFAFRRIQIPKQQQNEKYQVPQFDQSTIKNIESAKGLDVWDSWPLQNADGTVAEYNGYHVVFALAGSPKDADDTSIYMFYQKVGDNSIDSWKNAGRVFKDSDKFDANDPILKDQTQEWSGSATFTSDGKIRLFYTDYSGKHYGKQSLTTAQVRRAVNNYDIIVMSNSFNGQSEHQVWIVMKPLITSNTVTDEIERANVFKMNGKWYLFTDSRGSKMTIDGINSNDIYMLGYVSNSLTGPYKPLNKTGLVLQMGLDPNDVTFTYSHFAVPQAKSNNVVITSYMTNRGFFEDKKATFAPSFLMNIKGNKTSVVNNSILEQGQLTVN

SEQ ID NO: 34688 - protein, 576 aa, Homo sapiens
  DOMAIN (276)..(303): Mrp family proteins domain identified by eMATRIX, accession number BL01215A, p-value=4.964e-11, raw score of 9.75
MNMNIKKIVKQATVLTFTTALLAGGATQAFAKENNQKAYKETYGVSHITRHDMLQIPKQQQNEKYQVPQFDQSTIKNIESAKGLDVWDSWPLQNADGTVAEYNGYHVVFALAGSPKDADDTSIYMFYQKVGDNSIDSWKNAGRVFKDSDKFDANDPILKDQTQEWSGSATFTSDGKIRLWCINAGHEMTKAIAIAQFNDDSPEARKITRRWRIGEAADLVGVSSQAIRDAEKAGRLPHPDMEIRGRVEQRVGYTIEQINHMRDVFGTRLRRAEDVFPPVIGVAAHKGGVYKTSVSVHLAQDLALKGLRVLLVEGNDPQGTASMYHGWVPDLHIHAEDTLLPFYLGEKDDVTYAIKPTCWPGLDIIPSCLALHRIETELMGKFDEGGATQAFAKENNQKAYKETYGVSHITRHDMLQIPKQQQNEKYQVPQFDQSTIKNIESAKGLDVWDSWPLQNADGTVAEYNGYHVVFALAGSPKDADDTSIYMFYQKVGDNSIDSWKNAGRVFKDSDKFDANDPILKDQTQEWSGSATFTSDGKIRLFYTDYSGKHYRQTKPDNSAGIAPNTDPQLCLQKFAL

SEQ ID NO: 34689 - protein, 902 aa, Homo sapiens
  DOMAIN (99)..(128): kw REPLICATION REPB REPA INITIATION domain identified by eMATRIX, accession number DM00653A, p-value=7.207e-27, raw score of 20.40
IRKSDGTLQEHDGICEIHVAKYAEIFGLTSAEASKDIRQALKSFAGKEVVFYRPEEDAGDEKGYESFPWFIKRAHSPSRGLYSVHINPYLIPFFIGLQNRFTQFRLSETKEITNPYAMRLYESLCQYQTYGVSQIYKNDILQIPKQQQNEKYQVPQFDQSTIKNIESAKGLDVWDSWPLQNADGTVAEYNGYHVVFALAGSPKDADDTSIYMFYQKVGDNSIDSWKNAGRVFKDSDKFDANDPILKDQTQEWSGSATFTSDGKIRLFYTDYSGKHYGKQSLTTAQVNVSKSDDTLKINGVEDHKTIFDGDGKTYQNVQQFIDEGNYTSGDNHTLRDPHYVEDKGHKYLVFEANTGTENGYQGEESLFNKAYYGGGTNFFRGATQAFAKENNQKAYKETYGVSHITRHDMLQIPKQQQNEKYQVPQFDQSTIKNIESAKGLDVWDSWPLQNADGTVAEYNGYHVVFALAGSPKDADDTSIYMFYQKVGDNSIDSWKNAGRVFKDSDKFDANDPIKKDQTQEWSGSATFTSDGKIRLFYTDYSGKHYGKQSLTTAQTNRRANSWVNFPFPIAFKEIKIPGIPTSRGGEGLSKETSKPRFKEIKEDPTQWKNFPCSWVGRIIIVKRAILPKVISRFNAIPIKLPMTFFTELEKTTLKFIWNQKRARIAKSILSQKNKAGVITLPDFKLYCKATVTKTACYIRVYITGFTFLSLTSYNAGYKHGSAAGPRTTLSVVQVMLMQEVGSHGFGQLCPCGFAGYSPPPGCFPGLVLSVCGFSRCTVQAVSGSTILGLVDSGPFLTAPPVRCLALPLPSAMIVTFLRPYQKRMPVLCFLYSLQNGHADARCGFLWSWAALPLWLCRVQPPSWLLSWAGVVCLWPFQVHGASCRWSYHSVVWLMVALFSQLH

SEQ ID NO: 34690 - protein, 1891 aa, Homo sapiens
  DOMAIN (971)..(1000): kw REPLICATION REPB REPA INITIATION domain identified by eMATRIX, accession number DM00653A, p-value=7.207e-27, raw score of 20.40
MLEDPRKGLETPSPVSHNLHFQFHLGPLLPGSPMKKWPALVVTGSKSPKLESYKHFQKIWDMHGEPSKREEGAGLTVNQHIPNGASTCNEGPQRLEALGARIPMAAGFSSSKPTLVTPRRAYRADLRLEGYWGRARWTPCGPRRSDSSLSRKENNQKAYKETYGVSHITRHDMLQIPKQQQNEKYQVPQFDQSTIKNIESAKGLDVWDSWPLQNADGTVAEYNGYHVVFALAGSPKDADDTSIYMFYQKVGDNSIDSWKNAGRVFKDSDKFDANDPILKDQTQEWGKITKRMFEGDRKTYQNVQQFIDEGNYTSGDNHTLRDPHYVEDKGHKYLVFEANTGTENGYQGEETLAIRDAEKAGRLPHPDMEIRGRVEQRVGYTIEQINHMRDVFGTRLRRAEDVFPPVIGVAAHKGGVYKTSVSVHLAQDLALKGLRVLLVEGNDPQGTASMYHGWVPDLHIHAEDTLLPFYLGEKDDVTYAIKPTCWPGLDIIPSCLALHRIETELMGKFDEGKLPTDPHLMLRLAIETVAHDYDVIVIDSAPNLGIGTINVVCAADVLIVPTPAELFDYTSALQFFDMLRDLLKNVDLKGFEPDSIREDRNGRSQKTVHTEGDMNMNIKKIVKQATVLTFTTALLAGGATQAFAKENNQKAYKETYGVSHITRHDMLQIPKQQQNEKYQVPQFDQSTIKNIESAKGLDVWDSWPLQNADGTVAEYNGYHVVFALAGSPKDADDTSIYMFYQKVGDNSIDSWKNAGRVFKDSDKFDANDPILKDQTQEWSGSATFTSDGKNPVISTLDYFRLNITAKQSLTTAQCDNLKTCHTSHGSVMAETAVINHKKRKNSPRIVQSNDLTEAAYSLSRDQKRMLYLFVDQIRKSDGTLQEHDGICEIHVAKYAEIFGLTSAEASKDIRQALKSFAGKEVVFYRPEEDAGDEKGYESFPWFIKRAHSPSRGLYSVHINPYLIPFFIGLQNRFTQFRLSETKEITNPYAMRLYESLCQYRKPDGSGIVFLKMTGQKQHIHSVPHFHIKAKAFILKIFVSASQPHQTPASQTGPGSPAATIQRKTFRVDIRGQAPCMKSNNALIVILGTVTLDAVGIGLVMPVLPGLLRDIVHSDSIASHYGVLLALYALMQFLCAPVLGALSDRFGRRPVLLASLLGATIDYAIMATTPSIREDRNGRSQKTVHTEGDMNMNIKKIVKQATVLTFTTALLAGGATQAFAKENNQKAYKETYGVSHITRHDMLQIPKQQQNEKYQVPQFDQSTIKNIESAKGLDVWDSWPLQNADGTVAEYNGYHVVFALAGSPKDADDTSIYMFYQKVGDNSIDSWKNAGRVFKDSDKFDANDRGGSLEKLGFSLSAGGWWQGICQAPCMKSNNALIVILGTVTWNAVGIGLVMPVLPGLLRDIVHSDSIASHYGVLLALYALMQFLCAPVLGALSDRFGRRPVLLASLLGAMSAVLAPGCCFMANNARERLRVRDINEAFKELGRMCQLHLKSEKPQTKLLILHQAVAVILSLEQQVRGRPPGPNPLVNSEGSEPADRKKPVHTEEAMNMNIKKIVKQATVLTFTTALLAGGATQAFAKENNQKAYKETYGVSHITRHDMLQIPKQQQNEKYQVPQFDQSTIKNIESAKGLDVWDSWPLQNADGTVAEYNGYHVVFALAGSPKDADDTSIYMFYQKVGDNSIDSWKNAGRVFKDSDKFDANDPILKDQTQEWSGSATFTSDGKIRLFYTDYSGKHYGKQSLTTAQVNVSKSDDTLKINGVEDHKTIFDGDGKTYQNVQQFIDEGNYTSGDNHTLRDPHYVEDKGHKYLVFEANTGTENGYQGEESLFNKAYYGGGTNFFRKESQKLQQSAKKRDAELANGALGIIELNNDYTLKKVMKPLITSNTRLLRG

SEQ ID NO: 34691 - protein, 1194 aa, Homo sapiens
  DOMAIN (643)..(688): kw TRANSCRIPTASE REVERSE II ORF2 domain identified by eMATRIX, accession number DM01354N, p-value=1.000e-40, raw score of 13.17
MNMNIKKIVKQATVLTFTTALLAGGATQAFAKENNQKAYKETYGVSHITRHDMLQIPKQQQNEKYQVPQFDQSTIKNIESAKGLDVWDSWPLQNADGTVAEYNGYHVVFALAGSPKDADDTSIYMFYHKFNDDSPEARKITRRWRIGEAADLVGVSSQAIRDAEKAGRLPHPDMEIRGRVEQRVGYTIEQINHMRDVFGTRLRRAEDVFPPVIGVAAHKGGVYKTSVSVHLAQDLALKGLRVLLVEGDDPQGTASMYHGWVPDLHIHAEDTLLPFYLGEKDDVTYAIKPTCWPGLDIIPSCLALHRIETELMGKFDEGELPTDPHLMLRLGIETVAHDYDVIVIDSAPNLGIGTINVVCAADVLIVPRLLRLQRSDFKPSRKENNQKAYKDTYGVSHITRHDMLQIPKQQQNEKYQVPQFDQSTIKNIESAKGLDVWDSWPLQNADGTVAEYNGYHVVFALAGSPKDADDTSIYMFYQKNSDKFDANDPDPGRIRRKNGAGFWNLFILREKYRLFYTDLFPGNITGKQTLATTARKGGKNLMTHFKINGVGEPQNQFLTETGKGVFRVPQWIKDLNVGGSLESPYEHASLSPNEMDSVSILGGILAEEPHHVATATTSPQVVLPVYCQCSLKAQEIQTTIREYYKHLYANKLENLEEMDKFLDTYTLPRLNQEEVESLNRPKTGSEIVAIINSLPTKKSPGPDGFTAEFYQRDFADFGTTIKQDFRLLGQHQRGPLAATLSGPGGEGQSAVARLTGEKKNHPGAQYANRLSPRLARQVSRLESGQDFAEFGTTMIQDFRLLGITSVDRLRQLSQGHTVKGNQLLPVSLVKRKTTLAPAGVDTMSTSAQVNVSFSLSLELLSYQKLPADQTLPGVDIQQSASGEREMSRLRLHFWQRSDSSFAKENTQKAYKETYGVSHITRHDMLQIPKQQQNEKYQVPQFDQSTIKNIESAKGLDVWDSWPLQNADGTVAEYNGYHVVFALAGSPKDADDTSIYMFYQKVGDNSIDSWKNAGRVFKDSDKFDANDPILKDQTQEWSGSATFTSDGKIRLFYTDYSGKHYGKQSLTTAQVNVSKSDDTLKINGVEDHKTIFDGDGKTYQNVQQFIDEGNYTSGDNHTLRDPHYVEDKGHKYLVFEAGDPLESTCRHAKFQSGLFHVALGRTSECDFPSPAHPARTRENDFSRFHHENLLSPQDF

SEQ ID NO: 34692 - protein, 467 aa, Homo sapiens
  DOMAIN (151)..(196): kw TRANSCRIPTASE REVERSE II ORF2 domain identified by eMATRIX, accession number DM01354N, p-value=1.000e-40, raw score of 13.17
MARELREECTSFSSRFDQREERVSVKEDQMNEMKLEENFREKRIKRNEQSLQKIWDYVKRPNLRLIGVPESDGENGTKLENTLQDIIQENFPNLARQANIQIQEIQRTLQRYSSRRATPRHIIVRFTKVEMKKKMLRAAREKEIQTTIREYYKHLYTNKLENLEEIDKFLDTYTLPRLNQEEVESLNRPITGSEVEAIINSLPTKKSPGPDRFTAEFYQRYKEELVPFLLKLFQSIEKEGILPNSFYEASIILIPKPGRDTTKKENFRPISRMNIDAKILNKILANRIQQHIKKLIHHDQVGFIPGMQGWFNICKSINVIQHINRIKDKNHMIISIDAEKAFDKIQQPFVLKTLNKLGIDGTYLKIIRAIYDKPTASIILNGQKLEAFPLKTGTRQGCPLSPLLFNIALEVLARAIRQEKEIKGIQLGKEEVKLSLFADDMIVYLENPIVSAQNLLKLISNCSKVPG

SEQ ID NO: 34693 - protein, 644 aa, Homo sapiens
  DOMAIN (110)..(151): kw TRANSCRIPTASE REVERSE II ORF2 domain identified by eMATRIX, accession number DM01354I, p-value=1.000e-40, raw score of 15.55
MGDFNTLLSTLDRSMRQKVSKDIQELNSALHQVDLIDICRTLHPKSTEYTLFSAPQHTYSKIDHIVGSKALLSKCERTEIIINYLSDHSAIKLELRIKNLTQSRSTTWKLNNLLLNDYWVHNEMKAEIKMFFETNENKDTTYQNLWDAFKAVCRGKFIALNAHKRKQERSKIDTLTSQLKELEKQEQTQSKASRRQEITKIRAELKEIETQKTIQKINESRSWFFERINKIDRPLARLIKKKREKNQIDTIKNDKGDITTDPTEIQTTIREYYKHLYANKLENLEEMDKFLDTYTLPRLNQEEVESLNRPITGAEIVAIINSLPTKKSPGPDGFTAEFYQSKILANRNQQHIRKLIHHDQVGFIPRMQGWFNTRKSINIIHHINRTNDKNHMIISIDAEKAFDKIQQRFMLKTLNKLGIDGTYLKIIRAIYDKPTTNIILNGQKLEAFPLKTGTGQRCPLSPLVFNIVLEVLARAIRAEKEIKGIQLGKEEVKLSLFADDMTVYLENPITSAQNLLKLISNFSKVSGYKLNVQKSQAFLYTNNRQTESQIMSELPFTIASKRIKYLGIQLTRDVKDLFKENYKPLLNEIKATNKWKNIPCSWIGRINIVKMTILPKVIYRFNAIPIKLPMTFFTELEKTTLKFI

SEQ ID NO: 34694 - protein, 469 aa, Homo sapiens
  DOMAIN (182)..(228): kw TRANSCRIPTASE REVERSE II ORF2 domain identified by eMATRIX, accession number DM01354O, p-value=1.000e-40, raw score of 8.73
MGKKQSRKTGNSKKQSASPPPKERSSSPAMEQSWSENDFDELREEGFRRSNYSKLQEEIQTKGKEVKHFEKNLDECITRITNREKCLKELMELKAKARELREECRSLRSQCDQLEERVSVMEEIQTTIREYYKHLYENKLQNLEEMDKFLDTYTLRRLNQEEVESLNRPITGSEIVAIINSLPTKKSPGPDGFTAKFYQRYKEELIPFLLKLFQSIEKEGILPNSFYEASIILIPKQGRDTTKKENFRPIFLMNINAKILNKILANRIQQHIKKLIHHDQVGFIPGMQGWFNICKSRNVIHHINRTKDKNHMIISIDAEKAFDKIQQPFMLKTLNKLGIDETYLKIIRAIYDKPTANIILNGQKLEAFPLKTGTRQGCPLSPLLFNIVLEVLARAIRQEKEIKGIQLGKEEVKLSLFADDMIVYLENPIVSAQNLFELISNFSKVSGYKINVQISQAFLYTNYRQSAKS

SEQ ID NO: 34695 - protein, 497 aa, Homo sapiens
  DOMAIN (37)..(83): kw TRANSCRIPTASE REVERSE II ORF2 domain identified by eMATRIX, accession number DM01354O, p-value=1.000e-40, raw score of 8.73
MDKFLDTYTLPRLNQEEVESLNRPITGAEIVAIINSLLTKKSPGPDGLTAEFYQRYKEDLIPFLLKLFQSIEKEGILPNSFYEASIILIPKPGRDTTKKENFRPISLMNIDAKILNKMLANRIQQHIKKLIHRDQVGFIAGMQGWFNIRKSINVIQHINRTKDKNHMIISIDAEKAFDKIQQPFMLKTLNKLGTDGTYLKIIRAIYDKPTANIILNGQKLEAFPLKTGTRQGCPLSPLLFNIVLEVLARAIRQEKEIKGIQLGKEEVKLSLFADDMIVYLENPIVSAQNLLKLISNFSKVSGYKINVQKSQAFLYTNNRQTESQIMSELPFTIASKRIKYLGIQLTRDVKDLFKENYKPLLSEIKEDTNKWKNIPCSWVGRINIVKMAIVPKNGILNILIKQQDSASSPDTDNQLAGQYCCSNWHPDAVMKLHEALLKKWVVIENSQQKFKAKTWDQPKCPSVIDWIKKMWHLYAMEHYAAIKKNEFMPFVGTRMKL

SEQ ID NO: 34696 - protein, 284 aa, Homo sapiens
  DOMAIN (81)..(136): kw TRANSCRIPTASE REVERSE II ORF2 domain identified by eMATRIX, accession number DM01354Q, p-value=1.000e-40, raw score of 9.23
MCKPKRGLSPGNELVGSLSLDFQPTEWSGSKFYFFSVETCYHFQGQITFQLHLRVSHPPPLRLLTLHLPPQILNTVYEYVQALNHTSTQHIKKLIRHDQVSFIPRMQGWFNIRKSINIIHHINRTNDKNHMILSVDAEKAFDKIQQPFMLKTLNKLGIDETYHKIIRAIYDKPTANIILNGQKLEAFPLKTGTRQGCPLSPLLFNIALEVLARAIGQEKEINGIPIGREEVKLSLFADDMIVHLENPIVGKGIDSPRRANYPKYICTQYRSTQIRKALETYKET

SEQ ID NO: 34697 - protein, 293 aa, Homo sapiens
  DOMAIN (81)..(136): kw TRANSCRIPTASE REVERSE II ORF2 domain identified by eMATRIX, accession number DM01354Q, p-value=1.000e-40, raw score of 9.23
  misc_feature (1)...(293): Xaa = X or * as defined in Table 2
ASEGKQMLRDFVTTRSALKELLKRALNMARNNQYQPLQKHAKLXRPSMLXRNCINXQPGRDTTNKKENFRPISLMNIDAKILNKILANRIQQHIKKLIHNDQVGFIPGMQGWFNIHKSINIIHHIKRTNDKNHMIISIDAEKAFNKIQQPFMLKTLNKLGIDGTYLKIIRAIYDRPTANVILNGQKLEAFPFKTGTRQGCPLSPLLFNIVLKVLARAIRQETEIKGIQLAKEEVKLSLFADDMIVYLENPIISAQNLLKLISNFSKVSGYKINVQKSQAFLYTINRQTESQIM

SEQ ID NO: 34698 - protein, 410 aa, Homo sapiens
  DOMAIN (72)..(117): kw TRANSCRIPTASE REVERSE II ORF2 domain identified by eMATRIX, accession number DM01354N, p-value=1.000e-40, raw score of 13.17
TSRKSRQKTRAVGKTTNPIFNHTMVYDGFRPEDLMEACVELTVWDHYKLTNQFLGGLRIGFGTEIQTTIREYYKHFYANKLENLEEMDKFLDTHTLPRLNQEDVESLNRPITSSEMEAAINSLATKKSPGPDGFTAEFYRRYKEELVPFVLKLSQTTEKEGLLPNSFCGANINLIPNPGRDNTRKENFRPISLMNIDTNILNKILANRIQQHIKKLIDYDQVSFIPGMKGWCNICKSINVIHHVNRTNDKNHMIISIDAEKAFEKIQQPFLLKTLNKLGIDGTYLKIIKAIYNKPTANIILNGQKLEAFSLKTGTRQGCPLSPLLFNIVLEVLARTIRQEKKKNGIQIGREEVKLSLFADDMIVYLENLIVSAQNLLKLISNFSKVSGYKINVQKSQAFLYTNNKEPNHE

SEQ ID NO: 34699 - protein, 950 aa, Homo sapiens
  DOMAIN (601)..(656): kw TRANSCRIPTASE REVERSE II ORF2 domain identified by eMATRIX, accession number DM01354Q, p-value=1.000e-40, raw score of 9.23
MGMGPAKPGMGGNLLVCWLQRPWEKRSIWAEVYRSSRYSHSWLPLSRKGCDFSGTCRQTLSILTQPLRQWGLEGIKKPNSWIISEESVSNGGPPLLIPRQTASGVDLQQTPTDLQLRVLTVRRKTNKQKGIASTSTKRTSTPKPHLYVTIIKDQSYIKPQRWGKNIAEKLKILKIRVALSLQRNAAPHQQWNKAGRRMSLMSSQKKASEVIESQMNEIKGEEKFREKRVKRNEQSLQEIWDYVKRPDLRLIGVPDSDGENGTRLENTLQDIIRENFPNLARQASIQIQEIQRTPQRYSSRRATPRHIIVRFTKVEMKEKMLRAAREKELKIKKLTQNCLTTWKLNNLLLNDYWVHNEMKGEIKMFFETNENIDTTYQNLWHTFKAVCRGKFIALNAHKRKQERSKIDTLASQLKEIEKQEQTHSKASRRQEITKIRVELKEIETQKSLQKINESRSWFFEKINKIDRPLPRLIKKKREKNQIDTIKNDKGDITTNPTEIQTISREYYKHLYANKLENLEEMDKFLDTYTLSGLNKEEVESLNTSITGSEVEAIINSIPTKKSPGPDGFTAEFYQSYSRDTTKKENFRPISLMNIDVKILNKMLANGIQQHIKKLIHHDQVGFIPGMQGWFNIHKSINVIQHINRTKDKNHMIISIDAEKAFDKIQQPFMLKTLNKLDIDGTYLKIIRAIYDKPTANIILNGQKLEAFPLKSSTRQGCPLSPHLFNIVLEVLARAIRQEKEIKGIQLGKEEVKLSLFADDMIVYLENPIISAQNLLKLISNFSKVSGYKINVQKSQAFLYTSNRQTESQIMSELPFTIASKRIKYLEIQLTRDVKDLFKENYKPLLNEIKEDTNKWKNIPCSWIGRINIVKMAILPKDDKKCVSDDHDADNDSDNDGDNFLQVSAAKSYISHYFPVIRLLTAYWRRLSNSLEKAKGHDVEGPCGKELVVGL

SEQ ID NO: 34700 - protein, 180 aa, Homo sapiens
MDMSPLRPQNYLFGCELKADKDYHFKVDNDENEHQLSLRTVSLGAGAKDELHIVEAEAMNYEGSPIKVTLATLKMSVQPTVSLGGFEITPPVVLRLKCGSGPVHISGQHLVAVEEDAESEDEEEEDVKLLSISGKRSAPGGGSKVPQKKVKLAADEDDDDDDEEDDDEDDDDDDFDDEEA

SEQ ID NO: 34701 - protein, 1104 aa, Homo sapiens
  DOMAIN (272)..(317): kw TRANSCRIPTASE REVERSE II ORF2 domain identified by eMATRIX, accession number DM01354N, p-value=1.000e-40, raw score of 13.17
MGEFNTPLSTLDRPMRQKFNKDIQDLNSALHQADLIDIYRTLHPKSTEYTFFSAPHHTYSKTDHTVVSKALLSKCKRTEITTKCLSDHSAIKLEFRIKKLTQNCTITWKLNNLLLNDYGVSNEMKAETKMLFETNENKDTTYQNLWDAIKGVCRGKFIALNAHKRKQERPNINTLTSQLKELEKQGQTNSKASRRQEITKIRAELKEIETQKTLQKISESRSWFFEKINKIDRLLARLIKKKREKNQIDAIKNDTGDIATDPTEIQTTIREYYKHLYANKLENLEEMDEFLDTYTLPRLNQEEVESLNRPITGSEIEAIINSLPTKKSPGPDGFTAKFYQRYKEELVPFLLKLFQSIEKERILPNSFYEASIILIPNPGRDRTKKENFRPISLMNINAKILKKIIVLEVLARAIRQEKEIKGIQLGKEEVKLSLFADDMIVYLENPTVSAQNLLKLISNFSKVSGYKINVEKSQAFLYTNNTQTESQIMSELPFTIASKRIKYLGIQLTRDVKDLFKENYKPLFNEIKEDTNKWKRIPCSWVGRINIVKMPILPKNWKKTTLKFRWNQKRAHIAKTILNKKNKAGGFTLPHFKLYYKATVTKTACPSFKTKDYNFIKAVCFALGRLLRIITSTVCNVSWKCGLSRGCKALQLLLEGGFSGHAILHMVSETFKSERELKDHEIIPVNFTGEERKAQRHCGEPLKDFKQGWANGALWSAASFLKSVRPRTYWKEETPDTSEHLKKPTPDTSSLRTVTLTVRFRGFILEVSETKNPPEGTNSRHILATTKGLLTIAKWRKTSVSAAASVSATIPISRVQGPLRVLGQEVFLLLHRLPIAPLPINDKPPLIFPTQKEINKDISKGPQNPLGYQLCPLHAIGGGEFGATWNWKKLLKFIWNQKRAYIAKTILSQKNKAGGFMLPDFKLYYKATVTKTALYWYQKRDIDQWNRTEPLEIIPHIYNLLIFDKPDKNKKRGKDSLLNKWCWENWLAICRKLKLDPFLTPYTKTNSRWIKDLNVRLKTIKTLEENLGNTIQDIGMGKDFMTKTPKAMAPKAMATKAKIDKWDLINLKSFCTAKETTIRVNRQPTEWEKIFTIYPSDKGLISRI

SEQ ID NO: 34702 - protein, 152 aa, Homo sapiens
KVMLAEYPVFAQLTLTLPPSSASWEPSRGPGPRGIRGSCPEWLASGPGKAAPGAGVPPPAASFPDPPPRLRAPALAVSRGLRRELPSGLDWTHCLRTLPSLIVQILQQAALLGLPPAYSDQLQRAGQLHFYSGLIKISLVLTTRLSFWGTTE

SEQ ID NO: 34703 - protein, 143 aa, Homo sapiens
VTYSKEKECGEVADSVAKTALEKDGAPRTGDPRPNLGADPPRSLVSSAGPQAVRPVKPARQFPPQPPRYSQGPARAAGEEGRGMRPPGAGRRLPGPPLPGPEASHSGQLPLMPPGPGPRLGSQEPVSLSRYLQTQARMPGPRP

SEQ ID NO: 34704 - protein, 337 aa, Homo sapiens
  DOMAIN (205)..(240): CORE POLYPROTEIN PROTEIN GAG CONTAINS: P domain identified by eMATRIX, accession number PD02059B, p-value=7.085e-09, raw score of 24.48
QIQHSPLVSPLPSLPPQPLVAEEEPPVAPWPRRLLPATSTSHPSHPLTEPVPPTSGRGCCLWTKRQQKMCRTTYTSVGRKCTFPIDSGALRLSDGEMRALQTPTGPQSTVEGHTHLQSLPHHDRVTATPGTEPGLRAAGNRRIFYPGPVTSQVQPQLLCGYGNASRTPAALTPGPAPPTQASLPNCGICPHLQMGRPTSPCPPEGGHPSSSLYISLSPPPPSAPALRLPPPLPSAPTAPALPPAAPSAPALRLLRPLPCCSFRPRPAAPSAPAPRLLPPLLVCSFRPCPAAPSAPAGLLLPPLLCCSGLSPRLCCPHSSCSSDPPRLQRKADSSRWL

SEQ ID NO: 34705 - protein, 327 aa, Homo sapiens
MSTSLSHFRSCDTQSFGEVFRVLQEQSTSFRCVCEVLSAAHPATFLVSLIRKRGSLGLLYGASLWETLACLSDVIQRVIPGRQLPWWNALPEQHVPGPHGGSTQWLNTREELALGVQTSETWDVVAQDPQKFPAKDLGCVLLQYVNDLLLGLSMSVGCAKGMDALHLEDCGYKVSKKKAQTCRQQYCVEKNVGTALVSFGLLGKKDETDPVWLQKGKGSPSCMIGSSNPLELVITNPSDPKWKKGENVSLGIDGKGLDPKVNILIKEETQKRSPEPVFQTFYDELNVPVPEIPGKTRNLFLQLAKHVAQSLKVTSCYVCGGTVTGDR

SEQ ID NO: 34706 - protein, 171 aa, Homo sapiens
  DOMAIN (31)..(46): LIM domain proteins domain identified by eMATRIX, accession number BL00478B, p-value=5.500e-13, raw score of 14.79
VKLLLQDKEICILCQKTVYPMECLVADKQNFHKSCFRCHHCNSKLSLGNYASLHGQIYCKPHFKPTFQNPKGNYDEGFGHKAHKDRWNWQKPKADSVDFIPNEEPNMCKNIAENTLVPGDRNEHLDAGNSEGQRNDLRKLGERGKLKVIWPPSKEIPKKTLPFEEELKMSK

SEQ ID NO: 34707 - protein, 66 aa, Homo sapiens
  misc_feature (1)...(66): Xaa = X or * as defined in Table 2
GNLERMLNLGMVKQQKLPAIMKTQVLMLXAINVPAKPLFPQSGGAVRTTHGGKSRLKETGATSDTE

SEQ ID NO: 34708 - protein, 68 aa, Homo sapiens
IVKTQSIDGMGNLRITEKGLKLEGDSEFLQPLYAKEIQSRPGLGTQEQSCQTLSSCSSRGQQQHAEAA

SEQ ID NO: 34709 - protein, 261 aa, Homo sapiens
RDQVEMMPQEQYTHHRSTMPGSVGPQVYKVGIYGWRKRCLYFFVLLLMILILVNLAMTIWILKVMNFTIDGMGNLRITEKGLKLEGDSEFLQPLYAKEIQSRPGNALYFKSARNVTVNILNDQTKVLTQLITGPKAVEAYGKKFEVKTVSGKLLFSADNNEVVVGAERLRVLGAEGTVFPKSIETPNVRADPFKELRLESPTRSLVMEAPKGVEINAEAGNMEATCRTELRLESKDGEVRDEKDRSSKSYSFNRPTLPITG

SEQ ID NO: 34710 - protein, 382 aa, Homo sapiens
  DOMAIN (308)..(343): Matrix protein (MA) p15. domain identified by eMATRIX, accession number PF01140D, p-value=2.570e-09, raw score of 15.54
LLTTRTSFRSENHRHVGLLLVMTDNTRDKEYFGDESKRENEEKTVEKSIGEKQATLTTHANIITIRHCVKPEPDFSDHLNLLLGRADITGEEMAAQRSSVEKLANGNIALVDSLRSRSLEEGDSDPHKRLSGAQDIKTTVEEVIADVVEIARELELEVEPEDVTEFLQAHEKTLTDVELFLINEQIKWFLEMKSTPREDAVIIAETITKVLEYDINLVTKQQQGMRQLTPILKEVLLWVKCHQTALHATEKPFIKGRINPCGKIHTCLNLRNCGQLLIREEEEEDKEEEEQYEEKEEEEEEEEEEEEEEEEEEEEEEEEEEEEEEEDEEEEDKEDEEEDKEKEEEEDNKEEEEEEDKEKEEEEDKEEKEDKEEEEDKEEEED

SEQ ID NO: 34711 - protein, 164 aa, Homo sapiens
  DOMAIN (39)..(51): KH domain proteins family of RNA binding proteins domain identified by eMATRIX, accession number PF00013, p-value=6.538e-11, raw score of 5.78
EDTGTFRIYESAGAVKKARGFLEFVEDFIQVSKNLIGKVIGKNGKVIQEIVDKSDMVPVRIEGDSENKLPREDKDDRDSRHQRDSRRCPGGRCRSVSGRRGRGGPRGGKSSISSVPKDPDSNPYSVLDNTESDQTADTDASKSHHSTNRHTRSRRRRTDEDAVL

SEQ ID NO: 34712 - protein, 181 aa, Homo sapiens
  DOMAIN (19)..(46): Protamine P1 proteins domain identified by eMATRIX, accession number BL00048, p-value=4.825e-09, raw score of 6.39
  misc_feature (1)...(181): Xaa = X or * as defined in Table 2
TESERKDELSDWSLAGEDDRDSRHQRDSRRRPGGRGRSVSGGRGRGGPRGGKSSISSVLKDPDSNPYSLLDNTESDQTADTDASESHHSTNRRRRSRRRRTDEDAVLMDGMTESDTASVNENGLAKDVIEEHGPSEKAINGPTSASGDDISKLQRTPGERKRLIPXKKENTQEAAVLNGVS

SEQ ID NO: 34713 - protein, 687 aa, Homo sapiens
  DOMAIN (296)..(308): KH domain proteins family of RNA binding proteins domain identified by eMATRIX, accession number PF00013, p-value=6.538e-11, raw score of 5.78
MAELTVEVRGSNGAFYKGFIKDVHEDSLTVVFENNWQPERQVPFNEVRLPPPPDIKKEISEGDEVEVYSRANDQEPCGWWLAKVRMMKGEFYVIEYAACDATYNEIVTFERLRPVNQNKTVKKNTFFKCTVDVPEDLREACANENAHKDFKKAVGACRIFYHPETTQLMILSASEATVKRVNILSDMHLRSIRTKLMLMSRNEEATKHLECTKQLAAAFHEEFVVREDLMGLAIGTHGSNIQQARKVPGVTAIELDEDTGTFRIYGESADAVKKARGFLEFVEDFIQVPRNLVGKVIGKNGKVIQEIVDKSGVVRVRIEGDNENKLPREDGMVPFVFVGTKESIGNVQVLLEYHIAYLKEVEQLRMERLQIDEQLRQIGMGFRPSSTRGPEKEKGYATDESTVSSVQGSRSYSGRGRGRRGPNYTSGYGTNSELSNPSETESERKDELSDWSLAGEDDRDSRHQRDSRRRPGGRGRSVSGGRGRGGPRGGKSSISSVQYRSNIHNCSTLKRIFLASDMNIVLKDPDSNPYSLLDNTESDQTADTDASESHHSTNRRRRSRRRRTDEDAVLMDGMTESDTASVNENGLDDSEKKPQRRNRSRRRRFRGQAEDRQPAIDFIYKEVEKVVSLWQAKDVIEEHGPSEKAINGPTSASGDDISKLQRTPGEEKINTLKEENTQEAAVLNGVS

SEQ ID NO: 34714 - protein, 626 aa, Homo sapiens
  DOMAIN (300)..(312): KH domain proteins family of RNA binding proteins domain identified by eMATRIX, accession number PF00013, p-value=6.538e-11, raw score of 5.78
CGSNMADVTVEVRGSNGAFYKGFIKDVHEDSLTVVFENNWQPERQVPFNEVRLPPPPDIKKEISEGDEVEVYSRANDQEPCGWWLAKVRMMKGEFYVIEYAACDATYNEIVTFERLRPVNQNKTVKKNTFFKCTVDVPEDLREACANENAHKDFKKAVGACRIFYHPETTQLMILSASEATVKRVNILSDMHLRSIRTKLMLMSRNEEATKHLECTKQLAAAFHEEFVVREDLMGLAIGTHGSNIQQARKVPGVTAIELDEDTGTFRIYGESADAVKKARGFLEFVEDFIQVPRNLVGKVIGKNGKVIQEIVDKSGVVRVRIEGDNENKLPREDGMVPFVFVGTKESIGNVQVLLEYHIAYLKEVEQLRMERLQIDEQLRQIGSRSYSGRGRGRRGPNYTSGYGTNSELSNPSETESERKDELSDWSLAGEDNRDSRHQRDSRRRPGGRGRSVSGGRGRGGPRGGKSSISSVLKDPDSNPYSLLDNTESDQTADTDASESHHSTNRRRRSIRRRRTDEDAVLMNGMTESDTASVNENGLVTVADYISRAESQSRQRNLPRETLAKNKKEMAKDVIEEHGPSEKAINGPTSASGDDISKLQRTPGEEKINTLKEENTQEAAVLNGVS

SEQ ID NO: 34715 - protein, 139 aa, Homo sapiens
PRVRDSDTEDDSEAEHFESFIHPTAMMFTSTINLLQTLCLSAGVHAEIMQSEATKTLCGLLKSSPNRLVYREQHRSWCTLGFVQSIALTLQVCGALSSLQWITLLMKVVEGHAPFTATSLQRQILAVHLLQAVLPSWDK

SEQ ID NO: 34716 - protein, 49 aa, Homo sapiens
  misc_feature (1)...(49): Xaa = X or * as defined in Table 2
DLNCKVGSCFEVYSSXKQGINXIKLGDSKTXPXLSGPTSENLKNSSLAE

SEQ ID NO: 34717 - protein, 172 aa, Homo sapiens
LGEDGWIRVQWDTGSTNSYRMGKEGKYDLKLAELPAPAQPSAEDSDTEDDSEAEQTERNIHPTAMMFTSTINLLQTLCLSAGVHAEIMQSEATKTLCGLLRMLVESGTTDKTSSPNRLVYREQHRSWCTLGFVQSIALTLQVCGALSSPQWITLLMKVVEGHAPFTATSLQR

SEQ ID NO: 34718 - protein, 508 aa, Homo sapiens
  DOMAIN (305)..(349): PROTEASE IMMUNOGLOBULIN PRECURSO domain identified by eMATRIX, accession number PD01781B, p-value=8.843e-10, raw score of 27.55
MAGEASESWREAKGTSYVAAARENEEDAKAEPPTPGIKPSDLVRLIHYQENSMGETAPMIQIISHWVPPTTHGIYGSTIQDEIRVGTASGAQRPPRCPPRPQRLQGDARGSGILPWLPALPSSPRNPGTQVRAVAVAVAAPVKRPLERRRHLVGAGRLRRDRAGRRERSPGRKCSQGFFPRGRFSSAPPALWPDPAWGGTTFTRCGALGSKLGELSLGARRDPSAWAEEDKEEQEEKEDEEQEEEQEEEEQEKGGEAGAGGRGAGEEGAEGGGAGGGEGGGAGGGGGAGGGEAGGAEGEEEQEEEEKEQEEEEEEKQEEEEEEQEEEEELEEEHEEEEKEQEEEEEKQEQGEEEEAEQEEEQEEEEEVSSVDNTWKGKGWWVSLKGTSPSYFTAGWCPGEGESVRGVLTAHADILRILLGPAQMWPALGSPPLSPISSVTSSILKDLLMLLNSIICCKNVASSSRFYAPESGVRSSSGNLPCKTGLCMVRAACNVHTQDSMERVRSWW

SEQ ID NO: 34719 - protein, 356 aa, Homo sapiens
  DOMAIN (197)..(215): PROTEIN NUCLEAR BROMODOMAIN TRANS domain identified by eMATRIX, accession number PD01234B, p-value=8.125e-10, raw score of 15.53
  misc_feature (1)...(356): Xaa = X or * as defined in Table 2
TFSKASRGGNPHSMTKAPSDFRKARQTGIPGCSQLGSRYSLEPEQSALRLVCIQKLQESSTTCEDFFCPLCGRAWAVSTPLTDSPSPGHQPAVKXLGLVPFSDTHHPLPFQVLSTDDTSSSSSCSSSCSASSSSPSLLLLLLFLLLLLLLLMLLLKLFLLLLLFLLRPPASPPLLPPALSPPLHCSSSPSAPPASPPPAPPPPPAPPPSPPPAPPPSAPSSPAPLPPAPASPPFSCSSSSCSSSCSSSSFSSCSSLSSSAQAEGSLRAPRESSPSLDPSAPQRVKVVPPQAGSGHRAGGALENRPRGKKPWLHFRPGLRSRLPARSLRSRPAPTRWRLRSSGRFTGAATATATART

SEQ ID NO: 34720 - protein, 869 aa, Homo sapiens
  misc_feature (1)...(869): Xaa = X or * as defined in Table 2
MMGHSSAIPLTATPGELKGQSPTKMPDPELGCQGAKSQGCSRNARHQKARSMPLQDQHLALAILLELAVQRGTLSQMLSAILLLLQLWDSRAQETDNERSAQGTSTLLLSLLQTFQSIICSKDTPPSEGNMHLLSGPLSPSESFLRESFFTVQNCRNNEEVTLICKADLENHNKDGGFWIVIDEKVYDIKDFQTQSLTGNSILAQFAGENPVVALEAAFEFEVTRESMHAFCVGQYLEVRLYALSDAEDGRGTLXWLQSSIFSGGLQTSQIHYSYNEEKDEDHCSSPVGTPASKSRCSHRWALGDHSQAFLQAIADNNIQDHNVKTHQEQGRSYKEVCTPVIERLRFLSNELRPAVGNDLSIISEFKLLSSLPRWRRIAQKIIRERRKKRIPKKPESTADEEKIGNEESDLEEACILPHSPINVDKRPIAIKSPKTITSENPLGPSLGSIPQARFLLMMLSMLTLQHSANNLDLLLNSGTLALTQTALRLIGPSCDNVEEDMNASAQGVSATVLEATRKETAPVHLPVSGPELAATMKIGTRVMRGVDWKWGDQDGPPPGLGRVIGELGEDGWIRVQWGTGSTNSYRMGKEGKYDLKLAELPAAAQPSAEDSDTEDDSASPNRLVYREQHRSWCMLGFVRSIALTPQVCGALSSPQWITLLMKVMKGHAPFPAASLQRQRWVAVSLPHALVKSGTVPSLRESMPRWRRVRPQALLTATHSSTLVEVVVALLCTLHSLTQWNGLINKYINSQLRSITHSFAGRPSEGAQLEDYFPDSENPEVGGLMAVLAVIGGIDGRLCLGGQIVHDEFGEGTVTGITPKGKITVQFSDMRTCHICPLNQLKPVGELVLSYCMIREIGFTLGPSTNIST

SEQ ID NO: 34721 - protein, 282 aa, Homo sapiens
WARGGCARNALASGNAIQGGKCNPGLFPPSPNRLVYREQHRSWCMLGFVRSIALTPQVCGALSSPQWITLLMKVMKGHAPFPAASLQRQLCPEHTSCPVLKDFCKSVITDVACSSLISTLLVFWGGLLHTHKEASESWREAKSTSYVAAARENEEDAKAEPPTPGIKPSDLVRLIHYQENSMGETAPMIQIISHWVPPTTHGIYGSTIQDEIRVGVSYPGHTDARGFQLLLVSGDFSIPYWSLSSAYTSVNSSFVESLQSNLLKGILLPATIMTDPRTTGHQ

SEQ ID NO: 34722 - protein, 244 aa, Homo sapiens
  DOMAIN (81)..(94): Thioredoxin family proteins domain identified by eMATRIX, accession number BL00194, p-value=3.195e-09, raw score of 12.16
MVQLSGKRILNSPYLELRCHQNMDHLGWVIKKSLNRSEVSWVPGLEFPWGPKPFREVIAGPLLRNNGQSLESSSLEGSHVGVYFSAHWCPPCRSLTRVLVESYRKIKEAGQNFEIIFVSADRSEESFKQYFSEMPWLAVPYTDEARRSRLNRLYGIQAHLFLTANAEDFDTTVQVNKIILITYRQNENSLSSLKTGETEAQGRLQGSPSNVRGHDPDRHAIPLSVNRWNPSKSSPSPAVWSRLP

SEQ ID NO: 34723 - protein, 293 aa, Homo sapiens
  DOMAIN (32)..(47): WILM'S TUMOUR PROTEIN SIGNATURE domain identified by eMATRIX, accession number PR00049D, p-value=2.059e-11, raw score of 0.00
LHEFDSSRDLTSGLGGARTHRRLGGPSDAPRGLPAPPPAPPVRPGPRSPGPSAGTARDAPRPSVQMRAQRPARGSTKDLIETCCAAGQQWAIDNDECLEIPESGTEDNVCRTAQRHCCVSYLQEKSCMAGVLGAKEGETCGAEDNDSCGISLYKASLTCGLQGRCLNPQQASMGLFSYDVQSSKKINRSIQEKLGGHGVCAATPGGGMRNCGRLRRSGQRRGGTDRCEAVLTGLFTRALIREQMGDPHPLDHTGQLAKPLEVEKTPARWKYLDTNGEKEEPELRTQCPSLYED

SEQ ID NO: 34724 - protein, 174 aa, Homo sapiens
MMGEKAEKPDTKEKKPKAKKADAGGKRNCRYSRSAMYSRKTTSRKKYSAAKSKVEKKKKFLATVTKPVGVDKNSGTQVVKLHKMPRYYPTEDVPLKLLSHGKKKPFSQHRRRVVFLKQLVSGTGPLVLNQVPLRRTHQKFVIATSTKIGSSNVKIAKRLTGAYFKKVWKPKHQE

SEQ ID NO: 34725 - protein, 58 aa, Homo sapiens
MPRYYPTEDVPRKLLSHGKKPFSQHVRKLRASITPGTMLIILTGPPQGQEGGFPEAAG

SEQ ID NO: 34726 - protein, 111 aa, Homo sapiens
  misc_feature (1)...(111): Xaa = X or * as defined in Table 2
QRSCIENILRACVGLPPQNHMLLEHKMDAKRVGPVAATYPMLNKKGPVPAATNGCTGDANGHLQEEPPMPTTXGPGHTVSRLFLPAAPHDPTLKAPTNNSAATQPSKNKKK

SEQ ID NO: 34727 - protein, 142 aa, Homo sapiens
GAASAGRGPGPRAPGLWGRGPAAAGASLVPTDHVHLSYNHLGNNDGENLSAPSQFRSKEVSKSNVVDDMVQSNPVLYTPGEEPDHATRCWPHPSAGPSAADRAVPARPAGAPATEPHAPGTQNGAPGPSLKRVGPVAATYPI

SEQ ID NO: 34728 - protein, 111 aa, Homo sapiens
RAVRRRCLSRLCAARRDGGRAPSSSSRARTWSTAPRPIEAQYEYRTTRVSREGGVLKVHPTSTRFTFRTARQVPRLGVMLVGWGGNNGSTLTAAVLANRLRLSWPTRSGRK

SEQ ID NO: 34729 - protein, 84 aa, Homo sapiens
  misc_feature (1)...(84): Xaa = X or * as defined in Table 2
XILEGCAFLNGSPQNTLVPGALELAWQHRVFVGGDDFKSGQTKVKSVLVDFLIGSGLKTMSIVSYNHLGIQRWGEPVGAIAVPL

SEQ ID NO: 34730 - protein, 111 aa, Homo sapiens; identical to SEQ ID NO: 34612
  DOMAIN (84)..(99): RIBOSOMAL PROTEIN L7A/RS6 FAMILY SIGNATURE domain identified by eMATRIX, accession number PR00881D, p-value=8.500e-16, raw score of 11.60

SEQ ID NO: 34731 - protein, 51 aa, Homo sapiens; identical to SEQ ID NO: 34614
  DOMAIN (5)..(20): RIBOSOMAL PROTEIN L7A/RS6 FAMILY SIGNATURE domain identified by eMATRIX, accession number PR00881D, p-value=8.500e-16, raw score of 11.60

SEQ ID NO: 34732 - protein, 22 aa, Homo sapiens
ARLGRLVHRKTCTTVAFTQVNS

SEQ ID NO: 34733 - protein, 314 aa, Homo sapiens
  DOMAIN (42)..(60): RIBOSOMAL PROTEIN L7A FAMILY SIGNATURE domain identified by eMATRIX, accession number PR00882A, p-value=2.658e-11, raw score of 8.80
  misc_feature (1)...(314): Xaa = X or * as defined in Table 2
GTRPKMPKGKKAKGKKVAPAPAVVKKQEGFRKKWXIPWFEKRPKNFGIGQDIQPQKRPPPLLXKWPRQYQACSGQRAILYKRLKVPPAMKPVSPRALDRQTATQLAXAVAHKVQTQRQKQEKKQRLLARADEEGCLAKGDVPNERDPPVPSSQEFNPVSPPLVKEQEKLKLVVNWHTDVDPHPSLVCLPCLCPAPVSXKMGGPFTCIIQGKRARLWDRLVPQERPCTTCPPFTQVNSEDKVRLLAKAGLEAIQGPIYNXPDTMEIRPSLGVGNVLGPKSVARIAKARNRHKAKETATHTGLNVTLLSFLYYKNN

SEQ ID NO: 34734 - protein, 463 aa, Homo sapiens
  DOMAIN (91)..(146): kw TRANSCRIPTASE REVERSE II ORF2 domain identified by eMATRIX, accession number DM01354Q, p-value=1.000e-40, raw score of 9.23
MPDVSEEQKESVCTGSMMREEESSRKGKVRTAGAKSSSSDRVPRLNQEEVESLNRPITGAEIVAIINSLPTKKSPAPDGFTAEFYQRIRIQQPIIRIQQPIKKLIQHDKVGFIPGMQGWFNICKSINVIQHINRTKEKNHMIISIDAEKPFDKIQQCFMLKTLNKLGIDGTYLKIIRAIYHKPTANIILNGQKLEAFPLKTGTRQGCPLSPLLFNIVLEVLARAIRQEKEIKGIQLGKEEVKLSLFADDMIIYLENPTVSAQNLLKLISNFSKVSGYKINVQKSQAFLYTNNRQTESQIMSELPFTIASKRIKHLGIQLTRDVKDLFKENYKPLLNEIKEDTKKWKNIPCSWAGRISIMKMAILPKVIYRFNAIPIKLPMTFFTELEKTTLKFIRNQKRAHIAKSILSQKNKAGGITLPDFKLYYKATVTKTAWYWYQNRDIDQCTRTQPSEITPHIYNYLIF

SEQ ID NO: 34735 - protein, 649 aa, Homo sapiens
  DOMAIN (537)..(553): Protein kinases ATP-binding region proteins domain identified by eMATRIX, accession number BL00107B, p-value=1.643e-11, raw score of 13.31
MALRRLSHDVSGALLLANGESTGNSGGSSGSSPSGGATSGSSQTSISGDVVEACCSVLSMVCADPVYKVYVAALQCMLLVTLEDPSSHFTRMRRRLMAYADEVEIAEAIQLGVEDTLDGQQDSFCRHLFPTTIWKPQRTVPLECTIHLEKTGKGLCATKLSASSEDISERLASISVGPSSSTTTTTTTEQPKPMVQTKGRPHSQCLNSSPLSHHSQLMFPALSTPSSSTPSVPAGTATDVSKHRLQGFIPCRIPSASPQTQRKFSLQFHRNCPENKDSDKLSPVFTQSRPLPSSNIHRPKPSRPTPGNTSKQGDPSKNSMTLDLNSSSKCDDSFGCSSNSSNCCYTSDETVFTPVEEKCRLDVNTELNSSIEDLLEASMPSSDTTVTFKSEVAVLSPEKAENDDTYKDDVNHNQKCKEKMEAEEEEALAIAMAMSASQDALPIVPQLQVENGEDIIIIQQDMTFFRHIIPPIQWIYKKESANLLIDSTGQRLRIADFGAAARLASKGTGAGEFQGQLLGTIAFMAPEVLRGQQYGRSCDVWSVGCAIIEMACAKPPWNAEKHSNHLALIFKKLLDFANTACDGDKESEVEDVETDSGNSPEDLRKEIMIGLQYQAEIPPYLGEYDGNEKDSPQPKKMTGVQNAKEVLST

SEQ ID NO: 34736 - protein, 1495 aa, Homo sapiens
  DOMAIN (1342)..(1361): TYROSINE KINASE CATALYTIC DOMAIN SIGNATURE domain identified by eMATRIX, accession number PR00109B, p-value=5.059e-12, raw score of 12.27
PSPEAGGGGGALKASSARAAAAGLLREAGSGGRERADWRRRQLRKVRSVELDQLPEQPLFLAASPPASSTSPSPEPADAAGSGTGFQPVAVPPPHGAASRRGAHLTESVAAPDSGASSPAAAEPGEKRAPAAEPSPAAAPAGREMENKETLKGLHKMDDRPEERMIREKLKATCMPAWKHEWLERRNRRGPVVVKPIPVKGDGSEMNHLAAESPGEVQASAASPASKGRRSPSPGNSPSGRTVKSESPGVRRKRVSPVPFQSGRITPPRRAPSPDGFSPYSPEETNRRVNKVMRARLYLLQQIGPNSFLIGGDSPDNKYRVFIGPQNCSCAHGTFCIHLLFVMLRVFQLEPSDPMLWRKTLKNFEVESLFQKYHSRRSSRIKAPSRNTIQKFVSRMSNSHTLSSSSTSTSSSENSIKDEEEQMCPICLLGMLDEESLTVCEDGCRNKLHHHCMSIWAEECRRNREPLICPLCRSKWRSHDFYSHELSSPVDSPSSLRAAQQQTVQQQPLAGSRRNQESNFNLTHYGTQQIPPAYKDLAEPWIQVFGMELVGCLFSRNWNVREMALRRLSHDVSGALLLANGESTGNSGGSSGSSPSGGATSGSSQTSISGDVVEACCSVLSMVCADPVYKVYVAALKTLRAMLVYTPCHSLAERIKLQRLLQPVVDTILVKCADANSRTSQLSISTLLELCKGQAGELAVGREILKAGSIGIGGVDYVLNCILGNQTESNNWQELLGRLCLIDRLLLEFPAEFYPHIVSTDVSQAEPVEIRYKKLLSLLTFALQSIDNSHSMVGKLSRRIYLSSARMVTTVPHVFSKLLEMLSVSSVSTHFTRMRRRLMAYADEVEIAEAIQLGVEDTLQRQQHNSFCRHLFPTTIWKPQRTVPLECTVHLEKTGKGLCATKLSASSEDISERLARISVGPSSSTTTTTTTTEQPKPMVQTKGRPHSQCLNSSPLSHHSQLMFPALSTPSSSTPSVPAGTATDVSKHRLQGFIPCRIPSASPQTQRKFSLQFHRNCPENKDSDKLSPVFTQSRPLPSSNIHRPKPSRPTPGNTSKQGDPSKNSMTLDLNSSSKCDDSFGLSSNSSNCCYTSDETVFTPVEEKCRLDVNTELNSSIEDLLEASMPSSDTTVTFKSEVAVLSPEKAENDDTYKDDVNHNQKCKEKMEAEEEEALAIAMAMSASQVALPIVPQLQVENGEDIIIIQQDTPETLPGHTKAKQPYREDTEWLKGQQIGLGAFSSCYQAQDVGTGTLMAVKQVTYVRNTSSEQEEVVEALREEIRMMSHLNHPNIIRMLGATCEKSNYNLFIEWMAGGSVAHLLSKYGAFKESVVINYTEQLLRGLSYLHENQIIHRDVKGANLLIDSTGQRLRIADFGAAARLASKGTGAGEFQGQLLGTIAFMAPEVLRGQQYGRSCDVWSVGCAIIEMACAKPPWNAEKHSNHLALIFKIASATTAPSIPSHLSPGLRDVALRCLELQPQDRPPSRELLKHPVFRTTW

SEQ ID NO: 34737 - protein, 307 aa, Homo sapiens
  DOMAIN (49)..(90): kw TRANSCRIPTASE REVERSE II ORF2 domain identified by eMATRIX, accession number DM01354I, p-value=2.149e-34, raw score of 15.55
IDHMIGHKASLNKFKKIEIISSTLSGHNGIKLEINSKRDLQNHANTRKLNNLLLNEHWVKNEIKMEILKFFELNDHNDTTYQNLWDTAKATFLLRGKFTALNAYIKKTERAQTDILRSHVKELEKQEQTKPKPSRRKEITKIREELNEMETNKKKIQKINETKSRFFEQINKIDRSLARLAKKRREKIQITSIRNKTGDTTTDTTEIQKIIQGYYEHLYAHKLENLEEMDKFLEKYNPPSLNQEELDTLNRTITSNKIEMVIKKLPTKKKSPGPNGFTAEFYQTFKEELVPILSILVHKTEKEGTLP

SEQ ID NO: 34738 - protein, 37 aa, Homo sapiens
IANGITKNCNLLVFFFLKMLKFLNETKNLLLEFRNKI

SEQ ID NO: 34739 - protein, 399 aa, Homo sapiens
  DOMAIN (315)..(362): kw TRANSCRIPTASE REVERSE II ORF2 domain identified by eMATRIX, accession number DM01354V, p-value=3.211e-30, raw score of 12.97
MEISELNAKLRSQEKEKQNEIIKLQLEKLQHFQEEKNKEIAILRNTIRDLEQRLSVGKDSHLKRENEQLKISADLIKEKLKSHEQEYKNNIAKLVSEMKIKEEGYKKEISKLYQDMQRKGRIKVTCEWTCSERKTEGREPGPVREPTGRSQSAENEGSKTLAEINTKGTQSPAERINKIDRLLARLTNKRREKVQISSIRNKTGDIRTDTTEKQKFMQGYHEHLYMHKLENLKEMDKFLEIYSPPRLKREDIETLSRPITISDIEMKNLKIPPKLPELINKFSKVSRYKINVHKLVALLYANSDQTDNQIKNSTHFTIVAKKYLGIYLTKDMKDLHKENSKPLLKEIIDDTIKWKHIPCSWMSTTNIVKMTILPKTIYKFNAIIIKIPPSFFAERKKQS

SEQ ID NO: 34740 - protein, 62 aa, Homo sapiens
  DOMAIN (1)..(52): Neuromodulin (GAP-43) proteins domain identified by eMATRIX, accession number BL00412D, p-value=8.714e-12, raw score of 16.54
MIQRKRASIGAPCAWVRKKEEEEEEEEEEEEEEEEEEEEEEEKKKKKKKKERTTWLWGNPLT

SEQ ID NO: 34741 - protein, 70 aa, Homo sapiens
  DOMAIN (5)..(56): Neuromodulin (GAP-43) proteins domain identified by eMATRIX, accession number BL00412D, p-value=2.636e-14, raw score of 16.54
HRSNAFGEEEEEEEEEEEEEEEEEEEEEEEEEEEEEEEEEEEEEEEEEEEEEEEEEEEEEEEEETLFSNM

SEQ ID NO: 34742 - protein, 73 aa, Homo sapiens
  DOMAIN (3)..(54): Neuromodulin (GAP-43) proteins domain identified by eMATRIX, accession number BL00412D, p-value=4.156e-14, raw score of 16.54
KKKEEEEEEEEEEEEEEEEEEEEEEEEEEEEEEEEEEEEEEEEEEEEEEEEEEEEEEEEEEEESNFLQHYLHL

SEQ ID NO: 34743 - protein, 58 aa, Homo sapiens
  DOMAIN (3)..(38): Troponin domain identified by eMATRIX, accession number PF00992A, p-value=7.188e-12, raw score of 16.67
MKEERRRRREEEGEGEEEEEEEEEEEEEEEEEEEEEEEEEEEVVLLTPGTGAEDFKKH

SEQ ID NO: 34744 - protein, 131 aa, Homo sapiens
  DOMAIN (104)..(127): Ribosomal protein S7e proteins domain identified by eMATRIX, accession number BL00948A, p-value=3.912e-09, raw score of 14.13
EEEEEEEEEEEEEEEEEEEEEEEEEEEEEEEEEEEEEEEEEEEEEEEEEEKEEEEEEEEEEEEGEEEELGRLHGGSGKVRGLGFTENQQGSTNRQHQREDNRKSKQKKINNTKPEATESLIVNGITITAPA

SEQ ID NO: 34745 - protein, 64 aa, Homo sapiens
  DOMAIN (1)..(52): Neuromodulin (GAP-43) proteins domain identified by eMATRIX, accession number BL00412D, p-value=2.370e-10, raw score of 16.54
MKKKKEEEEEEEEEEEEEEEEEEEEEEEEEEEEEEEEEEEEEEQAIVSVHCKKKHKREEEEDDE

SEQ ID NO: 34746 - protein, 85 aa, Homo sapiens
  DOMAIN (2)..(53): Neuromodulin (GAP-43) proteins domain identified by eMATRIX, accession number BL00412D, p-value=7.075e-13, raw score of 16.54
PHEEEEEEEEQEEEEEEEEEEEEEEEEEEEEEEEEEEEEEEEEEEEEEESLSDKHHPTTSSMEAWFQVAVMTAPPESRHLPWVPF

SEQ ID NO: 34747 - protein, 93 aa, Homo sapiens; identical to SEQ ID NO: 33327
  DOMAIN (51)..(79): Granins proteins domain identified by eMATRIX, accession number BL00422C, p-value=8.054e-13, raw score of 16.18

SEQ ID NO: 34748 - protein, 235 aa, Homo sapiens
  DOMAIN (189)..(223): Amyloidogenic glycoprotein extracellular domain proteins domain identified by eMATRIX, accession number BL00319C, p-value= 5.875e-10, raw score of 17.12
MVAESCQGDLSTLANVVTSLANLGKTKDLSQNSNEMSMIESLSNDDTSLCEFQEMQTNGDVSRIMSPDTFPSGAQEQPRHTGRLARGFAQEPFLPNQTEQRYKTQKQAIRKDLCDWARWIMSVIPVLWEAEETPSASIHPLELQPTQALPDFSVLYKQRQCQKIPIQFCQESLEVVGDRRRKKKKKKEEEEEEEEEEEEEEEEEEEEEEEGRRRRRSSPSCYSITPELSCKLGHR

SEQ ID NO: 34749 - protein, 89 aa, Homo sapiens
  DOMAIN (32)..(83): Neuromodulin (GAP-43) proteins domain identified by eMATRIX, accession number BL00412D, p-value=8.831e-14, raw score of 16.54
GPHPQDISLCICKYFKIRKGLKVRTLPLSGISAWATEQDSVSKKKKEKKKEEEEEEEEEEEEEEEEEEEEEEEEEEEEEKKRKKRKMPK

SEQ ID NO: 34750 - protein, 139 aa, Homo sapiens
  DOMAIN (89)..(134): RIBOSOMAL PROTEIN 40S ZINC-FINGER METAL domain identified by eMATRIX, accession number PD01457A, p-value=6.878e-13, raw score of 16.51
MAGKQGRSEGASSWRLSSVLQLNSQYFLQGAQQCTFLAATAWKKRKEEEEEEEEEEEEEEEEEEEEEEEEEEEEEEEEKKKKKKKKKKKKKKKKKKKKKKKKKKKKKKKKKKKKKKKKKKKKKKKKKKKKKKENPFSCF

SEQ ID NO: 34751 - protein, 116 aa, Homo sapiens
  DOMAIN (51)..(73): Dihydrodipicolinate reductase proteins domain identified by eMATRIX, accession number BL01298A, p-value=5.959e-09, raw score of 13.90
MALLRKINQVLLFLLIVTLCVILYKKVHKGTVPKNDAHDESETPEELEEEIPVVICAAAGRMGATMAAINSIYSNTDANILFYVVGLRNTLTRIRKWIEHSKLREINFKIVEFNPM

SEQ ID NO: 34752 - protein, 156 aa, Homo sapiens
TRFYDHALHLIHRKGSTTVRSPPPLYFIGESKASALLAISLRWSGRSQPRSSVNQIRKAWGFRPRKGTEEDERSGCPSDALESDDPMAYIHFTAEGEVTFKSILFVPTSAPRGLFDEYGSKKSDYIKLYVRRVFITDDFHDMMPKYLNFVKGVVSI

SEQ ID NO: 34753 - protein, 842 aa, Homo sapiens
  DOMAIN (109)..(154): Heat shock hsp90 proteins family proteins domain identified by eMATRIX, accession number BL00298A, p-value=1.000e-40, raw score of 10.97
  misc_feature (1)...(842): Xaa = X or * as defined in Table 2
VGGPRGWRCEDPNPGVGGGGGSCDRRGLETHRPHAMRALWVLGLCCVLLTFGSVRADDEVDVDGTVEEDLGKSREGSRTDDEVVQREEEAIQLDGLNASQIRELREKSEKFAFQAEVNRMMKLIINSLYKNKEIFLRELISNASDALDKIRLISLTDENALSGNEELTVKIKCDKEKNLLHVTDTGVGMTREELVKNLGTIAKSGTSEFLNKMTEAQEDGQSTSELIGQFGVGFYSAFLVADKVIVTSKHNNDTQHIWESDSNEFSVIADPRGNTLGRGTTITLVLKEEASDYLELDTIKNLVKKYSQFINFPIYVWSSKTETVEEPMEEEEAAKEEKEESDDEAAVEEEEEEKKPKTKKVEKTVWDWELMNDIKPIWQRPSKEVEEDEYKAFYKSFSKESDDPMAYIHFTAEGEVTFKSILFVPTSAPRGLFDDYGSKKSDYIKLYVRRVFITDDFHDMMPKYLNFVKGVVDSDDLPLNVSRETLQQHKLLKVIRKKLVPXNRWDMIKKISLDDKYNDTFWKEFGYQHSSLVVIEGPLRIRTRLAKLLRFQSSHHPTDITSLDQYVERMKEKQDKIYFMAGSSKKEAESSPFVERLLKKGYEVIYLTEPVDEYCIQALPEFDGKRFQNVAKEGVKFDESEKTKESREAVEKEFEPLLNWMKDKALKDKIEKAVVSQRLTESPCALVASQYGWSGNMERIMKAQAYQTGKDISTNYYASQKKTFEINPRHPLIRDMLRRIKEDEDDKTVLDLAVVLFETATLRSGYLLPDTKAYGDRIERMLRLSLNIDPDAKVEEEPEEEPEETAEDTTEDTEQDEDEEMDVGTDEEEETAKESTAEKDEL

SEQ ID NO: 34754 - protein, 204 aa, Homo sapiens
  misc_feature (1)...(204): Xaa = X or * as defined in Table 2
PARAALGILTSHQSGFLKTSTSKITSTAWKNKDITMQSTKQYACLHDLTNKGIGEEIDNEHPWTKPVSSENFTSPYVWMLDAEDLADIEDTVEWRHRNVESLCVMETASNFSCSTSGCFSKDIVGLRTSACWQQHCASPAFAYCGHSFCCTGTALRTMSSLPESSAMWXKKPARTRLPRGKDLIYFGSEKSDQETGTLLLPVSS

SEQ ID NO: 34755 - protein, 472 aa, Homo sapiens
  DOMAIN (52)..(66): F-box domain proteins domain identified by eMATRIX, accession number PF00646A, p-value=9.036e-10, raw score of 14.37
QHCSQKDTAELLRGLSLWNHAEERQKFFKYSVDEKSDKEAEVSEHSTGITHLPPEVMLSIFSYLNPQELCRCSQVSMKWSQLTKTGSLWKHLYPVHWARGDWYSGPATELDTEPDDEWVKNRKDESRAFHEWDEDADIDESEESAEESIAISIAQMEKRLLHGLIHNVLPYVGTSVKTLVLAYSSAVSSKMVRQILELCPNLEHLDLTQTDISDSAFDSWSWLGCCQSLRHLDLSGCEKITDVALEKISRALGNSGHLHQSGFLKTSTSKITSTAWKNKDITMQSTKQYACLHDLTNKGIGEEIDNEHPWTKPVSSENFTSPYVWMLDAEDLADIEDTVEWRHRNVESLCVMETASNFSCSTSGCFNHRPWSQNEYEQLNYAKQLKERLEAFTRDFLPHMKEEEEVFQPMLMEYFTYEELKDIKKKVIAQHCSQKDTAELLRGLSLWNHAEERQKFFKYSVDEKSDKEAEVS

SEQ ID NO: 34756 - protein, 93 aa, Homo sapiens
MTSGEVKTSLKNAYSSAKRLSPKMEEEGEEEDYCTPGAFELERLFWKGSPQYTHVNEVWPKLYIGDEATALDRYRLQKAGFTHVLNAAHGRWN

SEQ ID NO: 34757 - protein, 123 aa, Homo sapiens
LFYVLTKNDEKGCHLVGYFSKEKLCQQKYNVSCIMIMPQHQRQGFGRFLIDFSYLLSRREGQAGSPEKPLSDLGRLSYLAYWKSVILEYLYHHHERHISIKAISRATGMCPHDIATTLQHLHM

SEQ ID NO: 34758 - protein, 301 aa, Homo sapiens
MGHRINIVCKIDAPCARQTRTFHPVVKTVEDCGRYPSVIEFGKYEIQTWYSSPYPQEYARNLAKEGKMGEREMSFVQQLQPMSGRCSLFRELSSCTYLLNTQPPAVSIHFLAVWIILLVDGNMSKIYCQNLCLLAKLFLDHKTLYYDVEPFLFYVLTKNDEKGCHLVGYFSKWTVLQGQWQVQGIAHFSRALTYLICFSFPQEKLCQQKYNVSCIMIMPQHQRQGFGRFLIDFISFPRLTIGASFTQLRKQSMSNSTEIPLLGDNGKSSPTFHWQSLTSSPNAHFSLEAQLSILGHLFQSP

SEQ ID NO: 34759 - protein, 1156 aa, Homo sapiens
  DOMAIN (470)..(517): kw TRANSCRIPTASE REVERSE II ORF2 domain identified by eMATRIX, accession number DM01354V, p-value=1.000e-40, raw score of 12.97
MGKKQNRKTGNSKNQSASPPPKERSSSPATEQSWMENDFDELREEGFRLSNYSELPEDIQTKGKEVENFEKNLEECITRITNKRNFKPTKIKRDKEGHYIMVKGSIQQEELTILNIYAPTGAPRFIKQVLSDRQRDLDFHTLIMGDFNTPLSTLDRSTRQKVNKDTQELNSALHQADLIDIYRTLHSKSTEYRFFSAPHHTYSKIDHLLGSKAFLSKCKRTEIITNYLSDHSAIKLELRIKNLTQNRSTTWKLNNLLLNDYWVHNEMKAEMKMFFETNENKDTTYQNLWDAFKAVCRGKFIALNAHKRKQERSKIDTLTSQLKELEKQEQTHSKASRRLNQEEVESLNRPITGSEIVAIINSLPTKKSPGPDGFTAKFYQMLEVLARAIRQEKEIRGIQLGKEEVKLSLFADDMIVYLENPIVSAQNLLKLISNFSKVSGYKINVQKSQAFLYTNNRQTESQIMSELPFTIASKRIKYLGIQLTRDVKDLFKENYKPLLKEIKEDTNKWKNIPCSWVGRINIVKMAILPKVIYRFNAIPIKLPMTFFTELEKTTLKFIWNQKRARIAKSILSQKNKAGGITLPDFKLYYKATVTKTAWYWYQNREIDQWNRTEPSEITPHIYNYLIFDKPEKNKQWGKDSLFNKWCWENWLAICRKLKLDPFLTPYTKINSRWIKDLNVRPKTIKTLEENLGITIQDIGMGKDFMSKTPKAMATKSKIDKWDLIKLKSFCTAKKTNIRVNRQPTKWEKIFATYLSDKGLISRIYNELKQIYKKKTNNPIKKWAKDMNRHFSKEDIYAAKKHMKKCSPSLAIREMQIKTTMRYHLTPVRMVIIQKSGNNRSLMYPRRLRIQPRQCTDNNEKSTWNNHRQKDYKLCNKYKGIGFIRWPAGYGPAQSSGKCGMPGDVQKNQVSWYKVQNALSRVVQEVLSGTATHWLGRFCSLSSCVEDDKDGFVQLLLYALLFNPLDEILIQGTKNLKKFSDDPKRLIEGFPKLALTFRLIWKDINVLLGQALLQEERQTICGAAIHCRNDLHLENANYPGGATAVPQLDPNQDYNAKAGIWARNHRLLCLIEMFTRVAEAMQLTEVGRRPLLEPVCTVTLEVVLAGDGPGTVAPRGSQTKAIFKDDAKIPRNHEKSELVRGSGALRPRTEQEALVAE

SEQ ID NO: 34760 - protein, 632 aa, Homo sapiens
  DOMAIN (174)..(199): 7 kw REVERSE TRANSCRIPTASE RNA POLYMERASE domain identified by eMATRIX, accession number DM00895E, p-value=4.667e-11, raw score of 15.72
FNKCMTLKFRLKNFSRINKIDTPLARLIKKKREKNRIDTIKNDKGDITSNPTEIQSTIREYYKHLYTNKLENLEEMDKFLDTYTLPRLNQEEVESLNRPITGSEIMAIINSLPTKKSPGPDGFTAKFYQRYKEELVPFLLKLFQSIEKEGILPNSFYEASIILIPKPGRDTTKNENFRPISLMNIDAKILNKILANRIQQHIKKLIHHDQVGFIPGMQGWFNIRKSINVIQHISRTKDKNHMIISIDAEKAFDKIQQPFMLKTLNKLGIKYLGIQLTRDVKDLFKERSYEPLLNEIKEDTNKWKNIPCSWVGRINIVKMAILPKVIYRFNAIPIKLPMTFFTELEKTTLKFIWNQKRALIAKSILSQKNKAGGITLPDFKLYYKATVTKTAWYWYQNRDIDQWNRTEPSEITLHIYNYLIFDKPEKNKQWGKDSLFNKWCWENWLAICRKLKLDPFLTPYTKINSRWIKDLNVRPKTIKTLEENLGITIQDIGMGKDYMSKTPKAMATKAKIDKWDLIKLKSFCTAKETTIRVNRQPTKWEKIFATYSSDKGLISRIYNELKQIYKKKTNNPIKKWVKDMNRHFSKEDIYAAKKHMKKCSPSLAIREMQIKTTMRYHLTPVRMAIIKKSGNN

SEQ ID NO: 34761 - protein, 643 aa, Homo sapiens
  DOMAIN (51)..(96): kw TRANSCRIPTASE REVERSE II ORF2 domain identified by eMATRIX, accession number DM01354N, p-value=1.000e-40, raw score of 13.17
SWFFEKINKIDRLLARLIKKKREKNQIDAIKNGKGDITTDPTEIQTTIREYYKHLYANKLENLEEMDKFLDTYTLPRLNQEEAESLNRPITGSEIEAIINSLSTKKSPGPDGFTAEFYQRYKEELVPFLLKLFQSTEKEGILPNSFYEASIILIPKPGRDTTKKENFRPISLMNIDAKILNKILANRIQQHIKKLIHHDQVGFIPGMQGWFNIRKSINVIQHINRTKHKNHMIISIDAEKASDKIQQPFMLKTLRKLGIDETQTESQIMSELPFTIASKRIKYLGIQLTRDVKDLFKENYKPLLNEIKEDTNKWKNFPCSWVGRINIVKMAIVPKVIYRFNASPIKLPMTFFTELEKTTLKFIWNQKRACIAKSILSQKNKAGGIMLPDFKLYYKATVTKTAWYWYQNRDIDQWNRTEPSEITPHIYNYLFFDKPDKNKQWGKDSLFNKWCWENWLAICRKLKLDPVLTPYTKINSRWIKDLHVRPKTIKTLEENLGITIQDIGMGKDFMSKTPKAMATKAKIDKWDLIKLKSFCTAKETTIRVNRQPTEWEKIFATYSSDKGLISRIYNELKQIYKKKTNNPIKKWAKDMNRHFSKEDIYADKKHMKKCSSSLIIREMQVKTTMRYHLTPVRMAIIKKSGNN

SEQ ID NO: 34762 - protein, 857 aa, Homo sapiens
  DOMAIN (245)..(270): 7 kw REVERSE TRANSCRIPTASE RNA POLYMERASE domain identified by eMATRIX, accession number DM00895E, p-value=9.556e-11, raw score of 15.72
MKAEIKMFFETNENKDTTYQNLWNTFKAMCRGKFIALNAHKRKQERSNTDTLTSQLKELKKQEQTHSKPSRRQEITKIRAEMKEIETQKTLQKIKESRTWFFEKINKIDRLLARLTKKKREKNQIDAIKNDKGDITTDPTEIQTTIREYYKHLYANKLENLEEMDKFLDTYTLPRLNQEEVESLNRPITGSEIEAIINSLPTKKCPGPDGFTAEFYRRKRGILPNSFYEASIILIPKPGTDTTKKENFRPISLMNIDVKILNKILANRIQQHIKKLIHHDQVGFIPGMQGWFNIRKSINIIQHINRAKDKNHMIISIDAEKAFDKIQQCFMLKTLNKLGIDGTYLKIIRAIYDKPTANIILNGQKLEVFPLKTGTRQGCPLSPLLFNIVLEVLARAIRQEKEIKGIQLGNEEVKLSLFADDMIVYLENPIISAPNLLKLINNFSKGSAYKIKVQKSQAFLYTNNRQTESQIMSELPFTIASKRIKYLGIQLTRDVKDLFKENYKPLLKEIKEDTNKWKNIPCSWVGRINIMKMAILPKVIYRFNAILIKLPMTFFTELEKSTLKFIWNQKRARIAKSILSQKNKAGGITLPDFKLYYKATVTKTAWYWYQNRDIDQWNGTEPSEIMPHIYNYLIFDKPEKNKQWGKDSLFNKWCWENWLAICRKLKLDPFLTPYTKINSRWIKDLHVRPKTIKTLENLGNTIQDIGMGKDFMSKTPKAMATKAKIDKWDLIKLKSFCTAKETTIRVNRQPTKWEKIFATYSSDKGLISRIYNELKQIYKKKTNNPIKKWAKDMNRHFSKEDIYAAKKHMKKCSTSLAIREMQIKTTMRYHLTPVRMAIIKKSGNNKCWRGCGEIGTL

SEQ ID NO: 34763 - protein, 655 aa, Homo sapiens
  DOMAIN (278)..(325): kw TRANSCRIPTASE REVERSE II ORF2 domain identified by eMATRIX, accession number DM01354V, p-value=1.000e-40, raw score of 12.97
MTLESEQTFVYAVTATQTGAKEGTRMSKSNVAGQQGDSGEKALQKTYQKILREKESALEAKYQAMERAATFEHDRDKVKRQFKIFRETKENEIQDLLRAKRELESKLQRLQAQGIQVFDPGESDSDDNCTDVTAAGTQCEYWTGGALGSEPSIGSMIQLQQSFRGPEFAHSSIDVEGPFANVNRDDWDIAVASLLQVTPLFSHSLWSNTVRCYLIYTDETQPEMDLFLKDYSPKLKRMCETMGYFFHAVYFPIDVENQYLTVRKWEIEKSSLVILFIHLTLPRIKYLGIQLTRDVKDLFKENYKPLLNEIKEDTNKWKNILCSWTGRNNVMKMATLPKVIYRFNAIPIKLPMTFFTELEKTTLKFIWNQKRAHIAKTILSEKNKAGGIMLPDFKLYFKATVTKAAWYWCQNRDIDQWNRTEASEITPHIYNHLIFDKPDKNKKWGKDSLFNKWCWENWLAICRKLKLDPFLTPYTKINSRWIKDLNVRPKTIKTLEENLGNAIQDIGMGKDFMTKTPKAMATKAKIDKWDLIKLKSFCMAKETPIGVNRQLTEWEKIFAIYPSDKGLISRIYKELKQTYKKKTNNPIEKLAKEMNRHLSKEDIYAANRHKKKCSSSLVIREMQIKTTMRYHLTPVRMAIIKKSGNNRCWRGCGEI

SEQ ID NO: 34764 - protein, 58 aa, Homo sapiens
  misc_feature (1)...(58): Xaa = X or * as defined in Table 2
PDLSLWLPLTFFPSFQLWXIXQLCVLELLFSRSIFVAFSVFPEFESWPALLGWGSSPG

SEQ ID NO: 34765 - protein, 426 aa, Homo sapiens
  DOMAIN (117)..(157): kw TRANSCRIPTASE REVERSE II ORF2 domain identified by eMATRIX, accession number DM01354Y, p-value=3.020e-34, raw score of 10.69
QKLYKPERIKYLGIQLTRDVKDLFKENYKLNEIKEDTNKRKNIPCSWVGRINILKMAILQKVIYRFNAIPIELPITFFTKLEKTTLRFIWNKKRVHIAKSIPSKKNKAGGIMLPDFKLYYKATITKTAWYLYQNRDIDQWNRTEALGITPHIYNHLIFDKPDKNKQRGKDSLFNKWCWENWLVICRKLKLDAFLTPYTKINSRWIKDLNIRPKTIKTLEENLGNTIQGIGMGKDFMTKTPKAMATKAKIDKRDLIKLKSFCTAKETNIRVNRQPIEWEKIFAIYRSDKGLISRIYKELKQIYKKKTNNSIKKWAKDMNRHFSKEDIYAANRHEKKWSPSLVTREMQIKTIMRYHLTPVRIMTIKMSGNNRCWRGYGEIGMLLHCWWECKLVQALWKTVWRFLKDLELEIPFDPVIPLLGIYPKDYT

SEQ ID NO: 34766 - protein, 800 aa, Homo sapiens
  DOMAIN (278)..(325): kw TRANSCRIPTASE REVERSE II ORF2 domain identified by eMATRIX, accession number DM01354V, p-value=1.000e-40, raw score of 12.97
FMWIRNLNAAYLGASGSESLMSLNQGVSCGHSHLKALLEEEPIPNSHMWLLSGLSSRKTTRYPRRKDLSGSVLGTEIYPLDSPSRKDLLPSCEKYSQQAVSGCQSFRICLICREQPCWRLSPSKQGLSINKWLMVAAGLLDQVSSSLVPSAARTGSGQLIPNWNKQLRSLGLYKGDFWLDLTNRRQGSEIRLEGGEKLGSLSIAFLALGKEEVKLSLFADDMIVYLENPIISAQNLLKLISNFSKVSGHKINVQKSQEFLYNNNRQTESQIMSELPFTIASKRIKYLGIQLTRDVRDLFKENYKPLLNKIKEDTNKWKNIPCSWVERINIVKMAILPKVIYRFNAIPIKLPMTFFTELEKTTLKFIWNQKRARIAKSILSQKNKAGGITLPDFKLYYKATVTKTAWYWYQNRDIDQWNRTEPSEITPHIYNYLIFDKPDKNKQWGKDSLFNKWCWENWLAICRKLKLDPFFTPYTKINSRWIKDLNVRPKTIKTLEENLGNIIQDIGMGKDFMSKTPKAMATKAKIDKWDLIKLKSFCTAKETTVRVNRQPTEWEKIFATYSSDKGLISRIYNELKQIYKKKTNNPIKKWAKDMNKHFSKEDIYAANRHMNKCSSSLAIREMQIKTTMRYHLTPVRMAIIKKSGNNGCWRGCGEIGTLLYCWWDCKLAQPLWKSVWRFLRDLELEIPFDPAIPLLGIYPKEYKSCCYKDTCTRNASFLSGCFQDFLFAFRFQEFNYNVSWCFTGFILYQVRIASWVLRFVSFAKGGEKRLRPTWPKISQTRPFAVAMSFLQAVPTLVSLG

SEQ ID NO: 34767 - protein, 524 aa, Homo sapiens
  DOMAIN (346)..(393): kw TRANSCRIPTASE REVERSE II ORF2 domain identified by eMATRIX, accession number DM01354V, p-value=6.283e-38, raw score of 12.97
MLVSFVSLGSLCLQPGSQTLLEKNRTVKPHVSFTLLPALSHVSEKNEAESMNSLIPPPPNLHTPAQAPFPLPTKEQDRSSSPATEQSWTENDFDELTEVGFRRSVITNSSKLKEDVRTHCKEAKNLEKRLHEWLTRINSVEKTLNDLKLKSMARELHDTCTSFNSRFDQVEERVSAIEDQTNEINNGENGTKLENTLQDIIQENFPNLARQANIQIQEIRRTPQRYSSRKATPRHIIVRFTKVEMKEKVLRAAREKVLEVLARAISQEKEIKCTQLGKEEVKLSLFADDMIVCLENPVVSDHNVLKLISNFSKVSVYKINVQKSHAFLYTNNRQTESQIMSELPFTITTKRIKYLGIQLTRAVKDFFKEKYKPLLNEIKKDTNKWKNIPCSCIGRINIMKMAIVPKVIYGFNAIPIKLPRTFFTELEKTTLKFIWKKKGAKTILSIKNKAGGIMLPDFKLYYKATVTKIAWYWYQNRYINQRNRTETSEITSHIYNHLIFDKPDKNKKWGKDSLFNKWCWENWL

SEQ ID NO: 34768 - protein, 433 aa, Homo sapiens
  DOMAIN (185)..(232): kw TRANSCRIPTASE REVERSE II ORF2 domain identified by eMATRIX, accession number DM01354V, p-value=1.000e-40, raw score of 12.97
MSAVTTLTQQSTEISSQCKIQTTIREYCKHLYTNKLENLEETDKFLNTYTLPRLNQEEVQSLNRPITGSEIEAIINSLPTKKVQDQTDSQLNSTRVLEVLARAIRQEKEIKGIQLGKEEVKLSLFADDIIVYLENPIISAQNLLKLISNFSKVSGYKINLQKSQAFLYTNNKQTGSQIMSELPFTIASKRIKCLGIQLTRDVKDLFKENYKPLLNEIKEDTNEWKNIPCSWIGRISIVKMAILPKVIYRFNAIPIKLPMTFFTELEKTTLKFIWNQKRAHIAKSILSQKNKAGGITLPDFKLYYKATVTKTAWYWYQNRDIDQWNRIEPLEIIPYIYNYLIFDKSDKNKKWGKDSLFNKWCWENWLTICRKLKLDPFLTSYTKINSRWIKDLNVRPKTIKTPEENLGNTIQDIGMGKDFMTKSAKRNGNKSQN

SEQ ID NO: 34769 - protein, 1161 aa, Homo sapiens
  DOMAIN (267)..(312): kw TRANSCRIPTASE REVERSE II ORF2 domain identified by eMATRIX, accession number DM01354N, p-value=1.000e-40, raw score of 13.17
  misc_feature (1)...(1161): Xaa = X or * as defined in Table 2
TWKGTTDRSTRQKVNKDTQELNSALHQADLIDIYRTLHPKSTEYTFFLAPHHTYSKIDHIVGSKALLSKCKRTEIITNYLSDHSAIKLELRIKNFTQSRSTTWKLNNLLLNDYWVHNEMNAEIKMFFETNENKDTTYQNLWDAFKAVCRGKFIALNAHKRKQERSKIDTLTSQLKELEKQEQTHSKASRRQEITKIRAELKEIETQKTLQKINESRSWFFERITKSDRPLARLIKKKREKNQIDTIKNDKGDITTDPTEIQTTIREYYKQLYANKLENLEEMNKFLDTYTLPRLNQEEVESLNRPITGSEIVAIINSLPTKKSPGPDGFTAEFYQRYKEELVPFLLKLFQSIEKEGILPNSFYEASIILIPKPGRDTTKKENFRPISLMNIDAKILNKILANRIQQHIKKLIHHDQVGFIPGMQGWFNIRKSINVIQHINRAKDKNHMIISIDAEKAFDKIQQPFMLKTLNKLGTDGTYLKIIRAIYDKPTANIILNGQKLEAFPLKTGTRQGCPLSPLLFNIVLEVLARAIRQEKEIKGIQLGKEEVKLSLFADDMIVYLENPIVSAQNLLKLISNFSKVSGYKINVQKSQAFLYTNNTDKQESQIMSELPFTTASKRIKYLGIQLTRDVKDLFKENYKPLLNEIKEDTNKWKNVPCSWVGRISIVKMAILPKVIYRFNAIPIKLPMTFFTELEKTTLKFIWNQKRAPTCPKSNPXAQKNKAGGITLPDFKLYLQGLQXPKTAWYWYPKQRYIDQWNRIEPSEIMPHIYYNYLIFDKPWEKPSNGGKDSLFNKWCWENWLAICRKLKLDPFPYTLYKKSNSRWIKDLNVKPKPHKKLXKENLGNTHIQDIGMGKDFMSNKTPKAMATKDKIDKWDLIKLKSFLHSKRETTIRVNRQPTKWEKIIFASYLSDKGLISRIYKELKQIYKKKTNNPIKKWAKDMNRCFSKEDIYAAKKHMKKCSTSLAIRVMQIKTTMRYRLTPVRMAIIKKSGNNRCWRGCGEIGTLLHCWWDCKLVQPLWKSVWRFLRDLELEIPFDPAIPLLGIYPKDYKSCCYKDTCTPSKLRQRATGNVAAAALKSKGTSTSLGPWNRGTSAISPVETAVTVPRSSRIVPLPPAASRPSTLHMHRVQRQLPGQQPHVCLNLAGGRNHLFQETSLREQT

SEQ ID NO: 34770 - protein, 273 aa, Homo sapiens
  DOMAIN (149)..(180): kw TRANSCRIPTASE REVERSE II ORF2 domain identified by eMATRIX, accession number DM01354G, p-value=4.364e-11, raw score of 11.57
MRRDYPVKAFTSRKREQHVQKVPSKKSRQVQRTERRFLETTPDLLYQKEKDLLLISSSKKQPRPGIERHYMMTQGSIHQEDVAILKVYTSNKRASKYIQQTLLEIKGKIAHPQIVGDFNTPTSTIDRTIRQQISIEFYDTIKQWDLTDTCRTGHPITEYIFCSGAHLTFTKINHIQGPKRILKRFKRIEIIECVLVLKGCQAKNRKKEEDLQTYWMLNIYGPHYRSGSYAAIHRQETICSGQLSQALRDRFAMNAKLLLSLAAHLWVIKLDFM

SEQ ID NO: 34771 - protein, 73 aa, Homo sapiens
TARSCRRGSWWSPSWKKEEDLQTYWMLNIYGPHYRSGSYGLESLLPTMGLSWPVLSCWSGTWSVVQSQTLRWW

SEQ ID NO: 34772 - protein, 178 aa, Homo sapiens
  DOMAIN (10)..(43): PROLINE-RICH PROTEIN 3 domain identified by eMATRIX, accession number DM00215, p-value=1.000e-08, raw score of 19.43
  misc_feature (1)...(178): Xaa = X or * as defined in Table 2
MEESRGAKPPPALLPGDATLPPGSLGSARHPPEPRPVPGPPPHQTCPGPSACSSRRPEPRSSPGSPARAPPAPPPPAAPAPRCEPPLWLLLRVPCPGRSGWSWMTTXISERPVQKRARSGPQPRLPPCLLPLSPPTAPDRATAVATPPVLGPMSSWSPRRAGGPTRPCTALQALSIPA

SEQ ID NO: 34773 - protein, 165 aa, Homo sapiens
YPSGRRLREPADVADAWDGMEESRGAKPPPALLPGDATLPPAPSGQLGTRPSPPSSRPSPHQTCPGPSACSSRRPEPRSSPGSPARAPPAPPPPAAPAPRASPRRPLPAPRSASVPAFSAPPSQWPEVGPSPCALRRAMPRGPGPPPEPRLVAEPGEDAAPTAGR

SEQ ID NO: 34774 - protein, 139 aa, Homo sapiens
GNMIACGISHDDELFSYSCPKFLSPVVPNYDNVHPNYHKEPFLQQLKVFSDEVQQQAQLSTIRSFLKLYTTMPVAKLAGFLDLTEQEFRIQLLVFKHKMKNLVWTSGISALDGEFQSASEVDFYIDKLNRTLKKMGQRP

SEQ ID NO: 34775 - protein, 596 aa, Homo sapiens
  misc_feature (1)...(596): Xaa = X or * as defined in Table 2
MSYPADDYESEAAYDPYAYPSDYDMHTGDPKQDLAYERQYEQQTYQVIPEVIKNFIQYFHKTVSDLIDQKVYELQASRVSSDVIDQKVYEIQDIYENSWTKLTERFFKNTPWPEAEAIAPQVGNDAVFLILYKELYYRHIYAKVSGGPSLEQRFESYYNYCNLFNYILNADGPAPLELPNQWLWDIIDEFIYQFQSFSQYRCKTAKKSEEEIDFLRSNPKIWNVHSVLNVLHSLVDKSNINRQLEVYTSGGDPESVAGEYGRHSLYKMLGYFSLVGLLRLHSLLGDYYQAIKVLENIELNKKSMYSRVPECQVTTYYYVGFAYLMMRRYQDAIRVFANILLYIQRTKSMFQRTTYKYEMINKQNEQMHALLAIALTMYPMRIDESIHLQLREKYGDKMLRMQKGDPQVYEELFSYSCPKFLSPVVPNYDNVHPNYHKEPFLQQLKGVFXXSSSQQAQLSTPIRSFLKLYTTMPVAKLAGFPGPSQSQEFRIPGFFVFKQQDERTSVWTQRVFSAPGWXNFSQASEVDFYIDKDMIHIADTKVARRYGDFFIRQIHKFEELNRTLKEGWGQRPWMIFHTHFREPGFECIIGQGSVFC

SEQ ID NO: 34776 - protein, 573 aa, Homo sapiens
  DOMAIN (10)..(65): kw TRANSCRIPTASE REVERSE II ORF2 domain identified by eMATRIX, accession number DM01354Q, p-value=1.000e-40, raw score of 9.23
  misc_feature (1)...(573): Xaa = X or * as defined in Table 2
MNIKAKILNKILANRIQQHIKKLIHHDHVSFIPRMQGWFNIHKPINVIHHINRTNDKNHMIISIDAEKAFDKIQHPFTLKTLNKLDDMTVYLENPIVSAQNLLKLISNFSKVSGYKINVQKSQAFLYTNNRQTESQIMSELPFTIASKRIKYLGIQLTRDVKDLFKENYKPLLKEIKEDTNKWKNIPCSWVGRINVVKMAILPKVIYRFNAIPIKLPMTFFTELEKTTLKFIWNQKRARIAKSILSQKNKAGGITLPDFKLYYKATVTKTAWYWYQNRDIDQWNRTEPSEIMPHIYNHLTFDKPDKNKQWGKDSLFNKWCWENWLAICRKLKLDPFLTPYTKINSRWIKDLNVRPKTIKTLEENLGNTVQDIGMCKDFMTKTPKAMATKAKIDKWDLIKLKSFCTSKETIIRVNRQPTEWEKMFAIYPSDEGLISRICKELFKQIYKKKNHPIKKWAKDMNRHFSKEDIYVANKHMKKSLSSLVIREMQIKTTMRHHLTPVRMTIIKKSGNNRFWRGCGETGMLLHCWWECKLVQPLXKIVWXFLKDLESEIPSDSAIPLGGIHPKAYKSFYY

SEQ ID NO: 34777 - protein, 32 aa, Homo sapiens
  misc_feature (1)...(32): Xaa = X or * as defined in Table 2
PGEWHGQGSPRCWRXPLPQRCGHLLSCRWRTP

SEQ ID NO: 34778 - protein, 204 aa, Homo sapiens
  DOMAIN (55)..(93): Aldo/keto reductase family proteins domain identified by eMATRIX, accession number BL00798E, p-value=6.538e-24, raw score of 20.32
  misc_feature (1)...(204): Xaa = X or * as defined in Table 2
MEELVDEGLVKALGVSNFSHFQIEKLLNKPGLKYKPVTNQNSLGTMQNRAGFPRDEDCLLLQVECHPYLTQEKLIQYCHSKGITVTAYSPLGSPDRPWAKPEDPSLLEDPKIKEIAAKHKKTAAQVLIRFHIQRNVIVIPKSVTPARIVENIQNTEHYKYCGLCVGPNLEKNLYPVDRMWKNSCGQFVLXISSHLEDYPFNAEY

SEQ ID NO: 34779 - protein, 80 aa, Homo sapiens
WMELESLSHFQIEKLLNKPGLKYKPVTNQVNSIQFKGSILEEGIVNMGDDSSMHVSAPEDPPVGQDVEAEDSDTDDPDPV

SEQ ID NO: 34780 - protein, 339 aa, Homo sapiens
  DOMAIN (58)..(83): ALDO-KETO REDUCTASE SIGNATURE domain identified by eMATRIX, accession number PR00069A, p-value=1.818e-29, raw score of 16.01
QKQQQKAGRETSTCSLRIISAPTMATFVELSTKAKMPIVGLGTWKSPLGKVKEAVKVAIDAGYRHIDCAYVYQNEHEVGEAIQEKIQEKAVKREDLFIVSKLWPTFFERPLVRKAFEKTLKDLKLSYLDVYLIHWPQGFKSGDDLFPKDDKGNAIGGKATFLDAWEAMEELVDEGLVKALGVSNFSHFQIEKLLNKPGLKYKPVTNQVECHPYLTQEKLIQYCHSKGITVTAYSPLGSPDRPWAKPEDPSLLEDPKIKEIAAKHKKTAAQVLIRFHIQRNVIVIPKSVTPARIVENIQVFDFKLSDEEMATILSFNRNWRACNVLQSSHLEDYPFDAEY

SEQ ID NO: 34781 - protein, 676 aa, Homo sapiens
MNNKDPPIAGKHQGFKTRSQKPGTEDHQFAPQSTMSRSRQPPLVTGISPNEGIPWTKVTIRGENLGTGPTDLIGLTICGHNCLLTAEWMSASKIVCRVGQAKNDKGDIIVTTKSGGRGTSTVSFKLLKPEKIAQGLGGLAGILDQSAVWVDEMNYYDMRTDRNKGIPPLSLRPANPLGIEIENIKHISLAIVVETGHNDVLRQKDGVSSWFPFLKVWRPFPDVLQQTFLRHHCSKTSLSNQEQGEYDKRGWLMVVDLSPVKGQLGGCVSAERVQGDWCASTLLERVGSRPLEVVPMGTGHLNVEGLQQGVSAGTHLRGGGKSDEQSKPQDGGDQHARQYSPFEAAEASGFMPRVAEMSPEGQADSVHRHAWISSCKWGRGRQQRLPRCEPRFEQLKMAVTNLKRQANKKSEGSLAYVKGGLSTFFEAQDALSVMGFVSIRKCGYMISFNANFDLESNLWSRATVGCDISAQCLFIAAAVGAHSVQLQWVPAIHQKLEADGTEKVEGSMTQKLENVLNSKFCPTTQNYLWILQHALKLVLGPDIAGQGKTFFNNMMLIAVLGYVFPNSGQLDRRLFNSGCVKPRAKPAWEQSRRGCSSGPERVPPRRVLWMISHTASFKATSDSHCTSVTSSQQTAKCAVVLPPYLPVTNPPDILQKWMIGKGLVDKDESASKTRKL

SEQ ID NO: 34782 - protein, 345 aa, Homo sapiens
DFTSENFSAAWYLIENHSNTSFEQLKMAVTNLKRQANKKSEGSLAYVKGGLSTFLEAQDALSAIHQKLEADGTEKVEGSMTQKLENVLNRASNTADTLFQEKVLGRKDKADSTRNALNVLQRFKFLFNLPLNIERNIQKGDYDVVINDYEKAKSLFGKTEVQVFKKYYAEVEPRVEALRELLLDKLLETPSTLHDQKRYIRYLSDLHASGDPAWQCIGAQHKWILQLMHSCKEGYVKDLKGKDFSSNVFQFSGSALRRVPDTVRVLDSQFSRSALRSVPDTVQVLDSQFSGSALRRVPDTVRVLDGQFSRSALRSVPDTVRVLDKCHCSPAKVVMNAVTIFTGYR

SEQ ID NO: 34783 - protein, 146 aa, Homo sapiens
MQRNLARAFSPGIKKIKMMCLGNSEKDWPKFRGVGEDAGLLAARECGALLVIRHLINAVRAIVPNKSNNEIILVLQHFDNCVDKTVQAFMEGSASEVLKEWTVTGKKKLLLQGEEELARLPFITGGSGSCYSSSTLAVEEECRVLA

SEQ ID NO: 34784 - protein, 92 aa, Homo sapiens
MEDEMEGLTEAGFRRWVTTNSAELKEHVLTQCKEAKNLDKRLEELLSRITSLERDISDQMERELCEAYTSINSQINQAEERISEFEDHLAEI

SEQ ID NO: 34785 - protein, 119 aa, Homo sapiens
  DOMAIN (17)..(53): TRANSCRIPTION PROTEIN FACTOR BTF3 REGULATION NUCL domain identified by eMATRIX, accession number PD02749B, p-value=8.138e- 37, raw score of 12.75
EMVHRKKKAVHRTATADDKKLQFSLKKLEVNNVSGIEEVNMFTNQGTVIHFNAEMPANSFTITGHAETKQLMEMLPSILNQLGAHCLTSLRRLAEALPKQSVNGKAPLATGEDDDEVPA

SEQ ID NO: 34786 - protein, 158 aa, Homo sapiens
  DOMAIN (98)..(132): TRANSCRIPTION PROTEIN FACTOR BTF3 REGULATION NUCL domain identified by eMATRIX, accession number PD02749C, p-value=3.739e- 34, raw score of 13.96
MRRTGAPAQADSRGRGRARGGCPGGEATLSQPPPRGGTRGEEPQMKETIMNQEKLAKLQAQVRIGGKVNMFTNQGTVIHFNNPKVQASLAANTFTITGHAETKQLTEMLPSILNQLGADSLTSLRRLAEALPKQSVDGKAPLATGEDDDDEVPGGFQE

SEQ ID NO: 34787 - protein, 252 aa, Homo sapiens
  DOMAIN (112)..(148): TRANSCRIPTION PROTEIN FACTOR BTF3 REGULATION NUCL domain identified by eMATRIX, accession number PD02749B, p-value=1.316e- 24, raw score of 12.75
  misc_feature (1)...(252): Xaa = X or * as defined in Table 2
EDGSGGGKFPEGARQGGTGQRRRRKAMRRTGAPAQADSRGRGRARGGCPGGEATLSQPPPRGGTRGQEPQMKETIMNQEKTRHTCRAQVRIGGKGTARRKKKVVHRGAASADDKKLQFSLKKLGVNNISGIEEVNMFTNQGTSGSTFNNPXKFQGISWPANTFHHLQGHAEDKGSXQEMLAQHLKPSLGADSLTSLRRLAEALPKQSVDGKAPLATGEDDDDEVPDLVENFXXRLPRNEANLNLSQLLKIKP

SEQ ID NO: 34788 - protein, 509 aa, Homo sapiens
MAITLRELNGLSYEEIAAIMDCPALTIAGYWIRVLGMQKEQLSALMDGETLDSELLNELAHNPEMQKTWESYHLIRDSMRGDTPEVLHFDISSRVMAAIEEEPVFLRDIICEYNCASIPYERDRIMQSVTKIVNAQLIRIELAGKHTIDVLMERLSVRIALIKKLLRLFFPLSLRVRFLLATAAVVLVLSLAYGMVALIGYSVSFDKTTFRLLRGESNLFYTLAKWENNKLHVELPENIDKQSPTMTLIYDENGQLLWAQRDMKGWTNECILVLSGDHSIQQQLQEVREDDDDAEMTHSVAVNVYPATSRMPKLTIVVVDTIPVELKSSYMGLCGQPTNKDVLRRMKKRYPTTFVMVVMLASYFLISMFGGVMVFVFGITFPLLCMEKIVSTKAILDKNTNQCKGMCKGIRTLKSCLCYLINGSSIVEVQDSWLMGAIKFQQESRLLHHRLLSAIRIKQKEEEERNKKEKKDKELESIFPSYGPFHYFKSKTIKEWAPFYGYDFYPLVL

SEQ ID NO: 34789 - protein, 107 aa, Homo sapiens
LIWQLTFTKTIKSCEEYGKIVSTKAILDKNTNQCKGMCKGIRTLKSCLCYLINGSSIVEVQKRLAYAGTLEPSLVHQVYSELSYYKLPGTQVVRIIAEVLRMQDSSE

SEQ ID NO: 34790 - protein, 191 aa, Homo sapiens
  DOMAIN (92)..(130): Nuclear transition protein 2 proteins domain identified by eMATRIX, accession number BL00970C, p-value=5.160e-09, raw score of 14.80
WMEGREKWRGRRKDGRKEGRKEGRKERRREREKGRERKGKERKGKERKGKERKGKERKGRERKGTEGKGTEGKGKERKGKEGKGKERKGKERKGKERKGKEGKGKEQKGKERKGKERKGKERKGKERKGKERKGKEEKGRERKGKEGKGRERKGKEGGKEEGRKERRKEGRKEGKKFSNNGMVEEMQGQCI

SEQ ID NO: 34791 - protein, 447 aa, Homo sapiens
  DOMAIN (275)..(315): kw TRANSCRIPTASE REVERSE II ORF2 domain identified by eMATRIX, accession number DM01354Y, p-value=1.000e-40, raw score of 10.69
MGKYFMTKTPKAMATKAKIDKWDLIKLKNLCAVLFGSVRGVPLSFKNEEMSSQKQAALKDTSDKKDSVLNIATEIKDEQKSGTDYFKTIHPREKDYFSMIDRRWCRYLLDSVAQPVTKDKFALESETISEPYFTNRRTISQQSAEKLSPEQPPLFTLTLKEADPSSKVAMRRKDSPPPGKVSSQKQPAEKATSNEKYSVSNTATEIKGGPISGTVSSQKQPAEKATSDKTDSVLNIATEIKDALKFIWNQKRACITKSILSQKNKAAGITLPDFKLYYKATVTKTAWYWYQNRDIDQWNRTEPSEITPHIYNYLIFDKPEKNKQWGKDSLFNKWCWENWLAIWRKLKLDPFLTPYTKINSRWIKDLNIRPKSIKTLEENLGNTIQDIGMGKDFMSKTQKAMATKDKIDKWDLIKLKSFCTARETTIRVNRQPTKWEKIFATYSLTKG

SEQ ID NO: 34792 - protein, 123 aa, Homo sapiens
LNLDTFLPHNEEKIEHNCQQVIAQTYATRGDHLEVPLTDPNPNLYTDGRSFVEKGLQKVGIKAVKLQIILQMEPQMQSMTKIYRGPLDHPDSPCSNVNDIEGTPPEEISTAQPLLHPRPAGSS

SEQ ID NO: 34793 - protein, 1288 aa, Homo sapiens
  DOMAIN (602)..(613): RNase H domain identified by eMATRIX, accession number PF00075B, p-value=6.276e-12, raw score of 12.56
  misc_feature (1)...(1288): Xaa = X or * as defined in Table 2
MQWEEAEKDPSGSCVFQRPPVALVFPLHSKWTLVNSPPSSGDPYVPGRPAQSGQLSLSPAPPYVLPGPGKIKQAGNNPSLTSIYRSEVFCAHRHLHPPQLVCARGHIGSAHLSVDRGSLIWEVLESTVWARTNEWSPVTRTVLISALASTHIPQPCESRPPVPPEYEVTVLRSQGTAQLPPWSSSTSWRLTDPSCPKHAAWLTDLASSKGPAAGGTGSFSQPGTLTSTRTNPLKKEKSPEDLKQIKIDLGKFSDNPDGYIDVLQGLGQSFDLTWRDIMLLLNQTLTPNEKVPPLLQPESLAISGISVRDQEEQAEQDKQDKKKAITLVMALRQVDFGGSVKGKSWANRMPNRAYFQCGLQGHFKKDCPSRKPQVCLTIESQEVNCLLDAGAAFSVLLSCPGQLSSRSVTIRGVLGQPVTRYFFQPLSCDWGALPFSHAFLIMPESLTPLLEREILVKAGAIIHLNIGEGTPICRLLFEEGISPEVWATEGQYGQAKNAHFVQVKLKDSTSFPYQRQYPLRPEAQQRLQKIVKDLKAQGLVKPYSSPCNTPILGVQKPKRQWRLVQDLRIINEAVFPLYPAIPSPYTLLSQIPEEAEWFTVLDLKDAFFCIPVHPDSQFLFAFEDPSNPTSQLTWTVLPQGFRDSPHLFGQALAQDLSQFSYLDTPVLQCMDDLLLAARSETLCHQATQALLNFLTTCGYKVSKPKAQLCSQQVKCLGLKLSKVTRALSEERIQPILAYPYPKTLKQLRGFLGITGFCRIWIPRYGKIARPLYTLIKETQKANTHLVRWTPEAEAAFHALKKALMQAPVLSLLTGQDFSSYVTKNKQTKKKKTXIALRVLALVXGTSLQPVAYLSKEIDVVAKGQPHCLRVVVAVAVLVSEAVKIIQGRNLTVWTSHDVNGILTAKGDLWLSDNHLLKYQALLLEGPMLRLCTCAALNLDTFLPHNEEKIEHNCQQVIAQTYATRGDHLEVPLTDPNPNLYTDGRSFVEKGLQKVGYAVVSDNGILESNPLTPGTSAQLAKLTRALELGEGKRVNIYTDSKYAYLVLHAHAVIWREREFLTSEGTPIKHQEAIRELLLAVQKPKEVAVLHCRGHQKGKEREIERNRQADIEAKRAARQDPPLEMLIEGPLVWGNPLWETKPQYSEEEIEWGISRGHSFLPSGWQATEQGKIPLPAANQWKLLKTTHQNFHLCIDSTHQMAKLLFTGPGLFKTLKQIVGACKFVSSRIKAVKLQIILQMEPQMQSMTKIYRGPLDHPDSPCSNVNDIEGTPPEEISTAQPLLHPRPAGSS

SEQ ID NO: 34794 - protein, 137 aa, Homo sapiens
LRSQGTAQLPPWSSSTSWRLTDPSCPKHAAWLTDLASSKGPAAGGTGSFSQPGTLTSTRTNPLKKEKSPEDLKQIKIDLGKFSDNPDGYIDVLQGLGQSFDLTWRDIMLLLNQTLTPNEKVPPLLQPESLAISGISV

SEQ ID NO: 34795 - protein, 93 aa, Homo sapiens
  misc_feature (1)...(93): Xaa = X or * as defined in Table 2
LCFPYAERPDLQFLCXDLCARSPYLLQAQKYLQEFXAIPHLDQQTEPPDPSVSFYLLDCTLNCTAQHKTCXKKSIGLXEQNQQTLSSIPYSHT

SEQ ID NO: 34796 - protein, 286 aa, Homo sapiens
MEWEDNLPLELGRTVAKLLSDHSQTPLGIQMFLLFSLSLRKSPLVCLSYLFNFRFTLESEVQHLSGAITLTAWPKIPFLGIREAKSPRSENTRLATILEAGHRHLGTSVSKDHPVTFWRPRRDLQSDLKQIKIDLGKFSDNPDGYIDVLQELGQSFDLTWRDIMLLLNQTLTPNERSATITAAREFGDLWYISQVVAAVAGLVSEAVKIIQGLTVWTSHDVNGILTAKGDLWLSDNHLLKYQALLLEGPVLRLRTCATLNPATFLPDNEEKIEHNCQQVIAQTYAT

SEQ ID NO: 34797 - protein, 340 aa, Homo sapiens
YPSLGRHQQVMFADFGTTLKQDFRLLGQTSVDRLLQLSQGQAVKGNQLLPVSLVKRKTTLAPNTQTASPRALADSLMQLARQVSRLESGHNFKDDEYPQRPCPLPMSEYRLGSTPPQNMIETEGNNKECGTILYSTCGIKLIPARRITNVLRILSSQHDFLPTRPFRSLQGHFQGGLRRQQMMVMEGVWVLSCAMDLLCRSAVCPLAPTKSNTCLPDVCTYRPAKLTAASPSEGRQSLLLEGPVLRLRTCATLNPDTFLPDNEEKIEHNCQQVIAQTIKAIKLQIVPQMEPQMHSMTKIYRRPLDQPASPCSDVNDIGATPPEDISIARPLLCPNSAGSS

SEQ ID NO: 34798 - protein, 896 aa, Homo sapiens
  DOMAIN (695)..(738): CTF/NF-I proteins domain identified by eMATRIX, accession number BL00349C, p-value=1.000e-09, raw score of 9.33
  DOMAIN (164)..(349): Reverse transcriptase domain identified by PFam, accession name rvt, E-value=5.3e-33, PFam score of 123.1
  misc_feature (1)...(896): Xaa = X or * as defined in Table 2
PQVCLTIESQEVNCLLDAGAAFSVLLSCPGQLSSRSVTIRGVLGQPVTRYFFQPLSCDWGALPFSHAFLIMPESLTPLLEREILVKAGAIIHLNIGEGTPICRLLFEEGISPEVWATEGQYGQAKNAHFVQVKLKDSTSFPYQRQYPLRPEAQQRLQKIVKDLKAQGLVKPYSSPCNTPILGVQKPKRQWRLVQDLRIINEAVFPLYPAIPSPYTLLSQIPEEAEWFTVLDLKDAFFCIPVHPDSQFLFAFEDPSNPTSQLTWTVLPQGFRDSPHLFGQALAQDLSQFSYLDTPVLQCMDDLLLAARSETLCHQATQALLNFLTTCGYKVSKPKAQLCSQQVKCLGLKLSKVTRALSEERIQPILAYPYPKTLKQLRGFLGITGFCRIWIPRYGKIARPLYTLIKETQKANTHLVRWTPEAEAAFHALKKALMQAPVLSLLTGQDFSSYVTKNKQTKKKKTXIALRVLALVXGTSLQPVAYLSKKTDVVAKGWPHCLWVMAAIAVLISKAVKMIQXRDLTVWTSHDVNGILTAKGDLWLSDNHLLKYQALLLEGPMLRLCTCAALNLDTFLPHNEEKIEHNCQQVIAQTYATRGDHLEVPLTDPNPNLYTDGRSFVEKGLQKVGYAVVSDNGILESNPLTPGTSAQLAELIALTWALELGEGKRVNIYTDSKYAYLVLHAHAVIWREREFLTSEGTPIKHQEAIRELLLAVQKPKEVAVLHCRGHQKGKEREIERNRQADIEAKRAARQDPPLEMLIEGPLVWGNPLWETKPQYSEEEIEWGISRGHSFLPSGWQATEQGKIPLPAANQWKLLKTTHQNFHLCIDSTHQMAKLLFTGPGLFKTLKQIVGACEVCQRNNPLPYRQAPSGEQRTGHYPGEDWQLILPTSPNLRDFSIY

SEQ ID NO: 34799 - protein, 542 aa, Homo sapiens
  DOMAIN (359)..(431): Globin domain identified by PFam, accession name globin, E- value=1.8e-13, PFam score of 51.4
MTSMTPLKPRMGTFTGTNVPRYPVNTSDIKNSGDKLNGGEQRCVARVDPQFTFATRYLDFLDQTREHLLLCADDVQVALKFFGFFHSFFDGTDHVERLLRQVIVFAFHDAFKATDGVFQGDVFTRRTGEYFCHEERLGQEALDLTSTRYHQFVFFRQFIHTQDGDDVFQFLITLQDGLNATRGVVVFLTNHQRVQLTAGGVQRAHAVAYASAEVVDVYAWLVRQFFHRHDVTVRQIHYVDVIAYASTIFGRIIVTKNRQRVATAYSNLGDWREALTTRQKLIAQDYKVSYSLAKSCKSDLKKYRCNVDNLPRSREAKCERNIIVDEAGFEAAMEEQRRRAREASGFVIMQFRHRTIAAYASNIENLPALLPAVEKIAQKHTSFQIKPEQYNIVGEHLLATLDEMFSPGQEVLDAWGKAYGVLANVFINREAEIYNENASKAGGWEGTRDFRIVAKTPRSALITSFELEPVDGGAVAEYRPGQYLGVWLKPEGFPHQEIRQYSLTRKPDGKGYRIAVKREEGGQVSNWLHNHANVGDVVKLVA

SEQ ID NO: 34800 - protein, 814 aa, Homo sapiens
  DOMAIN (518)..(531): LDL-receptor class A (LDLRA) domain proteins domain identified by eMATRIX, accession number BL01209, p-value=9.250e-14, raw score of 9.31
  DOMAIN (208)..(535): Low-density lipoprotein receptor domain identified by PFam, accession name ldl_recept_a, E-value=1.5e-39, PFam score of 144.9
PEPEPEPQPEPEPEPQPEPEPEPQPEPEPEPRGRRRRPRAAGPGMEKRAAAGLEGAPGARAQLAVVCLVNIFLTGRLSSAVPALAACSGKLEQHTERRGVIYSPAWPLNYPPGTNCSWYIQGDRGDMITISFRNFDVEESHQCSLDWLLLGPAAPPRQEAFRLCGSAIPPAFISARDHVWIFFHSDASSSGQAQGFRLSYIRGKLGQASCQADEFRCDNGKCLPGPWQCNTVDECGDGSDEGNCSAPASEPPGSLCPGGTFPCSGARSTRCLPVERRCDGLQDCGDGSDEAGCPDLACGRRLGSFYGSFASPDLFGAARGPSDLHCTWLVDTQDSRRVLLQLELRLGYDDYVQVYEGLGERGDRLLQTLSYRSNHRPVSLEAAQGRLTVAYHARARSAGHGFNATYQVKGYCLPWEQPCGSSSDSDGGSLGDQGCFSEPQRCDGWWHCASGRDEQGCPACPPDQYPCEGGSGLCYTPADRCNNQKSCPDGADEKNCFSCQPGTFHCGTNLCIFETWRCDGQEDCQDGSDEHGCLAAVPRKVITAALIGSLVCGLLLVIALGCAFKLYSLRTQEYRAFETQMTRLEAEFVRREAPPSYGQLIAQGLIPPVEDFPVYSASQASVLQNLRTAMRRQMRRHASRRGPSRRRLGRLWNRLFHRPRAPRGQIPLLTAARPSQTVLGDGFLQPAPGAAPDPPAPLMDTGSTRAAGDRPPSAPGRAPEVGPSGPPLPSGLRDPECRPVDKDRKVCREPLADGPAPADAPREPCSAQDPHPQVSTASSTLGPHSPEPLGVCRNPPPPCSPMLEASDDEALLVC

SEQ ID NO: 34801 - protein, 141 aa, Homo sapiens
  DOMAIN (16)..(29): LDL-receptor class A (LDLRA) domain proteins domain identified by eMATRIX, accession number BL01209, p-value=1.600e-13, raw score of 9.31
  DOMAIN (1)..(34): Low-density lipoprotein receptor domain identified by PFam, accession name ldl_recept_a, E-value=0.0018, PFam score of 25.0
PRGARSTRCLPVERRCDGLQDCGDGSDEAGCPDLACGRRLGSFYGSFASPDLFGAARGPSDIHCTWLVDTQDSRRVLLQLELRLGYDDYVQVYEGLGERGDRLLQTLSYRSNHRPVSLEAAQGRLTVAYHARARSHPLMNE

SEQ ID NO: 34802 - protein, 172 aa, Homo sapiens
  DOMAIN (69)..(96): G-protein coupled receptors proteins domain identified by eMATRIX, accession number BL00237C, p-value=7.923e-13, raw score of 13.19
  DOMAIN (11)..(130): 7 transmembrane receptor (rhodopsin family) domain identified by PFam, accession name 7tm_1, E-value=4.5e-09, PFam score of 31.0
RLRFAVFTGAFHALSFLLSFVVLCCTYLKGLKVARFHCKRIDVMHHADARAAGGPAPQCAGTLSEEQKRRRQRATKKISTFIGTFLVCFAPYVITRLVELFSTVPIGSHWGVLSKCLAYSKAASDPFVYSLLRHQYRKSCKEILNRLLHRRSIHSSGLTGDSHSQNILPVSE

SEQ ID NO: 34803 - protein, 110 aa, Homo sapiens
  misc_feature (1)...(110): Xaa = X or * as defined in Table 2
ERGRQEMSAKLRPPAEPPCVPARISPXRPSXRQXMERRCPPWRCSPMPCCFFREHALQVRCGPTSADCGRDPLFSPHPKPLPHPVPDIGWVATAGAQRSSSPVPSSLFVW

SEQ ID NO: 34804 - protein, 216 aa, Homo sapiens
  DOMAIN (62)..(88): MATRIXIN SIGNATURE domain identified by eMATRIX, accession number PR00138D, p-value=5.101e-11, raw score of 16.56
  DOMAIN (150)..(191): Disintegrin domain identified by PFam, accession name disintegrin, E-value=2.3e-12, PFam score of 40.4
TGSWGGGGADQLRPALTTALMPPDNRFGENTPAAPANGHCAPEPDITLVQDHSELPIGAAATMAHEIGHSLGLSHDPDGCCVEAAAESGGCVMAAATGVRGHPFPRVFSSCSRRQLRAFFRKGGGACLSNAPDTRTPGAAALCGNGFVEAGEECYCVSGQECRDLCCFAHNCSLRPGAQCAHGDCCVRCLVRCMEGSGSHQLPRLVPGGDSAEILM

SEQ ID NO: 34805 - protein, 278 aa, Homo sapiens
  DOMAIN (6)..(45): PROTEIN ZINC FINGER ZINC-FINGER METAL-BINDING NU domain identified by eMATRIX, accession number PD01066, p-value=6.170e-29, raw score of 19.43
  DOMAIN (141)..(276): Zinc finger, C2H2 type domain identified by PFam, accession name zf-C2H2, E-value=3.3e-33, PFam score of 123.8
MGPLTFRDVKIEFSLEEWQCLDTAPGNLYRDVMLENYRNLVFLVMCSHFAQDVWPEHSIKDSFQKVILRTYGKYGHENLQLRKDHKSVDACKVYKGGYNGLNQCLTTTDSKIFQCDKYVKVFHKFPNVNRNKIRHTGKKPFKCKNRGKSFCMLSQLTQHKKIHTREYSYKCEECGKAFNWSSTLTKHKIIHTGEKPYKCEECGKAFNRSSNLTKHKIIHTGEKPYKCEECGKAFNRSSTLTKHKRIHTEEKPYKCEECGKAFNQFSILNKHKRIHMGR

SEQ ID NO: 34806 - protein, 196 aa, Homo sapiens
  DOMAIN (54)..(76): Methionine aminopeptidase subfamily 1 proteins domain identified by eMATRIX, accession number BL00680, p-value=7.333e-15, raw score of 14.37
  DOMAIN (11)..(196): metallopeptidase family M24 domain identified by PFam, accession name Peptidase_M24, E-value=6.8e-13, PFam score of 56.3
MLGKVQQQEQTIAKDLVVTKYKMCGGTDIANRVLRSLVEASSSGGQDYILKEGDLVKIDLGVHVDGFIANVTHTFVVDVAQGTQVTGRKGDVIKAAQLCVEAALCLVKPGNQNIQVREAWSKVALSFNCMPIEGMLSHQLKQHVIDGEKNIIQNPTDQQKKDHEKAEFEVHEVYAADVLVSSGEGKAKDAGQRTTI

SEQ ID NO: 34807 - protein, 159 aa, Homo sapiens
  DOMAIN (30)..(53): Methionine aminopeptidase subfamily 2 proteins domain identified by eMATRIX, accession number BL01202C, p-value=5.846e- 11, raw score of 15.41
  misc_feature (1)...(159): Xaa = X or * as defined in Table 2
LSHCLPLQTTEVGGFGNLLGYWIACSIGCVLSTGMLSHQLKQHVIDGEKTIIQNPTDQQKKDHEKAEFEVHEVYAVDVLVSSGEGKVRRVPELAKRGDXECSPDQMLLKLLFQAKDAGQRTTIYKRDPSKQYGLKMKTSRAFFSEVERRFDAMPFTLRY

SEQ ID NO: 34808 - protein, 465 aa, Homo sapiens
  DOMAIN (170)..(192): Methionine aminopeptidase subfamily 1 proteins domain identified by eMATRIX, accession number BL00680, p-value=4.130e-17, raw score of 14.37
  DOMAIN (77)..(346): metallopeptidase family M24 domain identified by PFam, accession name Peptidase_M24, E-value=1.4e-44, PFam score of 161.6
  misc_feature (1)...(465): Xaa = X or * as defined in Table 2
GTSAPQPARSQLLALACLPAPLLARAFARPLLEDRGDSDHSLWLGRETEAAAAQGKRGCSGGSRKMSGEDEQQEQTIVDDSLVVTKYKMGGDIANRVLRSLVEASSSGVSVLSLCEKGDAMIMEETGKIFKKEKEMKKGIAFPTSISVNNCVCHFSPLXKSDQDYILKEGDLVKIDLGVHVDGFIANVAHTFVVDVAQGTQVTGRKADVIKAAHLCAEAALRLVKPGNQNTQVTEAWNKVAHSFNCTPIEGMLSHSLKQHVIDGEKPXFQNPTDKQKRAHEKADFEVHDVYAVEGLVKPQERARPKDAGQRTTIYKRDPSKQYGLKMKTSRAFFSEVERRFDAMPFTLRAFEDEKKARMGVVECAKHELVWQPFNVLYSGREGDFVCPVLNFTVLLMPNGPMLITSGPFEPDLYKSQMEVQDAELKALLQSSASRKTQKKKKKKASKTAENATSGETLEENEAGD

SEQ ID NO: 34809 - protein, 62 aa, Homo sapiens
  DOMAIN (1)..(55): Arginosuccinate synthase domain identified by PFam, accession name Arginosuc_synth, E-value=1.3e-21, PFam score of 70.5
PCIARKQVEIAQREGAKYVSHGATGKGNVQGDYEPTDATGFININSLRLKEYHRLQSKVTAK

SEQ ID NO: 34810 - protein, 195 aa, Homo sapiens
  DOMAIN (16)..(53): Argininosuccinate synthase proteins domain identified by eMATRIX, accession number BL00564D, p-value=3.400e-31, raw score of 22.43
  DOMAIN (1)..(159): Arginosuccinate synthase domain identified by PFam, accession name Arginosuc_synth, E-value=2.1e-71, PFam score of 228.6
MPEFYNRFKGHSDLTEYAKQRGIPTPVTPKNPWSMDENLMHISCEAGILENPENQAPPALYTKTQDPAKTPNTPDILEIEFKKGVPVKLFMYLNEVAGKHSVGNIAIVENRFIGTKSRGIYRAPAGTILCYAHLDIEAFTMYREVHKIKQCRGLKFAELHSGAARPQLCSLVPLKPANVVIEGKDGGQLRWRAVK

SEQ ID NO: 34811 - protein, 433 aa, Homo sapiens
  DOMAIN (112)..(157): Argininosuccinate synthase proteins domain identified by eMATRIX, accession number BL00564C, p-value=1.000e-40, raw score of 25.47
  DOMAIN (8)..(315): Arginosuccinate synthase domain identified by PFam, accession name Arginosuc_synth, E-value=5.5e-151, PFam score of 481.4
  misc_feature (1)...(433): Xaa = X or * as defined in Table 2
MSSKGSVVLAYSGGLDTSCILVWLKEQGYDVIAYLANIGQKEDFEEARKKALKLGAKKVFIEDVSREFVEEFIWPAIQSSALYEDRYLLGTFFARPCIARKQVEIAQREGAKYVSHGATGKGNDQVRFELSCYSLAPQIKVIAPWRMPEFYNRFKGRNDLMEYAKQHGIPIPVTPKNPWSMDENLMHISYEAGILENPKNQAPPGLYTKTQDPAKAPNTPDILEIEFKKGVPVEGGPTFKDGTTHQTFLELFMYLNEVAGKHGVGPYLTSWENRFHWELKSRGILRRPQAGTILYHAHLDIEAFTMGGDRAQIPNQGLGFEFVELGVYRFSGTAPECELVGPCLRQSPQERVEGKSAGVPSLKGPRCTSLGPEVPHCSLYNEELVKHGTCQGDYEPNXLPPGFIQTSISLKAEGNYHRLPRAKVTAQIRPRVQ

SEQ ID NO: 34812 - protein, 146 aa, Homo sapiens; identical to SEQ ID NO: 34618
  DOMAIN (16)..(35): Eukaryotic  RNA-binding region RNP-1 proteins domain identified by eMATRIX, accession number BL00030A, p-value=1.000e- 12, raw score of 14.39
  DOMAIN (58)..(128): RNA recognition motif. domain identified by PFam, accession name rrm, E-value=6.4e-24, PFam score of 92.9
  misc_feature (1)...(146): Xaa = X or * as defined in Table 2

SEQ ID NO: 34813 - protein, 369 aa, Homo sapiens
  DOMAIN (248)..(283): Prion protein domain identified by eMATRIX, accession number BL00291A, p-value=2.034e-09, raw score of 4.49
  DOMAIN (42)..(120): RNA recognition motif. domain identified by PFam, accession name rrm, E-value=0.00047, PFam score of 26.9
  misc_feature (1)...(369): Xaa = X or * as defined in Table 2
KTTTLEDNLGNTIQDIGPGKDFMMKIPKANATKIKIDEWDLIKLKSFCTAKATTKRVNKHDESLRSHYEXWGMLTDCVVMRDPNTKRSRGCGFVTYATVEEVDAATNARPHKVDGKVVEPKRTVSREDSQRPGAHLTVKKIFVGGIKEDTGGFAFVTFDDHDSVDKIVIPKYHTVNGHNCEVRKALSKQEMASASSSQRGRSGRGGGFGGNENFGCGGNFSGHGGFGGSHDGGGYGGSGDGYNGFGNDGGYPGGGPGYSGGSRGYGSGGQGCGNQDSGYGRSGSYDSCNKGGRGGFGSGSGSNFGGGGSYNDFGNYNNQYSNFGPMKGGNFGGRRSGPXGDGGQYFAKPPNHSGYGGSSSSSSYGSGRR

SEQ ID NO: 34814 - protein, 254 aa, Homo sapiens; identical to SEQ ID NO: 34619
  DOMAIN (16)..(35): Eukaryotic  RNA-binding region RNP-1 proteins domain identified by eMATRIX, accession number BL00030A, p-value=6.824e- 11, raw score of 14.39
  DOMAIN (16)..(86): RNA recognition motif. domain identified by PFam, accession name rrm, E-value=2.4e-17, PFam score of 71.0

SEQ ID NO: 34815 - protein, 109 aa, Homo sapiens
  DOMAIN (3)..(13): Eukaryotic  RNA-binding region RNP-1 proteins domain identified by eMATRIX, accession number BL00030B, p-value=1.900e- 11, raw score of 7.03
KKRGFAFVTFDDHDSMDKIVIPKYHTVNGHNCEVRKALSKQEMASASSSQRGQSGSGNFGGGCGGGFCGNDNFGHGGNVSGRGGFGGSHGGGGYGGSGDGYNGFGNDGI

SEQ ID NO: 34816 - protein, 558 aa, Homo sapiens
  DOMAIN (425)..(470): kw TRANSCRIPTASE REVERSE II ORF2 domain identified by eMATRIX, accession number DM01354N, p-value=6.550e-34, raw score of 13.17
  DOMAIN (62)..(132): RNA recognition motif. domain identified by PFam, accession name rrm, E-value=1.4e-23, PFam score of 91.8
  misc_feature (1)...(558): Xaa = X or * as defined in Table 2
MRDPNTKRSRGFGFVTYATVEEVDAAMNTTPHKVDGRVVEPKRAVSREDSQRPGAHLTVKKIFVGGIKEDTEEHHLRDYFEQYGKIEVIEIMTDRGSGKKRGFAFVTFDDHDSVDKIVIQKYHTVKGHNCEVRKALPKQEMASASSSQRGRRGSGNFGGGRGDGFGGNDNFGRGGNFSGRGGFGGSCGGGGYGGSGDGYNGFGNDGSNFXGGGSYNDSGNYNNQSSKFEPMKGGNFGGRSSGPYGGGGQYFAKPQNQAARCVAARWLFRTEARLVFLQKFPPWAVVEVVTVIVAAPAAATATTRDGGGCSRNCNIPEVFPELLGCPNRRGPPGGVREKQQQTNSKSTRRQEITKTIAELKEIETRKTLQKINESRSWFYEKINKVDRLLDRLIKKKREKSQIDAIKNDIGDIVTDPAEIQTTIKEYYKRLYANELENLEEMDKFLATYSLHSLNQEEVESLNKPVTSSEVEAVTNSLPTKKSPGPDGFTVLLEVLAPAIRQEKEIKHIPIGREEVKLSLFADDVIVYLENPIVSAQNLLKLISNFSKLSGYKINVQKS

SEQ ID NO: 34817 - protein, 474 aa, Homo sapiens
  DOMAIN (157)..(176): Eukaryotic  RNA-binding region RNP-1 proteins domain identified by eMATRIX, accession number BL00030A, p-value=1.000e- 12, raw score of 14.39
  DOMAIN (157)..(334): RNA recognition motif. domain identified by PFam, accession name rrm, E-value=2.6e-21, PFam score of 84.2
  misc_feature (1)...(474): Xaa = X or * as defined in Table 2
MKCLKFINHKEILEASERKQAESLDFPFKKLRWHLCEGWIEEERDESRKSETIFKDLFKVPVLKETIYYKFYGPPVYQIETVYFMALSPPKSKQFDKTKQNNNNKKTHQFVIVFFKTDEHLSARGRRRRSIVKVSLLPAVIGLKSKFLKKPDQLRKLFIGGLSFETTDESLRSHFEQWGTLTDCVVMRDPNTKRSRGFGFVTYATVEEVDAAMNARPHKVDGRVVEPKRAVSREDSQRPGAHITLVKKIFVGGIKEDTEEHHLRDDYFEEIILNSMEKIEVIEIMTDRGSGKKRGFAFVTFDDHDSVDKIVIQKYHTVGNGHNCEVRKALSKQEDGXVLHPAQRGRSGSGKLLVVGRGRWFSVGMDNFGRGGNFSWSVVAFGGTRGGGGYGWQWGMAYNGFGNDGSNFGGGGSYNDFGNYNNQSSNFGPMKGGNFGGRSSGPYGGGGQYFAKPRNQGGYGGSSSSSNYGSGRRF

SEQ ID NO: 34818 - protein, 160 aa, Homo sapiens
  DOMAIN (37)..(88): Ribosomal protein L30 proteins domain identified by eMATRIX, accession number BL00634, p-value=6.838e-28, raw score of 34.38
  DOMAIN (36)..(84): Ribosomal protein L30p/L7e domain identified by PFam, accession name Ribosomal_L30, E-value=4e-17, PFam score of 61.3
TVLNSMSVILAISTLLKIITGELLQSFGDGLLWNLVIGIRGIDGLSPKVRKVLQLLRLRQIFNGTFVKLIKVTVNMLRTVEPYIAWGYPNLKSVNELIYKHGYGKISKKRIALTDNVLIARSLGKYGIICMEDLIYEIYTVGKRFKEANNFLWPFKLSSP

SEQ ID NO: 34819 - protein, 661 aa, Homo sapiens
  DOMAIN (235)..(260): 7 kw REVERSE TRANSCRIPTASE RNA POLYMERASE domain identified by eMATRIX, accession number DM00895E, p-value=3.333e-11, raw score of 15.72
  DOMAIN (206)..(481): Reverse transcriptase domain identified by PFam, accession name rvt, E-value=4.6e-82, PFam score of 286.0
MLFETKENKDTTYQNLRDAFKAVCRGKFIALNAHKRKQERSKIDTLTSQFKELEKQEPIHSKASRRQEITKIRAELKINKIDRLLARLIKKKREKNQIDAIKNDKGDITTDPTEIQTTIREYYKHLYANKLENLEEMDKFLNTYTLPRLNQEEVESLNRPITGSEIVAIINSLPTKKSPGPDGFTAEFYQRYKEELVPFLLKLFQSIEKEGILPNSFYEAGIILIPKLGRDTTKKENFRPISLMNIDAKILNKILANRIQQHIKKLIHHDQVGFIPGMQGWFNILKSINVIQHINRAKDKNHISISIDAEKAFDKIQQPFMLKTLNKLGIDGTYFKIIRAIYDKPTANIILNGQKLGAFPLKTGTRQGCPLSPLLFNIVLEVLARAIRQEKEIKGIQLGKEEVKLSLFADDMIVYLENPIVSAQNLLKLISNFSKVSGYKINVQKSQAFLCTNNRQTESQIMSELPFTIASKRIKYLGIQLTRDVKDPFKENYKPLLKEIKEETNKWKNIPCSWVGRINIVKMAILPKKYLRLGNLQRKEVLLAHGSAGYTGRKAASARLLGKPQKTFTQGEGKARAVTSHGPSRKEKKSGGCTGSVVSPSHEGLRKLTIIQEAKGGASVLDGESGSKREKRSSQGCFNNQLSCELRKNPLVTKEIVLNDS

SEQ ID NO: 34820 - protein, 509 aa, Homo sapiens
  DOMAIN (237)..(284): kw TRANSCRIPTASE REVERSE II ORF2 domain identified by eMATRIX, accession number DM01354V, p-value=1.000e-40, raw score of 12.97
  DOMAIN (46)..(250): Reverse transcriptase domain identified by PFam, accession name rvt, E-value=3.8e-06, PFam score of 17.7
MQLKAKARELREECRSLRSRWNQLEERVSVMEDEMNEMKREGKFREKRIKRNEQSLQEIWDYVKRPNLRLIGVPESDGENATRLENTLQDIIQENFPNLARQANIQIQEIQRMPQRYSSRRASPRHIIVRFTKVEMKEKMLRAAREKVLEVLARAIRQEKEIKGIQLGKEEVKLSLFADDMIVYLENPIISAQNLLKLISNFSKLSGYKINVQKSQAFLYTNNRQTESQIMSELPFTIASKRIKYLGIQLTRDVKDLFKENYKPLLNEIKEDTNKWKNSPCSWVGRINIMKMAILPKRERVELLTLKGELAMQLYMGVAGGSSRDSKNSVKELLNKAIFHLHTFFQLSATHPPTPCGPQHGLKPDPRPENWHSRQDEMSRSSATEGSQNPKEPWEADKLWYHRTGQKPLAAALLSRDENLGCILPEGHNLSLLVPVTALSFRLLTCPNSIMDWAHTYAKVINVSSCWICTTLPAAAADSLPWYMNSASVKNWTWLETWGPMDNGWDVTR

SEQ ID NO: 34821 - protein, 736 aa, Homo sapiens
  DOMAIN (515)..(558): kw TRANSCRIPTASE REVERSE II ORF2 domain identified by eMATRIX, accession number DM01354T, p-value=1.000e-40, raw score of 9.48
  DOMAIN (403)..(637): Reverse transcriptase domain identified by PFam, accession name rvt, E-value=5.7e-40, PFam score of 146.2
MAILPKVIYRFNAIPIKLSMTFFTELEKTTLEFIWNQKRARITKSILSQKNKAEGITLPDFKLQYKATVTKTAWYSYQNRDIDQWNRTEPSEIVPCIYNYLIFDKPDKNKKWGKDSLFNKWCWENWLVICRKLKLDLFLTPYTKINSRWMKDLNVRPKTIKTLEENLGNTIQDIGMGKDLMSKTPKAMATKAKIDKWDLIKLKSFCTAKETTIRVIRQPTKWEKIFTTYSSDKGLISRIYSELKEIYKKKTNNPIKKWAKDMNRHFSKEDIYAAKKHMKKCSSSLAIREMQIKTTMRYHLTPVRMAIIKKSGNNRDMDETGNHHSQQTTARTKNQTPHVLTHRWELNNENTWTQEGEHHTLETVVGDMDEAGNHHSQQNITRTENQTPHVLTHKRELNNENTWTQGGEHNIPGPVVGSWRALNTGLRSFDFIPGTVREPVKILGRRLTSDLQIRNSPLEAAVQDAEKAFDKIQQPFMLKTLNKIAIDGTYLKIIRAIYDKPTANIILNGQKLEAFPLKTGTRQGCPLSPLLCNIVLEVLARAIRQEKEIKGIQLGKEEVKLSLFADDMIVYLENPIVSAQNLLKLISNFSKVSGYKINMQKSQAFLYTNNRQTESQIMSELPVTIASKRIKHLGIQLTRAVKDLFKENYKPLLNEIKEDTNKWKNIPCSWIGTINMVKMAILPKVIYRFNAIPIKLPRTFFTELETTTLEFIWNQKSLHCQVNPKPKEQSWRHHAT

SEQ ID NO: 34822 - protein, 826 aa, Homo sapiens
  DOMAIN (465)..(511): kw TRANSCRIPTASE REVERSE II ORF2 domain identified by eMATRIX, accession number DM01354O, p-value=1.000e-40, raw score of 8.73
  DOMAIN (498)..(773): Reverse transcriptase domain identified by PFam, accession name rvt, E-value=3e-80, PFam score of 280.0
MFFETNENEDTSYQNLRDTFKVVFRWKIIALNAHKRKQERSKIDTLTSKLKELEKQQQTNSKASRRHEITNIRAELKEIETQKTLQKINESVNWFFEKIIKIDRLLARLIKKKREKNQIDSIKNDIEDITTDPVETQTTVREYFKHLYANKLENLEEMDKFLDTYILPSLSQEEVEPLNRPITGSEIEAIINSLPTKKSPGPDRFTAKFYQRITNTEKCLKELMELKAKARELREECRSLRSRCDQLEERVSVMEDEMNEMNAIKLELRIKNLTQNRSTTWKLNNLLLNDYWVHSEMKAEIKMFFETNENKDTTYQNLWDTFEAKSKSKQHSKASRRQEITKIRAELKEIEIQKTLQKINESRSWFFERINKIDRPLARLIKKKREKNLIDAIKTDKGDITTNPTEIQTTIREYYKHLYANKLENREEMDKFLDTYTLPRLNEEEVESLNTPITGSEIVAIINSLPTKKSPGPDGFTAELYQRYKEELVPFLLKLFQSIEKEGILPNSFYEASIILIPKPGRDTTKKENFRPISLMNIDAKILNKILAKGIQQHIKKLIHHDQVGFIPGMQGRFNIRKSINVIQHINRTKDKNHMIISIDAEKAFDKIQQPFMLKTLNKLGIDGTYFKIIRAIYDKPTASIILNGQKLEAFRLKTGTRQGCPLSPLLFNIVFEILARAIRQEKEIKGIQLGKEEVKLSLFAGDMIVYLENPIVSAQNLLKLISNFSKVSGYKINVQKSQAFLYTNNRQTESQIMSELPFTIASKRIKYLGIQLTRDVKDLFKENYKPLLKEIKEDTNKWKNIPCSWVGRINIVKMAILPKNWKNLL

SEQ ID NO: 34823 - protein, 514 aa, Homo sapiens
  DOMAIN (45)..(90): kw TRANSCRIPTASE REVERSE II ORF2 domain identified by eMATRIX, accession number DM01354N, p-value=1.000e-40, raw score of 13.17
  DOMAIN (129)..(404): Reverse transcriptase domain identified by PFam, accession name rvt, E-value=4.6e-82, PFam score of 286.0
INKIDRLLARLIKKKREKNQIDAIKNDKGDITTDPTEIQTTIREYYKHLYANKLENLEEMDKFLNTYTLPRLNQEEVESLNRPITGSEIVAIINSLPTKKSPGPDGFTAEFYQRYKEELVPFLLKLFQSIEKEGILPNSFYEAGIILIPKLGRDTTKKENFRPISLMNIDAKILNKILANRIQQHIKKLIHHDQVGFIPGMQGWFNILKSINVIQHINRAKDKNHISISIDAEKAFDKIQQPFMLKTLNKLGIDGTYFKIIRAIYDKPTANIILNGQKLGAFPLKTGTRQGCPLSPLLFNIVLEVLARAIRQEKEIKGIQLGKEEVKLSLFADDMIVYLENPIVSAQNLLKLISNFSKVSGYKINVQKSQAFLCTNNRQTESQIMSELPFTIASKRIKYLGIQLTRDVKDPFKENYKPLLKEIKEETNKWKNIPCSWVGRINIVKMAILPKKYLRLGNLQRKEVLLAHGSAGYTGRKAASARLLGKPQKTFTQGEGKARAVTSHGPSRKEKKSG

SEQ ID NO: 34824 - protein, 716 aa, Homo sapiens
  DOMAIN (37)..(83): kw TRANSCRIPTASE REVERSE II ORF2 domain identified by eMATRIX, accession number DM01354O, p-value=1.000e-40, raw score of 8.73
  DOMAIN (70)..(345): Reverse transcriptase domain identified by PFam, accession name rvt, E-value=5.1e-89, PFam score of 309.1
MDTFLDTYTLPRLNQEEVESLNRPITGSEIVAIINSLPTKKSPGPDGFTAEFYQRYKEELVPFLLKLFQSIEKEGILPNSFYEASIILIPKPGRDTTKKENFRPISLMNIDAKILNKILANRIQQHIKKLIHHDQVGFIPGMQGWFNIRKSINVIQHINRAKDKNHMIISIDAEKAFDKIQQPFMLKTLNKLGIDGTYFKIIRAIYDKPTANIILNGQKLEAFPLKTGTRQGCPLSPLLFNIVLEVLARAIRQEKEIKGIQLGKEEVKLSLFADDMIVYLENPIVSAQNLLKLISNFSKVSGYKINVQKSQAFLYTNNRQTESQIMGELPFTIASKRIKYLGIQLTRDVKDLFKENYKPLLKEIKEETNKWKNIPCSWVGRINIVKMAILPKLIGNCSKISGYKINVQKSQAFLYTNNRQTESQIMSELAFTIASKKIKYLGIQLTRDVKDLFKENYKPLLNEIKEDTNKWKNIPCSWVGRINIVKMAILPKSRVCDLRYLHWIYGSVSYGKGNAWITRKRSTTQKWTGAALQPLSRTSLKDTGEGESSQWAELRAVYLLVHFAWKEKWPHVWLYTDSWAVSSGSAGWSGTWKKHDWKIGDKEIWRRASYLVADYIGPLPSWKGQRFVLTGIDTYSGYGFAYPACNASAKTTIRGFMECLIHHHGIPHSIASDQGTHFMAKEVQQWAHSHGIHRSYHVLHHPEAAGLIERWNGLLK

SEQ ID NO: 34825 - protein, 248 aa, Homo sapiens
  DOMAIN (136)..(183): kw TRANSCRIPTASE REVERSE II ORF2 domain identified by eMATRIX, accession number DM01354V, p-value=1.000e-40, raw score of 12.97
  DOMAIN (1)..(149): Reverse transcriptase domain identified by PFam, accession name rvt, E-value=0.0089, PFam score of -30.1
MRKEKIPHQAPFAIQAAQLLGRAIGAGLFAITPAGERGMCCKAIKLVLEVLARAIRQEKEIKGIQLGKEEVKLSLFADDMTVYLENPIVSAQNLLKLISNFSKVSGYKINVQKSQAFLYTNNRQTESQIMSELLFTIASKRIKYLGIQLTRDVKDLFKENYKPLLNEIKEDTKKWKNIPCSWLGRINIVKMAILPKRCLDPVRTGGSRRQNPLWATESNDLDSVRAVKGRDADLVGTAERKDREILQT

SEQ ID NO: 34826 - protein, 723 aa, Homo sapiens; identical to SEQ ID NO: 32661
  DOMAIN (317)..(363): kw TRANSCRIPTASE REVERSE II ORF2 domain identified by eMATRIX, accession number DM01354O, p-value=1.000e-40, raw score of 8.73
  DOMAIN (352)..(625): Reverse transcriptase domain identified by PFam, accession name rvt, E-value=3.8e-86, PFam score of 299.6

SEQ ID NO: 34827 - protein, 844 aa, Homo sapiens
  DOMAIN (328)..(371): kw TRANSCRIPTASE REVERSE II ORF2 domain identified by eMATRIX, accession number DM01354T, p-value=1.000e-40, raw score of 9.48
  DOMAIN (218)..(450): Reverse transcriptase domain identified by PFam, accession name rvt, E-value=4.6e-41, PFam score of 149.9
  misc_feature (1)...(844): Xaa = X or * as defined in Table 2
MKSGHPEKEQDNSDVQETREITIRGLLCTALMRHSTGAIAYLGVLSGSASLKLAGVPLRCCEGDKDAGHPLETQTALCERGRGARSLVGNTIMTSQPVPNETIIVLPSNVINFSQAEKPEPTNQGQDSLKKHLHAEIKVIGVNLIQNVLERGWGKCQEMIYVLGLDICRPFFVSRVSEEGRMGQRGEEDANSLDFPPASLLCLICQEQGVNGESCSPVGMYHREIVPVYEVLSVITGLQIQVFSGKEADSVIKRSIGWGPFFKPRTKDKNHMIISIDAEKAFDKIQQHFMLKTLSKLGIDGTYLKIIRAIYDKPTANIILNGQKLEAFPLKTGTRQGCPLSPLLFNIVLEVLARAIRQEKEIKGIQLGKEEVKLSLFADDMIVYLENPIVSDQNLLKLISNFSKVSGYKINVQKSQAFLYTNNRQTESQIMSELPFTIASKRIKYLGIQLTRDVKDLFKENYKPLLNEIKEDTNKWKNIPCSWVGRINIVKMAILPKVIYRFNAIPIKLPMTFFTELEKTTLKFIWYQKRARITKSILSQRNKAGDITLPDFKLYYKATVNKTAWYWHQNRHIDQWNRTKPSEITLHIYNYLFFDNPDKNKKWGKDSLFNKWCWENWLAICRKLKLDPFLTPYTKINSRWIKDLNIRPKTIKTLEENLGITIQDIGMGKYFMTKTPKAMATKAKIDKWDLIKLKSFCTGKETTIRVNRQPTKWEKIFATYSSDKGLISRIYNELKQIYKKKTNNPIKKWAKDMNRHFSKEDIYAAKKHMKKCSPSLAIREMQIKTTMRYHLTPTRLIVIGIEECLRGKEKLETLYYWNSDTDHQVXWLGWPXWKSDHKKEQPSF

SEQ ID NO: 34828 - protein, 594 aa, Homo sapiens
  DOMAIN (262)..(287): 7 kw REVERSE TRANSCRIPTASE RNA POLYMERASE domain identified by eMATRIX, accession number DM00895E, p-value=3.586e-10, raw score of 15.72
  DOMAIN (233)..(487): Reverse transcriptase domain identified by PFam, accession name rvt, E-value=2e-79, PFam score of 277.3
MKAEIKMFFETNENKDTTYQNLWDAFKAVCRGKFIALNAHKRKQERSKIDNLTSQLKELEKQEQTHSKASRRQEITKIRAELKEIETQKTLQKINESRSWFFERINKIDRPLARLIKKKREKNQIDTIKNDKWDITTDPTEIQTTIREYYKHLYANKLENLEEMDKFLDTYTLPRLNQEEVESLNRPITGSEIVAIINSLPTKKSPGPDGFTAEFYQRYKEELVPFLLKLFQSIGKEGILPNSFYEASIILIPKPGRDTTKKANFRPISLMNIDAKILNKILAKRIQQHIKKLIHHDQHINKAKDKNHMIISIDAEKAFDKIQQPFMLKTLNKLGIDGTYFKIIRAIYDKPTANIILNGQKLEAFPLKTGTRQGCPLSPLLFNIVLEVLARAIRQEKEIKGIQLGKEEVKLSLFADDMIVYLENPIVSAQNLLKLISNFSKVSGYKINVQKSQAFLYTNNRQTESQIMSELPFTIASKRIKYLGIQLTRDVKDLFKENYKPLLKEIKEDTNKWKNIPCSWVGRINIVKMAILPKVFPENTEGRRQESLLKGTGRNAENQDTRGLTKPGVDKDNKDGEELNKVTFRTPNYEPRFK

SEQ ID NO: 34829 - protein, 471 aa, Homo sapiens
  DOMAIN (133)..(158): 7 kw REVERSE TRANSCRIPTASE RNA POLYMERASE domain identified by eMATRIX, accession number DM00895E, p-value=3.333e-11, raw score of 15.72
  DOMAIN (104)..(379): Reverse transcriptase domain identified by PFam, accession name rvt, E-value=1.5e-84, PFam score of 294.3
MAEDEGKAKTFFAWQLKEGKSRAKGEEPLMKPSDLPCSIGCSNQNRLNQEEFESLNRPITGSEIVAIINSLPSKKSPGPDGFTAEFYQRYKAELVPFLLKLFQSIEKEEILPNSFYEASIILIPKLDRDTTKKENFRPISLMNIDAKILNKILANRIQQRIKKLIHHDRVGFIPGMQGWFNICKSINVIQHINRTKDKNHMIISIDAEKAFDKIQQPFMLKTLNKLGIDGTYLKIIRAIYDKPTANIILNGQKLEAFPLKTGTRQGCPLSPLLFNIVLEVLARAIRQEKEIKGIQLGKEEVKLSLFADDMIVYLENPIVSAQNLLQLISNFSKVSGYKINVQKSQAFLYTNNRQTESQIMSELPVTIASKRIKYLGIQLTRDVKDLFKENYKPLLNEIKEDTNKWKNIPCSWVGRINIVKMATLPKVLLYDPLFDWTMNPLKALYLQQRPEDETELHPTLNADDQECKRNL

SEQ ID NO: 34830 - protein, 934 aa, Homo sapiens
  DOMAIN (292)..(338): kw TRANSCRIPTASE REVERSE II ORF2 domain identified by eMATRIX, accession number DM01354O, p-value=1.000e-40, raw score of 8.73
  DOMAIN (325)..(517): Reverse transcriptase domain identified by PFam, accession name rvt, E-value=1.1e-12, PFam score of 55.5
  misc_feature (1)...(934): Xaa = X or * as defined in Table 2
MGDFNTPLSTLDRSTRQKVNKDTQELNLALHQADLIDIYRTLHPKSTEYTFFSAPHHTYSKIDRIVGSKALLSKCKRTEIITNYLSHHSAIKLELRIKNLTQNRSTTWKLNNLLLNDYWVHSEMKAEIKMFFETNENKDTTYQNLWDTFEAKSKSKQHSKASRRQEITKIRAELKEIEIQKTLQKINESRSWFFERINKIDRPLARLIKKKREKNLIDAIKTDKGDITTNPTEIQTTIREYYKHLYANKLENREEMDKFLDTYTLPRLNEEEVESLNTPITGSEIVAIINSLPTKKSPGPDGFTAELYQRYKEELVPFLLKLFQSIEKEGILPNSFYEASIILIPKPGRDTTKKENFRPISLMNIDAKILNKILAKGIQQHIKKLIHHDQVGFIPGMQGRFNIRKSINVIQHINRTKDKNHMIISIDAEKAFDKIQQPFMLKTLNKLGIDGTQTESQIMSELPFTIASKRIKYLGIQLTRDVKDLFKENYKPLLKEIKEDTNKWKNIPCSWVGRINIVKMAILPKVIYRINAIPIKLPMPFFTELEKSTLKFIWNQKRARIAKSILSQKNKAGSITLPDFKLYYKATVTKTAWYWYQNRDIDQWNRTEPSEITPHIYNYLIFDKPEKNKQWGKDSLFNKWCWENWLAICRKLKLDPFLTPYTKINSRWIKDLNVRPKTIKTLEENLGITIQDIGIGDDFMSKTPKTMAAKDKIDKWDLIKLKSFCTAKETTIRVNRQPTKWEKIFATYSSDKGLISRIYNELKQIFKKKTNNPIKKWVKDMNRHFSKGDIYAAKKHMKKCSSSLAIREMQIKTTMRYHLTPVRMAIIKKSGNNRCWRGCGEIGTLLHCWWDCKLVQPLWKSVWRFLRDLELEIPFDPAIPLLGIYPKDYKSCCYKDTCTLTWMELEAIILSEVLRNGKTKNRMFSLISGNQDTX

SEQ ID NO: 34831 - protein, 92 aa, Homo sapiens
FRARRRPRCNFLRSSRIRVHPTPAASTMPPKFDPNEIKVGACSGCGRGCGMEHPSAPPRVQSFPRMGLLKPLPPRDLPGVAPPRPGLSLSGP

SEQ ID NO: 34832 - protein, 842 aa, Homo sapiens
  DOMAIN (137)..(182): kw TRANSCRIPTASE REVERSE II ORF2 domain identified by eMATRIX, accession number DM01354N, p-value=1.000e-40, raw score of 13.17
  DOMAIN (211)..(486): Reverse transcriptase domain identified by PFam, accession name rvt, E-value=2.4e-87, PFam score of 303.6
ENKDTTYQNLWDAFKAVCRGKFIALNAHKRKQEKSKIDTLTSQLKELEKQEQTHSKASRRQEITKIRAELKEIDTQKTLQKINESRSWFFERINKIDRPLARLIKKKREKNQTDTIKNCKGDITTDPTEIQTTIREYYKHLYANKLENLEEMDKFLNTYTLPRLNQEEVESLNRPITGAEIVAIISSLPTKKSPGPDGFTAEFYQRYKEELEKEGILPNSFYEASIILIPKPGRDATKKENFRPISLMNIDAKILNKILAKRIQQHIKKLIHHDQVGFIPGMQGWFNIRKSINVIQHINRTKDKNHMIISIDAEKAFDKIQQRFLLKTLNKLGIDGTYFKIIRAIYDKPTANIILNGQKLEAFPLKTGTRQGCPLSPLLFNIVLEVLARAIRQEKEIKGIQLGKEEVKLSLFADDMIVYLENPIVSAQNLLKLISNFSKVSGYKINVQKSQAFLYTNNTQTESQIMSELPFTIASKRIKYLGIQLTRDVKDLFKENYKPLLKEIKDDTNKWKNIPCSWVGRINIVKMAILPKLPMTFFTELEKTTLKFIWNQKRACIAKSILSQKNKAGGITLPDFKLYYKATVTKTAWYWYQNRDIDQWNRTEPSEIMPPIYNYLIFDKPEKNKQWGKDSLFNKWCWENWLAICRKLKLDPFLTPYTKINSRWIKDLNVRPKTIKTLEENLGITIQDIGLGKDFMSKTPKAMATKAKIDKWDLIKLKSFCAEKETTIRVNRQPTKWEKIFATYSSDKGLISRIYNELKQIYKKKTNNPIKKWVKDMNRHFSKEDIYAAKRHMKKCSSSLAIREMQIKTTMRYHLTPVRMAIIKKSGNNSFRYVFISSMKMN

SEQ ID NO: 34833 - protein, 1307 aa, Homo sapiens
  DOMAIN (489)..(536): kw TRANSCRIPTASE REVERSE II ORF2 domain identified by eMATRIX, accession number DM01354V, p-value=1.000e-40, raw score of 12.97
  DOMAIN (106)..(356): AP endonuclease family 1 domain identified by PFam, accession name AP_endonucleas1, E-value=5.3e-34, PFam score of 126.4
MGKKQNRKTGNSKKQSASPPPKERSSSPATEQSWMENDFDEMREEGFRRSNYSELREDIQTKGKEVENFEKNLEECITRITNTEKCLKELMELKTKARELREECRSLRSRCDQLEERVSVMEDEMNEMNDGENGTKLENTLQDIIQENFPNLARQANVQIQEIQRTPQRYSSRRATPRHIIVRFTKVEMKEKMLRAAREKDFKPTKIKREKEGHYIMVKGSIQQEELTILKIYAPNTGAPRFTKQVLSDLQRDLDSHTLIMGDFNTPLSTLDTSTRQKVKKDTQELNSALHQADLIDIYRALHPKSTEYTFFSAPHHTYSKIDHIVGSKALLSKCKRTEIITNYLSDHSAIKLELRIKNLTQNHSTTWKLNNLLLNDYWVHNEVKAEIKVFFETKENKDTTYQNLWDAFKAVCRGKFIALNAHKRKQERSKIDTLTSQLKELEKQEQTHSKASRRQEITNIRAELKEIETQKTLQKINESRSMSELPFTLTTTRIKYLGIQLTRDVKDLFTENYKPLLNEIKEDTNKWKNIPCSWVGRINIVKMAILPKVIYRFNAIPIKLPMTFFTELEKTTLKFIWNQKRARIAKAIRSQKNKSGGITLPDFKLYYKATVTKTAWYWYQNRDIDQWNRTEPSEITPHIYNYLIFDKPEKNEQWGKDSLFNKWCWENWLAICRKLKLDPFLTPYTKINSRWIKDLIVRPKTIKTLEENLGITIQDIGMGKDFMSKTPKAMATKAKIDKWDLIKLKSFCTAKETTIRVNRQPTKWEKTFATYSSDKGLISRIYNELKQIYKKKTNNPIKKWAKDMNRHFSKEDIYAAKKHMKKCSPSLAIREMQIKTTMRYHLTPVRMAIIKKSGNNSEETVAQEDDVPLTRSWLLKALKPQEVQSRAKSPDGQYKEEEKEKDSRGCSLLDFPSMPASHCADKAKSDRSGEEVGSGSRSTSWYASKSFQTPPPHKPSELQIINLLNSIAETSAAGVLEVLARAIRQEKEIKGIQLGKEEFKLSLFADDMIVYLENPIVSAQNLLKLISNFSKVSGYKINVQKSQAFLYTNNRQTESQIMSELPFTIASKRIKYLGIQLTRDLKDLFKENYKPLLNEIKEDTNKWKNIPCSWVGRINIVKMAILPKRDVTANCPGSWRFEQRIGQNTQQRKNEATKERKQLSRLSARRRPRCNFLRSSRIRVHPTPAASTMPPKFHPNEIKVVYFTCTGVEVGATSALAPKIGPAGLSPKEVGDDIAKVTGDWKGLRITVKLTIQNRQAQIEVVPSASALIIKRNYQETERNRKTLNTGGISLFMRSSTLLDRCSTDP

SEQ ID NO: 34834 - protein, 1756 aa, Homo sapiens
  DOMAIN (350)..(372): OLFACTORY RECEPTOR SIGNATURE domain identified by eMATRIX, accession number PR00245A, p-value=9.135e-15, raw score of 18.03
  DOMAIN (1)..(238): Reverse transcriptase domain identified by PFam, accession name rvt, E-value=7.7e-47, PFam score of 169.0
  misc_feature (1)...(1756): Xaa = X or * as defined in Table 2
MNIDAKILNKILPNQIQQHIKKLIHHDQVGFIPGMQGWFNIRKSINVIQHINRAKDKNHMIILIDAEKSFDKIQQPFMLKTLNKLGIDGTYFKIIRAIYDKPTANIILNGQKLEVFTLKTGTRQGCPLSPLLFNIVLEVLARAIRQEKEIKGIQLGKEEVKLSLFADDMIVYLENPIVSAQNLLKQISNFSKISGYKINVQKSQAFLYTNNRQTESQIMSEIPFTIALKRIKYLGIQLTRDVKDLFKENYKPLLNEIKEDKNKWKNIPCSWVGRINIMKMAILPKKEVLQMRGFNKTTVVTQFILVGFSSLGELQLLLFVIFLLLYLTILVANVTIMAVIRFSWTLHTPMYGFLFILSFSESCYTFVIIPQLLVHLLSDTKTISFMACATQLFFFLGFACTNCLLIAVMGYDRYVAICHPLRDMDEAGNHHSQETIARTENQTLHVLTHRWELNIENTWTQEGEHHTLGPVGSVGSSGQGNQARERNKDIQLGKEEVKLALFADNMIVYLENPIISAQNLLKLISNFSKVSGYKINVQKSQAFLYINKRQTEIQIMSELPFTTASKRIKYLGTQITRDVKDLFKEDYKQLLNKIKEDTNKLKNIPCSWIGRINIMKMAILPKPNWEAPPSRGRLTPHTARYPSETKIPEEQSGSNICCSAIFTVLQPPLLIPRQTRSRVDLQQTPTDLQLRLLTVRRKTNKQKGQPHQKPICTSPSSKTKGELRDECTSFSSRFDQLEERVSVTEDQMNEMKREEKFREKRIKRNEQSLQEMWDYVKRPNLRLIDVPESDRENGTKLENTLQDIILENFPNLARQANIQIQEIQRMPQRYSSRRATTRNLIVRFTKVEMKEKMLRAAREKGRVTHKGKPIRLTADLLAETLQARREWGPIFNILKEKNFQPRISYPAKLSFISEGEIKYFTEKQMLRDFVTTSPALEELLKEALNMERNNRTTRQKVNKDIQELNSALHQADLIDISRTLHPKSTEYTFFSAPHHTYSKIDHIVGSKALLSKCKRTEIITKCLSDHSAIKLELRIKKLTQNCTTTWKLNNLLLNDYWVQNEMKAEIKMFFENNENKDTTYQNLWDTFKAVCRGKFIALNAHKRKQKRSKTDTLTSQLKELEKQEQTHSKASRRQEITKIRAELKEIETQKTLQKVNESRSWCFDRINKIDRPLARLIKKKREKNQIDAIKNGKGDVTTNPTEIQTTIREYYKHLYANKLENLEEMDKFLDTYTLPRLNQEEVESLNRPITGSEIVAIISNSIPTKKSPGPDGSTAEFYQSVGSSGQGNXAGEGNKGYSIRKRGSQISSPLCRXHDCICRKPPSVSAPKSSLRLVKQLQQIVFRLQNQCAKITSILIHQQQTKREPTHEXTPILYCFKENKIPRNPTYKGCEGPPQGELQTTAQRNKRGHKQMEEHSMLMDRKNQYCEKGHTGHTAQGNLQIQCHPHQATNDFLHRIGKNYFKVNMEPKKSPHRQVNPKPKEQSWRHHTTXLQTILQGYSNQNSMLRYWYQNSMVLVPKQRYRSMEQNRALRNNAACLQLSDLXQTXQKQAMGKGFPIXXTVLGKLACHMYKAETGSLPYTLYKNXFKMDXRLKRXTXNRNNPRRKPRHYHSGHRHGQGLHVXNTKSNGNKSQNXQMGSDXTKELLHSKRNYHQSEWATYKMGENFCNLLIXQRANIQNLQXTQRNLQEKNKQPHQKVGEGYEQTLLKRRHLCSQKNHEKMLTINGHQRNANQNHNELSSHTSXNGDHXKVRKQQYV

SEQ ID NO: 34835 - protein, 467 aa, Homo sapiens
  DOMAIN (9)..(54): kw TRANSCRIPTASE REVERSE II ORF2 domain identified by eMATRIX, accession number DM01354N, p-value=1.000e-40, raw score of 13.17
  DOMAIN (93)..(352): Reverse transcriptase domain identified by PFam, accession name rvt, E-value=5.6e-10, PFam score of 46.6
  misc_feature (1)...(467): Xaa = X or * as defined in Table 2
XIHTTIREYYKNLYAKKLENLEEMDKFLETYTLPRPNQEEVESLNRPITGSEIVAIINSLPTKKSPGPDGFTAEFYQRYKEELVPFLLKLFQSIEKEGILPNSFDEASIILIPKLGRDTTKKENFRPIPLMNTDAKILNKILANRIQQHIKKLIHHDQVGFIPGMQGWFNVRKSINVIQHINRTNDKNHMIISIDGEKAFDKIQQPFMLKTLNKFGIDGTYISKMGKDFVSKTPKTMATKAKIDKWDLIKLKSFCTAKETTIRVNRQPTQWEKIFATYSSDKGLISRIYNELKQIYKKKTNNPIKKWAKDMNRNFSKEDIYAAKKHMKKCSPSLAIREMQIKTTMRYHLTPVRMAIIKKSGNNRTWEYNILCSLVPLLCSLLWLHLTDHHLKEDRTKHLTASDNLEKTELSRWKERALLYEHRVLRPAIDSQHSCAPRRIQGHLVCGSDLTGFMDDVAVILIDVSPF

SEQ ID NO: 34836 - protein, 64 aa, Homo sapiens
  misc_feature (1)...(64): Xaa = X or * as defined in Table 2
RDSWGTCPVSGAGKVDWPPSSXHHRXHQQWCCGMPHQLSTKENISIKDHLTKEKRKGGAVXRII

SEQ ID NO: 34837 - protein, 578 aa, Homo sapiens
  DOMAIN (218)..(258): Sec1 family domain identified by eMATRIX, accession number PF00995B, p-value=6.745e-25, raw score of 17.37
  DOMAIN (95)..(562): Sec1 family domain identified by PFam, accession name Sec1, E -value=2.9e-164, PFam score of 559.1
GTCQFAAMNVVFAVKQYISKMIEDSGPGMKVLLMDKETTGIVSMVYTQSEILQKEVYLFERIDSQNREIMKHLKAICFLRPTKENVDYIIQELRRPKYTIYFIYFSNVISKSDVEVIGLKLIEQEVVAEVQEFYGDYIAVNPHLFSLNILGCCQGRNWDPAQLSRTTQGLTALLLSLKKCPMIRYQLSSEAAKRLAECVKQVITKEYELFEFRRTEVPPLLLILDRLDDAITPLLNQWTYQAMVHELLGINNNRIDLSRVPGISKDLREVVLSAENDEFYANNMYLNFAEIGSNIKNLMEDFQKKKPKEQQKLESIGSMKAFVENYPQFKKMSGTVSKHVTVVGELSRLVSERNLLEVSEVEQELACQNDHSSALQNIKRLLQNPKVTEFDAARLVMLYALHYERHSSNSLPGLMMDLRNKGVSEKYRKLVSAVVEYGGKRVRGSDLFSPKDAVAITKQFLKGLKGVGNVYTQLQPFLHETLDHLIKGRLKENLYPYLGPSTLRDRPQDIIVFVIGGATYEEALTVYNLNRTTPGVRIVLGGTTVHNTKSFLEEVLASGLHSRSKESSQVTSRSASRR

SEQ ID NO: 34838 - protein, 441 aa, Homo sapiens
  DOMAIN (144)..(184): Sec1 family domain identified by eMATRIX, accession number PF00995B, p-value=4.064e-25, raw score of 17.37
  DOMAIN (25)..(441): Sec1 family domain identified by PFam, accession name Sec1, E -value=3e-10, PFam score of 23.7
MAPVTMMGYRSGKMGILADVQLQVGPPGPWLHLVVIAPVPECITGIGIFSSWGSPDVGPLLYDIRAIMWGSLAPAENTWILGNNHRRFLAQLKPRVIMQDFSNVISKSDVKSLAEADEQEVVAEVQQVITKEYELFEFRRTEVPPLLLILDRCDDAITPLLNQWTYQAMVHELLGINNNRIDLSRVPGISKDLREVVSSAEIDEFYANNMYLNFAEIGSNIKNLMEDFQKKKPKEQQKLESIADMKAFVENYPQFKKMSGTVSKHVTVVGELSRLVSERNLAGRFSEVEARNWACQNDHSSALQNIKRLLQNPKVTEFDAARLVMLYALHYERHSSNSLPGLMMDLRNKGVFWRKYSKARVLAVVEYGGKRVRGSDLFSPKDAVAITKQFLKGLKQQEIVNCVLAAANVYIKQLPLSIQPSASLNGCISLEKKPLVSTQRN

SEQ ID NO: 34839 - protein, 272 aa, Homo sapiens
MKGYMPPPYFAHREIMARPAYGSWRAQTNQELKGSPTQHSCSTKKQPDCFFKWAPDPVPPDWVCLGQQQVSTHLGWTFQRKGQAAIFAVLQPSLVVPLSMEKVEGRARDLQPAMPEPTPTMLWAPVPPEPPQQVPPPAPRRPVPLTTQGLRSAGTWKVCSFTPETSETMNPLGGMNNSRRTALRAVTLIAKVHSFTPEPARPQTHQKEETLNTSEHQKEQTPDTPPLRTVTLMARVRGFILEVSETKNPPIQDTKPSWKTYVRTLSRRTFPT

SEQ ID NO: 34840 - protein, 77 aa, Homo sapiens
RGRWTKDMGVRLSRKGLSNNPQLFGVGTVDLPRNSFLFSFTSGLSRGLTERKAMQLWGPNNMLVDPSSVLHVVWEEN

SEQ ID NO: 34841 - protein, 60 aa, Homo sapiens
DHEPTGRKEQLQTRRLKSCNTHHGTSAASLLSQRDHEPTRRKKLRTHPNIRRNKLRTRHH

SEQ ID NO: 34842 - protein, 68 aa, Homo sapiens
HSPRGSTASFCEVSETKNPPIPDTPATREAEGLRSRLAVYSTRDSPCVACSGSYTQAQGSLGRKFQDP

SEQ ID NO: 34843 - protein, 32 aa, Homo sapiens
LRFYFFSPLWRYRHLPIASLRCSPPHPARAAP

SEQ ID NO: 34844 - protein, 86 aa, Homo sapiens
  misc_feature (1)...(86): Xaa = X or * as defined in Table 2
NHKNPRRKPRQYHSGHRHGQGLHDXNTKSNGTKSNGNKSQNXQWDLINLKSFCTAKETTIRVNRQPTEWEKIFTIYPSDKGLISRI

SEQ ID NO: 34845 - protein, 47 aa, Homo sapiens
  misc_feature (1)...(47): Xaa = X or * as defined in Table 2
DQEPTNSRHILATQMGPSPITKQSNPGVXXKECGFSCSPRVWRYLVS

SEQ ID NO: 34846 - protein, 191 aa, Homo sapiens
MQELLSCTNIIFHCAATVRFDDTLRHAVQLNVTATRQLLLMASQMPKLEAFIHISTAYSNCNLKHIDEVIYPCPVEPKKIIDSLEWLDDAIIDEITPKLIRDWPNIYTYTKALGEMVVQHESRILNIAIIRPSIVGATWQEPFPGWVDNINGPNGIIIATGKGFLRAIKATPMAVADVIPVDTVVNLMLAV

SEQ ID NO: 34847 - protein, 44 aa, Homo sapiens
WDWVLWSGGGTRWGGSGHTGAHGAAGRLRHGGLQVPSPAPCEGS

SEQ ID NO: 34848 - protein, 22 aa, Homo sapiens
AFLSRSKSLMSHVINHTIPCQF

SEQ ID NO: 34849 - protein, 740 aa, Homo sapiens
MVSMASGVKLQTFAVSVTARKSSVDPKSEQQQDLLQRAKGQSFHNVEADLRGLPLLAGQPAFILLSGPTHILLTDSGAQLASPSGSRTGAAGGAACQSHAMCPHSSALWVVDGTGLRGAGGGAGQGGWGRTGAQGGHLKTLRHPCLLRFLSCTVEADGIHLVTERVQPLEVALETLSSAEVCAGIYDILLALIFLHDRGHLTHNNVCLSSVFVSEDGHWKLGGMETVCKVSQATPESPEFTTLPECHGHARDAFSFGTLVESLLTILNEQGELELYYCIYRISRKIIHDVFCVEFKGLQSLSTVRNLLLTRNDFLEVVNFLKSLTLKSEEEKTEFFKFLLDRVSCLSEELIASRLVPLLLNQLVFAEPVAVKSFLPYLLGPKKDHAQGETPCLLSPALFQSRVIPVLLQLFEVHEEHVRMVLLSHIEAYVEHFTQEQLKKVILPQVLLGLRDTSDSIVAITLHSLAVLVSLLGPEVVVGGERTKIFKRTAPSFTKNTDLSLEGDPFSQPIKFPINGLSDVKNTSEDSENFPSSSKKSEEWPDWSEPEEPENQTVNIQIWPREPCDDVKSQCTTLDVEESSWDDCEPSSLDTKVNPGGGITATKPVTSGEQKPIPALLSLTEESMPWKSSLPQKISLVQRGDDADQIEPPKVSSQERPLKVPSELGLGEEFTIQVKKKPVKDPEMDWFADMIPEIKPSAAFLILPELRTEMVPKKDDVSPVMQFSSKFAAAEITEVSTFME

SEQ ID NO: 34850 - protein, 172 aa, Homo sapiens
MPPLRTVTVTARVRGFILDVSETKNPPIPDTFWRPRWDLRQSPSRGQARVQVFENASVRTAKSDFPWSSMWSGRKTSVSAAALVSATIPISRVQGLLRVLGQGLFLLLCWWLDDAIIDEITPKLIRDWPNIYTYTKALGEMVVQQESRNLNIAIISPPLWEQLGRSLSQIYS

SEQ ID NO: 34851 - protein, 184 aa, Homo sapiens
MDAFAIATKAKIDMWNLIKLMSFCTAKETIIRVKRQPTEWEKIFAIYPSDKGLISRIYKELKQIHKKKTNNPIKKWAKDMNKHFSKEDIHAANKQEKRLNITDHQRNTNQNHKATTELVAMEDCLNHLSVSILRVCGHLSTFYSTMNINEQANYPIKNKNVNYDLHKNTLLVLWGTVNTTVATG

SEQ ID NO: 34852 - protein, 528 aa, Homo sapiens
MQNTDNTKCWEFADFGTTIKQDFRLLGQTSVDRLLQLSQGQAVKGNQLLPVSLVKRKTTLAPNTQTASPRALADSLMQLARQVSRLESGQDFADFGTTIKQDFRLLGQTSVDRLLQLSQGQAVKGNQLLPVSLVKRKTTLAPNTQTASPRALADSLMQLARQVSRLESGQDFADFGTTIKQDFRLLGQTSVDRLLQLSQGQAVKGNQLLPVSLEKAAKWKNPDGHMDGLTTNGVLVMHPRGGFTEESQPGVWREISVCGDVYTLRETRSAQQRGKLDFRLLGQTSVDRLLQLSQGQAVKGNQLLPVSLVKRKTTLAPNTQTASPRALADSLMQLARQVSRLESGQDFADFGTTIKQDFRLLGQTSVDRLLQLSQGQAVKGNQLLPVSLVKRKTTLAPNTQTASLRALADSLMQLARQVSRLESGHGFLLPNWNNNQTLSRAYSFDLKGILRNSEPPSNRNFGLLRQTSVDRLLQFSQGQAVKGNQLLPVSLVKRKTTLAPNTQTASPRALADSLMQLARQVSRLESGQ

SEQ ID NO: 34853 - protein, 241 aa, Homo sapiens
GALPNGDRGRRKSRFALYKRPKANGVKPSTVHVISTPQASKAISCKGQHSISYTLSRNQTVVVEYTHDKDTDMFQVGRSTESPIDFVVTDTISGSQNTDEAQITQSTISRFACRIVCDRNEPYTARIFAAGFDSSKNIFLGEKAAKWKNPDGHMDGLTTNGVLVMHPRGGFTEESQPGVWREISVCGDVYTLRETRSAQQRGKLGLQTGDMAENTTVHALPSNCMVWRRSQTRQQISRYCV

SEQ ID NO: 34854 - protein, 111 aa, Homo sapiens
RPPLRRTRGLGENAAGSVHSPSTSMATSSQYRQLLSDYGPPSLGYTQGTGNSQVPQSKYAELLAIIEELGKEIRPTYAGSKSAMERLKRGIIHARGLVRECLAETERNARS

SEQ ID NO: 34855 - protein, 180 aa, Homo sapiens
DCGGGRARTAIFAGAARAADNKKCAGARRALGRARGCSATARPRRRRRRPRGLAPPRPARPPPGGMSYKPNLAAHMPAAALNAAGSVHSPSTSMATSSQYRQLLSDYGPPSLGYTQGTGNSQVPQSKYAELLAIIEELGKEIRPTYAGSKSSMERLKRGIIHARGLVRECLAETERNARS

SEQ ID NO: 34856 - protein, 217 aa, Homo sapiens
MAGPAESSPQGAHPNSPFALQHHSSLTVKPLHRQNVIQHQVAGQENRRGHQAGSSTSPQPLEALKRPNLRAPFHSQSRRILIPPAGNPTPGAAAPADPSTQRRDRWGCALPMPRVAAGSAHHQQAGPTAAAQHRTPVALFSPPLSLVYGQQQRKESETPTVPTPPARARGWTETGVEHVPAYNRTRAPEKCDISVPSPHSSPDAETSHPRHISPCPG

SEQ ID NO: 34857 - protein, 143 aa, Homo sapiens; identical to SEQ ID NO: 34613
  DOMAIN (90)..(130): Ribosomal protein L7Ae proteins domain identified by eMATRIX, accession number BL01082, p-value=7.750e-40, raw score of 20.37
  DOMAIN (58)..(143): Ribosomal protein L7Ae domain identified by PFam, accession name Ribosomal_L7Ae, E-value=2.1e-38, PFam score of 141.0

SEQ ID NO: 34858 - protein, 691 aa, Homo sapiens
  DOMAIN (577)..(617): Ribosomal protein L7Ae proteins domain identified by eMATRIX, accession number BL01082, p-value=9.182e-36, raw score of 20.37
  DOMAIN (545)..(643): Ribosomal protein L7Ae domain identified by PFam, accession name Ribosomal_L7Ae, E-value=1.9e-45, PFam score of 164.4
MKPCAHSWNAELSRNIIRHSFNLVMVAASQVAVSQLLGSYEILLLVSIELMFCFGLGYFFIPMQEWPNTYGERVFVDVESSVFKWNHKCLHKTEAERDYTKKRLKLCGHKPGNAVGQQKLEEARNRFFTRAPGGSAALPTLRFQPSDTDFRLLASRTILTFETKNPSELAERLRSVCGNQSNAYARLLEYRLNALRGLWNAQRQLALEEQHERESSGDEETLALLKRQGLLQQPEQAPFTSRMGLLLVFPLIQSQSRTDPSLCNITAEVLLNCLRDCQPLSLTKEPADCLNGIETLLCSWLEETSDTGRHIPHKQKENAAAALVALACARGFVYCRNEELEPGWVAFGSGSLLHRPVSFDNKPHSLFQVIDQNTLQVCQVVPMPANHLPIGSTMSTVHLSSDGTYFYWIWSPASLNEKTPKGHSVFMDIFELVTLKGKKAKGKKVAPAPAVVKKQEAKKVVNSLFEKRDIQPKRELTYFVKWPRYVRLQQQRAILYKQLKVPPAINQFTQALNCQTVTQLLKLAHKYRPETKQEKKQRLLAQAEKKAAGKGGVPTKRPPALRAGVNTITTLVENKKAQLVVIAHDVDSIELVVFLPALCCKMGVPYCIIKGKARLGRLVHRKTCTTVAFTQVNLEDKGALAKLVEGIRTNDNDRYDEICCHWGGNILGPKSVACIAKLEKAKAKELATKLG

SEQ ID NO: 34859 - protein, 855 aa, Homo sapiens
  DOMAIN (771)..(811): Ribosomal protein L7Ae proteins domain identified by eMATRIX, accession number BL01082, p-value=5.026e-28, raw score of 20.37
  DOMAIN (738)..(836): Ribosomal protein L7Ae domain identified by PFam, accession name Ribosomal_L7Ae, E-value=1.8e-35, PFam score of 131.2
MNMNIKKIVKQATVLTFTTALLAGGATQAFAKENNQKAYKETYGVSHITRHDMLQIPKQQQNEKYQVPQFDQSTIKNIESAKGLDVWDSWPLQNADGTVAEYNGYHVVFALAGSPKDADDTSIYMFYQKVGDNSIDSWKNAGRVFKDSDKFDANDPILKDQTQEWSGSATFTSDGKIRLFYTDYSGKHYGKQSLTTAQVNVSKSDDTLKINGVEDHKTIFDGDGKTYQNVQQFIDEGNYTSGDNHTLRDPHYVEDKGHKYLVFEANTGTENGYQGEESLFNKAYYGGGTNFFRKESQKLQQSAKKRDAELANGALGIIELNNDYTLKKVMKPLITSNTVTDEIERANVFKMNGKWYLFTDSRGSKMTIDGINSNDIYMLGYVSNSLTGPYKPLNKTGLVLQMGLDPNDVTFTYSHFAVPQAKGNNVVITSYMTNRGFFEDKKATFAPSFLMNIKGNKTSVVKNSILEQGQLTSIVAPSSERAGLGGGQSGRTVLRERVRIEIASTHIALQHAIVTGDAVGMDDIPQEARQYRHNQAYAYSIQGDGAEDDDERIVRFHTRVTVDSDTLASDAARLTCRHGLGNQVLPEARVDIRVNKTWSLPSIKESANAKAQMSEMLRYVERITRILGPVECTVQGGREEKLRRAHLNLVSHISSAQQTHWLVATILDNAGPEGLIEEAISAEFVDLINVEEEEQGDSTVITLVQDVIRSFGWSFNAVSPVTLPASQEKKQRLFVQAKKKAAGKGDVPTKRPPVLRAGVNTITTLEENKKAQLVVTAHEVDPIKLVVFLLALCHKMGVPYCIIKGKARLGHLVHRKTCTTVNFTQVNSEDKDTLAKLVEAIRTNYNDRYDEIRHH

SEQ ID NO: 34860 - protein, 215 aa, Homo sapiens
  DOMAIN (152)..(192): Ribosomal protein L7Ae proteins domain identified by eMATRIX, accession number BL01082, p-value=5.667e-34, raw score of 20.37
  DOMAIN (119)..(215): Ribosomal protein L7Ae domain identified by PFam, accession name Ribosomal_L7Ae, E-value=5.1e-40, PFam score of 146.4
MPKGKKAKEKKVAPAPAVVKKQEAKKVVNPLFEKRPKNFGTGQDIQPKRDLTHFVKWPCYIRLQQQRTILYKWLKVPPEINQFTQAPDSQTATLLLKLAHKYRPETNQEKKQRLLARAKKKAAGKGDIPTKSPPVLRAGVNTITTLVENKKAQLVVIAHDVDPIKLVVFLPVLCHKMGVPYCIIKGKARLGHLVHRKTCTTVTFTQVNSEDKGAL

SEQ ID NO: 34861 - protein, 303 aa, Homo sapiens
  DOMAIN (210)..(225): RIBOSOMAL PROTEIN L7A/RS6 FAMILY SIGNATURE domain identified by eMATRIX, accession number PR00881D, p-value=8.500e-16, raw score of 11.60
  DOMAIN (154)..(263): Ribosomal protein L7Ae domain identified by PFam, accession name Ribosomal_L7Ae, E-value=0.0033, PFam score of 10.9
  misc_feature (1)...(303): Xaa = X or * as defined in Table 2
KSIQKGLKMCLSSSLLPPSKMPKGKKAKGKKVAPAPAVVKKQEAKKVVNPLFEKRPKNFGIGQDIQPKRDFTRFVKWPRLLSGCMRKRAILYKAGXKLPPAINQFHPGPWDPANKLLQLLXAWAHKYRPETKAKRKKQRLLARAEKKAAGKGDVPNERDPPVLRAGVNTVTHLWWRNKKAPAWVVIATRRWIPFELVVFLPALCREKWGSPYCIIKGKARLGRLVHRRPCTTVGFHTRXNSKDKRRLLAXAGLEAIRTQFTIDQIRWRSGRHWGGNVLGPKSVARIRQASKRQRLKELATKLG

SEQ ID NO: 34862 - protein, 75 aa, Homo sapiens
  DOMAIN (25)..(41): AUXIN BINDING PROTEIN SIGNATURE domain identified by eMATRIX, accession number PR00655E, p-value=9.000e-09, raw score of 8.06
AVADVVSLLEQINTSPGTWYAAIDLANAFFSIPVHKAHQKQFAFSCHKVGRAQQHPSSNGSGIYVIRLEQVLKAQ

SEQ ID NO: 34863 - protein, 112 aa, Homo sapiens
KEKWPDVRLCTDSWAVANGLAVWSGTWKKRDWKIGDKEIWGRIMWIDLSEWSKTVKIFVSHADLTVAIAECPICQEQTPTLSSRYDTISQGDQPATWWQVDYIGRLPSRKWQ

SEQ ID NO: 34864 - protein, 117 aa, Homo sapiens
  DOMAIN (49)..(65): AUXIN BINDING PROTEIN SIGNATURE domain identified by eMATRIX, accession number PR00655E, p-value=9.000e-09, raw score of 8.06
KTDRSWRMTVDYHKLNKVVTPLAATVPDVVSLLEQINTSPRTWCAAIDLANAFFSIPVHKAHQKQFAFSWQEKALQQVQAAVQAALPLGPYDPADPMVLEVSLADRDAVWSLWQAPL

SEQ ID NO: 34865 - protein, 122 aa, Homo sapiens
HRVGRAQQHSISKWKWYIHDWSQVGPEGTNDSARYPDTTQKWTAAALQPLSRTSLKDSHEGKSSQWAELRAVHLVLRFAWKEKWPDVQLYTDSWAVASGLAGWSGTWKKHDWKIGDKEIWGR

SEQ ID NO: 34866 - protein, 155 aa, Homo sapiens
DSARYPDTTQKWTAAALQPLSRTSLKDSHEGKSSQWAELRAVHLVLRFAWKEKWPDVQLYTDSWAVASGLAGWSGTWKKHDWKIGDKEIWGRATPVIAQWAHEQRGHGGRDGDYAWAQQHGLPLTRDDLATATAECPICQQQRPTLSPQYGTIPQ

SEQ ID NO: 34867 - protein, 263 aa, Homo sapiens
  DOMAIN (63)..(80): RNase H domain identified by eMATRIX, accession number PF00075A, p-value=7.429e-09, raw score of 14.44
  DOMAIN (40)..(199): Reverse transcriptase domain identified by PFam, accession name rvt, E-value=0.025, PFam score of -36.6
PRGRNRRRKTFQERRMTLNESPEKIGKWIECYGHPPASKLVEIYIHTVFVEDKLSICIRSFNKKADGSWRMTVDYCKLNQVVTAIAAAIPDVVSLLEQINTSPDTWYAAIDLANALFSIPVHKGYINSLALCHNVIWRELDCFSLPRDTTLVHYIDDIMLIGSSVQEVENKLDLLVKDKLLHLAPPTTKEEVQHMVGLFGFWRQHIPHLGVLHQPIYRVIRKAASFEWGPEQEKALQQVQAAVGGKQSENNLGHQRSPGLWFS

SEQ ID NO: 34868 - protein, 346 aa, Homo sapiens
MTVGYHKLNQVVTPIAAAVPDVVSLLEQINTTPAIKWVVHSSIPSSNGSGVYVIRLEQVLKAQPLLSAQFQQQRPILSLRYGTISWGISQLPGGRLIILELFCHGNGRVLLPRLPSMDSRNALSIMIFHTALPLTKELALWLKKCGSGTVFPIARIHGSRNQGVELEVAPLTITPAPSPTNHDPRNTHLTSPLNVGPTKQEAVPRAERYNFLFKGDQLETQVCVLEVRGRCLRRERLKGEERRMWVEKRLEGGEKTQNHCTCHYDYMTTITPISQGKRAELSWSFSFDIAVVQLTPGRAEILGSGSGVDGRQFTDKLIKNFEEGCGRIEKAIILDDDDDDDDDDEM

SEQ ID NO: 34869 - protein, 271 aa, Homo sapiens
  DOMAIN (140)..(268): dUTPase domain identified by PFam, accession name dUTPase, E- value=4.7e-09, PFam score of 43.5
THLLVPGMQPLTWQMPFSPFLSISPTRSNLPSAATPVIAQWAHEQSGHGGRDGGYTWAQQHGLAFTNTDLATVNAKIGFAYPVCDASAKTTIRGLLECLIRCDGIPHSIASDQARIHRSRNQEVEVEVAPLTITPSDPLAKFLLSVPVTLRSAGLEVLVPGEGMLPPGNTRTIPLNWKLRLPPGHFGLLLTLSQEAKNGVTVLAGVIDLDYQDEISLLLHNGGKKEYARNTGDPLGRLLVLPCPVIKINGKLQQPNPGGTTNGSDPSGMKV

SEQ ID NO: 34870 - protein, 122 aa, Homo sapiens
DLWPFTRVTVHWGKANDQTFQGLLDTGSELTLIPGYPKRHCCPPVKVRVYGGQTDGSWRMTVGYHKLNQVVTPIAAAVPDVVSLLEQINTTPAIKWVVHSSIPSSNGSGVYVIRLEQVLKAQ

SEQ ID NO: 34871 - protein, 180 aa, Homo sapiens
  DOMAIN (117)..(133): AUXIN BINDING PROTEIN SIGNATURE domain identified by eMATRIX, accession number PR00655E, p-value=7.333e-09, raw score of 8.06
ARCVIIRDILSSWQNPHVGSMTGRVRAAMMGKAKWKPLELPLLRKIVNKKQYHIPGGTVEISATIKDLKDPGVVISTTSPFNSPIWPVQKTAAVPDMVSLLEQMNSSPGTWYAAIDLANAFFSIPVHKPHQKQFAFSCHSCHRPMGPEQSGHGGRDGGYTWAQQHGLAFTNTDLATVNAK

SEQ ID NO: 34872 - protein, 226 aa, Homo sapiens
MKLMETLNQCINAGHEMTKAIAIAQFNDDSPEARKITRRWRIGEAADLVGVSSQAIRDAEKAGRLPHPDMEIRGRVEQRVGYTIEQINHMRDVFGTRLRRAEDVFPPVIGVAAHKGYLWPFTRVTVQCGKKNDQTFQGLLDTGSELTLIPEDPKRHCGPPVKVGAYGGQVLHSKWAPIYHFLSSHNCNGFCYISIANLPKKFGQNIKECLTNNRIVPFNCVQDPTY

SEQ ID NO: 34873 - protein, 364 aa, Homo sapiens
  DOMAIN (63)..(80): RNase H domain identified by eMATRIX, accession number PF00075A, p-value=7.429e-09, raw score of 14.44
PRGRNRRRKTFQERRMTLNESPEKIGKWIECYGHPPASKLVEIYIHTVFVEDKLSICIRSFNKKADGSWRMTVDYCKLNQVVTAIAAAIPDVVSLLEQINTSPDTWYAAIDLANALFSIPVHKGYINSLALCHNVIWRELDCFSLPRDTTLVHYIDDIMLIGSIKFLGVQWCGACRDIPSKDPADPMVLEVSVADRDAVWSIWQALIDESQQRPLGFWSKSLPSSADNYSPFERQLLAYYWALVETERSTMGHQVTMLPELPVMNWVLSDPSSHKANGLAGWSGTGKKHDWKIGDKEIWRRGMWMDLSEWSKDVKIFVSHVSAHQRVTSAEEEFNNQVDRMTRSMDTTQPLYPTTPVIAQWAHE

SEQ ID NO: 34874 - protein, 412 aa, Homo sapiens
  DOMAIN (269)..(287): RNase H domain identified by eMATRIX, accession number PF00075J, p-value=8.571e-10, raw score of 15.78
  DOMAIN (251)..(328): Integrase core domain identified by PFam, accession name rve, E-value=1.2e-12, PFam score of 47.7
MLIGSSEQEVANTLDLFVRHLHAREWEIKLTKIQGPSTSVKFLGVQWYGACQDIPSNVKDTLLHLAPPITKKEAQCLLGLFGFWRQHIPHLELPIKNWVLSDPSSYKVGCAQQYSIIKWKWYICDWAQANPEGTINGLARWSGTWKKHNWKIGDKEIWGRGMWMDLSEWSKTVKIYVSHVSAHQQMTSAEEDFNNQVDRMTRSMDTTQPLSPTTPVITQWAHEQSDHGGRDGDYTWAQQHGLPLTKSFTFAKEVWQWAHAHGIHWSYVPHHPEAAGLIERWNGLLKSQLKCQLGDNTLQGWGKVLQKAMYALNQHPIYGTVSPIARLHGSRNQGEEVEVAPLIITPGDLLAKFLLPVSTTLHSAGLGVVYGFKLTRDGLVMVNTECQLDRIEGCKVLFLGVSVRVSPKEINI

SEQ ID NO: 34875 - protein, 489 aa, Homo sapiens
  DOMAIN (399)..(489): Integrase core domain identified by PFam, accession name rve, E-value=8.9e-10, PFam score of 37.8
  misc_feature (1)...(489): Xaa = X or * as defined in Table 2
GEKGNDQTFRKLLDTGSELMLIPLRVVIPTTSLFNSPIWPVQKTDGSGRMRVDYHKLNQVMTPTAAAVPDVVSLFEPINTFLGTWYAAIDLANALFSIPVCKAHQKQFAFSWQGQQYTFTVLPQRYINCLALCHNLIQRDLDHFLLPQGITLVHYIDSGPFIKXPEAASFEWGPEQEKALQQVQAAVQAALSIGPYDPADPMVLEVSVADGDAVWSLWQAPKGESQWRPLGFWSKALPSSTDNYSSSDVQLYTDSWAVASSLAGXSGTWKKHDWKIGDKEIWGRGMWMDLSEWSKTGKIFVSHVNAHQLVTSAEEDFNNQVDRMTRSVDTTQPLSPATPVVAQWAHEQSGHGGRNEGYAWTQQHGLPLTKADLTTATAECPICQQQRPTLRPRYGTTSQGDQPATCWQVDYIEPLPSWKRQRFLLTGINTHSGYGFAYPPCNASAKTTIHGLIACLIHCHGIPHSIASLYRERGTHFTDKEVQQWAHAH

SEQ ID NO: 34876 - protein, 534 aa, Homo sapiens
  DOMAIN (228)..(244): AUXIN BINDING PROTEIN SIGNATURE domain identified by eMATRIX, accession number PR00655E, p-value=7.889e-09, raw score of 8.06
  DOMAIN (336)..(482): RNase H domain identified by PFam, accession name rnaseH, E- value=1.5e-05, PFam score of 10.1
NLSPILPQDLWPFTRVTVHWGKGNDQTFQGLQDTGSELMLIPGDPKRHCSPPVKVGSYGGQVINGVLAQVRLTVGTVGPRTHPVVISPVPECIIDIDILNSWQNPHIDSLTGRVKAIMVGKAKWKPFEPLLPIKIVNQKQYRIPGGIAEISATIKDLKDAGVVIPITLPFNSPFWPVKKTDGSWRMKVVYCKLNQVVTPITAAVPDVVVSLLEQINTSPGTWYAAIDLANAIFSIPVHKAHQKQFAFSWQGHQNTFTVFTILLHIHKVGHAQQHSIIKWKWYIHDGARAGSEGTSKLNEEVPQMPMVTTSAALPSLPRPAPMASWGVLYDQLTEEEKTRAWFTDGSARYAGTTQKWTAAALQPLSRTSLKGSGEGKSSQWAELQAVHLVVHFSWKDKWPDVRLYIDSWAVANGLAGWSGTWKKHDWKIGDKEIWGRGMWMDLSEWPKPVKIFGSHVSAHQWVISAEEDFNNQVDKMTCSVDITQPLSPATPVITQWAHKQSGHGGRDGGYTWAQQHGLPLTKTGLAMATAECPI

SEQ ID NO: 34877 - protein, 629 aa, Homo sapiens
  DOMAIN (512)..(544): ABC transporters family proteins domain identified by eMATRIX, accession number BL00211B, p-value=3.423e-17, raw score of 13.37
  DOMAIN (436)..(588): ABC transporter domain identified by PFam, accession name ABC_tran, E-value=2e-07, PFam score of 26.5
MLSSTQNAGGSYQRVRGALDTQEWKWGEVSPRTLNVDGRALVSVANTHGTDRPAYTLNPQSRDQRSGVITLGYKRPLEREDLFELKESDSFCTACPIFEKQWRKEVLRNQERQKVKALNKLDEALCPGIILTQSTDSNANLFQKQPHRHTQTSGRWQIIIFCEHSSDFGWNGYGYAVALLVVVFLQTLILQQYQRFNMLTSAKVKTAVNGLIYKKLGWSGKVSWLILHDVGHGIMEGYIAWGKGSDVRITWEKKSTEMRTRPAQKMALLLSNVSRQKFSTGEIINLMSATHGLDSKPQSPLVCPFSNPNGRISPLARAGLADHYRVTHLQILKLYAWEPSYKNKIIKIRDQELEFQKSARYLTVFSMLTLTCIPFLTKISLGRLEDFLNTEELLPQSIETNYTGDHAIGFTDASFSWDKTGMPVLKESIRIRIEQVLNQLSLFETVDYPGSVAYVSQQAWIQNCILQENILFGSIMKKEFYEQVLEACALLPDLEQLPKGDQTEIGERAVNISGGQQHRVSLARAVYSGADVYLLDDPLSAIDVHVGKQLFEKVIGSLGLLKNRTHILVTHNLTLLPQMNLIVVMKSGRIAQMGIYQELLCKTKNLTNFTKSSVNKKKVGEWEESGRGS

SEQ ID NO: 34878 - protein, 180 aa, Homo sapiens
LTSAKVKTAVNGLIYKKVSLATLCVYFLLDERIILTAPKVFTSMSLFNILRIPLFELPSVISAVVQTKISLGRLEDFLNTEELLPQSIETNYTGDHAIGFTDASFSWDKTGMPVLNRGSEAYVSQQAWIQNCILQENILFGSIMKKEFYEQVLEACALLPDLEQLPKGDQTEIGERVRKL

SEQ ID NO: 34879 - protein, 222 aa, Homo sapiens
  DOMAIN (97)..(129): ABC transporters family proteins domain identified by eMATRIX, accession number BL00211B, p-value=3.423e-17, raw score of 13.37
  DOMAIN (8)..(174): ABC transporter domain identified by PFam, accession name ABC_tran, E-value=0.00028, PFam score of -13.7
IETNYTGDHAIGFTDASFSWDKTGMPVLKESSVAYVSQQAWIQNCILQENILFGSIMKKEFYEQVLEACALLPDLEQLPKGDQTEIGERGKETAVNISGGQQHRVSLARAVYSGADVYLLDDPLSAIDVHVGKQLFEKVIGSLGLLKNRTSHSVCHYTLLAVPHLLEVQILTGNFIQSLGFNYHEYANNSNAYIVNLDLFPGFQTCVYKLLSPIRCLICKSE

SEQ ID NO: 34880 - protein, 44 aa, Homo sapiens; identical to SEQ ID NO: 33760
  misc_feature (1)...(44): Xaa = X or * as defined in Table 2

SEQ ID NO: 34881 - protein, 171 aa, Homo sapiens
CGDNCVFESWIGDIILDMDNEFSDSIHNTFGHMWRTKEHNEAGWLLLSSVDKVMKENDELRDSISWLQKQILSLKSAKIALSESLISCRERAEIVEKQTQAVIMRMADPQGKVHAQPQQVSTVKGRTLIGKEWDPATWNGDVWEDPDEAGDTEFVNSDEPFLPEVTASPSP

SEQ ID NO: 34882 - protein, 284 aa, Homo sapiens
  DOMAIN (242)..(254): RNase H domain identified by eMATRIX, accession number PF00075C, p-value=7.058e-09, raw score of 11.58
  DOMAIN (146)..(284): Reverse transcriptase domain identified by PFam, accession name rvt, E-value=0.016, PFam score of -33.7
MPCTTSGLDKVPTSKKALTRYGYGSLTLDFSGSIIPCKMCLSPSTRIVRPSQPRGTEDPDETGDTEFVNSDESFLLEGTASPSPVVAVSPPRPMLPSAFPPLSEDINPVLPEATVLASPEVVAKQTHVDSPRKPLSTFLFASRPVTKLKSRQTPGGEVDSVTCEEKTDGPWRKTVDYCKLNQVVTPIAALVPDMVSLLVQINTSSDTSYAAIDLAKAFFSIPVYKAHQKQFIFSWQAQQYTFTVLPQGYIISPALCHNLIRRDLDHFLLPQDITLVHYIDDIRL

SEQ ID NO: 34883 - protein, 14 aa, Homo sapiens
  misc_feature (1)...(14): Xaa = X or * as defined in Table 2
MREVRLRLPRGILX

SEQ ID NO: 34884 - protein, 181 aa, Homo sapiens
  DOMAIN (77)..(91): RHESUS BLOOD GROUP PROTEIN SIGNATURE domain identified by eMATRIX, accession number PR00342I, p-value=6.447e-09, raw score of 4.99
  misc_feature (1)...(181): Xaa = X or * as defined in Table 2
LFGGCHTSGGLAVRVPRMPRGSRSRTSRMAPSASRAPLKXELEPRQAQVAQPPAAAPPSAVGSSAAAPRQPGLFMAQMATTAAGVAVGFCCGGHTLGHGITGGLSVGGKLIAXALRRPXHQFNQGSFRGTQAKHSKQQPALPLLWRIKTSFREVVPPEPRVTIQGFCGGFPMRLLETVPDL

SEQ ID NO: 34885 - protein, 3478 aa, Homo sapiens
  DOMAIN (28)..(43): VWFC domain proteins domain identified by eMATRIX, accession number BL01208B, p-value=9.156e-10, raw score of 15.83
  DOMAIN (78)..(2891): Low-density lipoprotein receptor domain identified by PFam, accession name ldl_recept_a, E-value=0, PFam score of 1131.6
  misc_feature (1)...(3478): Xaa = X or * as defined in Table 2
MTVIRSGIAYILHLKSYDVNIQTGSNACNQPTHPNGDCSHFCFPVPNFQRVCGCPYGMRLASNHLTCEGDPTNEPPTEQCGLFSFPCKNGRCVPNYYLCDGVDDCHDNSDEQLCGTLNNTCSSSAFTCGHGECIPAHWRCDKRNDCVDGSDEHNCPTHAPASCLDTQYTCDNHQCISKNWVCDTDNDCGDGSDEKNCILNCTASQFKCASGDKCIGVTNRCDGVFDCSDNSDEAGCPTRPPGMCHSDEFQCQEDGICIPNFWECDGHPDCLYGSDEHNACVPKTCPSSYFHCDNGNCIHRAWLCDRDNDCGDMSDEKDCPTQPFRCPSWQWQCLGHNICVNLSVVCDGIFDCPNGTDESPLCNGNSCSDFNGGCTHECVQEPFGAKCLCPLGFLLANDSKTCEDIDECDILGSCSQHCYNMRGSFRCSCDTGYMLESDGRTCKVTASESLLLLVASQNKIIADSVTSQVHNIYSLVENGSYIVAVDFDSISGRIFWSDATQGKTWSAFQNGTDRRVVFDSSIILTETIAIDWVGRNLYWTDYALETIEVSKIDGSHRTVLISKNLTNPRGLALDPRMNEHLLFWSDWGHHPRIERASMDGSMRTVIVQDKIFWPCGLTIDYPNRLLYFMDSYLDYMDFCDYNGHHRRQVIASDLIIRHPYALTLFEDSVYWTDRATRRVMRANKWHGGNQSVVMYNIQWPLGIVAVHPSKQPNYDQPFLITVRQHIIFGISLNPEVKSNDAMVPIAGIQNGLDVEFDDAEQYIYWVENPGEIHRVKTDGTNRTVFASISMVGPSMNLALDWISRNLYSTNPRTQSIEVLTLHGDIRYRKTLIANDGTALGVGFPIGITVDPARGKLYWSDQGTDSGVPAKIASANMDGTSVKTLFTGNLEHLECVTLDIEEQKLYWAVTGRGVIERGNVDGTDRMILVHQLSHPWGIAVHDSFLYYTDEQYEVIERVDKATGANKIVLRDNVPNLRGLQVYHRRNAAESSNGCSNNMNACQQICLPVPGGLFSCACATGFKLNPDNRSCSPYNSFIVVSMLSAIRGFSLELSDHSETMVPVAGQGRNALHVDVDVSSGFIYWCDFSSSVASDNAIRRIKPDGSSLMNIVTHGIGENGVRGIAVDWVAGNLYFTNAFVSETLIEVLRINTTYRRVLLKVTVDMPRHIVVDPKNRYLFWADYGQRPKIERSFLDCTNRTVLVSEGIVTPRGLAVDRSDGYVYWVDDSLDIIARIRINGENSEVIRYGSRYPTPYGITVFENSIIWVDRNLKKIFQASKEPENTEPPTVIRDNINWLRDVTIFDKQVQPRSPAEVNNNPCLENNGGCSHLCFALPGLHTPKCDCAFGTLQSDGKNCAISTENFLIFALSNSLRSLHLDPENHSPPFQTINVERTVMSLDYDSVSDRIYFTQNLASGVGQISYATLSSGIHTPTVIASGIGTADGIAFDWITRRIYYSDYLNQMINSMAEDGSNRTVIARVPKPRAIVLDPCQGYLYWADWDTHAKIERATLGGNFRVPIVNSSLVMPSGLTLDYEEDLLYWVDASLQRIERSTLTGVDREVIVNAAVHAFGLTLYGQYIYWTDLYTQRIYRANKYDGSGQIAMTTNLLSQPRGINTVVKNQKQQCNNPCEQFNGGCSHICAPGPNGAECQCPHEGNWYLANNRKHCIVDNGERCGASSFTCSNGRCISEEWKCDNDNDCGDGSDEMESVCALHTCSPTAFTCANGRCVQYSYRCDYYNDCGDGSDEAGCLFRDCNATTEFMCNNRRCIPREFICNGVDNCHDNNTSDEKNCPTHTCSSSEFQCASGRCIPQHWYCDQETDCFDASDEPASCGHSERTCLADEFKCDGGRCIPSEWICDGDNDCGDMSDEDKRHQCQNQNCSDSEFLCVNDRPPDRRCIPQSWVCDGDVDCTDGYDENQNCTRRTCSENEFTCGYGLCIPKIFRCDRHNDCGDYSDERGCLYQTCQQNQFTCQNGRCISKTFVCDEDNDCGDGSDELMHLCHTPEPTCPPHEFKCDNGRCIEMMKLCNHLDDCLDNSDEKGCGINECHDPSISGCDHNCTDTLTSFYCSCRPGYKLMSDKRTCVDIDECTEMPFVCSQKCENVIGSYICKCAPGYLREPDGKTCRQNSNIEPYLIFSNRYYLRNLTIDGYFYSLILEGLDNVVALDFDRVEKRLYWIDTQRQVIERMFLNKTNKETIINHRLPAAESLAVDWVSRYLYWADWGHRAYIGRVGMDGTNKSVIISTKLEWPNGITIDYTNDLLYWADAHLGYIEYSDLEGHHRHTVYDGALPHPFAITIFEDTIYWTDWNTRTVEKGNKYDGSNRQTLVNTTHRPFDIHVYHPYRQPIVSNPCGTNNGGCSHLCLIKPGGKGFTCECPDDFRTLQLSGSTYCMPMCSSTQFLCANNEKCLSSPWTDIDLQGSKGWEFSRPRESSCMSFLGIQCXLLLSRXLLPLVLCXRSAVCSLCRCIPIWWKCDGQKDCSDGSDELALCPQRFCRLGQFQCSDGNCTSPQTLCNAHQNCPDGSDEDRLLCCANKRCIPESWQCDTFNDCEDNSDEDSSHCASRTCRPGQFRCANGRCIPQAWKCDVDNDCGDHSDEPIEECMSSAHLCDNFTEFSCKTNYRCIPKWAVCNGVDDCRDNSDEQGCEERTCHPVGDFRCKNHHCIPLRWQCDGQNDCGDNSDEENCAPRECTESEFRCVNQQCIPSRWICDHYNDCGDNSDERDCEMRTCHPEYFQCTSGHCVHSELKCDGSADCLDASDEADCPTRFPDGAYCQATMFECKNHVCIPPYWKCDGDDDCGDGSDEELHLCLDVPCNSPNRFRCDNNRCIYSHEVCNGVDDCGDGTDETEEHCRKPTPKPCTEYEYKCGNGHCIPHDNVCDDADDCGDWSDELGCNINECEQFGTCPQHCRNTKGSYECVCADGFTSMSDRPGKRCAAEGSSPLLLLPDNVRIRKYNLSSERFSEYLQDEEYIQAVDYDWDPKDIGLSVVYYTVRGEGSRFGAIKRAYIPNFESGRNNLVQEVDLKLKYVMQPDGIAVDWVGRHIYWSDVKNKRIEVAKLDGRYRKWLISTDLDQPAAIAVNPKLGLMFWTDWGKEPKIESAWMNGEDRNILVFEDLGWPTGLSIDYLNNDRIYWSDFKEDVIETIKYDGTDRRVIAKEVPNLCKQICSHLCLLRPGGYSCACPQGSSFIEGSTTECDAAIELPINLPPPCRCMHGGNCYFDETDLPKCKCPSGYTGKYCEMAFSKGISPGTTAVAVLLTILLIVVIGALAIAGFFHYRRTGSLLPALPKLPSLSSLVKPSENGNGVTFRSGADLNMDIGVSGFGPETAIDRSMAMSEDFVMEMGKQPIIFENPMYSARDSAVKVVQPIQVTVSENVDNKNYGSPINPSEIVPETNPTSPAADGTQVTKWNLFKRKSKQTTNFENPIYAQMENEQKESVAATPPPSPSLPAKPKPPSRRDPTPTYSATEDTFKDTANLVKEDSEV

SEQ ID NO: 34886 - protein, 275 aa, Homo sapiens
ATGRCCCGLAPGFPLCWVLYPGGRGSACPEPHVLRTGSPLQREQRTNGRTDLSSLLPNLNFDSPPRCKHKNQLAITLRKRIRKLATSLFSSTIFRISGTSVIISAPGAGLPLPALFPTRCQPKFSRSIDPTGKAVQTADIRLSARATLWLGGSIEESPVLCSTLRLLLRRLPPPLTWTSPNRPTQPCTAQTQTNQSVGIAAPSAIRVIYPESVVLNAVIYLPGDPEVSGLPRAFKRRFSVEVRLDCGTFKLLLVYCTHPGDKKVNTCKTGALVAF

SEQ ID NO: 34887 - protein, 85 aa, Homo sapiens
MASKLWSGNLLQSGDSSVPLGQSKMPSHTTLRFTQMLWPRHCHCQLRTAKGLSRAVLLITHIPAVIVPITEPCPVDAVSVVTVEI

SEQ ID NO: 34888 - protein, 262 aa, Homo sapiens
METHRSPGRTSSRALEYSPRRQAFEQGNVDIAVRERRHWPDYPAQRVAVAGATRGLLVAAAVDWLSQDSKWLQDSHIVPDVKLCVVASAYRQSYQSLGNDISLGYRCQPKFSRSIDPTGKAVQTADIRLSARATLWLGGSIEESPVLCSTLRLLLRRFRHPLPGPVRTDRLNPVPRKHRPTRASESPHLVRIRVIYPESVVLNAVIYLPGDPEVSGLPRAFKRRFSVEVRLDCGTFKLLLVYCTHPGDKKVNTCKTGALVAF

SEQ ID NO: 34889 - protein, 4689 aa, Homo sapiens
  DOMAIN (1008)..(1023): VWFC domain proteins domain identified by eMATRIX, accession number BL01208B, p-value=9.156e-10, raw score of 15.83
RPKGAFASRGAAGAVCYARPPPGEGTARPGTVAEMDRGPAAVACTLLLALVACLAPASGQECDSAHFRCGSGHCIPADWRCDGTKDCSDDADEIGCAVVTCQQGYFKCQSEGQCIPSSWVCDQDQDCDDGSDERQDCSQSTCSSHQITCSNGQCIPSEYRCDHVRDCPDGADENDCQYPTCEQLTCDNGACYNTSQKCDWKVDCRDSSDEINCTEICLHNEFSCGNGECIPRAYVCDHDNDCQDGSDEHACNYPTCGGYQFTCPSGRCIYQNWVCDGEDDCKDNGDEDGCESGPHDVHKCSPREWSCPESGRCISIYKVCDGILDCPGREDENNTSTGKYCSMTLCSALNCQYQCHETPYGGACFCPPGYIINHNDSRTCVEFDDCQIWGICDQKCESRPGRHLCHCEEGYILERGQYCKANDSFGEASIIFSNGRDLLIGDIHGRSFRILVESQNRGVAVGVAFHYHLQRVFWTDTVQNKVFSVDINGLNIQEVLNVSVETPENLAVDWVNNKIYLVETKVNRIDMVNLDGSYRVTLITENLGHPRGIAVDPTVGYLFFSDWESLSGEPKLERAFMDGSNRKDLVKTKLGWPAGVTLDMISKRVYWVDSRFDYIETVTYDGIQRKTVVHGGSLIPHPFGVSLFEGQVFFTDWTKMAVLKANKFTETNPQVYYQASLRPYGVTVYHSLRQPYATNPCKDNNGGCEQVCVLSHRTDNDGLGFRCKCTFGFQLDTDERHCIAVQNFLIFSSQVAIRGIPFTLSTQEDVMVPVSGNPSFFVGIDFDAQDSTIFFSDMSKHMIFKQKIDGTGREILAANRVENVESLAFDWISKNLYWTDSHYKSISVMRLADKTRRTVVQYLNNPRSVVVHPFAGYLFFTDWFRPAKIMRAWSDGSHLLPVINTTLGWPNGLAIDWAASRLYWVDAYFDKIEHSTFDGLDRRRLGHIEQMTHPFGLAIFGEHLFFTDWRLGAIIRVRKADGGEMTVIRSGIAYILHLKSYDVNIQTGSNACNQPTHPNGDCSHFCFPVPNFQRVCGCPYGMRLASNHLTCEGDPTNEPPTEQCGLFSFPCKNGRCVPNYYLCDGVDDCHDNSDEQLCGTLNNTCSSSAFTCGHGECIPAHWRCDKRNDCVDGSDEHNCPTHAPASCLDTQYTCDNHQCISKNWVCDTDNDCGDGSDEKNCNSTETCQPSQFNCPNHRCIDLSFVCDGDKDCVDGSDEVGCVLNCTASQFKCASGDKCIGVTNRCDGVFDCSDNSDEAGCPTRPPGMCHSDEFQCQEDGICIPNFWECDGHPDCLYGSDEHNACVPKTCPSSYFHCDNGNCIHRAWLCDRDNDCGDMSDEKDCPTQPFRCPSWQWQCLGHNICVNLSVVCDGIFDCPNGTDESPLCNGNSCSDFNGGCTHECVQEPFGAKCLCPLGFLLANDSKTCEDIDECDILGSCSQHCYNMRGSFRCSCDTGYMLESDGRTCKVTASESLLLLVASQNKIIADSVTSQVHNIYSLVENGSYIVAVDFDSISGRIFWSDATQGKTWSAFQNGTDRRVVFDSSIILTETIAIDWVGRNLYWTDYALETIEVSKIDGSHRTVLISKNLTNPRGLALDPRMNEHLLFWSDWGHHPRIERASMDGSMRTVIVQDKIFWPCGLTIDYPNRLLYFMDSYLDYMDFCDYNGHHRRQVIASDLIIRHPYALTLFEDSVYWTDRATRRVMRANKWHGGNQSVVMYNIQWPLGIVAVHPSKQPNSVNPCAFSRCSHLCLLSSQGPHFYSCVCPSGWSLSPDLLNCLRDDQPFLITVRQHIIFGISLNPEVKSNDAMVPIAGIQNGLDVEFDDAEQYIYWVENPGEIHRVKTDGTNRTVFASISMVGPSMNLALDWISRNLYSTNPRTQSIEVLTLHGDIRYRKTLIANDGTALGVGFPIGITVDPARGKLYWSDQGTDSGVPAKIASANMDGTSVKTLFTGNLEHLECVTLDIEEQKLYWAVTGRGVIERGNVDGTDRMILVHQLSHPWGIAVHDSFLYYTDEQYEVIERVDKATGANKIVLRDNVPNLRGLQVYHRRNAAESSNGCSNNMNACQQICLPVPGGLFSCACATGFKLNPDNRSCSPYNSFIVVSMLSAIRGFSLELSDHSETMVPVAGQGRNALHVDVDVSSGFIYWCDFSSSVASDNAIRRIKPDGSSLMNIVTHGIGENGVRGIAVDWVAGNLYFTNAFVSETLIEVLRINTTYRRVLLKVTVDMPRHIVVDPKNRYLFWADYGQRPKIERSFLDCTNRTVLVSEGIVTPRGLAVDRSDGYVYWVDDSLDIIARIRINGENSEVIRYGSRYPTPYGITVFENSIIWVDRNLKKIFQASKEPENTEPPTVIRDNINWLRDVTIFDKQVQPRSPAEVNNNPCLENNGGCSHLCFALPGLHTPKCDCAFGTLQSDGKNCAISTENFLIFALSNSLRSLHLDPENHSPPFQTINVERTVMSLDYDSVSDRIYFTQNLASGVGQISYATLSSGIHTPTVIASGIGTADGIAFDWITRRIYYSDYLNQMINSMAEDGSNRTVIARVPKPRAIVLDPCQGYLYWADWDTHAKIERATLGGNFRVPIVNSSLVMPSGLTLDYEEDLLYWVDASLQRIERSTLTGVDREVIVNAAVHAFGLTLYGQYIYWTDLYTQRIYRANKYDGSGQIAMTTNLLSQPRGINTVVKNQKQQCNNPCEQFNGGCSHICAPGPNGAECQCPHEGNWYLANNRKHCIVDNGERCGASSFTCSNGRCISEEWKCDNDNDCGDGSDEMESVCALHTCSPTAFTCANGRCVQYSYRCDYYNDCGDGSDEAGCLFRDCNATTEFMCNNRRCIPREFICNGVDNCHDNNTSDEKNCPDRTCQSGYTKCHNSNICIPRVYLCDGDNDCGDNSDENPTYCTTHTCSSSEFQCASGRCIPQHWYCDQETDCFDASDEPASCGHSERTCLADEFKCDGGRCIPSEWICDGDNDCGDMSDEDKRHQCQNQNCSDSEFLCVNDRPPDRRCIPQSWVCDGDVDCTDGYDENQNCTRRTCSENEFTCGYGLCIPKIFRCDRHNDCGDYSDERGCLYQTCQQNQFTCQNGRCISKTFVCDEDNDCGDGSDELMHLCHTPEPTCPPHEFKCDNGRCIEMMKLCNHLDDCLDNSDEKGCGINECHDPSISGCDHNCTDTLTSFYCSCRPGYKLMSDKRTCVDIDECTEMPFVCSQKCENVIGSYICKCAPGYLREPDGKTCRQNSNIEPYLIFSNRYYLRNLTIDGYFYSLILEGLDNVVALDFDRVEKRLYWIDTQRQVIERMFLNKTNKETIINHRLPAAESLAVDWVSRKLYWLDARLDGLFVSDLNGGHRRMLAQHCVDANNTFCFDNPRGLALHPQYGYLYWADWGHRAYIGRVGMDGTNKSVIISTKLEWPNGITIDYTNDLLYWADAHLGYIEYSDLEGHHRHTVYDGALPHPFAITIFEDTIYWTDWNTRTVEKGNKYDGSNRQTLVNTTHRPFDIHVYHPYRQPIVSNPCGTNNGGCSHLCLIKPGGKGFTCECPDDFRTLQLSGSTYCMPMCSSTQFLCANNEKCIPIWWKCDGQKDCSDGSDELALCPQRFCRLGQFQCSDGNCTSPQTLCNAHQNCPDGSDEDRLLCENHHCDSNEWQCANKRCIPESWQCDTFNDCEDNSDEDSSHCASRTCRPGQFRCANGRCIPQAWKCDVDNDCGDHSDEPIEECMSSAHLCDNFTEFSCKTNYRCIPKWAVCNGVDDCRDNSDEQGCEERTCHPVGDFRCKNHHCIPLRWQCDGQNDCGDNSDEENCAPRECTESEFRCVNQQCIPSRWICDHYNDCGDNSDERDCEMRTCHPEYFQCTSGHCVHSELKCDGSADCLDASDEADCPTRFPDGAYCQATMFECKNHVCIPPYWKCDGDDDCGDGSDEELHLCLDVPCNSPNRFRCDNNRCIYSHEVCNGVDDCGDGTDETEEHCRKPTPKPCTEYEYKCGNGHCIPHDNVCDDADDCGDWSDELGCNKGKERTCAENICEQNCTQLNEGGFICSCTAGFETNVFDRTSCLDINECEQFGTCPQHCRNTKGSYECVCADGFTSMSDRPGKRCAAEGSSPLLLLPDNVRIRKYNLSSERFSEYLQDEEYIQAVDYDWDPKDIGLSVVYYTVRGEGSRFGAIKRAYIPNFESGRNNLVQEVDLKLKYVMQPDGIAVDWVGRHIYWSDVKNKRIEVAKLDGRYRKWLISTDLDQPAAIAVNPKLGLMFWTDWGKEPKIESAWMNGEDRNILVFEDLGWPTGLSIDYLNNDRIYWSDFKEDVIETIKYDGTDRRVIAKEAMNPYSLDIFEDQLYWISKEKGEVWKQNKFGQGKKEKTLVVNPWLTQVRIFHQLRYNKSVPNLCKQICSHLCLLRPGGYSCACPQGSSFIEGSTTECDAAIELPINLPPPCRCMHGGNCYFDETDLPKCKCPSGYTGKYCEMAFSKGISPGTTAVAVLLTILLIVVIGALAIAGFFHYRRTGSLLPALPKLPSLSSLVKPSENGNGVTFRSGADLNMDIGVSGFGPETAIDRSMAMSEDFVMEMGKQPIIFENPMYSARDSAVKVVQPIQVTVSENVDNKNYGSPINPSEIVPETNPTSPAADGTQVTKWNLFKRKSKQTTNFENPIYAQMENEQKESVAATPPPSPSLPAKPKPPSRRDPTPTYSATEDTFKDTANLVKEDSEV

SEQ ID NO: 34890 - protein, 409 aa, Homo sapiens
  DOMAIN (90)..(112): LOW DENSITY LIPOPROTEIN (LDL) RECEPTOR SIGNATURE domain identified by eMATRIX, accession number PR00261B, p-value=8.235e- 20, raw score of 14.12
  misc_feature (1)...(409): Xaa = X or * as defined in Table 2
MRTLLKNTVIVLLPYKGSGKLYGESSTELNVEVLNCTASQFKCASGDKCIGVTNRCDGVFDCSDNSDEAGCPTRPPGMCHSDEFQCQEDGICIPNFWECDGHPDCLYGSDEHNACVPKTCPSSYFHCDNGNCIHRAWLCDRDNDCGDMSDEKDCPTQPFRCPSWQWQCLGHNICVNLSVVCDGIFDCPNGQMSPHFALVAAAVDWLSQDSKWLQDSHIVPDVKLCVVASAYRQSYQSLGNDISLGYRCQPKFSRSIDPTGKAVQTADIRLSARATLWLGGSIEESPVLCSTLRLLLRRLPPPLTWTSPNRPTQPCTAQTQTNQSVGIAAPSAIRVIYPESVVLNAVIYLPGDPEVSGLPRAFKRRFSVEVRLDCGTFKLLLVYCTHPGDIKVNTCKTGALVAFRCFLPX

SEQ ID NO: 34891 - protein, 227 aa, Homo sapiens
  DOMAIN (198)..(219): ASPARTATE AMINOTRANSFERASE SIGNATURE domain identified by eMATRIX, accession number PR00799C, p-value=2.800e-21, raw score of 14.71
MGPPDIILAVIEDFKRDTNSKKMNLGVGAYRDDNGKPWTVPKAEAQIATKSLDKEYLSTGGLAEFCKASAELALGENSEVLKSGRWGNHTPIFRDTGMQLQGYRLYDPKTCDFDFTGAVEGLSKIPEQNVVLLHACTHNPTGVDPGLEQWKDTATMVKKKSLFAFFDIAYQGFTSGDGDKDARAVHHFFEQGINVCLCQSYAKNMGLYCERVGAFTVVCKDAMKPKG

SEQ ID NO: 34892 - protein, 452 aa, Homo sapiens
  DOMAIN (158)..(203): kw TRANSCRIPTASE REVERSE II ORF2 domain identified by eMATRIX, accession number DM01354N, p-value=1.000e-40, raw score of 13.17
MGRKYTLKWEFEEGFTEKKELKKVTSEGYITPVEIYDYRQYCYALQRPIATTQIDDVRDGHTTRLAKLEKQEQTHSKASRRQEIIKIRAEPKEIETQKTLQKINESRSWFFEKINKIDRLLARLIKKKREKNQIDAIKNDKGDITTNPTEIQTTIREYYKHLYANKLENLEEMDKFLHTYILPRLNQEEVESLNRPITGSEIEAIINSLPTKKSPGPDGFTADFYQMLEVLARAIMQEKEIKGIQLGKEEVKLSLFADYMIVYLENAIISAQNLLKLISNFSKVSGYKINVQKSQAFLYINNRQTESQIMSERPFTIASKRIKYLGIQLTRDVKNLFKENYKPLLNEIKEDTNKWKKIPCSWVGRINIVKMAILPKVIYRFNAIPIKLPMTFFTELEKTTLKFIWNQKRACITKSILSQKNKAGGIMLPEFKLYYQGSSTQTAWYWYQNRDI

SEQ ID NO: 34893 - protein, 366 aa, Homo sapiens
MANCDINRKDEKGGKEKKDRSKSKSLMDTLKRQLSAKQKPKGKAGKPSGSSADEDTFSSSSAPIVFKAVRAQRPIRSTSLRSHHCSPMPWPLRPTNSEETCIKMEPSPPLNGVRKDFHDLQSETACQEQANSLKSSASQNGDLYLRLDEHVPVVIGLLPQDYIQYTVPLDEGMCPLEGSSSYCLDSSSTMEVSVVPSQVGGRSFPEDESQADQNLVVAPEIFVDQSMNGLLTGTTGVMLQSPRVGPHHVPPLSPLLPPMQNNQIQRNFSGLTGTEAHMAESMLCHLNFDFNSAPGVARVYVSVQSSGPMVVTSLTEELKRLAKQGWLWPPLKSVRRCVLARRSLYTKQLNQEEGTELNLGSSCLLC

SEQ ID NO: 34894 - protein, 99 aa, Homo sapiens
  misc_feature (1)...(99): Xaa = X or * as defined in Table 2
PFHFTCFSCKVYFADPGSAARSVPGSPSAVCAQCILCTGHCAVCPGLGEHHSSGRTLMKTKLHSKKLKPCYLLCXSKNXKTQGGSPKSXNVNKYLVTLI

SEQ ID NO: 34895 - protein, 138 aa, Homo sapiens
  misc_feature (1)...(138): Xaa = X or * as defined in Table 2
CISIIILPGPSAKTLSPVLSLSSPYTASFQPTFVRTFSHQTTYLSLGSVPVAQLKCSAGQQRGELLCRRGVWGSWISVSHFTEIATLPAACLEDGEDFNLGGILDSSKYLXSIQKTNTHRIVDGKVVSETNITDVLRC

SEQ ID NO: 34896 - protein, 545 aa, Homo sapiens
  DOMAIN (20)..(68): IMMUNOGLOBULIN V REGION domain identified by eMATRIX, accession number DM00031A, p-value=3.382e-18, raw score of 16.80
MGWTCKILFLVAAATGAHFLVQLVQSGAEVKKPGASVKVSCKASGYTFTYCYLHWREPVSFICGRCILLTLLLGDCLWGEGAWTQGDVLQPSDRASFLAMGVNTTGQQVGDLSGDFPNSVGKACKCREFHTLTPLAHTSSTTHETFPGMSHIALELSQGSSLLQCLEAQTQGQRQELTVSANEQPESRGHGCVLLCETQSEGKSVRAQAQTSLKGSQKRLGGARTLCTGLSPGQRKQERSKIDTLTSQLKELEKQEQTYSKASRRQEITKIRAELKEIETQKTLQKINESRSWFFEKIYKIDRPLARLIKKKREKNQIDAIKNGKGDITTDPTEIQTTLRQYYKHLYANKLENLEGMDKFLDAYTLPRLNQEEVESLNRPITGPEIEAIINSTPTKKSPGPDRFTAEFYQRSDVLARAIRQKKEIKCIQLGKEEVKLSLFADDMIVYLEIPIISAQNLLKLISNFSKVSGYKISVQKSQAFLYTNNRQTESQIMSELPFTIASKRIKYLGIQLTKDVKDLFKDNCKPLLNEIKEDTNKWKNIPCS

SEQ ID NO: 34897 - protein, 143 aa, Homo sapiens
MGETWVLGTWPGGGLPPRAIGSQAGELPAGTEEQPLSVLQRSQAPAARAFLDAVRLYRQHQGHFGDDDVTLGSDAEVLTAVLMREQLPALRAQTLPGLRGAGRARAWAWTESLSSQHPRAPHVPVRSQVLSEDPLVEPSKPYM

SEQ ID NO: 34898 - protein, 299 aa, Homo sapiens
  DOMAIN (87)..(128): kw TRANSCRIPTASE REVERSE II ORF2 domain identified by eMATRIX, accession number DM01354I, p-value=4.529e-31, raw score of 15.55
MDLNYTLEQMDLTDIYRTFHPTTTEYTFYSTGHGTFSKTDDVIGHKMSLDKFKKIEMISNTVSDHSGIKLEINSERNLENHANTWKLNNLLLNECWVKNKMKMEIKKLFELNDNNDTTYHNLWDRAKVVIRGKCIALNTYIKKSERAQTDNLRIKNKNHMIISIDAEKAFDKIQHPFMIKTLSKISIRGTYLNLIKDIYDKPTANIMLNGEKLKAFTLRTGTRMNQGCPLPSLLFNIVLEVLARAIRQEKEIKGIQIGKEEVKVSLFADYVIVYFENPTDSSRKLLELIKEFSSFWIQD

SEQ ID NO: 34899 - protein, 487 aa, Homo sapiens
  DOMAIN (425)..(479): ATP synthase c subunit proteins domain identified by eMATRIX, accession number BL00605, p-value=9.182e-39, raw score of 27.67
MVTLMGHAALCLHYVMQLGTTGGAWYFPRASSQAREMPQCPTLESQEGENSEEKGDSSKEDPKETVALAFVRENPGAQNGLQNAQQQGKKKRKKKRIIIISGKVLEDFLALAMHFADEETGQKRCSLNQTIQLLITPDTGSIWHQAFLSSIVRRAAQQYGFREGGEDDDWTLYWTDYSVSLERVMEMKSYQKINHFPGMSEICRKDLLARNMSRMLKMFPKDFRFFPRTWCLPADPAQLDLWSQTFWPRPRTAPDGTGADGLGLRLGSLGKGVSGFQHAMASGDQKPATLPPGLWFPSRKLSTFSAYLEDHSYNVEQIWRDIEDVIIKTLISAHPIIRHNYHTCFPNHTLNSACFEILGFDILLDHKLKPWLLETEKMQTAGALFISPALPSYSNFPLQVARREFQTSVVSRDIDTAAKFIGAGAATVGVAGSRAGIGTVFGSLIIGYARNPSLKQQLFSYAILGFALSEAMGLFCLMVAFLILFAM

SEQ ID NO: 34900 - protein, 105 aa, Homo sapiens
  DOMAIN (76)..(96): ATP SYNTHASE C SUBUNIT SIGNATURE domain identified by eMATRIX, accession number PR00124A, p-value=2.125e-17, raw score of 8.81
SWETEKMQTAGALFISPALIRCCTRGLIRPVSASFLNSPVNSSKQPSYSNFPLQVARREFQTSVVSRDIDTAAKFIGAGAATVGVAGSGAGIGTVFGSLIIGYAR

SEQ ID NO: 34901 - protein, 161 aa, Homo sapiens
  DOMAIN (99)..(153): ATP synthase c subunit proteins domain identified by eMATRIX, accession number BL00605, p-value=1.600e-23, raw score of 27.67
VCHLEPGERCGPSRGCRAVGVQTEKMQTAGALFISPALIRCCTRGLIRPVSASFLNSPVNSSKQPSYSNFPLQVARREFQTSVVSRDIDTAAKFIGAGSATVGVADSGAGIGAVFGSLIIVYARKLSLKQQLLFYAILGFALSEGMGLFCLMVAFLILFAM

SEQ ID NO: 34902 - protein, 175 aa, Homo sapiens
  DOMAIN (101)..(130): Arenavirus glycoprotein domain identified by eMATRIX, accession number PF00798J, p-value=5.747e-09, raw score of 18.05
DWYSRSHPKELWEGSKKKSINHSACSLQAHGGPISTSLNPHSKPRGRVSPPPGKRQQECRARPGRSPELAGPPPANVQETSQKNACASRLSEPPGEGPEPAAHPQPHRGSSSGPCSRGGYRQPLFPGPAASGVPASGSVRSRIPGAPQGVALARRGPQGSPSPAPRFFPATERQS

SEQ ID NO: 34903 - protein, 202 aa, Homo sapiens
  misc_feature (1)...(202): Xaa = X or * as defined in Table 2
MAEDKSKRDSIEMSMKGCQTNNGFVHNEDILEQTPDPGSSTDNLKHSTRGILGSQEPDFKGVQLMRGCPRSSSLSQTPHSSPSQAPHSSPSQAPHSSPSQAPHSSPSQTPHSSVTGTAQLSHRHRTAQSQAPHSSPSQTPHSSPSQTVHSSVTDTAQLTVTDTAQLTVTGTAQLTVTGTAQLTVTGTAQLTVTGTVQLTVTX

SEQ ID NO: 34904 - protein, 108 aa, Homo sapiens
LAPAPSAAWRTGLKALTPSSTWMLCASEHHVGSGCVGDHLAGCRQEKTLPCQRYCVFCRRRRARSLQAQCGFSLTPALELLPVPFLKLLCPGPPRRRRICRILPGAGL

SEQ ID NO: 34905 - protein, 290 aa, Homo sapiens
MAPVLSWFIVVDAVAAYKLANEPALARDTPDGPEPRSSPALNTHLHLLGRETQPVPQSTLRDGETEARKGTKDVMWPSPISRCPGYPMCLHILSCAILGVLFSLVYQGCRLGWSDNTALTRCLELEKLGLGDSVDLHVYEIPVEYQTVQRLIPALWEKHSPQLVVHVGVSGMATTVTLEKCGHNKGYKGLDNCRFCPGSQCCVEDGPESIDSIIDMDAVCKRVTTLGLDVSVTISQDAGSLGSQKSKVKVVAGLVPSGGAEGKNPSLPKVTVFSAAEGGPGPSRLSVASP

SEQ ID NO: 34906 - protein, 169 aa, Homo sapiens
  DOMAIN (41)..(65): PYROGLUTAMYL PEPTIDASE I (C15) FAMILY SIGNATURE domain identified by eMATRIX, accession number PR00706A, p-value=1.684e- 13, raw score of 12.85
GPPSRVDDFVAAAAAAVAPVVLYACPRHSPIPPWSIRGRRVVVTGFGPFGEHTVNANWIAVQELEKLGLGDSVDLHVYEIPVEYQTVQRLIPALWEKHSPQLVVHVGVSGMATTVTLEKCGHNKGYKGLDNCRFCPGSQCCVEDGPESIDSIIDMDAVCKRVTTLGQCI

SEQ ID NO: 34907 - protein, 94 aa, Homo sapiens
MAPGALPALGEEEGPGASGLSAELGHLSAGSRAFRETSVDSALDTPFPAGTFVRLEFKLRQTESGRRKDWKKPKCKVQPERRKQKCLTCVKLEC

SEQ ID NO: 34908 - protein, 75 aa, Homo sapiens
  DOMAIN (37)..(59): Chromo domain proteins domain identified by eMATRIX, accession number BL00598, p-value=4.000e-20, raw score of 14.45
MEKKQNKKKVEEVLEEEEQEYVVEKVLYRRLVKGKVEYLLKWKGFSDEDNTWESEENLDCPALMSFCRPRNQPMR

SEQ ID NO: 34909 - protein, 361 aa, Homo sapiens
MGLERPVDRVMWLPGALWNSAVVSAPVGEEWALAGTGNQGLQDIQGMHCPEEGISQIHGRDHRNAKDSHTGVWCSCTLGIISTIIIRPKCRFSIDRSDSDYLPTSSCRRDPGGAEPCQDRPRVEQLCSVLANRSGPLAKCHWYESPVSYTQVCVSDLCQYGTGNRMLCTMLEAYVQLCALRCALPARVASQPGMQLRVACPANSYYDSCGPPFPATCASLNSSAPCTLQCTVSCFCLEGFALEAGSSVPHACCGCHLQGRYIAPGPWPSATGMRAPCPTRRCVSLTSASMARATACCAPCWRPTSNSAPCAARCLPAWRASLGCSYVWRVQPTATMTPVGHPSRPPVLASTPPRPAPSSAQ

SEQ ID NO: 34910 - protein, 70 aa, Homo sapiens
  misc_feature (1)...(70): Xaa = X or * as defined in Table 2
MWTADEIAQLCYEHYGIRLPKKGKPEPNHEWTLLAAVVKIQSPADKACDTPDKPVQVTKEVVSMGTGPNX

SEQ ID NO: 34911 - protein, 76 aa, Homo sapiens
TSQGLFHLCSSRMLPLTPWAPRPGPSRYGQLLEAPDILTSTSTTSTPSPRGGSGKLHFVVLSSQSRVVVLGCSQPP

SEQ ID NO: 34912 - protein, 188 aa, Homo sapiens
  misc_feature (1)...(188): Xaa = X or * as defined in Table 2
GCGCVLLPGGVGAPGHSPEGPVPPRDARQLRTCGLAGTLHLSTSCGHPTGAWRGALGSQWNGHNPVQDHLQEAQPWFLEFDRGXRCFWRMATSFPRYPTWDDYXRLPCCRCLPQCKKPAETTGCLPISGEKTHGGVGDLLGEAPARLRQWASQRQPATDLPAXASRGRPAXGKDTHRACVAGEAAQDA

SEQ ID NO: 34913 - protein, 197 aa, Homo sapiens
  DOMAIN (110)..(126): Putative AMP-binding domain proteins domain identified by eMATRIX, accession number BL00455, p-value=3.571e-12, raw score of 13.31
TPKGGIRLGLAKLGCPTAWINPYGRGMPLAHSVLSSGARVLVVDPDLRESLEEILPKLQAENIRCFYLSHTSPTPGVGALGAALDAAPSHPVPADLRAGITWRSPALFIYTSGTTGLPKPAILTHERVLQMSKMLALSGATADDVVYTEVLPLYHVMGLVVGILGCLDLGTSLASYGLRVYFILWSVLGPSRRTLCL

SEQ ID NO: 34914 - protein, 188 aa, Homo sapiens
  DOMAIN (26)..(61): Matrix protein (MA) p15. domain identified by eMATRIX, accession number PF01140D, p-value=4.977e-09, raw score of 15.54
EEEERKKKKKKKKEEEEGEEEGGGMGEKKKKEEEEEGEEEGEKEREKEREKERKKKKEERKEKERERKKKRERKKEKERERKEGEGERERKSTECTSSSYIIKKLVVKQPQAAPSGEIPEEGIAVLGGDSSMPVIVPEDLPVGQDVEVEDSDINDPDSLILVSSQAGGGGVITAYCNLEHLGSSDPPT

SEQ ID NO: 34915 - protein, 99 aa, Homo sapiens
IYATNSAEVCQYVITHAKVNILLVENDQQLQKILSIPQSSLEPLKAIIQYRLPMKKNNNLYSWDDFMELGRSIPDTQLEQVIESQKANQCAVLHLTLSG

SEQ ID NO: 34916 - protein, 214 aa, Homo sapiens
  DOMAIN (56)..(72): Putative AMP-binding domain proteins domain identified by eMATRIX, accession number BL00455, p-value=4.750e-17, raw score of 13.31
DGSAAPRATSDSFTYTVCVSEFPVDDFMELGRSIPDTQLDAVIESQKANQCAVLIYTSGTTGIPKGVMLSHDNITWIAGAVTKDFKPTDKHETVVSYLPLSHIAAQMMDIWVPIKIGALIYFAQADALKVRLSKDLGSDFILLGSPVGLRPSTKRLPVLSKLGHTYRRVVWVEESSGPHTISNQNNYRLQGPMMKLKRHFVAQKYKKQIDHMYH

SEQ ID NO: 34917 - protein, 278 aa, Homo sapiens
  DOMAIN (128)..(161): PROLINE-RICH PROTEIN 3 domain identified by eMATRIX, accession number DM00215, p-value=3.893e-10, raw score of 19.43
MVTQKLPNAQENLKHAERQAAGCCPGRSHIFQHVGPGASESLRGEGCSTHPEAQGAQERCEQWKKDQHWCLASHTDVTQQWGRHIVQEGGTHRGPSAVLSLRTALDEGARGGCSHPITAQLPLQLRHLPRPPPAPARPSPAPPAATSPPTPPPAPARSSPAPPAATSPPTASSGACAALPQLPLQLRHLPRPPPAPARSSPAPPAAMSPPRPPAPARPRLRRSTACATALRPGERGSAAAQPGARSETSFCRLGAAAAVLDPAFISSQALACPVVGVI

SEQ ID NO: 34918 - protein, 125 aa, Homo sapiens
  DOMAIN (61)..(85): Receptor tyrosine kinase class III proteins domain identified by eMATRIX, accession number BL00240B, p-value=8.468e-09, raw score of 24.70
GFYTCNATNALGYDSVSIAVTLAGKPLVKTSRMTVINTEKPAVTVDIGSTIKTVQGVNVTINCQVAGVPEAEVTWFRNKSKLGSPHHLHEGSLLLTNVSSSDQGLYSCRAANLHGELTESTQLLI

SEQ ID NO: 34919 - protein, 543 aa, Homo sapiens
MNETVILADELCRQPKPSTVQACNRFNCPPAWYPAQWQPPSSKEDAGRVPEAEVTWFRNKSKLGSPHHLHEGSLLLTNVSSSDQGLYSCRAANLHGELTESTQLLILDTLPRDVNRYYFGKSAEYIGGTPTCSWVLVHIACTEARAEIKKTMLRARPGLGALGEPLILPVIQLVEILQATKEPICLVWVELRNFPAAWACITGTLGCWLGPFTLVNRQVSHGLRERQEHLAPDYSHLGPHTTGDCAGRPGLWDEPAVGKQTRGQDEKPQAGSHGGWSRAAEACKPGSLTLTLADNERTDKKASLAHRVFLLFSPYECNSESVSAQYSRKTLSVIRFGFRISNLFARSSSFRIKMVPGWLNTSVLKASQGHAPSLMAFTSLDADVRVLAICQALLLCKSCPRLLDLNDRKRAVQKSVGGRCQGQGMARADVLLCWRKGRPVCWSTVIDGECGLRKPLVKTSRMTVINTEKPAVTVDIGSTIKTVQGVNVTINCQVAGVQEAVVSCLNKQTREPAEENLCVTSRRPPQLLKALHLESLPSKLSSC

SEQ ID NO: 34920 - protein, 407 aa, Homo sapiens
  DOMAIN (51)..(69): VON WILLEBRAND FACTOR TYPE A DOMAIN SIGNATURE domain identified by eMATRIX, accession number PR00453A, p-value=3.423e- 09, raw score of 12.79
MDGTNRFYLYVWETERQQDVEHVARCILCYDKCRPDPECPAGTPGPQEVDVDLVFVVDSSYGVDADVYRGSLSLADAALEDLEVAEQPGASHRGARVALVTHTTPNFGRGFHLTTYGNRKQMQRHVREASARPLQGTAPPGHALEWTLENVLLAAPRPRKAQVLFAIVASETSSWDREKLWTLSLEAKCKGITLFVLALGPGVGTHELAELAELVSAPSEQHLLRLQGVSEPEVNYAQGFTRAFLNLLKSEQSPGTGAPWVEWGEGFTEPGIWACRWTNQYPPPELTEECGGLHRGDTVLQLVTPVNRFMYAAKENSLKRKTKANFHLAVELELDESYFRAYYEGTLYEVSALPLQRSNELLQKWSLFHGSNGRRVSGSHPEVALQQGGTGLPAVLVWQLWRQCQPV

SEQ ID NO: 34921 - protein, 96 aa, Homo sapiens
HKVQQICYRLRLVSQILFSINQTLAERQIVTFTVYPDTERDRETRNLADLKQIKIDLGKFSDNPDGYIDILRGLRQSFDLTWRDIMLLLNQTLAPN

SEQ ID NO: 34922 - protein, 244 aa, Homo sapiens
MASNRAITLTVWPKISFLGIHEAKNPRSENKRLAAILEAAHHHLGSSKNKDHPMGNVPPQGKNTPKMYSGEFGPARVYVPFFLSDLKQIKIDLGKFSDNPDGYIDVSQGLRQSFDLTWRDIMLLLDQTLTPNERSAAITAAREFGDLCYLSQVVAAVAGLVSEAVKIIQGSYCVDIHDVNGILTAKGDLWLSDNHLLKYQALLLEGPVLRLRTCATLNPATFLPDNEEKIEHNCQQVIAQTYAT

SEQ ID NO: 34923 - protein, 183 aa, Homo sapiens
  DOMAIN (121)..(175): Ribosomal protein S12e proteins domain identified by eMATRIX, accession number BL01189B, p-value=1.000e-40, raw score of 13.49
  misc_feature (1)...(183): Xaa = X or * as defined in Table 2
PTAMVEEGIAAGGVMDVNTAVQEVLKTALIHDGLARGIREAAKALDKYVYQSQYCGFLQPDQKLATQGKKGMGVHGVKRKSSXMASVLPGNLRKRRQAHLCVLASNCDEPMYVKLVEALCAEHQINLIKVDDNKKLGEWVGLCKIDREGKPRKVVGCSCVVVKDYGKESQAKDVIEEYFKCKK

SEQ ID NO: 34924 - protein, 175 aa, Homo sapiens
  DOMAIN (75)..(111): Ribosomal protein S12e proteins domain identified by eMATRIX, accession number BL01189A, p-value=9.791e-33, raw score of 14.27
  misc_feature (1)...(175): Xaa = X or * as defined in Table 2
SWRNRTVSNGSAVSASSVHLCFAECKALCGERILTDGSDVSRPTIAAGGVTDVNTALQEVLKTALIHDGLARGISRTWPKALDKRQAHLCVLASNCDEPMYVKLVEALCAEHQINLIKVDDNQETXEKWVGLCKIDREGKPREXWLVGSXCSSLRTIGKESQAKDVIEEYFKCKK

SEQ ID NO: 34925 - protein, 113 aa, Homo sapiens
RSLDLVWWQLSGGLAGSAKPKPCTPVKQSTVMSFPSHKEQYFLMDGKKKYDKESEKYYSILEKHLNLSAKKKESHLQENSSGPSVSTKLINLFSKRLLCAFLPAQLTPYSFCS

SEQ ID NO: 34926 - protein, 554 aa, Homo sapiens
  DOMAIN (56)..(68): RNase H domain identified by eMATRIX, accession number PF00075C, p-value=9.022e-10, raw score of 11.58
ITENGMEKYLHCLPPPPTYVDIVKYPMLAQSITTLSRGTLRVWEDLGSGVTTQYTWTRLLQGFKNSPTIFGEAMARDLQKFPARYLGCVLLQYIDDLLLGQPTAVGSAKGMDTLLQHLEDLLPKSLYGVTKWGDKEHFEWGSQQQRAFYELKGKLISAPALGLPDLTKPFTLYVSEREKMAVAVLTQTVGPWPRPVAYFSKQLDGVSKGWPPCLRALAATALLAREVDKLTLGQNLNIKAPHAVVTLMNTKGHHWLMNARITRYQSLLCDKPHITIEVCNTLNPTTLLLVSESPVEHNCVEVLDSVYSSRPNLRDHPWTSVDWELYVDGSSFINPQGESVWGIIQGKRPIKLWGKRRKVSARDLAIIGGSVEAPKLVQQCVTYWQHNARQGPNVLPGIQSYGAAPFEDLQVALTEMPKCGGNKYLLVLVCAYAGWVEVYPTQTEKAHEVTCVLLRDLLPRFGLPLQISSDNGLGFVADLVQKTAKNLTDTGQLPLDYTGYVGIEPTPNYLTNGITLDVVLRTECKEVELSQGELLVGHCNNKVKGNGDLEQEDG

SEQ ID NO: 34927 - protein, 158 aa, Homo sapiens
  DOMAIN (48)..(59): RNase H domain identified by eMATRIX, accession number PF00075F, p-value=7.088e-10, raw score of 12.87
  misc_feature (1)...(158): Xaa = X or * as defined in Table 2
LIKGTRCLGRRPSFAYSRSNIXAXSXPEGTSAQLAELLALTLALELGNGKRINVYTDSKYAYLILHDHAAIWKERAFLTSGGTPIKYHKEIMELLHTVQKPKEVAVLHCQSHQKESSPLEDTTTAGPLLHPYPAGSSPERSSPSSQQLLGDLFRGIIE

SEQ ID NO: 34928 - protein, 876 aa, Homo sapiens
  DOMAIN (146)..(157): RNase H domain identified by eMATRIX, accession number PF00075B, p-value=1.878e-10, raw score of 12.56
MEQANHPVRLINVVCKDTLKKIVQQETSCPLTHVHYAEAITGRCTAPEDKGSLDQKPPTDDPTGCPWQVPAHVITLTETWVCLTIEGQEIDFLLDTGVQKPNGQWRLVQDLIPIKEAVIPLYPVVPNPYTLISQIPEKAEWFMALDLKDAFFCISLHSDSQFLFAFEDPTNHTSKITRTVLPQGFRDSPPLFGQALAQDLGHFSSPGTLVFQYVDDLILATSSEASCQQATLDLLNFLANQGKVVPNLWGKLPLNTTRKSWSYCTQCKNPRRWQSYTAKAIKKQLAEAGPVTAILLLLIFGPCIFNLLIKFVSSRIEAIMLQMVLQMEPQMSSTNNFYQGPLDRCTDPLSGLESSPRCSEAPCLMSQWTGDIEYDLLLPPIPHQTTLCDLQNLKGIFSRYHRKWYGEILALLTPTANVCGHSQVPHACSIYHDPVTWNPQGLLPKSLYGVTKWGDKEHFEWGSQQQRAFYELKKKLMSAPALGLPDLTKLFTLHVSDREKKMAVRVLTQTMGPWLGPVAYLSKQLDGVSKSWPPCLRALAATALLAREVDKLTLGQNLNIKAPHAVVTLMNTKGHHWLMNARITRYQSLLCDKPHITIEVCNTLNPTTLLLVSESPVEHNCVEVLDSVYSSRPNLRDHPWTSVDWELYVDGSSFINPQGESVWGIIQGKRPIKLWGKRRKVSARDLAIIGGSVEAPKLVQQCVTYWQHNARQGPNVLPGIQSYGAAPFEDLQVALTEMPKCGGNKYLLVLVCAYAGWVEVYPTQTEKAHEVTCVLLRDLLPRFGLPLQISSDNGLGFVADLVQKTAKNLTDTGQLPLDYTGYVGIEPTPNYLTNGITLDVVLRTECKEVELSQGELLVGHCNNKVKGNGDLEQEDG

SEQ ID NO: 34929 - protein, 168 aa, Homo sapiens
FLALTSRFLFVLLNEETRSHLEKSLCWKVSPHIKMDLLQWIQSKAQSDGSTLQQGSLEFFSCLYEIQEEEFIQQALSHFQVIVVSNIASKMEHMVSSFCLKRCRSAQVLHLYGATYSADGEDRARCSAGAHTLLVQLPERTVLLDAYSEHLAAALCTNPNLIELSLYR

SEQ ID NO: 34930 - protein, 126 aa, Homo sapiens
  DOMAIN (24)..(36): Glyceraldehyde 3-phosphate dehydrogenase proteins domain identified by eMATRIX, accession number BL00071A, p-value=2.607e- 14, raw score of 5.81
RQSAASSFASPAEPHRSDTMGKVKVGVNGFGRIGRLVTRAAFNSGKVDIVAINDPFIDLNYMVYMFQYDSTHGKFHGTVKAENGKLVINGNPITIFQERDPSTTTLSSSFPGMTTNLATATGWWTS

SEQ ID NO: 34931 - protein, 160 aa, Homo sapiens
  DOMAIN (89)..(106): GLYCERALDEHYDE-3-PHOSPHATE DEHYDROGENASE SIGNATURE domain identified by eMATRIX, accession number PR00078C, p-value=5.500e- 20, raw score of 15.99
FRAASSFASPAEPHRSDTMGKVKVGVNGFGRIGRLVTRAAFNSGKVDIVAINDPFIDLNYMVYMFQYDSTNCLAPLAKVIHDNFGIVEGLMTTVHAITATQKTVDGPSGKLWRDGRGALQNIIPASTGAAKAVGKVIPELNGKLTGMAFRVPTANVSMVD

SEQ ID NO: 34932 - protein, 136 aa, Homo sapiens
  DOMAIN (47)..(93): Glyceraldehyde 3-phosphate dehydrogenase proteins domain identified by eMATRIX, accession number BL00071B, p-value=2.703e- 28, raw score of 21.70
AEFGTRAASYFAWPAEPHRSDTMGKVKVGVNGKLVINGNPITIFQERDPYKIKWGDAGAEYVEESTGVFTTMENAGAHLQGGATRDIISAPSADAPMFDMGVNHEKYDNSLKIISSASCTTNCLAPLCKVIHDNCG

SEQ ID NO: 34933 - protein, 83 aa, Homo sapiens
  DOMAIN (52)..(71): GLYCERALDEHYDE-3-PHOSPHATE DEHYDROGENASE SIGNATURE domain identified by eMATRIX, accession number PR00078B, p-value=8.116e- 17, raw score of 7.45
  misc_feature (1)...(83): Xaa = X or * as defined in Table 2
SADAPMFDMGVNHEKYDNSLNIISVMKAGPVEKRPAWHPMDTLPXLAPRSLFLCSNASCTTNCLEPLAKVIHDNFGIVEGLMV

SEQ ID NO: 34934 - protein, 159 aa, Homo sapiens
  DOMAIN (27)..(82): Glyceraldehyde 3-phosphate dehydrogenase proteins domain identified by eMATRIX, accession number BL00071D, p-value=1.000e- 40, raw score of 19.39
LAPLVKEIHDNFGMGEGLMTTGHAITATHKTADGPSGKLWRDGRGAHQNIIPASTGAAKAVGKVMPELNGKLTGVAFRVPTANVSVVDLTCRRQKPAKYDDIGKVVRQAPEGPLKGILGYTEHQVVSSDFNSDTHSSTFDAGAGIALNDHFATLSPPPH

SEQ ID NO: 34935 - protein, 67 aa, Homo sapiens
  DOMAIN (7)..(21): GLYCERALDEHYDE-3-PHOSPHATE DEHYDROGENASE SIGNATURE domain identified by eMATRIX, accession number PR00078A, p-value=1.000e- 15, raw score of 10.38
MEKAGAHLQGGAKRVIISAPSADAPMFVMGVNHEKYDNSLKIISNASCTTNCLAPLPLLALPRLWAS

SEQ ID NO: 34936 - protein, 395 aa, Homo sapiens
  DOMAIN (178)..(197): GLYCERALDEHYDE-3-PHOSPHATE DEHYDROGENASE SIGNATURE domain identified by eMATRIX, accession number PR00078B, p-value=3.250e- 24, raw score of 7.45
  misc_feature (1)...(395): Xaa = X or * as defined in Table 2
PSTACRNSARACSTVSRIFFCVASRATSLRTPMGKVKVGVNGFGRIGRLVTRAAFNSGKVDIVAINDPFIDLNYMVYMFQYDSTHGKFHGTVKAENGKLVINGNPITIFQERYPSKINWGDAGAEYVLESTGAFTTMENAGAHLQGGAKRVIISAPSADAPMFVMGVNHEKYDNSLKIISNASCTTNCLAPLAKVIHDNFGIVEGLMTTVHAITATQKTVDGPSGKLWALMGPRGFFQEHQSLPFTGGCARVVGQGSSPELERGKLTWAWAFRCPQLPKRVNGWDLTCRLEKPCPKYDXHQGRVVKAGRRKGPLQGAILGLQLSNPGGSPSGLSTSDNPLLPPFDAWGLAFALQRTHFCSKLIFLGIDNGILGYSNQGGWDLHGPPWPTWAFQGS

SEQ ID NO: 34937 - protein, 55 aa, Homo sapiens
  misc_feature (1)...(55): Xaa = X or * as defined in Table 2
WRIMPTKKVMITMGRTTQRRMLESSQQFWPCHLHXKLVPSCLQLGCLVFHFRRER

SEQ ID NO: 34938 - protein, 114 aa, Homo sapiens
QHAAECKAHAGLPGLPLPARKLASRHGAPRWRQSGVGPGGKVENYGRRRLPGTRHPQSLSHKPAKKIDVARVTFDLYKLNPQDFIGCLNMKATFYDTYSLSYDLHCCGAKRIMK

SEQ ID NO: 34939 - protein, 214 aa, Homo sapiens
MESNAVQLTRMEYAMKSLSLLYPKSLSRHVSVRTSVVTQQLLSEPSPKAPRARPCRVSTADRSVRKGIMAYSLEDLLLKVRDTLMLADKPFFLVLEEDGTTVETEEYFQALAGDTVFMVLQKGQKWQPPSEQGTRHPLSLSHKPAKKIDVARVTFDLYKLNPQDFIGCLNVKATFYDTYSLSYDLHCLGGQAHHERAYRARFRVDDGMGWHTIA

SEQ ID NO: 34940 - protein, 137 aa, Homo sapiens
  misc_feature (1)...(137): Xaa = X or * as defined in Table 2
ESDNNLTQGTSIXQGTRHPQSLFPLSPAKKIXCGPVLTFLTCYKLNPQGLSLGCLNIEGRFFMDYVIPFPIDLALLLGAKRIMKGTLHWALFSMQTTGPRAVFTSCYLQQLLDATEDGHPPKGKASSLIPTCLKILQ

SEQ ID NO: 34941 - protein, 78 aa, Homo sapiens
ARLTVSGEFWGTRAKGLEKARRRSRREATVPRRREARPFQTGNQLSVKMAGPETVARLQHPPLGGPTHSLSFTFFRRA

SEQ ID NO: 34942 - protein, 751 aa, Homo sapiens
  DOMAIN (263)..(307): Sigma-54 interaction domain proteins ATP-binding region A proteins domain identified by eMATRIX, accession number BL00675A, p -value=8.800e-10, raw score of 24.86
EPDVCAKMAGRSMQAARCPTDELSLTNCSVVNEKDFQSGQHVIVRTSPNHRYTFTLKTHPSVVPGSIAFSLPQRKWAGLSIGQEIEVSLYTFDKAKQCIGTMTIEIDFLQKKSNDSNPYDTDKMAAEFIQQFNNQAYSVGQQLVFSFNEKLFGLLVKDIESMDPSILKGEPATGKRQKIEVGLVVGNSQVAFEKAENSSLNLIGKAKTKENRQSIINPDWNFEKMGIGGLDKEFSDIFRRAFAFRVFPPEIVEQMGCIHVKGILLYGPPGCGKTLLARQIGKMLNAREPKVVNGPEILNKYVGESEANIRKLFADAEEEQRRLGANSGLHIIIFDEIDAICKQRGSMAGSTGVHDTVVNQLLSKIDGVEQLNNILVIGMTNRPDLIDEALLRPGRLEVKMEIGLPDEKGRLQILHIHTARMRGHQLLSADVDIKELAVETKNFSGAELEGLVRAAQSTAMNRHIKASTKVEVDMEKAESLQVTRGDFLASLENDIKPAFGTNQEDYASYIMNGIIKWGDPVTRVLDDGELLVQQTKNSDRTPLVSVLLEGPPHSGKTALAAKIAEESNFPFIKICSPDKMIGFSETAKCQAMKKIFDDAYKSQLSCVVVDDIERLLDYVPIGPRFSNLVLQALLVLLKKAPPQGRKLLIIGTTSRKDVLQEMEMLNAFSTTIHVPNIATGEQLLEALELLGNLKDKERTTIAQQVKGKKVWIGIKKLLMLIEMSLQMDPEYRVRKFLALLREEGASPLDFD

SEQ ID NO: 34943 - protein, 64 aa, Homo sapiens
LARSGMGFYRRGLLGEVKGRVEGNRMWHVIVRTSPNHRYTFTLKTHPSVVPGSIAFSLPQRPWS

SEQ ID NO: 34944 - protein, 46 aa, Homo sapiens
HLRCLGCWQPLQNQTSVAAFFPEHKRAISFPVCTIHQEIMRGHWHK

SEQ ID NO: 34945 - protein, 105 aa, Homo sapiens
  DOMAIN (21)..(60): kw TRANSCRIPTASE REVERSE II ORF2 domain identified by eMATRIX, accession number DM01354X, p-value=8.579e-24, raw score of 13.86
RLPFSPRSVGPTPQAPRLLCNGWRQLPTTFFTELEKTTLKFIWNQKRALIAKTILKPKNKAGGITLPDFKLYYKATVTKTARFLLYKVSQIDNTDLFDPVKIKFE

SEQ ID NO: 34946 - protein, 455 aa, Homo sapiens
  DOMAIN (10)..(65): kw TRANSCRIPTASE REVERSE II ORF2 domain identified by eMATRIX, accession number DM01354Q, p-value=1.000e-40, raw score of 9.23
  misc_feature (1)...(455): Xaa = X or * as defined in Table 2
MNIDAKILNKILANRIQQHIKKLIHHDQVGFIPGMQGWFNIRKSMNVIQHINRTKDKNHMIISIDAEKAFDKIQQPFMLNTLNKLGIDGMYLKIIRAIYDKPTANIILNGQKLEAFPSKHGTRQGCPLSPLLFNIVLEVLARAIRQEKEIKGIQLGKEEVKLSLFADDMIIYLENPIVSAQNLLKLIGNFSKVSEYKINVQKSQAFLYTNNRQTESQIMSELPFTIASIRIKYLGIXLTRGVKDLFRENYKPLLNKIKEDTNKWKNIPCSWVGRNNIMKMAILPKVIYRFNAIPIKLPMTFFTELEKTTLKFIWNQKRARIAKSILRQKNKAGGITLPDFKLYYKATVTKGAWFQHHKHTLIKEPLLDSVFSPNRPDHGKKQDKQPQTKNIANASADSKNTQQMNGFVTGAATSFIPKDRTASSLCGCTGRRRQSVAKYLRIRPHINVPSFTYYK

SEQ ID NO: 34947 - protein, 223 aa, Homo sapiens
WHQNLALTRASGSFHSWEEGKGGADMSHEICVANLQVYVRSTDFDRTLMSAEANLAGLFPPNEVQHFNPNISWQPIPVHTVPITEDRLLKFPLGPCPRYEQLQNETRQTPEYQNRSIQNAQFLNMVANETGLTNVTLETIWNVYDTLSCEAPSPPWGRKPPLERLWPRPRELTCPLRYTQTHGLLLPPWASPQTVQRLSQLKDFSFLFLFGIHEQVQKARLQG

SEQ ID NO: 34948 - protein, 640 aa, Homo sapiens
  DOMAIN (5)..(44): PROTEIN ZINC FINGER ZINC-FINGER METAL-BINDING NU domain identified by eMATRIX, accession number PD01066, p-value=1.305e-23, raw score of 19.43
DSVAFEDVAVNFTQEEWALLGPCQKNLYEDVMQETIRNLDCGHETEFVEYENLRDPMNMPLHTTDGPHKCKICGKGFDCPSSLKSHERTHTGEKLYECKQCGKALSHSSSFRRHMTMHTGDGPHKCKICGKAFVYPSVFQRHEKTHTAEKPYKCKQCGKAYRISSSLRRHETTHTGEKPYKCKCGKAFIDFYSFQNHKTTHAGEKPYECKECGKAFSCFQYLSQHRRTHTGEKPYECNTCKKAFSHFGNLKVHERIHSGEKPYECKECGKAFSWLTCFLRHERIHMREKPYECQQCGKAFTHSRFLQGHERIHTGEKPYECKECRKAFSWLTCLLQHERIHTREKPYEGKQCGKAFTHSRFLQGHERTHTAKKLCECLSTVSARKSVDLIIASYPLFLNLFSTPKTLRNCSYRRHERMHTGEKPYECKQCSKALPDSSSYIRHERTHTGEKPYTCKQCGKAFSVSSSLRRHETTHSAEKPYECKQCGKTFHHLGSFQIHMKRHTGDRPHKCKICGKGFDRPTLVRYHERISTGEKPHECKQCGKAFDHLGSFQRHMIRHTRDGPHKCKICGKGFDCSSTLQSHERTHTGEKKLYECKQCGKALSHSSSFRRHMTMHTGDGPHKCKICGKAFVYFIGFQRH

SEQ ID NO: 34949 - protein, 84 aa, Homo sapiens
MGKGSFKYAWALYKQKAECERGVTIDTSLWKFETSKCYVTIKDFIKNIITGTSQQGQTASVAAFCILSSCPASWKNQVSHRLGG

SEQ ID NO: 34950 - protein, 179 aa, Homo sapiens
  DOMAIN (63)..(95): GTP-binding elongation factors proteins domain identified by eMATRIX, accession number BL00301B, p-value=5.500e-31, raw score of 20.09
SINAVASTRRTIEKFEKEAAEMGKGSFKYAWVLDKLKAERERGITIDISLWKFETSKYYVTIIDAPGHRDFIKNMITGTSQADCAVLIVAAGVGEFEASICQNGQTREHALLAYTLGVKQLICRVNKMDSTEPPYSQKRYEEIVKEVSTYIKKIGYNPDTRAFVPISGLNGDHMLEPKC

SEQ ID NO: 34951 - protein, 174 aa, Homo sapiens
  DOMAIN (53)..(91): Synapsins proteins domain identified by eMATRIX, accession number BL00415O, p-value=9.349e-09, raw score of 3.44
GCPSGPGHRCVAGHGAPGAVCRHVPTAWPGYSRCSPGPGPRGVEAVGHQRHRAPETHSTPAADRHRRGLPGSKSDSAMEPSPSPAPQAQPPKPVPKPRTVFGGLSGPATTQRPGLSPALGGPGVSRSPEPSPRPPPLPTSSSEQSSALNTVEMMPNSIYFGLDSRGRAQAAQDK

SEQ ID NO: 34952 - protein, 148 aa, Homo sapiens
  DOMAIN (91)..(118): Cyclophilin-type peptidyl-prolyl cis-trans isomerase signatur domain identified by eMATRIX, accession number BL00170A, p-value= 2.364e-15, raw score of 17.08
  misc_feature (1)...(148): Xaa = X or * as defined in Table 2
RRAHACARRRRKKEMLGVNVLTSHSSQERMKLTFKKKAVNFADAAAAQGPLLPAMVNPTMFFHIAVDGEPLGCVSFEVRGLESKKXLLIXSIKLCXQIGLFADKVPKTAENFHALSTGEKGFGYKGSCFHRIIPGFTCQSGDFTRPTA

SEQ ID NO: 34953 - protein, 247 aa, Homo sapiens
  DOMAIN (124)..(137): CYCLOPHILIN PEPTIDYL-PROLYL CIS-TRANS ISOMERASE SIGNATURE domain identified by eMATRIX, accession number PR00153B, p-value= 9.591e-14, raw score of 11.57
  misc_feature (1)...(247): Xaa = X or * as defined in Table 2
GTRDATAEENRVLLAMVNPTVFFDIAVDGEPLGRVSFEVRGLDTKKXLLIXSIKLCXQIGGSSIFITSDXKNSCLPLIVQQCLLFLRILPLFADKVPKTAGVXFFFKQKIFRALSTGEKGFGYKGFPAFHRIIPGFMCQGWXLSHRHNGTGWQVHLMGRNFEDENFILKAYGVLGSLSMAKCLDPTKIGSPVFPSCTAKTEWLDGQALWCFGKVKKGLNIVEAMERFGSRNGKTSKKITIADCGQLE

SEQ ID NO: 34954 - protein, 204 aa, Homo sapiens
  DOMAIN (89)..(106): RNase H domain identified by eMATRIX, accession number PF00075A, p-value=4.000e-09, raw score of 14.44
  misc_feature (1)...(204): Xaa = X or * as defined in Table 2
PECIIGIDILSSGQNPHIGSLTGRVRAIMVGKAKRKPLELPLPRKILNQKQYRIAGGIEEISATIKDLKDAGVVIPTTSLFDSPIWPVQKTDGSWRMTVDYRQINQVATPIAAAIPDVASLLKQINTSPDTWPIRPPISNGDXGVSGRXACCLEPLAGPHRXITSEASRILEQGPAIFCRXLLSFXETALGLLLGFGGNXTFDY

SEQ ID NO: 34955 - protein, 115 aa, Homo sapiens
  misc_feature (1)...(115): Xaa = X or * as defined in Table 2
DSWAVANGLAGWSGTWKKHDWKINDNEIWGKSMWIDLSEWSKTVKIFVSHESAHHITXKSSAEEDFNNQVDRMIHSVDTTRPLSPATPVIAQWTHEQSGHGGRDGGYTWAQQHGL

SEQ ID NO: 34956 - protein, 416 aa, Homo sapiens
VRVLSPVEKELKLWKNTHKLLSYPTVGAAVTQLQNLTAMGVIGSHGARGQVVALNRQRQGDLQPFTRVTVHWGKGNMQIFGGLLDTGSELTLIPGDPKHHCGPPVKVGAYGGQVINGVLAQVQITVGPQTHPVVISPVPECIIGIDILSSWQNPHIGSLTGRVRAIMVGKAKWKPLELPLPRKIVNQKQYHILGGTVEISATIKDLKDTEAVTPTTSPFNSPIWPVQKTDGSWRMTVDYCKLNQVVTPIAAAVPDVVSLLEQINTSPGTWFEWSPKKALQQVQAAVQAALPFGPYDPADPMVLEVSVADRDAIWSLWNAAIGESQRRPLGFWSKALLSSADNYSPFERQLLASYWALVETERLTVGHQVTLRPELPIMNWVLSDPSSHKVSGAQQRSIIKLKWYIHDWVRAGPEGT

SEQ ID NO: 34957 - protein, 88 aa, Homo sapiens
ARGSKHTGLIAQWAHEQSGHGGRAGGYAWAQQHGLPLTKADLPAMATAECPICQQQRPTLSPRYGTIPWWAWDAPGGRGCWRLQKAGE

SEQ ID NO: 34958 - protein, 67 aa, Homo sapiens
  misc_feature (1)...(67): Xaa = X or * as defined in Table 2
MYSRKAMYKRKYSAAKSKVXXXXXXGPFLKDQFLLPRAGKELXXXXGPQIKFRGPGFNRGGRGKPGG

SEQ ID NO: 34959 - protein, 114 aa, Homo sapiens
MAGEKVEKPDTKEKKPEAKKADAGGKVQEGTGRYSRSAMYSRKAMYKRKYSAAKSKIEKKKEKVLATVTKPVGGDKNGGTQVFQIITYSSYTQKVQLPKSTLKQRQGPCPQGAL

SEQ ID NO: 34960 - protein, 259 aa, Homo sapiens
  DOMAIN (161)..(197): Ribosomal protein L6e proteins domain identified by eMATRIX, accession number BL01170A, p-value=9.647e-32, raw score of 12.34
  misc_feature (1)...(259): Xaa = X or * as defined in Table 2
EAFQTLHFCCLGLRQGTKRMAGEKVEKPDTKEKKPEAKKVDAGGKVKKGNIKAKKPKKGRPHCSRNPVLCSEGFGRYSRSAMYSRKAIYQEGSTFSPLKSKVEKKKKEKVLATVTKPVGGDKNGGTRVVKLRKMPRYYPTEDVPRKLLSHGKKPFSQHVRKLRASITPGTILIILTGRHRGKRVVFLKQLAKLAYLLCXLGPLVLNRVPLRRTHQKFCHLPLSTKIDISNVKIPKHLTDAYFKKKKLRKPRHQEGEIFD

SEQ ID NO: 34961 - protein, 116 aa, Homo sapiens
  DOMAIN (56)..(79): Quinone oxidoreductase / zeta-crystallin proteins domain identified by eMATRIX, accession number BL01162A, p-value=7.353e- 11, raw score of 15.38
FVALAAVLCRQCLPRAWVCRRAGQGSGRHYRAAICAELKKPLTIEEVAPDPVGPHEVRVDVHFCGVNFGDILICRDQYQERPHLPFTPGPVADSRKGLPIRSCCPPYNLWHCDFCS

SEQ ID NO: 34962 - protein, 184 aa, Homo sapiens
  DOMAIN (99)..(143): Quinone oxidoreductase / zeta-crystallin proteins domain identified by eMATRIX, accession number BL01162C, p-value=8.731e- 14, raw score of 22.80
MGLKLNTHMDQTRGSLSGDTLEGSPSKRAKIILKRGGFRGILGGVGVQERRTGQRPALPCHDLRRAEVVPDHRRGGPRPVGPHEDLWQIPEKVSLQEAAVLPITYGTESFALEHRARTQPGEIVLVTAAAGATGLAVMWQQISSGQGNIAAAGSDEKCKLAMEKGAQSSVNYSQGSLKDSATDQ

SEQ ID NO: 34963 - protein, 47 aa, Homo sapiens
  DOMAIN (30)..(41): dUTPase domain identified by eMATRIX, accession number PF00692B, p-value=5.304e-09, raw score of 8.14
PFLLSPNGPMNKVAMVAGQQAKKGVTVLAGVIDPDYQDEISLLLYNR

SEQ ID NO: 34964 - protein, 122 aa, Homo sapiens; identical to SEQ ID NO: 34865

SEQ ID NO: 34965 - protein, 166 aa, Homo sapiens
  misc_feature (1)...(166): Xaa = X or * as defined in Table 2
HKVGHAQHHSFITWKWYTRDWSRAGPEGTGVPYDQLTEEEKTRAWFTDGSARYAGTIRRWTAAALQPLSRTSLKESGEGKSSQWAEVRAVHLVVHFTWKEKXPDVRLYTDSWAVANGLAGWSGTWKKHDWKIDDNEIWGRGMWIDLSEWSKTVKIFVSHESAHHIT

SEQ ID NO: 34966 - protein, 220 aa, Homo sapiens
RTAVKGNLPTTPVISQWAHEQSGHGGRDSGYTWAQQHGLLITKADLAMTTAECLISQQQRPRLSLQYSSIPWGNQPATWWQIDYIRPLPSWKGQSQDSQDRSRNQGVKVKVAPLTITPSDTTAKFLLHVPAALHSAGVDVLVPEGGMLPPGGTTTIPLNWKLRLPPGHFGLLIPLSQQAKKRVTVLAGVIDLDCQDEISLLLYNRDAKELYRYTAHRVSD

SEQ ID NO: 34967 - protein, 93 aa, Homo sapiens
  DOMAIN (30)..(51): GLUTELIN SIGNATURE domain identified by eMATRIX, accession number PR00211B, p-value=4.700e-13, raw score of 0.86
SRVSCSPPPLSPPPPLSPPPPLSPPPLLSPPPPPLSPPPSPPPPVSLPPPPPVFSFPSSCPPPFPPPLLPPLPPPPPLSPPPPPPPWSPSPPI

SEQ ID NO: 34968 - protein, 177 aa, Homo sapiens
MGSSHCTQPGMLAAAVGQAVPGTDTGADSVSLSASCCHQHAIHCAQAIRAKGHLQAHTELPSAPTQPPSCARQCPKSGGDLGGRELYNNHEIRSGKHIGVCISFANNRLFVVSIPKSKTKEQILEEFIKVTGSYWVLGLSFDFRKWPVGQCCQSFHGRLRATPARRAERRDARSFAL

SEQ ID NO: 34969 - protein, 762 aa, Homo sapiens
  DOMAIN (478)..(497): Eukaryotic  RNA-binding region RNP-1 proteins domain identified by eMATRIX, accession number BL00030A, p-value=4.375e- 12, raw score of 14.39
  misc_feature (1)...(762): Xaa = X or * as defined in Table 2
ATAEGSGSSGVKERGAGIRKAERRRTEASGGGGGRGRRRSWRRAGAEGVSEADARGRGGKGREGKGGSRGGARAHRERARRRVELDRVCCQRRELRPPFYNSSTRAGHREQRARVSRNPIPSDRISPPQPNGEISGNMATEHVNGNGTEEPMDTTSAVIHSENFQTLLDAGLPQKVAEKLDEIYVAGLVAHSDLDERAIEALKEFNEDGALAVLQQFKDSDLSHVQNKSAFLCGVMKTYRQREKQGTKVADSSKGPDEAKIKALLERTGYTLDVTTGQRKYGGPPPDSVYSGQQPSVGTEIFVGKIPRDLFEDELVPLFEKAGPIWDLRLMMDPLTGLNRGYAFVTFCTKEAAQEAVKLYNNHEIRSGKHIGVCISVANNRLFVGSIPKSKTKEQILEEFSKVTEGLTDVILYHQPDDKKKNRGFCFLEYEDHKTAAQARRRFNXVGKVQGFGGNVGTVEWADPIEDPDPEVMAKVKVLFVRNLANTVTEEILEKAFSQFGKLERVKKLKDYAFIHFDERDGAVKAMEEMNGKDLEGENIEIVFAKPPDQKRKERKAQRQAAKNQMYDDYYYYGPPHMPPPTRGRGRGGRGGYGYPPDYYGYEDYYDYYGYDYHNYRGGYEDPYYGYEDFQVGARGRGGRGARGAAPSRGRGAAPPRGRAGYSQRGGPGSARGVRGARGGAQQQRGRGVRGARGGRGGNVGGKRKADGYNQPDSKRRQTNNQNWGSQPIAQQPLQGGDHSGNYGYKSENQEFYQDTFGQQWK

SEQ ID NO: 34970 - protein, 122 aa, Homo sapiens
KGFKFDSSVFSTWSLVHTVLLPLAPYYSAGQQAESKNLKESVVPPTAPTENKKQVREDKNWPIPPPPIAETSVLPPSVAEIETPKQTTLCSAAIAGEPLGPCTFPISVRPDSNNPQQFIHEH

SEQ ID NO: 34971 - protein, 334 aa, Homo sapiens
MNAGCGQTHDCAYRQKRPEDVNEEGRLEQRNRKRQDEWGPRDKPASSGYKAGTLDVENWNRAGEGLKHAHQKGLKVDSSAFCTCSLIRTVLMPLSPYYSAGQQAESKNLKESVVPPTASIENKKQEREDKNWPILPPPVAETSVPPPSVAGIETPIQRILRSAAIAGEPSGPCAFPISVRPDSNNPQQFIHEHTPLEFKLLNELKTSVVNIGVQSPFTLGLPESAFGAMRLLPFDVKHWARTCLSASAYLTWNLNGQEMCTDQVRQNRAAGHGDIAEDMLLGNGPYFRPGTSNGTKRAWATIPEEGVPVQSFLPFMEGSQEPSAQFLARLREAV

SEQ ID NO: 34972 - protein, 156 aa, Homo sapiens
  DOMAIN (69)..(78): HYDROGENASE (FE) LARGE CHAIN domain identified by eMATRIX, accession number DM01782E, p-value=9.526e-09, raw score of 11.39
MDSRLYMLSFLPFLVLLVLIRNLRILTIFSMLANISMLVSLVIIIQYITQIITMTAVTGISNTHDHCPFKGVRGLVGIGVLYQSVKLLYIAGILCTLPCSSTSLQKSSSPLPSPGVNTLGTASGSVHSPVMVCLTSAPMTRVPLSASIPPEAEGDG

SEQ ID NO: 34973 - protein, 258 aa, Homo sapiens
VVLMRNLMSGTIFSMLANISMLGSLVIIIQYITQEIPDPSRVPLVASWKTYPLFFGTAIFSFESIGVDLPLENEMKNARHFPPILTLGMPIVTTLDIGMAALGYLRFGDDTKGSIILSLPICWYLHGLSGEGPSQSFSERETKAQVIVPRSEVNVPRRPVSEHSGRGEQLCGLSCRLYQSVKLLYIAGILCTYALQFYVPAEIIIPFAISRVSTRWALPLDLSIRLVMVCLTSAPMTRSTPFCKYSTRGRRRWLEIPV

SEQ ID NO: 34974 - protein, 431 aa, Homo sapiens
  DOMAIN (156)..(211): kw TRANSCRIPTASE REVERSE II ORF2 domain identified by eMATRIX, accession number DM01354Q, p-value=1.000e-40, raw score of 9.23
MGKDFMSKTPKAMATKTKIDKWDLIKRKSFCTAKETTIIVNRQPTEWEKIFATYSSHKELISRIYTELKQIYKKKTNNPINKWAKDMNRHFSKEDIYASKKHMKKCSSSLAIREMQIKTTMRYHLTPVRMEIIKKSGNNRQPIVGPCDNSVILLYKILANRIQQHIKKLIHHDQVGFIPGMQGWFNTCKSINVIQHINRTKDKNHMIISIDAEKAFDKIQQPFMLKTLNKLGIDGMYLKIIIAIYDRPTANIILNGQKLEAFPLKTGTRQGCPLSPLLFNIVLEVLARAIRQEKEIKGSQLGKEEVNLSLFADNMIVYLENPIISAQNLPKLINNFSKVSVCKINVQKPQAFLYTNNRQTESQIMSELPFTIASKRIKYLVIQLTRDVKDLFKENYKPLLNEIKEDTNKWKNIPCSWVGRINIVKMAILSK

SEQ ID NO: 34975 - protein, 236 aa, Homo sapiens
  DOMAIN (28)..(68): kw TRANSCRIPTASE REVERSE II ORF2 domain identified by eMATRIX, accession number DM01354Y, p-value=1.679e-31, raw score of 10.69
WNRRRPCIAKTILSQKNKAGGITLPDFKVYCKSTVTKTAWYWYQNRHIDRWSRTETSEITPHIYNHQIVDKPHKNKQWGKDLLFSKWCWENWVAICRKLKLNLFLTRYTKINSRWIKDLHEKLKTIKTLEENLGNTIQDIGIGKDFMTKMPKAIATKAKIDKWDLIKLKSFCTAKETIIRVNKQPTEWENISAIYPSDRSLISRIYKELKNIYKRLDAVAHTCNPITLKGQGRWIT

SEQ ID NO: 34976 - protein, 192 aa, Homo sapiens
MRVISSLPFSATKESERQKGGEGYLMFYALLGATYISGNELTQNYASVWSPILNDGQEEQNTSRSNVDVLYLGSIKVPSEPSRAGRDHIYTVDIDTSHTEEIYCSKKLTWKSRQADVDTCRMKGKHKLLGLHHELLRRTQDYGHKAGCPESCLLSVRRCPPPQSKAHRESVEELIKGCRRHAGFCACGHITT

SEQ ID NO: 34977 - protein, 257 aa, Homo sapiens
MVTSCNGLWKHNTKVPAMHEMDTLEPFGDEFSGMARCPYDAKHANVALFAGCFRLLRGFEMVERRRKELETVIFHFHSRNPRCYLLVGQIPNGDLSVGLCVGHSLFGDFNCSGNHLSSFSPCSFSAPLALLGPISLPGVSLTPPAEGDTGQALQVVLLKPISAGLKRGKSPFLLNPNAGREHLSTRLRAHSQLSWKEGSFLNPNHVTASRQIMARGQNFIMAAIGGLELHFGLGLSWLLMFTDTSQPLEPQPKLKHS

SEQ ID NO: 34978 - protein, 295 aa, Homo sapiens
FPEDSEPISISHGNYTKQYPVFVGHKPGRNTTQRHRLDIQMIMIMNGTLYIAARDHIYTVDIDTSHTEEIYCSKKTAWEILDRPMVATCRMKGKHKDECHNFIKVLLKKNDDALFVCGTNAFNPSCRNYKMDTLEPFGDEFSGMARCPYDAKHANVALFADGKLYSATVTDFLAIDAVIYRSLGESPTLRTVKHDSKWLKEPYFVQAVDYGDYIYFFFREIAVEYNTMGKLLGLHHELLRRTQDYGHKAGCPESCLLSVRRCPPPQSKAHRESVEELIKGCRRHAGFCACGHITT

SEQ ID NO: 34979 - protein, 962 aa, Homo sapiens
  misc_feature (1)...(962): Xaa = X or * as defined in Table 2
MVLLKVDPGLWGSSLRVLLKADPPYGTQAHAERHGRALAGGLGVGEQSQSLDLLRMSHTYGALFLPRAAVSSWCASVRIRKIKKSPLLDGAPLLYEPDTWLGKWSSSWTLVFTHPFSAALTHSALTARSDTGSLTLSPDGKLYSATVTDFLAIDAVIYRSLGESPTLRTVKHDSKWLKEPYFVQAVDYGDYIYFFFREIAVEYNTMGKVVFPRVAQVCKNDMGGSQRVLEKQWTSFLKARLNCSVPGDSHFYFNILQAVTDVIRINGRDVVLATFSTPYNSIPGSAVCAYDMLDIASVFTGRFKEQKSPDSTWTPVPDERVPKPRPGCCAGSSSLERYATSNEFPDDTLNFIKTHPLMDEAVPSIFNRPWFLRTMVRYRLTKIAVDTAAGPYQNHTVVFLGSEKGIILKFLARIGNSGFLNDSLFLEEMSVYNSEKCSYDGVEDKRIMGMQLDRASSSLYVAFSTCVIKVPLGRCERHGKCKKTCIASRDPYCGWIKEGGACSHLSPNSRTQRGFVVFVVTGSTLHRCLLITSLWRQTHPSYHSSSETGRPVKGGERGKCTLNHFELGYWLPVSYTLRVVIGVGLLKRQTLFPRRRLRWPQGGRRKRSQLEAQRVIRESYLKGHDQLVPVTLLAIAVILAFVMGAVFSGITVYCVCDHRRKDVAVVQRKEKELTHSRRGSMSSVTKLSGLFGDTQSKDPKPEAILTPLMHNGKLATPGNTAKMLIKADQHHLDLTALPTPESTPTLQQKRKPSRGSREWERNQNLINACTKDMPPMGSPVIPTDLPRGPPPATSPAWWSCPSRSRATSMSTWTSPKXARWPRWRWRTRPPHWSIRPSRNISAARVPTMGXTLWRTWTACPPKFHSGRPPWVPREPPCLRPVXASGWKCTTPLPTGLTIRGATPRTRSREATRPPLSKETTLTPPIPLTSPETRALAGETTRRPPRRGWTPSRCTAPSHLARP

SEQ ID NO: 34980 - protein, 160 aa, Homo sapiens
  DOMAIN (37)..(88): Ribosomal protein L30 proteins domain identified by eMATRIX, accession number BL00634, p-value=3.032e-33, raw score of 34.38
MEGVEEKEKVPAVPETLKKKQGNFAELKIKPKMAFVLRIRGVSGVSPKVRKVLQLLRLHQIFSGTFVKLNKASVNMLRIVEPYIAWGYPNLKSVNELIYKRGYGKINKKRIALTDNTLIVPSLGKYGILCMEDLIHEIYTVGKHFKEANNLLWPFKLSSP

SEQ ID NO: 34981 - protein, 91 aa, Homo sapiens
EFGKINKKRIALTDNALIARSLGKYGIICMEDLIHEIYTVGKRFKEANNFLWPFKLSSPRGGMKKKTTHFVEGGDAGNREDQINRLIRRMN

SEQ ID NO: 34982 - protein, 92 aa, Homo sapiens
MAKSIRSGIALTDNRFDCSDLLGKYGIICMEDLIHEIYTCWKTASKEANNFLVALSNWLSSTTGERNKKRPPIFVGRWEMLATGEDQIQQAY

SEQ ID NO: 34983 - protein, 67 aa, Homo sapiens
  misc_feature (1)...(67): Xaa = X or * as defined in Table 2
HQRCRKXXTKLEGXTCRKIEVNTDYIKPXEXEFWMIYYISIYLTSICSSICNENILQLENREKSRNT

SEQ ID NO: 34984 - protein, 279 aa, Homo sapiens
  misc_feature (1)...(279): Xaa = X or * as defined in Table 2
GLAFPPILQKESPHPCLWILFTSPVALSTSRPPCVISSAALCPRRHGFLPPRLLAPLAAAFCPRPRCFLPLPPRLFAPAPVDFCPRRCGFLPLPPRVFAVSCPRRRGLLPPLLFAPSAAAFCGFLAPSPWLFAAFGTRCRGFLGLLVPAAAAFFPRRLRFFLPRLFSPAAAVTFCHPCFLPPPPRLSVPAAASFCRRGFQQEIRTVEIRGSGTRVGLQHQTGHLPRGPSSLPAELHAXARVSPLEASPPSCTRWMQQPEDLGPALTLGRICGVGACWEL

SEQ ID NO: 34985 - protein, 76 aa, Homo sapiens
  misc_feature (1)...(76): Xaa = X or * as defined in Table 2
ARRSTAPVDCKXLQPXAQAALWVLVWDHEAARQPEGVVQPAPGLWPSSRRWRKFQAPGSSGVCHPGALQACPEELS

SEQ ID NO: 34986 - protein, 187 aa, Homo sapiens
MKLVAVFDKQDLHHGGDDISASSMHTQSPERFTSASELGTNNVSAFSVYQAASEIEVTSSVLHASSQKGLSSQHLGFGAPQAGGGSFRHLAPQRKEVLEEYFKYDPEHKLIFRFVRTLFKAMRLTAEFAIEITHGGRDVERATGLVNKIHRQGCGDSFCNIGGNAKPYVCCGKEYVSSSKHQNGIAI

SEQ ID NO: 34987 - protein, 228 aa, Homo sapiens
MGKYAEALRSQQKAVLMSVRVMGIEHPNTIQENMHLALHCFTSRQLSLALSLLQGAHYLMLLVLGEDHPEVALLDNIRRVLHRVMEYDLSLCFLDNALAVSTKYQGPKALKVALGHHLITSVYESKAEFRSALQHQKEGLAAHTSLGEDQEKTKESSEYLKCLTQLAVALRRAMHEIYRNGSSNNIPPLNFTAPSMASVLEQFKGINGILFIPLSQKDLESLKAEVAQ

SEQ ID NO: 34988 - protein, 147 aa, Homo sapiens
VWQSGGDSITSKTNIITCVNCYLYTCIDSSFNQYHSILIVRARQDIWLPVALHRPWESSPFIHVINNILQKILKRSTQFIFTLIAIIMGLIAVTVIAATAGVALRQSIQTVHFVDKWQKNSTRMWNSQRIDQKLANQINDLRQTVIW

SEQ ID NO: 34989 - protein, 125 aa, Homo sapiens
  DOMAIN (18)..(30): RNase H domain identified by eMATRIX, accession number PF00075C, p-value=1.000e-08, raw score of 11.58
  misc_feature (1)...(125): Xaa = X or * as defined in Table 2
FAFTWTDPDTHQAQQITWALLPQGFADSPHYFSQAQISSSSITYLGIILHENTRALPADHVXLISQTPISSTKQQLLSFLGMVRYFCLWIPSFTILTKPLYXFTKANLADPTDPKSFPHSSFRSL

SEQ ID NO: 34990 - protein, 365 aa, Homo sapiens
  DOMAIN (286)..(297): RNase H domain identified by eMATRIX, accession number PF00075B, p-value=1.346e-09, raw score of 12.56
  misc_feature (1)...(365): Xaa = X or * as defined in Table 2
MAKAVLSKKNKTGSTTLPDFKIYYKDIVTEEPGIETLRHTSSTKFSKGLPSRESFSEKQNKTTTHLHPGEINSFIAHTKPAWRSLHTDAHEIWCRDSDQVNSPGRSIPCPPALCSMRKIHLRPLVLRPASPRNISPILNPLHLIAALLPNPKPPFRPPLVSPDLNPQVKDISTPSWATDHVHLTVSLKPYHPYPAQCQYPIPQHALKGLKPVITRLLQHGLLKPINSPYNSHILPVLKPDKPYRLVVQDLRLINHIVLLPIHPMVPNPYTLLSSIPASTTHYSVLDLKHAFFTIPLHPSSQPLFAFTWTDPDTHQAQQITXAVQPQSFTDSPHYLNQAQISSSSVTYLGIILIKAHVLSLPIVSD

SEQ ID NO: 34991 - protein, 586 aa, Homo sapiens
  DOMAIN (15)..(70): kw TRANSCRIPTASE REVERSE II ORF2 domain identified by eMATRIX, accession number DM01354Q, p-value=1.000e-40, raw score of 9.23
  misc_feature (1)...(586): Xaa = X or * as defined in Table 2
KKRESMNIDAKILNKILANRIQQHIKKLIHHDQVGFIPGRQGWFNICKSINVIQHINRAKDKNHMIISIDAEKAFDKIQQLFMLKTLNKLGIDGTYFKIIRAIYDKPTANIILNGKKLEAFPLKTGTRQGCPLSPLLFNIVLEVLARAIRQEKEIKGIQLGKEEVKLSLFADDMIVYLENPIVSAQNLLKLISNFSKVSGYKINVQKSQAFLYTNNRQTESQIMSELPFTIASKRIKYLGIQLTRDVKDLFKENYKPLLKEIKEDANKWKNIPCSWVGRINIVKMAILPKVIYRFNAIPIKLPMTFFTELEKTTLKFIWNQKRAHITKAILSQKNKARGITLPDFKLYYKATVTKTAWYWYQNRDIDQWNRTQPSEITPHIYNYLIFDKPDKNKQWGKGSLFNKWCWENWLAICRKLKLDPFLTPYTKINSRWIKDLNVRPKTTKTLEENLGITIQDIGMGMDFMSKTPKAMATKDKIDKWDLIKLKSFCTAKETTIRVNRQPTKWEKFSQPTHLTKGXYPESTMNSNKFTRKKQTTPSKSGRRNEQTLLKRGHLCSQKTHEKMLTITGHQRNANQNHNEIPSHTC

SEQ ID NO: 34992 - protein, 207 aa, Homo sapiens
  misc_feature (1)...(207): Xaa = X or * as defined in Table 2
MQNQEKFGELISEWAPYGRPRPQIAVGDHHISVYDGEVNWRMSSLQASAAGKDYANRGTEWGEEPSQMLRHELLSGEMCVSRNRGQPLANSERRSEALSPVTPKKLIPADGHKSDPGRTWMKLETIILSKLTQEQKTKHHMFSLISGXFAENDGFQLHPCPSGSLLWPSAGISFFGVTGLRASDLLSLLARGCPRFLDTHISPLSSS

SEQ ID NO: 34993 - protein, 850 aa, Homo sapiens
  DOMAIN (466)..(514): IMMUNOGLOBULIN V REGION domain identified by eMATRIX, accession number DM00031A, p-value=1.000e-40, raw score of 16.80
MEYYAAIKKDEFMSFAGTWMKLTTIILSKLTEEQKTRHRCFHSNAWMSWVRQAPGKGLEWVGCIKSKANGGTTDYAAPVKGRFTISRDDSKNTLYLQMISLKTEDTAVYYCTTGTVRGDEPTSPSTDLQAKHVPAFAVVSSAMNSAAVLGTSPSSPTFTFTLGRHYSRDCSSIKAGRRSSYLLAITTERSKSCDDGLNTFRDEGQVLRHLPNRIPSLPLLRSFFTDGSHQWSVRVADETRMRQRHLLSVVVMVQEMIQIVSMLIKYGFTVPNSRCSWCSLGLKEEAWGLSEGVPQSSGYTFTSYDIHYPGEEPPHICALLSVHTMGSVLIWASLVITLNIQVPRGSGPAVAAQRGTGGDCLVDASQNHQGVLRTSGGAKNHQEMLRTPGGAQDTMGYSKPPGGAQNTRGHSKPPEGAQNHHGALMTRKDVQNHLGSCEIACVCYPLHHDCKFFVASPAMKNCVQCEVQLVQSGGGLVHPGGSLRLSCAGSGFTFSSYAMHWVRQAPGKGLEWVSAIGTGGGTYYADSVKGRFTISRDNAKNSLYLQMNSLRAEDMAVYYCARDTHPPVCHVETHLGMQVANSSEEDELVWSKWDVDVKFILCCAKYHREQLQESALDLKSLHCPSASPALFLATPSQPVLTTGPGSAGSQGGAEMGAHFLVQLVQSGAEVKKPGASVKVSCQASGYTFTYCYLHWREPVSFICGRCILLTLLLGDCLWGEGAWTQGDVLQPSDRASFLAMGGAQCEVQLVESGGGLVQPGGSLRLSCPASGFTFSNHYMSWVRQAPGKGLEWVSYISGDSGYTNYADSVKGRFTISRDNANNSPYLQMNSLRAEDTAVYYCVKHTARGSQ

SEQ ID NO: 34994 - protein, 80 aa, Homo sapiens
VPVLCRDMDDTGNHYSQQTNTRTENQTPHALTPAKSTYSRAHRETVVQDPALRTPSMQISNSTNAGTANASQDSSASWCE

SEQ ID NO: 34995 - protein, 1015 aa, Homo sapiens
  DOMAIN (76)..(93): GELSOLIN FAMILY SIGNATURE domain identified by eMATRIX, accession number PR00597B, p-value=5.629e-09, raw score of 9.78
MLCALSLALCALSLPVRAATASRGASQAGATKGRVPEARPNSMVVEHPEFLKAGKEPGLQIWRVEKFDLVPVPTNLYGDFFTGDAYVILKTVQLRNGNLQYDLHYWLGNECSQDESGAAAIFTVQLDDYLNGRAVQHREVQGFESATFLGYFKSGLKYKKGGVASGFKHVVPNEVVVQRLFQVKGRRVVRATEVPVSWESFNNGDCFILDLGNNIHQWCGSNSNRYERLKATQVSKGIRDNERSGRARVHVSEEGTEPEAMLQELAELESALQEQHEVNASLQQTQGDLSAYEAELEARLNLRDAEANQLKEELEKVTRLTQLEQSALQAELEKERQALKNALGKAQFSEEKEQENSELHAKLKHLQKKLEDAKSQEQVFGLDKELKKLKKAVATSDKLATAELTIAKDQLKSLHGTVMKINQERAEELQEAERFSRKAAQAARDLTRAEAEIELLQNLLRQKGEQENEVSRLEDIMQHLKSKKREERDFIDGNVESLMTELEIEKSLKHHEDIVDEIECIEKTLLKRRSELREADRLLAEAESELSCTKEKTKNAVEKFTDAKRSLLQTESDAEELERRAQETAVNLVKADQQLRSLQADAKDLEQHKIKQEEILKEINKIVAAKDSDFQCLSKKKEKLTEELQKLQKDIEMAERNEDHHLQVLKESEVLLQAKRAELEKLKSQVTSQQQEMAVLDRQLGHKKEELHLLQGSMVQAKADLQEALRLGETEVTEKCNHIREVKSLLEELSFQKGELNVQISERKTQLTLIKQEIEKEEENLQVVLRQMSKHKTDLVDTGLALTTSSKDGFISSFHLFFHLKDLLHTTKHQDVLLSEQTRLQKDISEWANRFEDCQKEEETKQQQLQVLQNEIEENKLKLVQQEMMANQKDLERRQMEISDAMRTLKSEVKDEIRTSLKNLNQFLPELPADLEAILERNENLEGELESLKENLPFTMNEGPFEEKLNFSQVHIMITTRQLLSHNSPRLEYGKEVSIREECGIMTQANHLLEDIANV

SEQ ID NO: 34996 - protein, 111 aa, Homo sapiens
MEYYEAIKKNDHVLCRDMDEAGSHHSQQTNTGAENQTLHVLTHKWEPNMRFFYSSYDIQGALTDVPNTVTVEFILQNWATLSDYLLPQRVTGLTERTVLQNCKSSRFCNWK

SEQ ID NO: 34997 - protein, 82 aa, Homo sapiens
  misc_feature (1)...(82): Xaa = X or * as defined in Table 2
FPIVASPWLLCXLMSFAGTWVKLETIILSKLSHGQKTKHRMFSLIDTVVVGSDDFPLLRVPGCCASSLNAAHTSVNIKLELT

SEQ ID NO: 34998 - protein, 79 aa, Homo sapiens
  misc_feature (1)...(79): Xaa = X or * as defined in Table 2
TANLKNGRKFLXPIHLTKGXYPESTKNVNKFTRKKQTTPSKSGQKIXTNTSQKKTFMQPTGTXKNAHHHWSSEKCKSKP

SEQ ID NO: 34999 - protein, 77 aa, Homo sapiens
  misc_feature (1)...(77): Xaa = X or * as defined in Table 2
RLVYADTCFSTIKLKAEDASTSENMRCLVFCACDSLLRMIVSSFIRVPTKDMYSSFFMAAXYLLQYHQVKSRRCFYE

SEQ ID NO: 35000 - protein, 126 aa, Homo sapiens
  misc_feature (1)...(126): Xaa = X or * as defined in Table 2
SALVCHTCSNWQVHLGDSVFYRSEEQPLEPLPFSYLSSLFPGLHPDPVSSGSQQPSXMPHTDASVTSSHGLGGLAGRNSCIYPCCAPALCADYLWGSPDLFLLLSFQHKGNVGVGLAHSPQFQQGN

SEQ ID NO: 35001 - protein, 92 aa, Homo sapiens
MEYYAAIKKDEFVSFVGTSMKLETIILSKLSQGQKTKHRMFSLIGSSLFSSLSSAMKQAPQATSGLMEPPGPSTPIVQRPRILLVIDDAHTD

SEQ ID NO: 35002 - protein, 119 aa, Homo sapiens
  misc_feature (1)...(119): Xaa = X or * as defined in Table 2
GYYWRPSFQSLRENNECQRKSNSVNAGCLNCDHCVLGIYQQHXQNYFSFDIHYFLSETGRKVSSSIAYFTIGETEALSGKVVPYWQQAAGQGCTLHLLLPQTRLFPGKGRRQPGLLREF

SEQ ID NO: 35003 - protein, 139 aa, Homo sapiens
YSMVYMCHIFLILNPTFSSWPTFCRSLCGPRVTVSPQVISGAASSGQQVIMGMRLRSTSSPETIFCWQGAPRSRFVGMFNTCLNCGSLSNRSRKPFGGSGSFRNANNLPTSRSAETSSCPMPIATRFGVPNRLHSTGIE

SEQ ID NO: 35004 - protein, 291 aa, Homo sapiens
  misc_feature (1)...(291): Xaa = X or * as defined in Table 2
MEYYAAIKNDEFKSFVGIWMKLETIILSKLSQGQKTKHRVFSLRDYKLSHFLISLGFILLKRKDVIGLSSHHPGEQCSHDSPLRSLMVFGPELISGHSPLEPVVVPRRSHGCLIGAVNLKSSNRTPVVQEFERDLAGRAEILGKTSLKIWNVTRRDSALYRCEVVARNDRKEIDEIVIELTVQVKPVTPVCRVPKAVPVGKMATLHCQESEGHPRPHYSWYRNDVPLPTDSRANPRFRNSSFHLNSETGTLVFTAVHKDDSGQYYCIASNDAGSARCEEQEMEVCHTDKRX

SEQ ID NO: 35005 - protein, 187 aa, Homo sapiens
  misc_feature (1)...(187): Xaa = X or * as defined in Table 2
MWHIYTIEYYAAIKKDEFMSFAGTWMKLETIILSKLTQEQKTKHRMFSLVSGSSGHYNKVPQGGLSNRNLILSVLEAGESKIPSEGSSWLADGHLLPVSTRDGEQVSYCLFLFLNPEVDDSSAQKGWWFLSWFNNGNRYERLKATQVSKGIRDNERSGRARVHVSEEGTEPEAMLQVLGPKPALSAX

SEQ ID NO: 35006 - protein, 788 aa, Homo sapiens
  DOMAIN (696)..(717): MAM domain proteins domain identified by eMATRIX, accession number BL00740B, p-value=3.813e-09, raw score of 19.76
RVATMAPHRPAPALLCALSLALCALSLPVRAATASRGASQAGAPQGRVPEARPNSMVVEHPEFLKAGKEPGLQIWRVEKFDLVPVPTNLYGDFFTGDAYVILKTVQLRNGNLQYDLHYWLGNECSQDESGAAAIFTVQLDDYLNGRAVQHREVQGFELAPFLGYFKSGLKYKKGGVASGFKHVVPNEVVVQRLFQVKGRRVVRATEVPVSWESFNNGDCFILDLGNNIHQWCGSNSNRYERLKATQVSKGIRYNERSGRARVHVSEEGTEPEAMLQVLGPRVALPAGTEDTAKEDAANRKLAKLYKVSNGAGTMYVSLWADENEFTQGALKSEDCFILDHGKDGKIFVWKGKHANTEERKAALKTASGFHSPRWDYPKQIQVSVPFLEGGETPLFKQVFKNWRDPDQTDGLGLSYLSSHIANVERVPFDAATLHTSTAMAAQHGMDDDGTGQKQIWRIEGSNKVPVDPATYGQFYGGDSYIILYNYRHGGRQGQIIYNWQGAQSTQDEVAASAILTAQLDEELGGTPVQSRVVQGKEPAHLMSLFGGKPMIIYKGGTSREGGQTAPASTRLFQVRANSAGATRAVEVLPKAGALNSNDAFVLKTPSAAYLWVGTGASEAEKTGAQELLRVLRAQPVQVAEGSEPDGFWEALGGKAAYRTSPRLKDKKMDAHPPRLFACSNKIGRFVIEEVPGELMQEDLATDDVMLLDTWDQVFVWVGKDSQEEEKTEALTSAKRYIETDPANRDRRTPITVVKQGFEPPSFVGWFLGWDDDYWSVDPLDRAMAELAA

SEQ ID NO: 35007 - protein, 88 aa, Homo sapiens
  misc_feature (1)...(88): Xaa = X or * as defined in Table 2
MFGLPNARAATSTAPFASHSLCLCFRILLLLGPGINLANPRNHLVLHQKFSILGRHFSLATEEPCISLALAPSKRWECNSSSXRYENN

SEQ ID NO: 35008 - protein, 601 aa, Homo sapiens
LVQDLLKTLPQMFTKTLETQSALGPALQAAFKLMSPTGGRMSVFQTQLPTLGVGALKPREEPNHRSSAKDIHMTPSTDFYKKLALDCSGQQVAVDLFLLSGQYSDLASLGCISRYSAGSVYYYPSYHHQHNPVQVQKLQKELQRYLTRKIGFEAVMRIRCTKGLSIHTFHGNFFVRSTDLLSLPNVNPDAGYAVQMSVEESLTDTQLVSFQSALLYTSSKGERRIRVHTLCLPVVSTLNDVFLGADVQAISGLLANMAVDRSMTASLSDARDALVNAVIDSLSAYRSSVLSNQQPGLMVPFSLRLFPLFVLALLKQGALNISDRTIPQPPILQLSVEKLSRDGAFLMDAGSTVDGRMESMAVATDGGERPGVPAGSGLSASQRRAELRRRKLLMNSEQRINRIMGFHRPGSGAVHPTCIRDSCAHILVFVFSAVNTVTYGPARKEEESQTKSKQQDSDKLNSLSVPSVSKRVVLGDSVSTGTTDQQGGVAEVKGTQLGDKLDSFIKPPECSSDVNLELRQRNRGDLTADSVQRGSRHGLEQYLSRFEEAMKLRKQLISEKPSQEDGNTTEEFDSFRIFRLVGCALLALGVRAFVCKYLPAK

SEQ ID NO: 35009 - protein, 168 aa, Homo sapiens
MTFQCVVNTHYLTYPRPQRFLYLVVVRPSCASWIMFVLIDRGYVFSYFPQSYGGFGSRILSKPIEVQVGGRSVVAQMWSNKCGQYSDLASLGCISRYSAGSVYYYPSYHHQHNPVQVQKLQKELQRYLTRKIGFEAVMRIRCTKAKPTRHRHYGELEISITIIRAIGK

SEQ ID NO: 35010 - protein, 91 aa, Homo sapiens
DVPEVERETEAESEEDLEVETGDAQGVEAGAGDPDPPVLEIKARKLRIDLGPKRKLMVGKVLKRRKKTKMTRRMKKKKMLATLTRISWKKK

SEQ ID NO: 35011 - protein, 1083 aa, Homo sapiens
  misc_feature (1)...(1083): Xaa = X or * as defined in Table 2
PPGPERSRLGLGVSLHQRSCPKCIAVFTRVSEPRIQFPASRILPSSNTSKDFDPVSGQSNYGGSQGSGQTLNRPPVASNPVTPSLHSGPAPRMPLPASQNPATTPMPSSSFLPEANLPPPLNWQYNYPSTASQTNHCPRASSQPTVSGNTSLTTNHQYVSSGYPSLQNSFIKSGPSVPPLVNPPLPTTFQPGAPHGPPPAGGPPPVRALTPLTSSYRDVPQPLFNSAVNQEGITSNTNNGSMVVHSSYDEIEGGGLLATPQLTNKNPKMSRSVGYSYPSLPPGYQNTTPPGATGVPPSSLNYPSGPQAFTQTPLGANHLTTSMSGLSLQPEGLRVVNLLQERNMLPSTPLKPPVPNLHEDIQKLNCNPELFRCTLTSIPQTQALLNKAKLPLGLLLHPFKDLVQLPVVTSSTIVRCRSCRTYINPFVSFLDQRRWKCNLCYRVNDVPEEFLYNPLTRVYGEPHRRPEVQNATIEFMAPSEYMLRPPQPPVYLFVFDVSHNAVETGYLNSVCQSLLDNLDLLPGNTRTKIGFITFDSTIHFYGLQESLSQPQMLIVSDIEDVFIPMPENLLVNLNESKELVQDLLKTLPQMFTKTLETQSALGPALQAAFKLMSPTGGRMSVFQTQLPTLGVGALKPREEPNHRSSAKDIHMTPSTDFYKKLALDCSGQQVAVDLFLLSGQYSDLASLGCISRYSAGSVYLLSPLYHHQHNPASKLQKLQKELQRYLTRKIGFEAVMRIRRTKGLCIHTFHGNFFVRSTDLLSLPNVNPDAWGMAVQVFSGEESSXLDTQLVSFQSALLYTSSKGERRIRVHTLCWPVVSTLNDDFLGADVQAISGLLANMAVDRSMTASLSDARDALVNAVIDSLSAYRSSVLSNQQPGLMVPFSLRLFPLFVLALLKQKSFQTGTNARLDERIFAMCQVKNQPLVYLMLTTHPSLYRVDNLSDEGALNISDRTIPQPPILQLSVEKLSRDGAFLMDAGSVLMLWVGKNCTQNFLSQVLGVQNYASIPQPMTDLPELDTPESARIIAFISWLREQRPFFPILYVIRDESPMKANFLQNMIEDRTESALSYYEFLLHIQQQVNK

SEQ ID NO: 35012 - protein, 61 aa, Homo sapiens
ICDRIKEEFQFLQAQYHSLKLECEKLASEKTEMQRHYVMYYEMSYGLNIEMHKQSASPSPP

SEQ ID NO: 35013 - protein, 133 aa, Homo sapiens
LPQPQPATPWPSAPTPRFASPAAAMATLWSGTCRIRLWSGSSRATRTAPAALIFPITALGSGQGAWTTRCAAGTCGRAASCSSMTSAPRFSPWATALTRTGWRSEWRVATWRSCTSASRRNTSCTSTRAACCP

SEQ ID NO: 35014 - protein, 257 aa, Homo sapiens
MVLLTQCCWASCLGLAAGRPSKELPVAGQRAFALLTAQESGSANSSSERALAASRSSTMRRLRFSSLLIKAGQPCVARRAGSASPSPPESLVEEERRVALVVAGSREQMRRSLRTLSLLPPNPVTLPAPGRFHPRAQLGQSPCQLAAKPAPSTDSVGPGLVLGPLKEAGLGIALKELPGGKKGQDPDPKLTALYSQGWYQGSPEEPPDSVQSLHTSFSLGSHSTLNGDLSCPAPTSASTCPPRSAARGVRTLPRDGI

SEQ ID NO: 35015 - protein, 138 aa, Homo sapiens
SENVDDVSVMMGTPANKALLDTTGFWHDDFNNATPNDICVAIRSEAADAGIAQAIMQQLEEALKQQALDRNLNVMMFSDNVTLEDEIQLKTRAREKGLLVMGPDCGTSMIAGTPLAFANVMPEGNIGVIGASGTGFRR

SEQ ID NO: 35016 - protein, 551 aa, Homo sapiens
  DOMAIN (482)..(519): AIR carboxylase domain identified by eMATRIX, accession number PF00731B, p-value=7.375e-33, raw score of 19.47
MQQLEEALKQLAQGSGSSQALTQVRRWDSACQKLPDANLALISVAGEYAAELANQALDRNLNVMMFSDNVTLEDEIQLKTRAREKGLLVMGPDCGTSMIAGTPLAFANVMPEGNIGVIGASGTGIQELCSQIALAGEGITHAIGLGGRDLSREVGGISALTALEMLSADEKSEVLAFVSKPPAEAVRLKIVNAMKATGKPTVALFLGYTPAVARDENVWFASSLDEAARLACLLSRQLERIRAKPFFDTQLVRQPLMVETRRIGRLEGHLLFRLRANGNTVTLARVYATIGSYGIYRPLSITKVDPPVPGERVFPESIVRTVVHMMESVALPGGGGVKAAIKGYRIAIKTGTAKKVGPDGRYINKYIAYTAGVAPASQPRFALVVVINDPQAGKYYGGAVSAPVFGAIMGGVLRTMNIEPDALTTGDKNEFVINQGEGTGRMSSRNNPARVAIVMGSKSDWATMQFAAEIFEILNVPHHVEVVSAHRTPDKLFSFAESAEENGYQVIIAGAGGAAHLPGMIAAKTLVPVLGVPVQSAALSGVDSLYYHQDN

SEQ ID NO: 35017 - protein, 200 aa, Homo sapiens
  DOMAIN (143)..(158): G-PROTEIN BETA WD-40 REPEAT SIGNATURE domain identified by eMATRIX, accession number PR00320C, p-value=8.435e-11, raw score of 13.01
LPQPQPATPWPSAPTPRFASPAAAMATLWSGTCRIRLWSGSSRATRTAPAALIFPITALGSGQGAWTTRCAAGTCGRAASCSSMTSAAQIFSPCHCPNQDWLAVGMESSNVEILHVGKPEKYQLHLHESCVLSLKFAPCGRWFVSTGKDNLLNAWRTPYGASIFQSKESSSVLSCDISRNNKYIVTGSGDKKATVYEVVY

SEQ ID NO: 35018 - protein, 437 aa, Homo sapiens
  DOMAIN (351)..(363): PROTEIN TRANSMEMBRANE INTERGENIC REGION RECQ-PLD domain identified by eMATRIX, accession number PD01736B, p-value=9.250e- 09, raw score of 8.42
QNQSTISVMLRSAMTTTMAADLITAIMGQRKQHIDTGFWHDDFNNATPNDICVAIRSEAADAGIAQAIMQQLEEALKQLAQGSGSSQALTQVRRWDSACQKLPDANLALISVAGEYAAELANQALDRNLNVMMFSDNVTLEDEIQLKTRAREKGLLVMGPDCGTSMIAGTPLAFANVMPEGNIGVIGASGTGIQELCSQIALAGEGITHAIGLGGRDLSREVGGISALTALEMLSADEKSEVLAFVSKPPAEAVRLKIVNAMKATGKPTVALFLGYTPAVARDENVWFGSSLDEASLAGCFSVRARSPLTRIDGMMILGMFGGCFAASLWANNVKLRMPRSRIRIMQAIIGGIIAGFGARLAMGCNLAAFFTGIPQFSLHAWFFANPLLIGQTLEDPHEYIDYLDKEFPLYQLVECVVSLNYSYHWECTEIAGVTLY

SEQ ID NO: 35019 - protein, 374 aa, Homo sapiens
  DOMAIN (310)..(355): kw TRANSCRIPTASE REVERSE II ORF2 domain identified by eMATRIX, accession number DM01354N, p-value=1.000e-40, raw score of 13.17
MEAEVDKLELMFQKAESDLDYIQYRLEYEIKTNHPDSASEKNPVTLLKELSVIKSQYQTLYARFKPVAVEQKETKSRICAGMTKTMNVIQKLQKQTDLDLSPLTKEEKTAAEQFKSHSFGMWPCKLKYRQNKKKKKKLSQNRSTTWKLNNLLLNDYWIQNEMKAEIKMFFETNENKDTTYQNLWDTFKAVCRGKFIALNAHKRKQERSKIDTLALQLKELEEQEQTHSKASRRQEITKIRAELKEIETQKNLQKINESRSCFFEKINKMDRLLARLIKKKREKNQIDAIKNDKGGITNDPTEIQTTIREYYKHLYANKLENLEEMDKFLDTYNLPRLNQEEVESLNRPITGSEIEARINSLPTKKSPGPDGFTA

SEQ ID NO: 35020 - protein, 139 aa, Homo sapiens
  DOMAIN (46)..(76): kw TRANSCRIPTASE REVERSE II ORF2 domain identified by eMATRIX, accession number DM01354M, p-value=6.800e-12, raw score of 12.50
  misc_feature (1)...(139): Xaa = X or * as defined in Table 2
GRVGGRVGKIRTXLNXIETKKYKRXNETKSWFFEKIKMDRPLARLTKKRIKEIQITSLRNETGNIITDTTEIHKIIQGXSSSSSSSSSSSSSSSSSFSSSSSSSSSSSSSSDTFKRPITGIKIEMVFXKLPTKKSRISL

SEQ ID NO: 35021 - protein, 218 aa, Homo sapiens
  DOMAIN (167)..(213): kw TRANSCRIPTASE REVERSE II ORF2 domain identified by eMATRIX, accession number DM01354O, p-value=1.000e-40, raw score of 8.73
MEYYAAIKNNTFMSFAATWMKLEAIILSKLTKEQKTKRHMFSLVSTLELGALTALVRCGRWRRQCDDEAMACVTQGRPLARLTKKRREKIQITSLRNETGDITTDTTEIQKIIQGYDEHTYAHKVENLEGMDKLLEKYNPPRLNQEELGTLNRPITSYEMEMIIKKLPNEKSPGPDGFTAEFYQTFKEELVPILLALFHKTEKEGILPNSFYEASITL

SEQ ID NO: 35022 - protein, 262 aa, Homo sapiens
  DOMAIN (71)..(110): DEAD-box subfamily ATP-dependent helicases proteins domain identified by eMATRIX, accession number BL00039A, p-value=3.250e- 22, raw score of 18.44
MPPSLAYKNPRPQQADTQVATMSRGVHWRKKMQAAGPREDVKRSTQAEEHTDRHQHTSRHQLLLMRIFEMGWKKPSPFQEESIPIALSGRDILARAKNGTGKSSAHDIPLLKRLDLKKDTIQTIVIVPTGGPALQVSQICIQVSKHMGGVKVVMTTGGTNSGDDVLRLDDTVHMVIAAPGRILNLIKKGVAKLEETYLRHIGRPGHFGHFGLAINLITYGDHFNLKGIEEQLGKEIKPIPSNIDKSLHVAEFHSKAVENEKP

SEQ ID NO: 35023 - protein, 167 aa, Homo sapiens; identical to SEQ ID NO: 32883

SEQ ID NO: 35024 - protein, 191 aa, Homo sapiens
YSACFFLFSIAMGILLTVPPSFWIPTSFSAFLGFFSSFSLLVLHQPDFSFVLGLWRIISLLVLKIVEGSSNQGMQMASRSWEWPSSSRKMATSVRTLPEPGPSGCRAPSAFPFRKEAGADPSGCPGGRQVPLVAIGRGGALEPQRWELRAPGSAGRLPREGGRTFPGAQSPAGAQSPAGKQSPPGAQSPLH

SEQ ID NO: 35025 - protein, 115 aa, Homo sapiens
  misc_feature (1)...(115): Xaa = X or * as defined in Table 2
PPINISVPHCXPFGGEPLEILIPAPERSSHVLSQSPVRTHSSAVHQSVGASLNCGDKQPPNFSGSKIFFLIYLHLMTGQVRGSSVLCHPNTGIQKEGGTVNEIPIAIEKRKKHAE

SEQ ID NO: 35026 - protein, 155 aa, Homo sapiens
  DOMAIN (24)..(51): Protamine P1 proteins domain identified by eMATRIX, accession number BL00048, p-value=4.197e-10, raw score of 6.39
MRRAGGGAPGATAGAAPTVVLCPARLRQSRDPPQSPLTCQGRRRRRHRGLNRSRAHTSGVRQARPLPDVTPLQRPAPQWRACSPRDPVGRPASRASELPRHRATHTRSRPPGPQPRERPRDPSSARRTPRPRPRLPSTPEHTIVNQAIEATSYTP

SEQ ID NO: 35027 - protein, 93 aa, Homo sapiens
ETGEFTQLKELNIQGNCWTLLLPELGNLYLTGQKKVCKVENSPWVTPIAGQFQLDVSCVSECVCSETYEYLYGQHMQANPEPPKHNNHKSGKD

SEQ ID NO: 35028 - protein, 61 aa, Homo sapiens
EFGTSSSGETTYKKTTSSALKGAIQLGITHTVGSLSTKPERDVLMQDFYVVESIFFPRYRV

SEQ ID NO: 35029 - protein, 50 aa, Homo sapiens
QHQMLARMWSNRNSHSLLPQLEQLGCRMPSPEAAQSRRVLGLAQETTFSS

SEQ ID NO: 35030 - protein, 294 aa, Homo sapiens
WPSVSSGPSSAVSFSSFDPGVASCTSSSASGIQRPMASEVPCASGIPIKKIGHRGVDSSGETTYRKTTSSALKCAIQLCITHTVGSLDPTPERHVLIEPLIELSSSGADGSLLHVSIHDEFIIKTVQHKQAEFLQKLIPGYHIDLNQNSWTLLPKFYGLCCVKAGGKNTQIAVMKNLLLRLNSEGERILLCIGITDILQSYRFVKKLEHSWKALVCDGDTVSVHRPGFYTERFQCFMCNTAFKKIPARTLTTPNAGKDVEQQELSSLLMGMRSGTATVEDSLVVSYKTKHTLTI

SEQ ID NO: 35031 - protein, 136 aa, Homo sapiens
NLQSGGFSCTIMYRKIGPLVDKQIYRFSEEGMVNARFDYTYHDNSFRIASIKPVISETPLPVDLYRYDEISGKVEHFGKFGVIYYDINQIITTAVMTLSKHFDTHGRIKEVQYEMFRSLMYWMTVQYDSMGRVIKR

SEQ ID NO: 35032 - protein, 242 aa, Homo sapiens
LRRFDRPTWRYSYDLNGNLLLLNPGNSVRLMPLRYDLRDRITRLGDVQYKIDDDGYLCQRGSDIFEYNSKGLLTRAYNKASGWSVQYRYDGVGRRASYKTNLGHHLQYFYSDLHNPTRITHVYNHSNSEITSLYYDLQGHLFAMESSSGEEYYVASDNTGTPLAVFSINGLMIKQLQYTAYGEIYYDSNPDFQMVIGFHGGLYDPLTKLVHFTQRDYDVLAGRWTSPDYTMGKNVGQGAGPP

SEQ ID NO: 35033 - protein, 402 aa, Homo sapiens
MKMEKVNTSWLLPPSSISVLIRRGAGSMVLLLQSQRQYIFEYDSSDRLLAVTMPSVARHSMSTHTSIGYIRNIYNPPESNASVIFDYSDDGRILKTSFLGTGRQVFYKYGKLSKLSEIVYDSTAVTFGYDETTGVLKMVNLQSGGFSCTIRYRKIGPLVDKQIYRFSEEGMVNARFDYTYHDNSFRIASIKPVISETPLPVDLYRYDEISGKVEHFIITTAEMTLSKHFDTHGRIKEVLAYEMFRSLMYWMTVQYDSMGRVIKRELKLGPYANTTKYTYDYDGDGQLQSVACNDRPTWRYSYELNGNLHLLNPGNSVRLMPLRYDLRDRITRLGDVQYKIDDDGYLCQRGSDIFEYNFNGAPTKTLSQASGILQSLQGLHEVHRNPACSDFAGREGQPKCHV

SEQ ID NO: 35034 - protein, 220 aa, Homo sapiens
MMLLLLALLGAGLLGASLLTSWHAPARNKIPRAQKWREEPDLDPKPILELPLAELAQQLRTEELSLESILCSYLKQALKVHQEVNCLMDFLGECEEELQALKKLKKSERGLLYGVPMSLKDTYDSMFLEKPATKDGVIMKVLKAQGAIPFVKTNIPLTLLRSLKRASWALNAATPIYGQMLSPLNLKKTCGGSSGGDHGGWPHGPGRGEPGAVPCKALPE

SEQ ID NO: 35035 - protein, 206 aa, Homo sapiens
SDARLHKDDTDICFSKTLNSCKVPQIRYASVERLLERLTDLRFLSIDFLNTFLHTYRIFTTAAVVLGKLSDIYKRPFTSIPVRRARKLSLTSPLNSKIGALDLTTSSSPTTTTQSPAASPPPHTGQIPLDLSRGLSSPEQSPGTQPEVSGSSPHSTAQSKIWSLVWKQYWLMAPSHALKTCHAARLARTFVTSSSATKVHCAISLK

SEQ ID NO: 35036 - protein, 65 aa, Homo sapiens
FGRGISFWLERGNSQVQTPEVRFQQQLEQLNSMGFINREANLQALIATGGDINAAIERLLGSQLS

SEQ ID NO: 35037 - protein, 615 aa, Homo sapiens
  DOMAIN (56)..(108): Ubiquitin domain proteins domain identified by eMATRIX, accession number BL00299, p-value=5.154e-13, raw score of 28.84
MAEAEPGRPGERGGGGAGRAGGRPGGGGGMAEPSGAETRPPIRVTVKTPKDKEEIVICDRASVKEFKEEISRRFKAQQDQLVLILSGKILKDGDTLNQHGIKDGLTVHLVIKTPQKAQDPAAATASSPSTPDPASAPSTTPASPTTPTQPSTSDSASSDAGSGSRRSSGGGPSPGTGEGSPSATASILSGFGGILGLGSLGLGSANFMELQQQMQRQLMSNPEMLLQIMENPLVQDMMSNPDLMRHMIIAKPQMQQLMERNPEISHMLNNPELMRQTMELARNPAVMQEMMRNQDRALSNLESIPGGYNALRRMYTDIQEPMFSAAREQFGNNPFSSLAGNSDSSSSQPLRTENREPLRNPWSPSPPTSQAPGSGGEGTGGSGTSQPGSGMFNSPEMQALLQQISENPQLMQNVISAPYMRSMMQTLAQNPDFAAQMMVNVPLFAGNPQLQEQLRLQLPVFLQQMQNPESLSILTNPRAMQALLQIQQGLQTLQTEAPGLVPSLVSFGMSRTPAPSAGSNAGSTPEAPTSSPATPATSSPTGASSTQQQLMQQMIQLLAGSGNSQVQTSEVRFQQQLEQLNSMGFINREANLQALIATGGDINAAIERLLGSQLS

SEQ ID NO: 35038 - protein, 135 aa, Homo sapiens
  misc_feature (1)...(135): Xaa = X or * as defined in Table 2
MQQMIQLLAGSGXXXXXXXXXXXXXXXXXXXXXXXXXXXXXXXXXXQLLYPXXXXXXXXXXXXXXXXXXXXXXXXXXXXXXXXXXXXXXXXXXXXXXXXXXXXXXXSTLLNKIXXXXXXXXXXXXXXXXXXXXXF

SEQ ID NO: 35039 - protein, 632 aa, Homo sapiens
  DOMAIN (56)..(108): Ubiquitin domain proteins domain identified by eMATRIX, accession number BL00299, p-value=5.154e-13, raw score of 28.84
MAEAEPGRPGERGGGGAGRAGGRPGGGGGMAEPSGAETRPPIRVTVKTPKDKEEIVICDRASVKEFKEEISRRFKAQQDQLVLILSGKILKDGDTLNQHGIKDGLTVHLVIKTPQKAQDPAAATASSPSTPDPASAPSTTPASPTTPTQPSTSDSASSDAGSGSRRSSGGGPSPGTGEGSPSATASILSGFGGILGLGSLGLGSANFMELQQQMQRQLMSNPEMLLQIMENPLVQDMMSNPDLMRHMIIAKPQMQQLMERNPEISHMLNNPELMRQTMELARNPAVMQEMMRNQDRALSNLESIPGGYNALRRMYTDIQEPMFSAAREQFGNNPFSSLAGNSDSSSSQPLRTENREPLPNPWSPSPPTSQAPGSGGEGTGGSGTSQVHPTVLNPFGINAASLRSGMFNSPEMQALLQQISENPQLMQNVISAPYMRSMMQTLAQNPDFAAQMMVNVPLFAGNPQLQEQLRLQLPVFLQQMQNPESLSILTNPRAMQALLQIQQGLQTLQTEAPGLVPSLVSFGMSRTPAPSAGSNAGVYPPRPPLPHPATPSHIFSNRGSPAPQQQLMQQMIQLLAGSGNSQVQTPEVRFQQQLEQLNSMGFINREANLQALIATGGDINAAIERLLGSQLS

SEQ ID NO: 35040 - protein, 73 aa, Homo sapiens
MMGGMLPLFRGGTPNCRQQLRLQLPSLPGSRCRNPESLSILTKSPEAMQGIAARSKQGLTRPCRPKAPGLVPQ

SEQ ID NO: 35041 - protein, 465 aa, Homo sapiens
  DOMAIN (206)..(253): kw TRANSCRIPTASE REVERSE II ORF2 domain identified by eMATRIX, accession number DM01354V, p-value=1.000e-40, raw score of 12.97
KKDQRETRNQKGLGFLRDRPQWVSGKMKQECLQHWNAMAINNHRAVAIFPKRRHGREDGLLSNLPTFGSYAPLRRVSNEFIASAVQRILLERRALPHGNCKLGGLTPQFMNRKNALVLEVLARAIRQEKEIKGIQLGKEEVKLSLFADDMIVYLENPIVSAQNLLKLISNFSKVSGYKINVQKSQAFLYTNNRQTESQIMSELPFTIASKRIKYLGIQLTRDVKDLFKENYKPLLNEIKEDTNKWKNIPCSWVGRINIVKMAILPKVIYRFNAIPIKLPMTFFTELEKTTLKFIWNQKRARIAKSILSQKNKAGGITLPDFKLHYKATVTKTAWYWFQNTDIDQWNRTEPSEIMPHIYNYLIFDNPEKNKQWGTDFLFNKWCWENWLAICRKLKLDPFLTPYTKIKSRWIKDINVRPKTIKALEENLGNTIQDIGMGKDFMSETPKAMTTKVKIDKWDLIKLKSF

SEQ ID NO: 35042 - protein, 123 aa, Homo sapiens
  DOMAIN (23)..(43): kw ALLERGEN POLLEN CIM1 HOL-LI domain identified by eMATRIX, accession number DM01724, p-value=6.070e-10, raw score of 8.14
SVGVALRPWKRERAASERRSSSGGGGGGGGGGGGGGGGSGSGQHAPAAPAGGIEAVNMASASYHISNLLGVLAAAALAVTQALPPPSAVAGSFSAPKSPAHRSAGLPIPAEPLSSPLLQPPPP

SEQ ID NO: 35043 - protein, 336 aa, Homo sapiens; identical to SEQ ID NO: 32222

SEQ ID NO: 35044 - protein, 873 aa, Homo sapiens
  DOMAIN (559)..(576): Zinc finger C2H2 type, domain proteins. domain identified by eMATRIX, accession number BL00028, p-value=8.500e-17, raw score of 16.07
MIKPLSPVWVTTVAQSPDYTSKTLSLNNNKNLKEVGEDCFPLEPSHQIVTALRPQREPGSASVSVHAACPNQGSSQWPASTIKQQCVPEKVSEPLRGPSHGKGNRIVNGKGEAVYSYYNQGILPEQGIQDSFKKATLGRYGSCGLENICLWKNWESIGEGEGQKECYNLCSQYLTTSHNKHLTVKGDKEYRIFQKKPQFLSAAPTEPCIPMNKYQHKFLKSVFCNKNQINFNHDSNISKHHSTHFLENYYNCNECEKVFYQSSKLIFPENIHIQKKPYNSNECGETSDPFSKLTQHQRIYIGESSQRCNKKCIIVFSQSHLKGHKIINTGEKSVKYKERGKAFTRGLHLGHQKIHTGEKPYKCKKCDKAFNKSSHLAQHQRIHTGEKPFKCKECGKAFNRGSYLTQHQRIHTGERAFKCEECGKAFNRGSYLTQHQRIHTGEKPFRCKECGKAFNRSSYVTQHQRMHTGEKPFKCKECGKAFNRASHLTQHQRIHTGEKHFKCKECGKAFNRGSHLTRHQRIHTGEKSFKCEECGKAFIWGSHLTQHQRVHTGEKFFKCKECGKAFTRSSHLTQHQRIHTGEKPFKCKECGKAFNRRSTLTQHQIIHTSAGVVGQQEEPVVPTFQSCHLFYLLMFLPVHLERVHPHPTAPGPAAQKCSIERDAAHSGERSGKYIKDFDLEPSAGPIMAKPSTRQKPMAPDLRPGPLTPLLAFHSGLRPRVNPTGRQAMSAWATRAPRAVLVLAAWDLDVTQMSISLGNQETAPTFSPPVLGSTVQSDSIHWQGGREKHQQVSGSLPPAQVLDFTPSLHRYLHCPLGQSITFLNFDSLPSRLCPVTVDPTGTTNTKEHPNIPPETQPSTGSLNWSVLPSEKIYK

SEQ ID NO: 35045 - protein, 117 aa, Homo sapiens
  misc_feature (1)...(117): Xaa = X or * as defined in Table 2
VLLLSSMSRRKCQSLYVDLLMKKETEXSMEKEKLTMHPLSCTHIXPRPQAPEADKQMRRXTEEQNCRMMWQKKEKEHLNAKRSLAGSGWRDQPLDGKAPGEDHLPIPSPFQLPIHPI

SEQ ID NO: 35046 - protein, 418 aa, Homo sapiens
  DOMAIN (198)..(214): Ank repeat proteins domain identified by eMATRIX, accession number PF00023A, p-value=6.625e-10, raw score of 16.03
MPGRQRLSLVVGQAAKGRELAVHAIPVSTENSTIMAPERTLRPGLCSVPANLTPSRGAPPSHASASAAAENCKSAEPALVAPEFLEEAKSQQPLKWAGDALDPEDIRYQARQLMPTSEPQLQSRRGAPALFGFGSRRSQTAHGSIEHVYTGSGYRIPDSELQKIHRAAAKGDPAGVERCLARRSGDLDALDKQHRTALHLACASGHVQVVTLLVNRKCQIDVCDKENRTPLIQAVHCQEEACAVILLEHGTNPNLKDIYRNTALQYAVYSESTSLAEKLLFHGANIEALDKLSTPHRRPRAASRAPWSSSPSPAALLLHGRESLRCATRVTRLRPVLRGVAPRLLPPGHRFLFRGGALPLPKWLNFWRNGLGAVAPPGAVPVSLLAAVGRPAPRAFLVPGPASGVGAGGAGELFYDSP

SEQ ID NO: 35047 - protein, 281 aa, Homo sapiens
CLHGFGYRIRDSELQKIHRAAVKGDAAGVERCLARRSGDLDALNKTAQIAGAQPREEACTVILLEHGTNPNLKDIYRNTALHYAVYSESTSLAEKLHFHGANIEALDKVLSISFLSKILMSSLKTCGRDAEDYTISHHLTKIQQQILERKKKILKKEKRGKASESEFLNSLGGPTLDKKIRNVEISDESAVSILHELCVDSLPALDDEVLSVATKCVPEKVSEPLCRPSHEKGNRIVNGKGEGSEECLCPAAHRLRCGERLYLPPRLGCERLCLATTPSEK

SEQ ID NO: 35048 - protein, 252 aa, Homo sapiens
  DOMAIN (45)..(58): REPEAT PROTEIN ANK NUCLEAR ANKYR domain identified by eMATRIX, accession number PD00078B, p-value=8.650e-10, raw score of 13.14
QCKPLLVSRKCQIDICDKENRTPKIQEEACAVILLEHGANPNLKDIYGNTALHYAVYSESTSLAEKLLFHGENIEALDKDSNTPLLFAIICKKEKMVEFLLKKKASTHAVDRLRRSALMLAVYYDSPGIVSILLKQNIDVFAQDMCGRDAEDYAISHHLTRNEWSGRVSDDGVCDGGDGGDDDDSKEDDDGGDSDDNDGDGCDDNDGVAMLVIMVLVVMIVVEMMGDNAGMVVLVVMVVVMMTVVEMMMTIM

SEQ ID NO: 35049 - protein, 84 aa, Homo sapiens
  DOMAIN (30)..(52): Actinin-type actin-binding domain proteins domain identified by eMATRIX, accession number BL00019F, p-value=6.609e-09, raw score of 19.68
  misc_feature (1)...(84): Xaa = X or * as defined in Table 2
XSKAIVDGNLKLILGLVWTLILHYSISMPVWEDEGDDDAKKQTPKQRLLGWIQNKIPYLPITNFNQNWQDGKALGALVDSCAPX

SEQ ID NO: 35050 - protein, 2657 aa, Homo sapiens
  DOMAIN (146)..(182): Actinin-type actin-binding domain proteins domain identified by eMATRIX, accession number BL00019C, p-value=4.800e-30, raw score of 14.66
AARGGRPQSSTGRGSGSSKFEPRSRSASVLAPSALGPPNTSPRQLVAHCALPATRMPVTEKDLAEDAPWKKIQQNTFTRWCNEHLKCVNKRIGNLQTDLSDGLRLIALLEVLSQKRMYRKYHQRPTFRQMQLENVSVALEFLDRESIKLVSIDSKAIVDGNLKLILGLVWTLILHYSISMPVWEDEGDDDAKKQTPKQRLLGWIQNKIPYLPITNFNQNWQDGKALGALVDSCAPGLCPDWESWDPQKPVDNAREAMQQADDWLGVPQVITPEEIIHPDVDEHSVMTYLSQFPKAKLKPGAPLKPKLNPKKARAYGRGIEPTGNMVKQPAKFTVDTISAGQGDVMVFVEDPEGNKEEAQVTPDSDKNKTYSVEYLPKVTGLHKVTVLFAGQHISKSPFEVSVDKAQGDASKVTAKGPGLEAVGNIANKPTYFDIYTAGAGVGDIGVEVEDPQGKNTVELLVEDKGNQVYRCVYKPMQPGPHVVKIFFAGDTIPKSPFVVQVGEACNPNACRASGRGLQPKGVRIRETTDFKVDTKAAGSGELGVTMKGPKGLEELVKQKDFLDGVYAFEYYPSTPGRYSIAITWGGHHIPKSPFEVQVGPEAGMQKVRAWGPGLHGGIVGRSADFVVESIGSEVGSLGFAIEGPSQAKIEYNDQNDGSCDVKYWPKEPGEYAVHIMCDDEDIKDSPYMAFIHPATGGYNPDLVRAYGPGLEKSGCIVNNLAEFTVDPKDAGKAPLKIFAQDGEGQRIDIQMKNRMDGTYACSYTPVKAIKHTIAVVWGGVNIPHSPYRVNIGQGSHPQKVKVFGPGVERSGLKANEPTHFTVDCTEAGEGDVSVGIKCDARVLSEDEEDVDFDIIHNANDTFTVKYVPPAAGRYTIKVLFASQEIPASPFRVKVDPSHDASKVKAEGPGLSKAGVENGKPTHFTVYTKGAGKAPLNVQFNSPLPGDAVKDLDIIDNYDYSHTVKYTPTQQGNMQVLVTYGGDPIPKSPFTVGVAAPLDLSKIKLNGLENRVEVGKDQEFTVDTRGAGGQGKLDVTILSPSRKVVPCLVTPVTGRENSTAKFIPREEGLYAVDVTYDGHPVPGSPYTVEASLPPDPSKVKAHGPGLEGGLVGKPAEFTIDTKGAGTGGLGLTVEGPCEAKIECSDNGDGTCSVSYLPTKPGEYFVNILFEEVHIPGSPFKADIEMPFDPSKVVASGPGLEHGKVGEAGLLSVDCSEAGPGALGLEAVSDSGTKAEVSIQNNKDGTYAVTYVPLTAGMYTLTMKYGGELVPHFPARVKVEPAVDTSRIKVFGPGIEGKDVFREATTDFTVDSRPLTQVGGDHIKAHIANPSGASTECFVTDNADGTYQVEYTPFEKGLHVVEVTYDDVPIPNSPFKVAVTEGCQPSRVQAQGPGLKEAFTNKPNVFTVVTRGAGIGGLGITVEGPSESKINCRDNKDGSCSAEYIPFAPGDYDVNITYGGAHIPGSPFRVPVKDVVDPSKVKIAGPGLGSGVRARVLQSFTVDSSKAGLAPLEVRVLGPRGLVEPVNVVDNGDGTHTVTYTPSQEGPYMVSVKYADEEIPRSPFKVKVLPTYDASKVTASGPGLSSYGVPASLPVDFAIDARDAGEGLLAVQITDQEGKPKRAIVHDNKDGTYAVTYIPDKTGRYMIGVTYGGDDIPLSPYRIRATQTGDASKCLATGPGIASTVKTGEEVGFVVDAKTAGKGKVTCTVLTPDGTEAEADVIENEDGTYDIFYTAAKPGTYVIYVRFGGVDIPNSPFTVMATDGEVTAVEEAPVNACPPGFRPWVTEEAYVPVSDMNGLGFKPFDLVIPFAVRKGEITGEVHMPSGKTATPEIVDNKDGTVTVRYAPTEVGLHEMHIKYMGSHIPESPLQFYVNYPNSGSVSAYGPGLVYGVANKTATFTIVTEDAGEGGLDLAIEGPSKAEISCIDNKDGTCTVTYLPTLPGDYSILVKYNDKHIPGSPFTAKITDDSRRCSQVKLGSAADFLLDISETDLSSLTASIKAPSGRDEPCLLKRLPNNHIGISFIPREVGEHLVSIKKNGNHVANSPVSIMVVQSEIGDARRARVYGRGLSEGRTFEMSDFIVDTRDAGYGGISLAVEGPSKVDIQTEDLEDGTCKVSYFPTVPGVYIVSTKFADEHVPGSPFTVKISGEGRVKESITRTSRAPSVATVGSICDLNLKIPEINSSDMSAHVTSPSGRVTEAEIVPMGKNSHCVRFVPQEMGVHTVSVKYRGQHVTGSPFQFTVGPLGEGGAHKVRAGGPGLERGEAGVPAEFSIWTREAGAGGLSIAVEGPSKAEITFDDHKNGSCGVSYIAQEPGNYEVSIKFNDEHIPESPYLVPVIAPSDDARRLTVMSLQESGLKVNQPASFAIRLNGAKGKIDAKVHSPSGAVEECHVSELEPDKYAVRFIPHENGVHTIDVKFNGSHVVGSPFKVRVGEPGQAGNPALVSAYGTGLEGGTTGIQSEFFINTTRAGPGTLSVTIEGPSKVKMDCQETPEGYKVMYTPMAPGNYLISVKYGGPNHIVGSPFKAKVTGQRLVSPGSANETSSILVESVTRSSTETCYSAIPKASSDASKVTSKGAGLSKAFVGQKSSFLVDCSKAGSNMLLIGVHGPTTPCEEVSMKHVGNQQYNVTYVVKERGDYVLAVKWGEEHIPGSPFHVTVP

SEQ ID NO: 35051 - protein, 105 aa, Homo sapiens
VILKASIVQKRIIYFQDEGSLTKKLCEQDSTFDGVTDKPILDCCACGTAKYRLTFYGNWSEKTHPKDYPRRANHWSAIIGGSHSKNYVLWEYGGYASEGVKQVAE

SEQ ID NO: 35052 - protein, 49 aa, Homo sapiens
DPPLCLGLLLHRASIVQKRIIYFQDEGSLTKKLCEQGKTLKHSQQMFFK

SEQ ID NO: 35053 - protein, 346 aa, Homo sapiens
MELEWKVNVKVNSQDTNHHGSLQLARGEAAAVKFGRMSKKQRDSLYAEVQKHQQRLQEQRQQQSGEAEALARVYSSSISNGLSNLNNETSGTYANGHVIDLPKSEGYYNVDSGQPSPDQSGLDMTGIKQIKQEPIYDLTSVPNLFTYSSFNNGQLAPGITMTEIEIVAAEKFPLIYKQSFLLTVLSFGGGGSVICGPTFAKVSSSRRFIHHGDKIQPSINALGWTFMEETPQIFKCRTNTHGKELEHDLPEHSSGQGSTRRKSSCLRRDNNPMLLSGGRFYEKIHNFITGTFDVRKMEHAEGKTSDLVHVGFQAIKMPSSLKQEASNGLIKLEEASGARMKTGHIK

SEQ ID NO: 35054 - protein, 39 aa, Homo sapiens
ECAGSTDDFEPRDLLSPTSSSFSGPSHHRASGHQKQQNF

SEQ ID NO: 35055 - protein, 598 aa, Homo sapiens
  DOMAIN (274)..(308): Urocanase proteins domain identified by eMATRIX, accession number BL01233O, p-value=7.028e-09, raw score of 14.77
MKGAGGQLRLRLRLRLPRGRTLPSVTMKLWVSALLMAWFGVLSCVQAEFFTSIGHMTDLIYAEKELVQSLKEYILVEEAKLSKIKSWANKMEALTSKSAADAEGYLAHPVNAYKLVKRLNTDWPALEDLVLQDSAAGFIANLSVQRQFFPTDEDEIGAAKALMRLQDTYRLDPGTISRGELPGTKYQAMLSVDDCFGMGRSAYNEGDYYHTVLWMEQVLKQLDAGEEATTTKSQVLDYLSYAVFQLGDLHRALELTRRLLSLGKEILGEVTTNVLWLDAVEGRMQHADPSHERAGGNLRYFEQLLEEEREKTLTNQTEAELATPEGIYERPVDYLPERDVYESLCRGEGVKLTPRRQKRLFCRYHHGNRAPQLLIAPFKEEDEWDSPHIVRYYDVMSDEEIERIKEIAKPKLARATVRDPKTGVLTVASYRVSKSSWLEEDDDPVVARVNRRMQHITGLTVKTAELLQVANYGVGGQYEPHFDFSRRPFDSGLKTEGNRLATFLNYMSDVEAGGATVFPDLGAAIWPKKGTAVFWYNLLRSGEGDYRTRHAACPVLVGCKWGFFLLLLPSSHVMSMQLVNAKAAGWKHSEIHRKLKKA

SEQ ID NO: 35056 - protein, 562 aa, Homo sapiens
PSQQEPGSGTSCLRYCWTAQTLPSVTMKLWVSALLMAWFGVLSCVQAEFFTSIGHMTDLIYAEKELVQSLKEYILVEEAKLSKIKSWANKMEALTSKSAADAEGYLAHPVNAYKLVKRLNTDWPALEDLVLQDSAAGFIANLSVQRQFFPTDEDEIGAAKALMRLQDTYRLDPGTISRGELPGTKYQAMLSVDDCFGMGRSAYNEGDYYHTVLWMEQVLKQLDAGEEATTTKSQVLDYLSYAVFQLGDLHRALELTRRLLSLDPSHERAGGNLCRYFEQLLEEEREKTLTNQTEAELTTPEGIYERPVDYLPERDVYESLCRGEGVKLTPRRQKRLFCRYHHGNRAPQLLIAPFKEEDEWDSPHIVRYYDVMSDEEIERIKEIAKPKLARATVRDPKTGVLTVASYRVSKSSWLEEDDDPVVARVNRRMQHITGLTVKTAELLQVANYGVGGQYEPHFDFSRNDERDTFKHLGTGNRVATFLNYMSDVEAGGATVFPDLGAAIWPKKGTAVFWYNLLRSGEGDYRTRHAACPVLVGCKWVSNKWFHERGQEFLRPCGSTEVD

SEQ ID NO: 35057 - protein, 810 aa, Homo sapiens
MLSTGTKYQAMLSVDDCFGMGRSVYNEGGYYHTVLWMEQVLKELDAVEVAPQPRKGEMLLVLECVRDDPEVSEVLLFLMSRGSVKQHFCTDYELIWHNRSFPSSALKPRLGSSVLGAFSVRAGGLVLRELALWMMSALFAPAKQRRVLSFRRDLDEASTALCFRRLSPRVWGRADASLWGSLQPTKRRQPQACHLRTLCPQLLRERKAAEAVSLPPSFPPVKNSAGSLVCYLRKFVASLCTRNCTRWGPRDTNIRPGSLGQTVNRISIGGEVTASQNVHREWACVTICEGKRRINVAAARLAILGPDSGPWLGRALTSGWSPHRTPPVERGGYFARACLYKLAKTGWLEVYGYLSAKQVRPILCPIRIVAGPWWAASRSVGWCQVVVYQGQQEISSCSFCDVFQDLVSAYRKENLMVVSNTGIHDQALILLWPLDSGFEQVCPSEVRTTLLYVAPRRHQELQAGSRAVAASISVAPGTPARQNGSLPWKGGLSQGAKWSSSVGPTPMEARKSSVNSVDTVGSHRSTAELDRFLPEGEQLKAAAAVPPDLQRGDSGETLFYISFVPGFKAFHYFELFHFDGLAVLTISALCSKVAESRNKDKYLQPTDLRQSKQKYKQMVSMSLPMSVGLVLPVPHPMGPPEVSSPSARGLQVISISQLPDPKTMENARIAGTDMGSNSGSAVTDCVDWADHWSPRSQVPRDNKNPHQGLDSYHTDMYRCQICLLYMQTLKLQNFPWASRSEDLLLCPLGPQLSHVDSDSNSSYSHSKHTLPCIPENEAELIVVDNLSDVLLDLVCQYFIEGFRIDVHQGY

SEQ ID NO: 35058 - protein, 218 aa, Homo sapiens
PMGTSFLYECANFQSVSLGDPQEPSCLCGGQPQGAAGGSSGSEDALLCLWDLQARKWKFEMSYTSGNIRGSSFCQFKSSFLVYFKALLKFRELFAQFKSFMGEKKLSLAPPMSDSSGDGIIRKIDYASCKRSGSSIRALPKTYQQPEVLNDTWVSFPSWSEDSTFVSSKKTPYEEQLHRCEDERFEEMKTAGFASFGERSKTGVPNLRVTDWYRLVAC

SEQ ID NO: 35059 - protein, 140 aa, Homo sapiens
  DOMAIN (47)..(62): HISTONE H5 SIGNATURE domain identified by eMATRIX, accession number PR00624E, p-value=8.013e-09, raw score of 3.41
GASSEEAEGASEGPGAPGGWGAPGSQGAQEGGDLQEAEESQEGGDPRKPRSPRKVERHRKAGAPGRDLGRPSLTVLLNHCVLQRLRKIYHSSIKPLEQSYKYNELRQHEITGQRCPCCEEPKPQHQERALFVVVSENRNI

SEQ ID NO: 35060 - protein, 351 aa, Homo sapiens
  DOMAIN (194)..(241): Imidazoleglycerol-phosphate dehydratase proteins domain identified by eMATRIX, accession number BL00954B, p-value=1.000e- 40, raw score of 19.92
MSQKYLFIDRDGTLISEPPSDFQVDRFDKLAFEPGVIPELLKLQKAGYKLVMITNQDGLGTQSFPQADFDGPHNLMMQIFTSQGVQFDEVLICPHLPADECDCRKPKVKLVERYLAEQAMDRANSYVIGDRATDIQLAENMGITGLRYDRETLNWPMIGEQLTRRDRYAHVVRNTKETQIDVQVWLDREGGSKINTGVGFFDHMLDQIATHGGFRMEINVKGDLYIDDHHTVEDTGLALGEALKIALGDKRGIRRFGFVLPMDECFARCALNISGRPHLEYKAEFTYQRVGDLSTEMIEHFFRSLSYTMGVTLHLKTKGKNDHHRVESLFKAFGRTCASHPRGGPGLLDTV

SEQ ID NO: 35061 - protein, 112 aa, Homo sapiens
  DOMAIN (85)..(112): Imidazoleglycerol-phosphate dehydratase proteins domain identified by eMATRIX, accession number BL00954C, p-value=4.000e- 16, raw score of 15.98
LLSVRHVVRNTQETANDVQVWLDREGGSKINTGVCFLDHMLDQIATAVSRMEINVKGDLYIDDHHTVEDTGLALGEALKIAPGDKPGICRFGFVLPMDECLACALDISGGPH

SEQ ID NO: 35062 - protein, 66 aa, Homo sapiens
NSFMNQERKAKLEKGLEFKSRIDSGRAGSLSTFGCTSASVLWTTQWNFRALVYTVWEIVSRLNFAF

SEQ ID NO: 35063 - protein, 427 aa, Homo sapiens
  DOMAIN (278)..(291): LDL-receptor class A (LDLRA) domain proteins domain identified by eMATRIX, accession number BL01209, p-value=5.263e-12, raw score of 9.31
RTSQMSSSAWRQQNRARPSSAILPSSLSLGHPALPQFSQRMPATASQLPGMVGVLEGYGQTAASPGSVSSCSPACSSCCLGCWWPSSWPSCRLHPHLGRPIAHCLPEVLTTTTTTPTITTSQAAGTPKGQQESGVSPSPQSTCGGLLSGPRGFFSSPNYPDPYPPNTHCVWHIQVATDHAIQLKIEALSIESVASCLFDRLELSPEPEGPLLRVCGRVPPPTLNTNASHLLVVFVSDSSVEGFGFHAWYQAMAPGRGSCAHDEFRCDQLICLLPDSVCDGFANCADGSDETNCSAKFSGCGGNLTGLQGTFSTPSYLQQYPHQLLCTWHISVPAGHSIELQFHNFSLEAQDECKFDYVEVYETSSSGAFSLLGRFCGAEPPPHLVSSHHELAVLFRTDHGISSGGFSATYLAFNATERLCLVESTSS

SEQ ID NO: 35064 - protein, 51 aa, Homo sapiens
  DOMAIN (18)..(48): MYOGLOBIN SIGNATURE domain identified by eMATRIX, accession number PR00613F, p-value=4.474e-15, raw score of 7.87
FISECIIRFLQSKHPGDFGADAQGAMNKALELFRKDMAPPIWAPGSRESGV

SEQ ID NO: 35065 - protein, 231 aa, Homo sapiens
  DOMAIN (72)..(96): MYOGLOBIN SIGNATURE domain identified by eMATRIX, accession number PR00613B, p-value=8.200e-31, raw score of 9.02
GSRPQFPGHTRVRASGWRPCSLKPQLLGPVHPVSPYLLFLSSSDCAMGLIDGEWQLVLNVWGKVEADIPGHGQEVLIRLFKGHPETLEKFDKFKHLKSEDEMKASEDLKKHGATVLTALGGILKKKGHHEAEIKPRGTVSNATKHKIPVKVTWRSSPECIIQVLQSKHPGDFGADAQGAMKQGPGSCFRKDNWPPTYKELGLSRAKPLAGFPTPNPSWAPGFKRERGLISV

SEQ ID NO: 35066 - protein, 51 aa, Homo sapiens; identical to SEQ ID NO: 35064
  DOMAIN (18)..(48): MYOGLOBIN SIGNATURE domain identified by eMATRIX, accession number PR00613F, p-value=4.474e-15, raw score of 7.87

SEQ ID NO: 35067 - protein, 202 aa, Homo sapiens
  DOMAIN (172)..(202): MYOGLOBIN SIGNATURE domain identified by eMATRIX, accession number PR00613F, p-value=1.529e-31, raw score of 7.87
  DOMAIN (48)..(118): Globin domain identified by PFam, accession name globin, E- value=6.9e-17, PFam score of 63.3
GSRPQFPGHTRVRASGWRPCSLKPQLLGPVHPVSPYLLFLSSSDCAMGLIDGEWQLVLNVWGKVEADIPGHGQEVLIRLFKGHPETLEKFDKFKHLKSEDEMKASEDLKKHGATVLTALGGILKKKGHHEAEIKPRGTVSNATKHKIPVKVTWRSSPECIIQVLQSKHPGDFGADAQGAMNKALELFRKDMASNYKELGFQG

SEQ ID NO: 35068 - protein, 158 aa, Homo sapiens
MTDVPLKAVWMGRRMPLEAYLWEPCQSLTAGLRTDWGKGVRIIGDQEMSRNPAWRMQLMVGPSPGRGPYLFPRKGVGIQSGSRHGEAGTQSQAPGIACRSDFPRSHSWHGELVWMGQELRGVLHRPWPLASSYILPSPGLCSVCGNTARTPDSGSLAW

SEQ ID NO: 35069 - protein, 179 aa, Homo sapiens
  misc_feature (1)...(179): Xaa = X or * as defined in Table 2
TKELLHSKRNCHQSEQATYKMGENFCNLLIXQSANIQNLQRTXTNLQEKNKQPHQKVGEGYEQTLLNRRSLCSQKTHEKILIITGHQRNANQNHNEIPSHTSXNGNHXKVRKQQVSYKLLXMRPRRTRQVTQXRREPETSLAKETPGNPTNTNAKFKTRGARISHYSSGNGERLPRTVC

SEQ ID NO: 35070 - protein, 2158 aa, Homo sapiens
MPAQPQDRLWVEHFRRTMVEWAGQRMSREKNWFPRSFMVTSLEGDTTFPMRLYVPLLGTHVGHSALPSCDLILYLEKPKDSTKKLLELINKFRVTRYKIKLQKSVVFLNAKNEQSKEENQELGQVAPGANTGASSPQGYGWTTGTSSSFHSWHIGNTVEPRSLEIPGTTGPQRGNHSPGSGSSQVKHSDTCNDYNDSRSLQESYVRDKHSEASWSVLESYVRDKHSEPSSSVLESYVRDKLSDPRSRVLESYVRGKHLDPRSTVLEYYCSGVLCDEQTFRPQQESSGILCEGQTFRPQQYCSGILCEDKHSDPRGSVLESHVRDKYSDHNRSALESYVRGKHSEPCSSVLESYVRERHLDPRSSVLVSHVRDKHSDPPSCVLEFYVRERHSNSSSSFLESDLRGRHSDPSSSVLECYMGDKHSDPSSRLLESYVGDKHSDNGSSVLESYVRDKHSEPRSSALESYVRDKHSEPHSSVLESYQECSGILCEGKHSDHSRGVLECYVRDKYSDTSIRLLESYMRDKYSDNDSSVLESYVGDKHSEPRSVVESYVRDRHLGHSSSVLESHVRDKHSDPNRSVLESYVRDKHLDRLSSVLESYVRDKHSYPRSIVMESYCSGILCEGHSEFHSSVLESYVTDKHSDHSRSVLESYVRDKNSDPSMNLLESYVRDKHSDSHSSVLEYCVGDKHSDHSRSVLESYVRDKHSDPRGSVLESYVRDKHSDPHNSFPESYECSGILCEGKHSDHSRSVLECYVRDKHSDTRSRLVESYVRDKYSDNGSSVLESYVGDKHSEPRSVVGSYVRGRHLDHSSSVLESHVRDKHSDPNRSVLESYVRDKYSDPLSSVLESYVRDKHSYPRSSVMESYVRDKHSDLRSSVLESYGYSEPSRSVLESYVTDKHSDHSSSVLESYVRVKVSDRSRSVLESYVRDIQTIAGMFWNPMDQHSDPRSSVLEFYVRDKHSDPSSSVLESYVRDIQTTDTVFWNSVTDKHSDHSRNVLESYSRSVLESHERGKHSDSSSSVLECYVRDKHSDHSRSVLESYVREKHSEHSRRLLETIVKDKHTDLCSSVLEFYVRKKHSEHSRSVLKSYVRDKHSNHSRSVLESYVSVKYSDNSRSVLESYVRDKHSDPRSSVLESYVRENHSYPRSSVLESYVRVKISESRSSVLESYVRDKHSVHSSSVLESYVRDKHSDHSRSVLESYVRDKHSDPGSSVLESYVRENHSYPRSSVLESYVRVKNSESRSSALESYVRDKHSVHSSSVLESYVRDKHSDHSRSVLESYVRDKHSDPHSSVLESYVRENHSYPRSSVLESYVRVKISESKSSVLESYVRDKHSVHSSSVLESYVRDKHSDHSRSVMEFYVRDKHSDHSGSVLECYLKNKIQNPAAVFWNPIQTFRPWYQRSAILYQGHTYPSHSVLESYVTDKHTNNSRSVLESYVRNKHSDPSSSVLESYVREKHSYPRRGVLESYVREKKLRIQEHCSGILCEGQIFSPQQQCSGMLLRDKHSDNKRSVLESYVRDKHSEAHSSVMESYVRDKHADLSSSVLGSYVRDKHSDPRSSVLGCHVRDKSSDHSRNVLESYMKDKHSDSCSSFLESYVRDKPSDLSSSVLGSYVRDKHSDPRSSVLGCHVRDKSSDHSRNVLQSYVKDKHSDSCSSFLESYVREKHSDPSSSVVKSYVRDKHSDPPSSVLESYVRDKHSDPPSSVLESYVRDKHSDPHSSVLESYVRNKHSDNCRIVLESYVREKRSDPRNSVLESYVRDKHSDQSRSVLESHVTKKLSEHSRSVLESYVMDKHSEPSSSVLEYYVRGKSSDSSSSVLECYLRDKHSDHSWSVLESYVRDKHSDHSRSVLKSYVRDKHSDHSRSLLESLVKDKHSDTCGSVLESYVRDKHAEHCRSVLKSYCSGILCEAHSDPSSSVFECYVRDKHSEPSNSVLECYVRDKHSEHSSSVLESYVRDRHSHNSRNVLESLVKEKHSDPCSSVLESYASDRHSEHSRSVLESYVRVKHSDPRNSVLESYVKDKHSDSSSSFLESYFRIKYSDPRSSVLESYVRDKHSEPSSSVLESYVREKHSDNSRSVVELCVRNKHSDHSRSVQESCVRDKHSDPHNSVIESHMRDRQPSSSVLESYVRVKHSDHSRSVLETCVRTNIQTTAGVFSNPI

SEQ ID NO: 35071 - protein, 207 aa, Homo sapiens
MSSDISEVEDKNEFLTEQLSKPQIKFNTLKDKFLKTRDTLRKKSLALETVHNNLSQTQQQIKEMKEMYENAEAKENNSTGKWSCVEERICQLQHENPCIEQQLDDVHQKECLPSRKEKFKSEPPAFLSGNQVKSSSCSLQTLFPPDDLILYLENPKDSTKKLLELINKFRVTGYKIKLQKSVAFLNDKNEQSKEENQECNPIYNNYK

SEQ ID NO: 35072 - protein, 1090 aa, Homo sapiens
  DOMAIN (135)..(182): Intermediate filaments proteins domain identified by eMATRIX, accession number BL00226D, p-value=7.750e-10, raw score of 19.10
CTLKQENEEKTNVNMLYKKNREELERKEKQYKKEVEAKQLEPTLQSLEMKSKTARNTPNRDFHNHEEMKGLMDENCILKADIAILRQEICTMKNDNLEKENKYLKDIKIVKETNAALEKYIKLNEEMITETAFRYQQELNDLKAENTRLNAELLKEKESKKRLEADIESYQSRLAAAISKHSESVKTERNLKLALERTRDVSVQVEMSSAISKVKAENEFLTEQLSETQIKFNTLKDKFRKTRDSLRKKSLALETVQNDLTQTQQQTQEMKEMYQNAEAKVNNSTGKWNCVEERICHLQRENAWLVQQLDDVHQKEDHKETVTNIQRGFIESGKKDLVLEEKSKKLTNECDHLKESLFQYEREKTEGVPKKENEELRKLFELISSLKYNVNRIRKKNDELEEEATGYKKLLEMTINMLNVFGNEDFDCHGDLKTDQLKMDILIKKLKQKFDDLTAEKEALSSKCVNLAKDNQVLQQEFLSMKKVQQQCEKLEEDKKMLKEEILNLKTHMENNRVELSKLQEYKLELDEKAMQAVEKLEEIHLQEQAQYEKQLEQLNKDNMASLNKKELTLKDVECKFSEMKTAYEEVTTELEEYKEAFAAALKANNSMSKKLTKASNQHTTSWGTNLPRGGIQHVEEVVLRCPLEKEGLREKKLLHEERSLWRRQPIVTGDALTSTCEFWRHLRMSCANWDVGSSDESAVRKKSLALETVQNDLSQTQQQIKEMKEMYQSAEAKVSKSTGKWNCVEERICQLQRENPWLEQQLVDVHQKEDHKEIVINIQRGFIESRKKDLMLEEKNKKLMNEYDHLKESLFQYERQKAETVIAQPLNLSAQQSACEGSTTATVAQREQIQEPWFSNRVQGFQLSVFSLSLLVMSVMYYSIQEASDSASPRGLEPPMLQRAAQRMARSAEARMGRRAWKQTVMRLGQNICVLCCEWLRQEDRAWMSQTVPQGLGGGSPYPRSQLERTAQLLGLWAWLSHLGSGYPGGRGGAQTLSPAEVVSGQSMKSSAGHGGSRQLTKSSAIACAKLCKASTYINWEDNAVIFLLVQSMVVDLKAEEPHPIATITTGPWGIPPGYHQCSLKIQGSLVHL

SEQ ID NO: 35073 - protein, 193 aa, Homo sapiens
MDVEINMQMVFKTMEMDDIIEGENGRERRASFEPLGISCVERSVQKRQGAKETEMGIQAKTREFRERQARERDYAEIQDFHRTFGCDDELMYGGVSSYEGSMALNARPQSPREGHMMDALYAQVKKPRNSKPSPVDRVWGLTKCGANDRAEAHGAQLMTKAAECPDEMVNTKFMRPEDSLMCTNSDKSFSTWN

SEQ ID NO: 35074 - protein, 169 aa, Homo sapiens
PWPPTFPGREFRERQARERDYAEILYFHRTFGCDDELMHGGDSSYDRAMALNARPQSPREGHMMDALYAQVKKPRNSKPSPVDTNRSTPSNHDRIQRLRQEFQQAKQDEDVEDRRRTYSFEQPWPNARPATHSGRHSVSVEVQMHRQRQEERESSQQAQRQYSSLPRQR

SEQ ID NO: 35075 - protein, 419 aa, Homo sapiens
MEAVDTFLVFNALNFLLTSQTTGCSSSCDPGHGLGQGSGNRFPIAAASARTAEEAKWFFSNKDYSNVLQLPDPKKTEYHIHEKRFSDSRILCYYPEFGKVEEIILTAMKHDWFGKHRKDDKIEKTGKIKIQESFTSEEERIRMKQEQERIQAKTREFRERQARERDYAEIQDFHRTFGCDDELMYGGVSSYEGSMALNARPQSPREGHMMDALYAQVKKPRNSKPSPVDSKGKVLGEADPVYPRRNPGTEGNASSLPSVSFSESPPVRAAFAGYHYVAFPWLQKLMSGTSGKDPEKEADLARVVTLRVVTLRIETHVKTLAFTAALLQQLACIDVGMDKQNDVYTYNKILLSFKRKEILTHTTTRMSLEDIILSEINQWQEDKYRFGLYEVAQVVKLIETESKVVVSRDGGRGNWGDSG

SEQ ID NO: 35076 - protein, 680 aa, Homo sapiens
  DOMAIN (526)..(539): Phorbol esters / diacylglycerol binding domain proteins domain identified by eMATRIX, accession number BL00479C, p-value= 4.600e-13, raw score of 12.01
  DOMAIN (369)..(628): Eukaryotic protein kinase domain identified by PFam, accession name pkinase, E-value=4e-87, PFam score of 302.8
LTAEGLSEKMSELEEDFAKILMLKEERIKELEKRLSEKEEEIQELKRKLHKCQSVLPVPSTHIGPRTTRAQGISAEPQTYRSFHDLRQAFRKFTKSERSKDLIKEAILDNDFMKNLELSQIQEIVDCMYPVEYGKDSCIIKEGDVGSLVYVMEDGKVEVTKEGVKLCTMGPGKVFGELAILYNCTRTATVKTLVNVKLWAIDRQCFQTIMMRTGLIKHTEYMEFLKSVPTFQSLPEEILSKLADVLEETHYENGEYIIRQGARGDTFFIISKGTVNVTREDSPSEDPVFLRTLGKGDWFGEKALQGEDVRTANVIAAEAVTCLVIDRDSFKHLIGGLDDVSNKAYEDAEAKAKYEAEAAFFANLKLSDFNIIDTLGVGGFGRVELVQLKSEESKTFAMKILKKRHIVDTRQQEHIRSEKQIMQGAHSDFIVRLYRTFKDSKYLYMLMEACLGGELWTILRDRGSFEDSTTRFYTACVVEAFAYLHSKGIIYRDLKPENLILDHRGYAKLVDFGFAKKIGFGKKTWTFCGTPEYVAPEIILNKGHDISADYWSLGILMYELLTGSPPFSGPDPMKTYNIILRGIDMIEFPKKIAKNAANLIKKLCRDNPSERLGNLKNGVKDIQKHKWFEGFNWEGLRKGTLTPPIIPSVASPTDTSNFDSFPEDNDEPPPDDNSGWDIDF

SEQ ID NO: 35077 - protein, 705 aa, Homo sapiens
  DOMAIN (551)..(564): Phorbol esters / diacylglycerol binding domain proteins domain identified by eMATRIX, accession number BL00479C, p-value= 4.600e-13, raw score of 12.01
  DOMAIN (394)..(653): Eukaryotic protein kinase domain identified by PFam, accession name pkinase, E-value=4e-87, PFam score of 302.8
GSLKTRSSGRKEPPAARRSMGTLRDLQYALQEKIEELRQRDALIDELELELDQKDELIQKLQNELDKYRSVIRPATQQAQKQSASTLQGEPRTKRQAISAEPTAFDIQDLSHVTLPFYPKSPQSKDLIKEAILDNDFMKNLELSQIQEIVDCMYPVEYGKDSCIIKEGDVGSLVYVMEDGKVEVTKEGVKLCTMGPGKVFGELAILYNCTRTATVKTLVNVKLWAIDRQCFQTIMMRTGLIKHTEYMEFLKSVPTFQSLPEEILSKLADVLEETHYENGEYIIRQGARGDTFFIISKGTVNVTREDSPSEDPVFLRTLGKGDWFGEKALQGEDVRTANVIAAEAVTCLVIDRDSFKHLIGGLDDVSNKAYEDAEAKAKYEAEAAFFANLKLSDFNIIDTLGVGGFGRVELVQLKSEESKTFAMKILKKRHIVDTRQQEHIRSEKQIMQGAHSDFIVRLYRTFKDSKYLYMLMEACLGGELWTILRDRGSFEDSTTRFYTACVVEAFAYLHSKGIIYRDLKPENLILDHRGYAKLVDFGFAKKIGFGKKTWTFCGTPEYVAPEIILNKGHDISADYWSLGILMYELLTGSPPFSGPDPMKTYNIILRGIDMIEFPKKIAKNAANLIKKLCRDNPSERLGNLKNGVKDIQKHKWFEGFNWEGLRKGTLTPPIIPSVASPTDTSNFDSFPEDNDEPPPDDNSGWDIDF

SEQ ID NO: 35078 - protein, 218 aa, Homo sapiens
  DOMAIN (175)..(183): CGMP-DEPENDENT PROTEIN KINASE SIGNATURE domain identified by eMATRIX, accession number PR00104C, p-value=8.071e-10, raw score of 8.08
MWNSKTLAAFRPCPKDPLNFELERDNLAYLAEEIPKQQSIQYITWMILKAFSHMHLQRDNLKLELMFKRKAKHKGLKNLHPDHVIEKKNLFSAEKFKPAAEIYISNEEPNVNSQDNGKKCLQGMSEIFAAAPAITDNTSDKTTLIKVSSWPYIADRRCPLVNVTREDSPSEDPVFLRTLGKGDWFGEKALQGWGLKGIHHVSAQEPVCLLLPFMTPRL

SEQ ID NO: 35079 - protein, 156 aa, Homo sapiens
MQKIEAGPRSLHHISKINSRSIKELHVKLKTINTLEDNLGNTILDLGMGKDFMTKTPKAIPTKAKIDKWDLIKLKSFCTAKETTNRVNRQPKEWEKTFANCASDEGLISSIYKELKQIYKRKTNNPIKTWAKDMNRHFSKEDINATKKHIKKAQYH

SEQ ID NO: 35080 - protein, 31 aa, Homo sapiens
MLFMKMDLLNYQYLDKMNNNIGILCYEGEAA

SEQ ID NO: 35081 - protein, 210 aa, Homo sapiens
MLFMKMDLLNYQYLDKMNNNIGILCYEGEAALRGEPRIQTLPVASALSSHRTGPPPISPSKRKFSMEPGDEDLDCDNDHVSKMSRIFNPHLNKTANGDCRRDPRERSRSPIERAVAPTVSLHGSHLYTSLPSLGLEQPLALTKNSLDASRPAGLSPTLTPGERQQNRPSVITCASAGARNCNLSHCPIAHSGCAAPGPASYRRPPSATCV

SEQ ID NO: 35082 - protein, 141 aa, Homo sapiens
IFCIASAMSLYNCLAALIHKIPYGQCTIACRGKNMEVRLIFLSGLCIAVAVVWAVFRNEDRWAWILQDILGIAFCLNLIKTLKLPNFKNGESIMVELAAGPFGNNEKLPVVIRVPKLIYFSVMSVCLMPVSILGFGDIIVP

SEQ ID NO: 35083 - protein, 39 aa, Homo sapiens
  misc_feature (1)...(39): Xaa = X or * as defined in Table 2
MXXXXXXGGRFKGSSFTSPGWQRKSFFMGPPKLNSWAGV

SEQ ID NO: 35084 - protein, 136 aa, Homo sapiens
  misc_feature (1)...(136): Xaa = X or * as defined in Table 2
CFFFFFFETESHFVTQAGVQWRDLGSLQSPPPGFTPFSSPQPPKEPGPQAPATTPGQSFAFLVEMGFHHVSQEVSISXPRDPPASASQSAGTTGVSHRAWTFCFLRQSLALSPDWSAVARSQLTATSASWVQVSRR

SEQ ID NO: 35085 - protein, 113 aa, Homo sapiens
MCDTLGLLLLYDVFFVFITPFITKNGESIMVELAAGPFGNNEKLPVVIRVPKLIYFSVMSVCLMPVSILGFGDIIVPGLLIAYCRRFDVQTGSSYIYYVSSTVDDGPFGLCNK

SEQ ID NO: 35086 - protein, 183 aa, Homo sapiens
GIAFCLNLIKTLKLPNFKSCVILLGLLLLYDVFFVFITPFITKNGESIMVELAAGPFGNNEKNDGNLVEATGQPSAPHEKLPVVIRVPKLIYFSVMSVCLMPVSILGFGDIIVPGLLIAYCRRFDVQTGSSYIYYVSSTVAYAIGMILTFVVLVLMKKGQPALLYLVPCTLITASVVAWRRKE

SEQ ID NO: 35087 - protein, 314 aa, Homo sapiens
  DOMAIN (147)..(169): SUGAR TRANSPORTER SIGNATURE domain identified by eMATRIX, accession number PR00171D, p-value=6.700e-19, raw score of 12.76
  DOMAIN (1)..(249): Sugar (and other) transporter domain identified by PFam, accession name sugar_tr, E-value=0.07, PFam score of -140.4
MSPNRVYHGNHLWKRKVDSRRKKTCGSEHFKDGEILKILTGKIVVGHAIHNDFKALQYFHPKSLTRDTSHIPPLNRKADCPENATMSLKHLTKKLLNRDIQVFYYSTGIFKDAGVQQPIYATISAGVVNTIFTLLSNHYNGMSFVCIGAILVFVACFEIGPGPIPWFIVAELFSQGPRPAAMAVAGCSNWTSNFLVGLLFPSAAAPCMKSNNALIVILGTVTLDAVGIGLVMPVLPGLLRDIVHSDSIASHYGVLLALYALMQFLCAPVLGALSDRFGRRPVLLASLLGATIDYAIMATTPVLWIYPLVNSPSC

SEQ ID NO: 35088 - protein, 70 aa, Homo sapiens
ISPKDPLPIFRPRRYLFPTRSSMAHSCWSKGCPPRDEEPPKGLFPSPRSPLYFSPARSNTLLQILEEEHP

SEQ ID NO: 35089 - protein, 261 aa, Homo sapiens
MGPSQAAVGPEPPGLCPLVLTKIAAAEGHLDAVGKSRSGDIGSSLRVEAGDKRTQASPERQPHCGAHDAQDPPKTYTQDDVWLIESGMTQLQSLTVTVPRRKLSKPKLKLKIINQNSVAVLQTPPDIQSEHSRDGDMDDSREGELMDCDGKSESSPEREAVNDETKGVEGTDGVKKRKRKPYRPAAPLGRPLPSWLLRFRPREGAGDPGLHPLLAVTLTLHDLEGLGGQLVALMLDALFKDELWIHYQILLYALDNYDHNG

SEQ ID NO: 35090 - protein, 46 aa, Homo sapiens
MSQSSHSRSLPGSVAFPQASHTVHSRHLQPLLRTTLVILILTQYGW

SEQ ID NO: 35091 - protein, 39 aa, Homo sapiens
  misc_feature (1)...(39): Xaa = X or * as defined in Table 2
XMRKAAEKEEGSSTWDDGQEGSAEAVALTLLQILEEEHP

SEQ ID NO: 35092 - protein, 272 aa, Homo sapiens
  misc_feature (1)...(272): Xaa = X or * as defined in Table 2
XISEGREIFKPRQLPGSAIWSIKVGRGSGFPGKRRPRGAGLSGRGGRGRSKLKSGIGAVVLPGVSTADISSNKDDEENSMHNTVVLFSSSDKFTLNQFVAVLAKEQKEDYLPVLSVVSVTIHTVSVLRWMHAVCQNLNTEEEVENVADIGFDCSMCRPYMPASNVPSSDCCESSLVAQIVHKIPRRKRSKPKLKLKIINQNSVAVLQTPPDIQSEHSRDGEMDDSREGELMDCDGKSESSPEREAVDDETKGVEGTDGVKKRKRKPYRPGWX

SEQ ID NO: 35093 - protein, 257 aa, Homo sapiens
  DOMAIN (231)..(246): PHD-finger domain identified by eMATRIX, accession number PF00628, p-value=7.750e-10, raw score of 15.84
  DOMAIN (215)..(253): PHD-finger domain identified by PFam, accession name PHD, E- value=0.0011, PFam score of 17.4
SQSCLLLQEDFAPIAGEQEAEQHQEDLRALLRASLQGQCSRQPGTRLHGSAPWPGEAQNRSRPLPGDSPSLDRYRGISDAVGKSRSGDIGSSLRVEAGDKRTQASPERQPHCGAHDAQDISGGREIFKPRQLPGSAIWSIKVGHGSGFPGKRRPRGAGLSGRGGRGRSKLKSGIGAVVLPGVSTADISSNKDDEENSVLDMVVLFSSSDKFTLNQVCGSFGQGAEGRLLACSQCGQCYHPYCVSIKMDACSSSELKY

SEQ ID NO: 35094 - protein, 200 aa, Homo sapiens
  DOMAIN (173)..(193): F-ACTIN CAPPING PROTEIN ALPHA SUBUNIT SIGNATURE domain identified by eMATRIX, accession number PR00191C, p-value=4.732e- 23, raw score of 11.49
  DOMAIN (12)..(200): F-actin capping protein alpha subunit domain identified by PFam, accession name F-actin_cap_A, E-value=2.6e-76, PFam score of 267.0
MANFNDCVLDKEKVCIAAKFITHAPAGEFNEVFSDIRLLCNNDSLLRERAARAFAHYNMDQFTPVKMEGCEDQTIIACIESHECQPKNFWNGRWRSEWKFTITPPTAQVVGVLKIQVHYYEDGSVQLVSHKDVQDSLTVSNDAQTAKEFIKIIENAENEYQTAISENCQTMSDTTFKVLRRQLPVTRTKIDWNKILSYNI

SEQ ID NO: 35095 - protein, 286 aa, Homo sapiens
  DOMAIN (252)..(272): F-ACTIN CAPPING PROTEIN ALPHA SUBUNIT SIGNATURE domain identified by eMATRIX, accession number PR00191C, p-value=1.409e- 26, raw score of 11.49
  DOMAIN (12)..(286): F-actin capping protein alpha subunit domain identified by PFam, accession name F-actin_cap_A, E-value=1.2e-155, PFam score of 530.4
MADFDDRVSDEEKVRIAAKFITHAPPGEFNEVFNDVRLLLNNDNLLREGAAHAFAQYNMDQFHAVKIEGYEDQVLITEHGDLGNSRVLDPRNKISFKFDHLRKEASDPQPEEADGGLKSWRESCDSALRAYVKDHYSNGFCTVYAKTIDGQQTIIACIESHQFQPKNFWNGRWRSEWKVPITPPSAQVVGVLKIQVHYYEDGNVQLVSHKDVQDSLTVSNEAQTAKEFIKIIENAENEYQTAICGNYQTMSDTTFKALRRQLPVTRTKIDWNKILSYKIGKEMQNA

SEQ ID NO: 35096 - protein, 230 aa, Homo sapiens
WPSGSASRPRHLRAPEPVGKAGKNKGAGLTPAAGTSGCAGRAESRGPPTGSHGSEPSRGSKGLCGRGTRSLPERGAEVLPHLPAQTSPQLGSQGAWPRHPRKPFRPAARAGTQPPGFVPSTPALLKVLYRSAHTQHSGRAAPEPSRLALGPTLQQKRHMGHRRNLTFSSTYNKKCGFGWAVEMRFSALLDVTTTPSRVAFWGSRGPPLGMERQLQLLSGYSPDGWLSTSM

SEQ ID NO: 35097 - protein, 196 aa, Homo sapiens
  DOMAIN (134)..(187): Clathrin light chain proteins domain identified by eMATRIX, accession number BL00224B, p-value=4.273e-09, raw score of 16.94
MDTRIGTTDTGTYGKVEGARRMRLKKLPIEYYAYYLDDEIICTSNPCEFPGYGIEREYPCETSGPLELTVQEDQGEEPQREELTRKKTSKVCRGSPLAWATGVKPCLKKKRRRRKEERRKKKEEGEGEGEEEEEEEEEEEEEEEEEEEEEEEEEEEEEEEEEEEEEEEEEEEEEEEEEEEEEEESDPCTSWNTSQP

SEQ ID NO: 35098 - protein, 141 aa, Homo sapiens
  DOMAIN (100)..(128): Granins proteins domain identified by eMATRIX, accession number BL00422C, p-value=6.400e-12, raw score of 16.18
MGFCHIGQASLELLTSGEEEEEEEEEEEEEEEEEEEEEEEEEEEEEEEEEEEEEEEEEEEEEEEEEEEEEEEEEEEEEEEEEEEEEEEEEEEEEEEEEEEEEEEEEEEEEEEEEEEEEEEEEEIALGGDQILTGKHMAFLK

SEQ ID NO: 35099 - protein, 79 aa, Homo sapiens
  DOMAIN (24)..(59): Matrix protein (MA) p15. domain identified by eMATRIX, accession number PF01140D, p-value=1.733e-09, raw score of 15.54
MRSSVIGPRSHIPSQRKSGIQEEEEEEEQEEEEEEEEEEEEEEEEEEEEEEEEEEKGLLDQEAARHLVLPAATQCKPKM

SEQ ID NO: 35100 - protein, 264 aa, Homo sapiens
  DOMAIN (230)..(241): PROTEIN REPEAT MUSCLE CALCIUM-BI domain identified by eMATRIX, accession number PD00301A, p-value=6.400e-09, raw score of 10.24
  misc_feature (1)...(264): Xaa = X or * as defined in Table 2
MASHSSPMGSQYYYGFPGPDSAMHALNTVVSEKDLTLDLSGLVARNKRCGPHSYSLNTHLLHACLRLPTQRENTTLKTFIPQGWEIHTDQVEREAECQPGRLKICVHDTAQELPLASTARNALLGRNLCPFRQSSTTQMPDEIPISLDDRMRPPSLKKKKVVGEEEEEEEEKEKEEEEEEDEGEEEEEEEEEEEEEEEEEEEEEEEGGGGGVGEEEEEEEGEGEGGGGEEDEEEXEEEEEEQKKKEKKKKEQEEGGGEGGMEKK

SEQ ID NO: 35101 - protein, 80 aa, Homo sapiens
  DOMAIN (15)..(66): Neuromodulin (GAP-43) proteins domain identified by eMATRIX, accession number BL00412D, p-value=4.857e-12, raw score of 16.54
TWLSEAGDSRGCRLAHFPPPQGCQAWIMALIPTPTPWEEEEEEEEEEEEEEEEEEEEEEEEEARSWWSLCPAQSSLPPPG

SEQ ID NO: 35102 - protein, 217 aa, Homo sapiens
  DOMAIN (88)..(116): Granins proteins domain identified by eMATRIX, accession number BL00422C, p-value=4.886e-11, raw score of 16.18
QGLKNEASTLLATLEMLPCYQDTQHIDFGSKEATSNSQSWCLCLIHERTHQNLIQLSGSSGLGRVALELQKTQPRATPPSEHLGKRQEEEEEEEEEEEEEEEEEEEEEEEEEEEEEEEEEEEEEEEEEDLLYNFIYIIFSKMPTKLKICKHTNQHPVSSSGFVNAPIEALYLANLVGTWRTFVSSSGIVKAPISAPSKQTTRLSVKWTNQQDVGGAR

SEQ ID NO: 35103 - protein, 143 aa, Homo sapiens
  DOMAIN (44)..(72): Granins proteins domain identified by eMATRIX, accession number BL00422C, p-value=4.886e-11, raw score of 16.18
SLCHKEAEGGHGKAHVEGKRAPSNLQPSAPAELSGNNSISFHHEEEEEEEEEEEEEEEEEEEEEEEEEEEEEEEEEEEEEEEEDLLYNFIYIIFSKMPTKVPSLWDSKLGAEQAAPEENNKKEQQEEYQGKSFSFLNLTECWP

SEQ ID NO: 35104 - protein, 138 aa, Homo sapiens
  DOMAIN (52)..(86): Amyloidogenic glycoprotein extracellular domain proteins domain identified by eMATRIX, accession number BL00319C, p-value= 5.500e-10, raw score of 17.12
MKGRRRKKKEGEGGGGESERGGGGGEGEGEGEEEEEEEEEEEEEEEEEEEEEEKEEEEEEEEEQEEEEDDEEEEEEKSCSVNVSLIELPWDPKAYSRLAPLSSQPGPAVKVPTEHLIAKLEDCVQGFTYLTVEKRWAR

SEQ ID NO: 35105 - protein, 167 aa, Homo sapiens
  DOMAIN (44)..(72): Granins proteins domain identified by eMATRIX, accession number BL00422C, p-value=4.886e-11, raw score of 16.18
SLCHKEAEGGHGKAHVEGKRAPSNLQPSAPAELSGNNSISFHHEEEEEEEEEEEEEEEEEEEEEEEEEEEEEEEEEEEEEEEEEDLLYNFIYIIFSKMPTKAMSISSMFKFATKIRMTVTPNPKCCWIPVFPAYLSTSKAAKCMHHTAHHGQEKSDHCISPSPIPAP

SEQ ID NO: 35106 - protein, 1271 aa, Homo sapiens
  DOMAIN (129)..(143): LEUCINE-RICH REPEAT SIGNATURE domain identified by eMATRIX, accession number PR00019B, p-value=1.360e-09, raw score of 11.36
  DOMAIN (16)..(291): Leucine Rich Repeat domain identified by PFam, accession name LRR, E-value=2.4e-30, PFam score of 114.2
RPTRPEFPENIKNCKVLTIVEASVNPISKLPDGFSQLLNLTQLYLNDAFLEFLPANFGRLTKLQILELRENQLKMLPKTMNRLTQLERLDLGSNEFTEVPEVLEQLSGLKEFWMDANRLTFIPGFIGSLKQLTYLDVSKNNIEMVEEGISTCENLQDLLLSSNSLQQLPETIGSLKNITTLKIDENQLMYLPDSIGGLISVEELDCSFNEVEALPSSIGQLTNLRTFAADHNYLQQLPPEIGSWKNITVLFLHSNKLETLPEEMGDMQKLKVINLSDNRLKNLPFSFTKLQQLTAMWLSDNQSKPLIPLQKETDSETQKMVLTNYMFPQQPRTEDVMFISDNESFNPSLWEEQRKQRAQVAFECDEDKDEREAPPREGNLKRYPTPYPDELKNMVKTVQTIVHRLKDEETNEDSGRDLKPHEDQQDINKDVGVKTSESTTTVKSKVDEREKYMIGNSVQKISEPEAEISPGSLPVTANMKASENLKHIVNHDDVFEESEELSSDEEMKMAEMRPPLIETSINQPKVVALSNNKKDDTKETDSLSDEVTHNSNQNNSNCSSPSRMSDSVSLNTDSSQDTSLCSPVKQTHIDINSKIRQEDENFNSLLQNGDILNSSTEEKFKAHDKKDFNLPEYDLNVEERLVLIEKSVDSTATADDTHKLDHINMNLNKLITNDTFQPEIMERSKTQDIVLGTSFLSINSKEETEHLENGNKYPNLESVNKVNGHSEETSQSPNRTEPHDSDCSVDLGISKSTEDLSPQKSGPVGSVVKSHSITNMEIGGLKIYDILSDNGPQQPSTTVKITSAVDGKNIVRSKSATLLYDQPLQVFTGSSSSSDLISGTKAIFKFDSNHNPEEPNIIRGPTSGPQSAPQIYGPPQYNIQYSSSAAVKDTLWHSKQNPQIDHASFPPQLLPRSESTENQSYAKHSANMNFSNHNNVRANTAYHLHQRLGPARHGEMWAISPNDRLIPAVTRSTIQRQSSVSSTASVNLGDPGSTRRAQIPEGDYLSYREFHSAGRTPPMMPGSQRPLSARTYSIDGPNASRPQSARPSINEIPERTMSVSDFNYSRTSPSKRPNARVGSEHSLLDPPGKSKVPRDWREQVLRHIEAKKLEKMPLSNGQMGQPLRPQANYSQIHHPPQASVARHPSREQLIDYLMLKVAHQPPYTQPHCSPRQGHELAKQEIRVRVEKDPELGFSISGGVGGRGNPFRPDDDGIFVTRVQPEGPASKLLQPGDKIIQANGYSFINIEHGQAVSLLKTFQNTVELIIVREVSS

SEQ ID NO: 35107 - protein, 179 aa, Homo sapiens
  misc_feature (1)...(179): Xaa = X or * as defined in Table 2
KNRNYNKLSLRPQCNPTRTQDXETHSKPLNYMETEQPSPEXLLGTXRNEGRHKAVLXNQXEKRHNIPESLGHIAKQCVEGNLXHXMPTRESRKDLKLTPXPSQLKELEKQEQTHSKAGRRQETNXDQSRIEGDRDTKNPSKNQXIQELVFXKDQQNXXTASKTNKEEKREESNRRNKKC

SEQ ID NO: 35108 - protein, 1654 aa, Homo sapiens
  DOMAIN (79)..(103): Bacterial extracellular solute-binding proteins family 5 sig. domain identified by eMATRIX, accession number BL01040A, p-value= 4.600e-22, raw score of 17.12
  DOMAIN (6)..(254): Bacterial extracellular solute-binding prot domain identified by PFam, accession name SBP_bac_5, E-value=3.2e-112, PFam score of 386.2
MLSTLRRTLFALLACASFIVHAAAPDEITTAWPVNVGPLNPHLYTPNQMFAQSMVYEPLVKYQADGSVIPWLAKSWTHSEDGKTWTFTLRDDVKFSNGEPFDAEAAAENFRAVLDNRQRHAWLELANQIVDVKALSKTELQITLKSAYYPFLQELALPRPFRFIAPSQFKNHETMNGIKAPIGTGPWILQESKLNQYDVFVRNENYWGEKPAIKKITFNVIPDPTTRAVAFETGDIDLLYGNEGLLPLDTFARFSPESGLPHPTVTADRNRDAGAQYRQREPPRARPNRRPLATGLPIGAPGSLKGPPEIRAAGKPWRENPGFHGTSKDRSSTNTDSSGLTYSPGIIPIACNATQLPLQETLSLSTGTASILCKERKGLASWPPDRTTLSSELPVGSEPGLGFACEKGDPGGGRGDHGPARCPVSALPLSPGASSCSCGREAGPQCASLGFGSSNNQEQAQPAQSVTVWPGEPGQSVTVWAHGWTPCPKNVARKYAVTVSYLTPPGLSLTGLSATAVEAPLRSLCRAEIWRGAGKGWESCQTGTFKSAEVVCCLLFSYALPPEVESTQADDTKETDSLSDEVTHNSNQNNSNCSSPSRMSDSVSLNTDSSQDTSLCSPVKQTHIDINSKIRLLRNWLSIMLAVGLNGNRRGIEMSSKERMVNITQYAMESEELSSDEEMKMAEMRPPLIETSINQPKVVALSNNKKEIQTTIREHYKHLYVNKLENLEEMDKFLDTYTLPRLNQEEAELLNRPITGSEIEAIINSLPTEKSPGPDGFTAEFYQRTKDKNHMIISIDGGKAFDKIQQPFMLKTLNKLGIDGTYLKRIRAIFDKPTANIILNGQKLEAFPLKTGTRQGCPLSPLLFNIVLEVLARVIRQEKEIKGIQFGKEEVKLSLFADDMTVYLENPIFSAQNLLKLISNFSNVSGYKINVQKSQAFLYTNNSQIMSELPFTIATKRITYLGIQLARDVKDLFKENYKPLLNEIKEDTNKWKNIPCSQIGRILWPYCPRQEDENFNSLLQNGDILNSSTEEKFKAHDKKDFNLPEYDLNVEERLVLIEKSVDSTATADDTHKLDHINMNLNKLITNDTFQPEIMERSKTQDIVLGTSFLSINSKEETEHLENGNKYPNLESVNKVNGHSEETSQSPNRTEPHDSDCSVDLGISKSTEDLSPQKSGPVGSVVKSHSITNMEIGGLKIYDILSDNGPQQPSTTVKITSAVDGKNIVRSKSATLLYDQPLQVFTGSSSSSDLISGTKAIFKFDSNHNPEEPNIIRGPTSGPQSAPQIYGPPQYNIQYSSSAAVKDTLWHSKQNPQIDHASFPPQLLPRSESTENQSYAKHSANMNFSNHNNVRANTAYHLHQRLGPARHGEMWAISPNDRLIPAVTRSTIQRQSSVSSTASVNLGDPGSTRRAQIPEGDYLSYREFHSAGRTPPMMPGSQRPLSARTYSIDGYLLYSESLQEEESQVSVSIPFLSPKTVKNCEGSGSLPYLLKNLPFSFTKLQQLTAMWLSDNQKSGIILRIIGVTEEEDNSKSLENIFGGIIEENFPGLVRDLDIQIQEAQRIPGKFIAKRSSPKHIVIRLSKVKTKEKSLKSCETEAPVTTLSCRSVGVDWRSTPDPVCLGISSTGCRTADIGEPQMLLPDHSSGSFVSEEYLAV

SEQ ID NO: 35109 - protein, 196 aa, Homo sapiens
  misc_feature (1)...(196): Xaa = X or * as defined in Table 2
NQACQPGQAGAARAGQCFPRVAQRPGPGPAGMALAHPDLYLCHSAGDQCRXDEEADPPEGQAPTHFQVHPAGGLHLLDRLAAPQHQAGTQGQGQPGRHHXPAARSSPVEPPSTGSPSRPTTTMWPSCSRRQGGLGPGLXCVQQPHLLDAPGTLPVLGALVCRLQPWRCLPLGGGGGVGGSQRPPGGGGGNGGRNWG

SEQ ID NO: 35110 - protein, 310 aa, Homo sapiens
  misc_feature (1)...(310): Xaa = X or * as defined in Table 2
MRTPKSSIKPSLGEEKENYRGSLKETAPSLQKEWAEQSSKSQETVGVKGITRHFQVSTLLERREDRKSKEPPLLIPRQTVSGVDLQQTPTDLQLSVLTVRRKTNKQKGHPHQKPICTSPSSNTKVKNLEKQLDEWLTRITNAEKSSKDRMELKTKARELHDECTSLSSRCDQLEERVSVTEDEMNEMKRGEKFREKRIKRNEQSLQEIWDYVKRPNLCLIGVPESDGENGTKLENTLQDIIQENFPNLARQANIQIQEIRENATKILLEKSNSKTHNCQIHQSXNEGKNVKGSQRERSGYPQREAHQTNS

SEQ ID NO: 35111 - protein, 53 aa, Homo sapiens
  misc_feature (1)...(53): Xaa = X or * as defined in Table 2
LLCCGFELPLLARRSLIVXSLLLSTHQSHSPSSFVPLLVRSCIPLEEERRSDF

SEQ ID NO: 35112 - protein, 502 aa, Homo sapiens
  DOMAIN (250)..(297): kw TRANSCRIPTASE REVERSE II ORF2 domain identified by eMATRIX, accession number DM01354V, p-value=1.000e-40, raw score of 12.97
MGKKQSRKTGNSKNQSTSPPPKQRSSSPATEQSWMENDFDELREEGFRTSNYSELKEEVRTHGKKVKNFEKKLDEWLTRISNAEKSLNDLMELKTTARELCDECTSLSSRCNQLEERVSAMEDEVNEMNVSESDGENGTKLENTLQDIIQENFPNLARQANIQIQEIQTTTERYSSRRATPRHIIVRFTKIEMKENMLRAAREKAPNLIKLISNFSKVSGYKINVQISQAFVYTNNRQTESQIMSELPFTMASKRIKYLGIQLRRDVKDLFKENYKPLLNEIKEDTNKCKNIPCSWVGRINIVKMAILPKVIYRFNAIPIKLPMTFFTELEKTTLKLIWNQKGARIAKSILSQKNKAGGITLPDFKLYHKATVTKTAWYWYQHRDIDQWNRTEPSEIMPHIYKYLIFDRPEKNKQWGKDSLFNKWCWENWLATCGKLKLDPFLTPYTKINSRWIKDLNVRPKTIKTLEENLGNTIQDIGMSKYFISKTPKAMATKAKIDKWV

SEQ ID NO: 35113 - protein, 276 aa, Homo sapiens
  misc_feature (1)...(276): Xaa = X or * as defined in Table 2
ERHHPPPQAGPHPPRRRKERNTHRQPTPQPHGAWKISVPQTTNKGISSSITSTQRNQPQATTVEKAHNESTRTPEEPKGAVRGTRXKKKKTSRDTPPQTPXEKSSSATRNKAGGKDSDKRERKATEDQTTPSKRRKLHPMAKKLKTLKKNXMNGXLEXPMQRSPXRTXWSXKPRHENYVMNAQASVTDAINWKKGPPPRPTTNDAKIVTRPTHPTCSHHRPPRKPPRTHPTPTPTQNKISQXNGYTPPRGKRVREDRCKPPQAPTSAPRAAKQRQS

SEQ ID NO: 35114 - protein, 1031 aa, Homo sapiens
  DOMAIN (518)..(559): kw TRANSCRIPTASE REVERSE II ORF2 domain identified by eMATRIX, accession number DM01354I, p-value=1.000e-40, raw score of 15.55
  DOMAIN (766)..(1031): Reverse transcriptase domain identified by PFam, accession name rvt, E-value=1.8e-74, PFam score of 260.8
  misc_feature (1)...(1031): Xaa = X or * as defined in Table 2
XHCCLIPRQTGSGVDLQQTPTGLQLRVLTVRRKTNKQKGHPHQKPICTSPSSKTKEKSFKDLMELKTTAQELHDECTSLSNRCNQLEEIVSAMEDEMNEMKREEKFREKRMKRNKQSLQEIWDYVKRPNLRLIGVPESDGENETNLENTLQDIIQENFPNLARQANIQIQEIQRMPQRYSSRRATPRHIIVRFTKVEMKEKILRADREKGQVTHKGKPIRLPADLSAETLQARREWGPIFNILKEKNFQPRISYPAKLSFISEGEIKYFTDKQMLRDFVTTRPALRELLKHRLANWIKSQDPSVCCIQETHLTCRDTHRLKIKGWRKIYQANGKHKKAGVAILVSDKTDFKPTKIKRDKEGHYIMVKGSIQQEELTILNIYAPNTGARRFVKQVLSDLQRDLDSHTIIMGDFNTPLSTLHRSTRQNVNKDIQELNSALHQADLIDIYRTVHPKSTESTFFSAPHHTYSKIDHIIGSKALLSKCKRTEIITNCLSDHSAIKLELRIKKLTQNRSTTWKLNNLLLNDYWVPNEMKAEIKMFFETNENKDTTYQNLWDTIKAACRGKFIALSAHKRKQERSKIDILTSQLKELEKQEQTHSKASRRQEITKIRAELKETETQKTFQKINESRSWFFEKIIKIDRLLARLIKKKREKNQIDAIKNDKGDITTDPTEIQTTIREYYKHLYANKLENLEEMDKFLDTYTLPRLNKEETESLNRPITGSEIEAIINSLATKKSPGPDGFTAEFYQRYKEELVPFLLKLFQSIEKQGILPNSFYEASIILIPKPGRDTTKKENFRPISLMNIDAKILNKILASRIQQPIKKLIHHDQVGFIPGMHGWFNIRKSINVIQPINRTKDKNHMIISIDAEKAFNKIQQHFMLKTLNKLGIDGTYLKIIRAIYDKPTANIILNGQKLEAFPLKTGTRQGCPLSPLLFNIVLEVLARAIRQEKEIKGIQLEKEEVKLSLFADDMIVYLENPIVSAQNLLKLISNFSKVSGYKINVQKSQAFLYTNNRQTESQIMRELPFTIASKE

SEQ ID NO: 35115 - protein, 762 aa, Homo sapiens
  DOMAIN (671)..(700): kw REPLICATION REPB REPA INITIATION domain identified by eMATRIX, accession number DM00653A, p-value=7.207e-27, raw score of 20.40
  DOMAIN (655)..(697): Initiator RepB protein domain identified by PFam, accession name RepB_protein, E-value=0.0091, PFam score of 12.3
  misc_feature (1)...(762): Xaa = X or * as defined in Table 2
MKLEHQEAQRRSGQGREKRRWPEGKAGPGCEGAWILCPESQDDSKQEGDNNMIVVSRNAVRSVKAEFQGDNLENWESCSEAIIVQGRDNGVPHKAHGLGTEEEGTVLKISERQNWLDLVDFILLGGDLFHENKPSRKTLHTCLELLRKYCMGDRPVQFEILSDQSVNFGFRKLTNRKDIHTKNPSVRHHHQRPKVDETIKMGKTQSRKTRNSKNQSTSPPPKERSSSPAIEQSWMENDFDELKEEGFRRSNYSELKEEVRTNGKEVKNLEKKLDKWITRITNAEKSLKDLMELKTIAQELRDECTSLSNQCDQLEERVSVMEDQMNEMKREEKFREKRIKRNEQSLQEIWDYVKRPNLCLIGVPESDGENGTKLENTLQDIIQVNFPNLARQANIQIQEIQRMPQRYSLRRETPRHIIVRFTKVEMKEKMLRTAREKGLECSGAGLAHCKLWLLGPSDPPDCSSVSPVLRVHLVLPSSLPHSVGTPFLGSVSIPPSVPRFPDRVFHPYPYTHYCDNLKTCHTSHGSVMAETAVINHKKRKNSPRIVQSNDLTEAAYSLSRDQKRMLYLFVDQIRKSDGTLQEHDGICEIHVAKYAEIFGLTSAEASKDIRQALKSFAGKEVVFYRPEEDAGDEKGYESFPWFIKRAHSPSRGLYSVHINPYLIPFFIGLQNRFTQFRLSETKEITNPYAMRLYESLCQYRXKTTSFPAKLFNACRISLLASAEVNPNISAYLATWISQIPSCSCRVPSDFLIWSTNRYSIRF

SEQ ID NO: 35116 - protein, 304 aa, Homo sapiens
  DOMAIN (183)..(228): kw TRANSCRIPTASE REVERSE II ORF2 domain identified by eMATRIX, accession number DM01354N, p-value=1.000e-40, raw score of 13.17
  misc_feature (1)...(304): Xaa = X or * as defined in Table 2
KNRNYNKLSLRPQCNPTRTQDXETHSKPLNYMETEQPSPEXLLGTXRNEGRHKAVLXNQXEKRHNIPESLGHIAKQCVEGNLXHXMPTRESRKDLKLTPXPSQLKELEKQEQTHSKAGRRQETNXDQSRIEGDRDTKNPSKNQXIQELVFXKDQQNXXTASKTIQRRKERRIKXTQXKMLKEDITTDPTEIKTIIREYYKHLYAHNLENLEEMDKFLDTYTLPRLNQEEAESLNRPITNSEIETVINSLKEKAQDQKDLQLNSTRALFTIAKAWNQPKCPSMTDEIKINVEHIHHGILCSHQKE

SEQ ID NO: 35117 - protein, 752 aa, Homo sapiens
  DOMAIN (63)..(106): kw TRANSCRIPTASE REVERSE II ORF2 domain identified by eMATRIX, accession number DM01354T, p-value=1.000e-40, raw score of 9.48
  DOMAIN (1)..(181): Reverse transcriptase domain identified by PFam, accession name rvt, E-value=2.3e-15, PFam score of 64.5
TKDKNHMIISIDGGKAFDKIQQPFMLKTLNKLGIDGTYLKRIRAIFDKPTANIILNGQKLEAFPLKTGTRQGCPLSPLLFNIVLEVLARVIRQEKEIKGIQFGKEEVKLSLFADDMTVYLENPIFSAQNLLKLISNFSNVSGYKINVQKSQAFLYTNNSQIMSELPFTIATKRITYLGIQLARDVKDLFKENYKPLLNEIKEDTNKWKNIPCSQIGRILWPYCPRQEDENFNSLLQNGDILNSSTEEKFKAHDKKDFNLPEYDLNVEERLVLIEKSVDSTATADDTHKLDHINMNLNKLITNDTFQPEIMERSKTQDIVLGTSFLSINSKEETEHLENGNKYPNLESVNKVNGHSEETSQSPNRTEPHDSDCSVDLGISKSTEDLSPQKSGPVGSVVKSHSITNMEIGGLKIYDILSDNGPQQPSTTVKITSAVDGKNIVRSKSATLLYDQPLQVFTGSSSSSDLISGTKAIFKFDSNHNPEEPNIIRGPTSGPQSAPQIYGPPQYNIQYSSSAAVKDTLWHSKQNPQIDHASFPPQLLPRSESTENQSYAKHSANMNFSNHNNVRANTAYHLHQRLGPARHGEMWAISPNDRLIPAVTRSTIQRQSSVSSTASVNLGDPGSTRRAQIPEGDYLSYREFHSAGRTPPMMPGSQRPLSARTYSIDGPNASRPQSARPSINEIPERTMSVSDFNYSRTSPSKRPNARVGSEHSLLDPPGKSKVPRDWREQVLRHIEAKKLEKEGYRVVDPVMAG

SEQ ID NO: 35118 - protein, 71 aa, Homo sapiens
  misc_feature (1)...(71): Xaa = X or * as defined in Table 2
ILAPHSLLACRVSAERSAVSPMGFPLWVTQPFSLAALNDFFLHFNFGRIXQLCVLELLFSRSIVVAFSEFP

SEQ ID NO: 35119 - protein, 473 aa, Homo sapiens
RRYDELQNSSGRDGKPRAMAVTRSTSSTSSGSNSNVLVPVSWKRPQYSQKRAKEKLVHVLSLCGQEVGLSKNPSVIFSSCGDLDLLEHQTSLVSSEDGAREQENMDDTNSEQQFRVFRDFDFLDVELEDGEELQGESMDNFNWGVRRRSLDSLDKCDMQILEERQLSGSTPSLNKMHHEDFDESSEEEDLTASQILEHSDLIMTLSPSEETNPMELLTTACDSTPPEPHSFNTRMSSFDASLPDMNNLQISEGSKAEAVREEEDTTVHEDDLSSSINELPAAFECSDSFSLDMTEGEEKGNRALDQFTLASFGEGDRGVSPPPSPFFSAILAAFQPAACDDAEEAWRSHINQLMCDSDGSCAVYTFHVFSSLFKNIQKRFCFLTCDAASYLGDNLRGIGSKFVSSSQMLTSCSLDKLKFSVLELQEYLDTYNNRKEATLSWLANCKATFAGGSRDGVITCQPGDSEEKVIKAC

SEQ ID NO: 35120 - protein, 34 aa, Homo sapiens
MQTAPRKLFRALCWSVLPDIPGPQATSLHQKWSR

SEQ ID NO: 35121 - protein, 835 aa, Homo sapiens
  misc_feature (1)...(835): Xaa = X or * as defined in Table 2
XTKQPQPLPMPCTGGCWAPLVDYLPETITPRGPLHRCNIAVIFMTEMVVDHSVREDWALHLPLLLHAVFLGLDHYRPEVFEHSKKLLLHLLIALSCNSNFHSIASVLLQTREMGEAKTLTVQPAYQPEYLYTGGFDFLREDQSSPVPDSGLSSSSTSSSISLGGSSGNLPQMTQEVEDVDTAAETDEKANKLIEFLTTRAFGPLWCHEDITPKNQNSKSAEQLTNFLRHVVSVFKDSKSGFHLEHQLSEVALQTALASSSRHYAGRSFQIFRALKQPLSAHALSDLLSRLVEVIGEHGDEIQGYVMEALLTLEAAVDNLSDCLKNSDLLTVLSRSSSPDLSSSSKLTASRKSTGQLNMNPGTTSGNTATAERSRHQRSFSVPKKFGVIDRSSDPPRSATLDRIQACTQQGLSSKTRSSSSLKDSLTDPSHINHPTNLLATIFWVTVALMESDFEFEYLMALRLLSRLLAHMPLDKAENREKLEKLQAQLKWADFSGLQQLLLKGFTSLTTTDLTLQLFSLLTPVSKISMVDASHAIGFPLNVLCLLPQLIQHFENPNQFCKDIAERIAQVCLEEKNPKLSNLAHVMTLYKTHSYTRDCATWVNVVCRYLHEAYADITLNMVTYLAELLEKGLPSVQQPLLQVIYSLLSYMDLSVVPVKQFNVEVLKTIEKYVQHSDLSKIEIHRVWTSASKELPGKTLDFHFDISETPIIGRRYDELQNSSGRDGKPRAMAVTRSTSSTSSGSNSNVLVPVSWKRPQYSQKRTKEKLVHVLSLCGQEVGLSKNPSVIFSSCGDLDLLEHQTSLVSSEDGAREQENMDDTNSEQQFRVFRDFDFLD

SEQ ID NO: 35122 - protein, 3048 aa, Homo sapiens
PRADITTCDRRITPGTCSRPLPVLPASLYAADMASQQDSGFFEISIKYLLKSWSNTSPVGNGYIKPPVPPASGTHREKGPPTMLPINVDPDSKPGEYVLKSLFVNFTTQAERKIRIIMAEPLEKPLTKSLQRGEDPQFDQVISSMSSLSEYCLPSILRTLFDWYKRQNGIEDESHEYRPRTSNKSKSDEQQRDYLMERRDLAIDFIFSLVLIEVLKQIPLHPVIDSLIHDVINLAFKHFKYKEGYLGPNTGNMHIVADLYAEVIGVLAQAKFPAVKKKFMAELKELRHKEQNPYVVQSIISLIMGMKFFRIKMYPVEDFEASLQFMQECAHYFLEVKDKDIKHALAGLFVEILVPVAAAVKNEVNVPCLRNFVESLYDTTLELSSRKKHSLALYPLVTCLLCVSQKQLFLNRWHIFLNNCLSNLKNKDPKMARVALESLYRLLWVYMIRIKCESNTATQSRLITIITTLFPKGSRGVVPRDMPLNIFVKIIQFIAQERLDFAMKEIIFDFLCVGKPAKAFSLNPERMNIGLRAFLVIADSLQQKDGEPPMPVTGAVLPSGNTLRVKKTYLSKTLTEEEAKMIGMSLYYSQVRKAVDNILRHLDKEVGRCMMLTNVQMLNKEPEDMITGERKPKIDLFRTCVAAIPRLLPDGMSKLELIDLLARLSIHMDDELRHIAQNSLQGLLVDFSDWREDVLFGFTNFLLREVNDMHHTLLDSSLKLLLQLLTQWKLVIQTQGKVYEQANKIRNSELIANGSSHRIQSERGPHCSVLHAVEGFALVLLCSFQVATRKLSVLILKEIRALFIALGQPEDDDRPMIDVMDQLSSSILESFIHVAVSDSATLPLTHNVDLQWLVEWNAVLVNSHYDVKSPSHVWIFAQSVKDPWVLCLFSFLRQENLPKHCPTALSYAWPYAFTRLQSVMPLVDPNSPINAKKTSTAGSGDNYVTLWRNYLILCFGVAKPSIMSPGHLRASTPEIMATTPDGTVSYDNKAIGTPSVGVLLKQLVPLMRLESIEITESLVLGFGRTNSLVFRELVEELHPLMKEALERRPENKKRRERRDLLRLQLLRIFELLADAGVISDSTNGALERDTLALGALFLEYVDLTRMLLEAENDKEVEILKDIRAHFSAMVANLIQCVPVHHRRFLFPQQSLRHHLFILFSQWAGPFSIMFTPLDRYSDRNHQITRYQYCALKAMSAVLCCGPVFDNVGLSPDGYLYKWLDNILACQDLRVHQLGCEVVVLLLELNPDQINLFNWAIDRCYTGSYQLASGCFKAIATVCGSRNYPFDIVTLLNLVLFKASDTNREIYEISMQLMQILEAKLFVYSKKVAEQRPGSILYGTHGPLPPLYSVSLALLSCELARMYPELTLPLFSGGKPAIRHNTPQRAPDHAYLPAALAAQHRAGGQQTPPPGSSPSSPEDEVKDREGDVTASHGLRGNGWGSPEATSLVLNNLMYMTAKYGDEVPGTEMENAWNALANNEKWSNNLRITLQFLISLCGVSSDTVLLPYIKKVAIYLCRNNTIQTMEELLFELQQTEPVNPIVQHCDNPPFYRFTASSKASAAASGTTSSSNTVVAGQENFPDAEENKILKESDERFSNVIRAHTRLESRYSNSSGGSYDEDKNDPISPYTGWLLTITETKQPQPLPMPCTGGCWAPLVDYLPETITPRGPLHRCNIAVIFMTEMVVDHSVREDWALHLPLLLHAVFLGLDHYRPEVFEHSKKLLLHLLIALSCNSNFHSIASVLLQTREMGEAKTLTVQPAYQPEYLYTGGFDFLREDQSSPVPDSGLSSSSTSSSISLGGSSGNLPQMTQEVEDVDTAAETDEKANKLIEFLTTRAFGPLWCHEDITPKNQNSKSAEQLTNFLRHVVSVFKDSKSGFHLEHQLSEVALQTALASSSRHYAGRSFQIFRALKQPLSAHALSDLLSRLVEVIGEHGDEIQGYVMEALLTLEAAVDNLSDCLKNSDLLTVLSRSSSPDLSSSSKLTASRKSTGQLNMNPGTTSGNTATAERSRHQRSFSVPKKFGVIDRSSDPPRSATLDRIQACTQQGLSSKTRSSSSLKDSLTDPSHINHPTNLLATIFWVTVALMESDFEFEYLMALRLLSRLLAHMPLDKAENREKLEKLQAQLKWADFSGLQQLLLKGFTSLTTTDLTLQLFSLLTPVSKISMVDASHAIGFPLNVLCLLPQLIQHFENPNQFCKDIAERIAQVCLEEKNPKLSNLAHVMTLYKTHSYTRDCATWVNVVCRYLHEAYADITLNMVTYLAELLEKGLPSVQQPLLQVIYSLLSYMDLSVVPVNQFNVEVLKTIEKYVQSVHWREALNILKLVVSRSASLVLPSYQHSDLSKIEIHRVWTSASKELPGKTLDFHFDISETPIIGRRYDELQNSSGRDGKPRAMAVTRSTSSTSSGSNSNVLVPVSWKRPQYSQKRTKEKLVHVLSLCGQEVGLTKNPSVIFSSCGDLDLLEHQTSLVSSEDGAREQENMDDTNSEQQFRVFRDFDFLDVELEDGEELQGESMDNFNWGVRRRSLDSLDKCDMQILEERQLSGSTPSLNKMHHEDSDESSEEEDLTASQILEHSDLIMTLSPSEETNPMELLTTACDSTPAEPHSFNTRMSSFDASLPDMNNLQISEGSKAEAVREEEDTTVHEDDLSSSINELPAAFECSDSFSLDMTEGEEKGNRALDQFTLASFGEGDRGVSPPPSPFFSAILAAFQPAACDDAEEAWRSHINQLMCDSDGSCAVYTFHVFSSLFKNIQKRFCFLTCDAASYLGDNLRGIGSKFVSSSQMLTSCSECPTLFVDAETLLSCGLLDKLKFSVLELQEYLDTYNNRKEATLSWLANCKATFAGGSRDGVITCQPGDSEEKQLELCQRLYKLHFQLLLLFQSYCKLIGQVHEVSSMPELLNMSRELSDLKKHLKEASAVIAADPLYSDGAWSEPTFTSTEAAIQSMLECLKNNELGKALRQIRECRSLWPNDIFGSSSDDEVQTLLNIYFRHQTLGQTGTYALVGSNQSLTEICTKLMELNMEIRDMIRRAQSYRVLTTFLPDSSVSGTSL

SEQ ID NO: 35123 - protein, 2035 aa, Homo sapiens
GERKPKIDLFRTCVAAIPRLLPDGMSKLELIDLLARLSIHMDDELRHIAQNSLQGLLVDFSDWREDVLFGFTNFLLREVNDMHHTLLDSSLKLLLQLLTQWKLVIQTQGKVYEQANKIRNSEARDLELDVGVDVDVGVDVDADVDVDVDLGVDVDVGVDVDADVDVDVDMGVDVDVDRIYGFGCKCGCDRDVDRVVDVDVDIDVDVDVDMDVNIDVDVGLGAGVDVDMDVHIDMDMDVDIGSDNILQSALRRSVVRGEPGWWELGIGNEQMEKGVWLEKSVTESLKTVEAHGSILIANGSSHRIQSERGPHCSVLHAVEGFALVLLCSFQVATRKLSVLILKEIRALFIALGQPEDDDRPMIDVMDQLSSSILESFIHVAVSDSATLPLTHNVDLQWLVEWNAVLVNSHYDVKSPSHVWIFAQSVKDPWVLCLFSFLRQENLPKHCPTALSYAWPYAFTRLQSVMPLVDPKELVEELHPLMKEALERRPENKKRRERRDLLRLQLLRIFELLADAGVISDSTNGALERDTLALGALFLEYVDLTRMLLEAENDKEVEILKDIRAHFSAMVANLIQCVPGTVIRYKKLPFMLGSPFVFFITVLSSLTLLAFMQAMSAVLCCGPVFDNVGLSPDGYLYKWLDNILACQDLRVHQLGCEVVVLLLELNPDQINLFNWAIDRCYTGSYQLASGCFKAIATVCGSSVVAYEFNSSFFNNKINALITRSSAWPCLILEAKLFVYSKKVAEQRPGSILYGTHGPLPPLYSVSLALLSCELARMYPELTLPLFSVLYTFLHSAPDVEQQACRQALVLSFCGLGELLGKPAIPHNTPQRAPDHAYLPAALAAQHRAGGQQAPPPGSSPSSPEDEVKDREGDVTASHGLRGNGWGSPEATSLVLNNLMYMTAKYGDEVPGPEMENAWNALANNEKWSNNLRITLQFLISLCGVSSDTVLLPYIKKVAIYLCRNNTIQTMEELLFELQQTEPVNPIVQHCDNPPFYRFTASSKASAAASGTTSSSNTVVAGQENFPDAEENKILKESDERFSNVIRAHTRLESRYSNSSGGSYDEDKNDPISPYTGWLLTITETKQPQPLPMPCTGGCWAPLVDYLPETITPRGPLHRSCINFIISLIRCNIAVIFMTEMVVDHSVREDWALHLPLLLHAVFLGLDHYRPEVFEHSKKLLLHLLIALSCNSNFHSIASVLLQTREMGEAKTLTVQPAYQPEYLYTGGFDFLREDQSSPVPDSGLSSSSTSSSISLGGSSGNLPQMTQEVEDVDTAAETDEKANKLIEFLTTRAFGPLWCHEDITPKNQNSKSAEQLTNFLRHVVSVFKDSKSGFHLEHQLSEVALQTALASSSRHYAGRSFQIFRALKQPLSAHALSDLLSRLVEVIGEHGDEIQGYVMEALLTLEAAVDNLSDCLKNSDLLTVLSRSSSPDLSSSSKLTASRKSTGQLNMNPGTTSGNTATAERSRHQRSFSVPKKFGVIDRSSDPPRSATLDRIQACTQQGLSSKTRSSSSLKDSLTDPSHINHPTNLLATIFWVTVALMESDFEFEYLMALRLLSRLLAHMPLDKAENREKLEKLQAQLKWADFSGLQQLLLKGFTSLTTTDLTLQLFSLLTPVSKISMVDASHAIGKASLVHPVSILMLIQHFENPNQFCKDIAERIAQVCLEEKNPKLSNLAHVMTLYKTHSYTRDCATWVNVVCRYLHEAYADITLNMVTYLAELLEKGLPSVQQPLLQVIYSLLSYMDLSVVPVKQFNVEVLKTIEKYVQSVHWREALNILKLVVSRSASLVLPSYQHSDLSKIEIHRVWTSASKELPGKTLDFHFDISETPIIGRRYDELQNSSGRDGKFRAMAVTRSTSSTSSGSNSNVLVPVSWKRPQYSQKRTKEKVAHVLSLCGQEVGLSKNPSVIFSSCGDLDLLEHQTSLVSSEDGAREQENMDDTNSEQQFRVFRDFDFLDAELEDGENWKQNAMHTRELFALLSSVAGVLDTGAAKFKSQWANADSFILDDNHGENHVLGIKKVFFTNSFPGKQVEQIRS

SEQ ID NO: 35124 - protein, 188 aa, Homo sapiens
MLPGHLFCLAKAGKEEQEEKGQIITRKTITPQNIPGPGAHITATHRGRCTVATKFSGGLCKEPNRLTWYGPPLKGAHGGRGPSSRVPSFPAAGQPPIGGALHGAGSRGLARTRAQLGGPPGGELRGTSGNGDGQGPDGDSRKSGSPLRPSHLPDPAAVAGAPVSGHLQTPGHHAGRRQQAGPRGAGLP

SEQ ID NO: 35125 - protein, 139 aa, Homo sapiens
MGKGVWETGSNPIITRQSTTLVLEHTNLLKQPDWLSTHAFSHCPENMSKLVVDTCGSVVLATSATSQQAPYSRNKALANSVRAAEVWMDEFKELYYHRNPRARLGLACDECSIKAGWWLVSERVKEEIMEAAEEAVLQR

SEQ ID NO: 35126 - protein, 355 aa, Homo sapiens
  DOMAIN (77)..(262): Glycosyl transferases domain identified by PFam, accession name Glycos_transf_2, E-value=4.1e-12, PFam score of 53.7
MPRPPVPANALGARGEAVRLQLQGEELRLQEESVRLHQINIYLSDRISLHRRLPVRWNPLCKEKKYDYDNLPRTSVTKAFYNEAWSTLLRTVYSVLETSPDILLEEVILVDDYSDREHLKERLANELSGLPKVRLIRANKREGLVRARLLGASAARGDVLTFLDCHCECHEGWLEPLLQRIHEEESAVVCPVTDVIDWNTFEYLGNSGEPQIGGFDWRLVFRWHTVPERERIRMQSPVDVIRSPTMAGGLFAVSKKYFEYLGSYDTGMEVWGGENLEFSFRIWQCGGVLETHPCSHVGHVFPKQAPYSRNKALANSVRAAEVWMDEFKELYYHRNPRARLGLACDECSIKAGWWL

SEQ ID NO: 35127 - protein, 383 aa, Homo sapiens
  DOMAIN (155)..(200): Glycosyl hydrolases family 2 proteins domain identified by eMATRIX, accession number BL00719C, p-value=1.923e-28, raw score of 30.44
  DOMAIN (1)..(382): Glycosyl hydrolases family 2 domain identified by PFam, accession name Glyco_hydro_2, E-value=1.8e-12, PFam score of -84.6
MHNSDGIEVMRQQKAEIGRVGGLEGIQLGVTEVIVNGARMLESYNCKAELGATGLVNYQISVKCSNQFKLEVYLLNAENKVVDNQAGTQGQLKVLGTNLWWPYLMHEHPAYLYSWEGRPDGAQAVGALTPGTLAVEVWLTAQKSLGPSDFYTLPVGLRTVAVTESQFLISGKPFYFHGVNKHEDADIQGKGFNWPLLVKDFNLLCWLGANTFCTSHYPYTEEMLQICYRYGIVVIDECPAPSGHTGPSVPSLLARWQLFNNVSMHHHMWVVEEPVLRDKNHPAMVMWSLAKEPASFLESAGYSFKSLTMEQTARVLDLDTGEAVLQYRSLPRGAHKTLGKKRKISSYNVDLTSCQLAKEKCLKGPSSFLQSRQERMNSELRDN

SEQ ID NO: 35128 - protein, 81 aa, Homo sapiens
TIFQTRLVNYQISVKCSNQFKLEVCLLNAENKVVDNQAGTQGQLKVLGANLWWPYLMHEHPAYLYSWEDGDCSHQSLGPLP

SEQ ID NO: 35129 - protein, 197 aa, Homo sapiens
  DOMAIN (134)..(179): Glycosyl hydrolases family 2 proteins domain identified by eMATRIX, accession number BL00719C, p-value=2.579e-19, raw score of 30.44
QAGTHRDRTRSLWSPWASRGSGVGKKAHTLDLEAMFEQTQRTAVERSHKTLGLVNYQISIKCSNQFKLEVCLLNAENKVVDNQAGTQGQLKVLGANLWWPYLMHERPAYLYSLEVQLTAQTSLGPVSDFYTLPVGIRTVAVTKSQFLINGKPFYFHGVNKHEDADVCWGSWVLVGAASGHPPLSPSLCPAGEGSSGQ

SEQ ID NO: 35130 - protein, 728 aa, Homo sapiens
  DOMAIN (554)..(601): kw TRANSCRIPTASE REVERSE II ORF2 domain identified by eMATRIX, accession number DM01354V, p-value=1.000e-40, raw score of 12.97
  DOMAIN (301)..(567): Reverse transcriptase domain identified by PFam, accession name rvt, E-value=0.00072, PFam score of -14.7
MQYEKNLAAFASSEDRGRGPGSKEEKVQNSIRKCSITCGKGMQSRVIQCMHKITGRHGNECFSSEKPAAYRPCHLQPCNEKINVNTITSPRLGSQPTSGSESDFSVGQQDQQLGRKNGSGVQESKVKGDMDLSVLPNNNHPDKFLQLDVKSLTRSSALLQASLVRFPGGNYPAAQHWQNLVYSQGLISTINHLYSFGSSSLICQDTRILTQLKYRPQNRQAVVWHPGTHLPSGVKQNFFLLYKVITILNIKLLLKVEEEIKKHGSNNMGLSENLTDCAAAGNGDDGLIPQRAENLKISNFLGRRMKSIIGDEHQKPKVDKTTKRWRNQCRKAENSQNQNASSPKDHNSLPSREQNWSENEFDGLIEVGFRRWVITNSCELKECVLTQPQVDITVLPICDVTPRGLAVKFLSLYSFSLFLNRPTLMENRTYVEILGVGSPSTYPPRSSQLHPWDARLVQHMHINKALEVLARAIRKEKEIKGIQIGREEVNLSLFADDMIVYLEYLIVSAQILLEVISNFSNVSGYKINMQKSQAFLYTNNTQIETQIMNEFPFTIATKRIKYLVIQLTKDVKDLFKENYKPLLKEIREDTNKWENIPCFWIGRINIVKMAILPKVIYRLNVIPIKLPLTFFTELEKTTLNFIWNQKRAHIAKTILSKKNKAGGIMLPDFKLYYKATVTKTAWYWYQNRYADQWNRTEPSEITSHIYNHLIFDKPDTNKQWGKDSLFNK

SEQ ID NO: 35131 - protein, 397 aa, Homo sapiens
  DOMAIN (87)..(100): PROTEIN ZINC-FINGER METAL-BINDI domain identified by eMATRIX, accession number PD00066, p-value=3.769e-15, raw score of 13.92
  DOMAIN (9)..(272): Zinc finger, C2H2 type domain identified by PFam, accession name zf-C2H2, E-value=9.9e-68, PFam score of 238.4
MFHVIERPYECKECGKNFRSGYQLTLHQRFHTGIHKGGKPYECKECKKTFTLYRNLTRHQNIHTGEKLFECKQCGKTYTTGSKLFQHQKTHTGEKPYECKECGKAFSLYGYLKQHQKIHTGMKHFECKECKKTFTLYRNLTRHQNIHTGKKLFECQECGKAYSTGSNLIQHRKTHTGEKPYKCKECGKTFSLHGYLNQHQKIHTGVKPYECKKIHTGGKPYECKECGKAFSRASNLVQHERIHTGEKPYVCKQCGKTFRYGSALKAHQRIHRSIKVNQWLDSPRHKSINCDPMSPRTRKTRERSHVSGRSLCQRLLGQGAQLREFKQPPRNRFRRVCGLVARNTFPRGLRGRRASRRNAAASRLEDAVAELLKARCSALGGSGLPEGLSPRASAVRG

SEQ ID NO: 35132 - protein, 163 aa, Homo sapiens
  DOMAIN (35)..(85): Sugar transport proteins domain identified by eMATRIX, accession number BL00216B, p-value=3.732e-11, raw score of 27.64
CQGEGAKWEQGMTGRRWVVGPPASSTPPHSHFWLLVLSRGLVGIGEASYSTIAPTIIGDLFTKNTRTLMLSVFYFAIPLGSGLGYITGSSVKQAAGDWHCALRESFLQLVRLLKVTHLLQQLQLLYPTNGKRQDTNHTRSQCAHYLPHLDFQVALCAYAVLQC

SEQ ID NO: 35133 - protein, 109 aa, Homo sapiens
EYECHTPSTEKQYFGSYSAKMNLVAVSTKSSCLSWPTPQARLGAPVCCWTQSHEEEVSGAVPAGRGPGAGHCRPLSLAPSASKEPDNHVYTRATVAADAKQCSEIGRKS

SEQ ID NO: 35134 - protein, 106 aa, Homo sapiens
  misc_feature (1)...(106): Xaa = X or * as defined in Table 2
ANRKASTMRWYVRPFCSGLSTLSREKLYPLRMLRMRASTGPLSGALGMYSTASPRLMFSGCSISSARXLFRSSAVTMPPAAWMSFTIWAVRLPLXKAWAPSMASVS

SEQ ID NO: 35135 - protein, 161 aa, Homo sapiens
  misc_feature (1)...(161): Xaa = X or * as defined in Table 2
SRLDCGQGLVNGSCDYHHGCTGDTPRRPEWHRSLAHCMSPVDSLPGCAVSGSSDPWEVSWLWQQVDRCDNREEVMWXQRLGFPSPTVSFPQRAVSASKPLQXAPSWISLHSTLSQCRASDLRGRHTVPEVVYEWSPCALPTHREHPNAIMEGWPPPQAWWA

SEQ ID NO: 35136 - protein, 127 aa, Homo sapiens
  DOMAIN (75)..(107): 2 POLY-IG RECEPTOR domain identified by eMATRIX, accession number DM01688G, p-value=9.138e-10, raw score of 16.45
  DOMAIN (9)..(98): Immunoglobulin domain identified by PFam, accession name ig, E-value=8.8e-06, PFam score of 23.7
SNASVILEGEDLRFSCSVRMAGRLQGRFSVIWQLVDRQNRRSDIMWLDRDGTVQPGSSYWERSSFGSVQMEQVQPNSFSLGIFNSRKEDEGQYECHVTEWVRVVDGEWQIVGERRASTPISIIALGE

SEQ ID NO: 35137 - protein, 1235 aa, Homo sapiens
  DOMAIN (531)..(563): 2 POLY-IG RECEPTOR domain identified by eMATRIX, accession number DM01688G, p-value=8.564e-10, raw score of 16.45
  DOMAIN (55)..(1124): Immunoglobulin domain identified by PFam, accession name ig, E-value=3.9e-51, PFam score of 169.8
EIRSWEKRKRLVLCLLEAADMKCFFPVLSCLAVLGVVSAQRQVTVQEGPLYRTEGSHITIWCNVSGYQGPSEQNFQWSIYLPSSPEREVQIVSTMDSSFPYAIYTQRVRGGKIFIERVQGNSTLLHITDLQARDAGEYECHTPSTDKQYFGSYSAKMNLVVIPDSLQTTAMPQTLHRVEQDPLELTCEVASETIQHSHLSVAWLRQKVGEKPVEVISLSRDFMLHSSSEYAQRQSLGEVRLDKLGRTTFRLTIFHLQPSDQGEFYCEAAEWIQDPDGSWYAMTRKRSEGAVVNVQPTDKEFTVRLETEKRLHTVGEPVEFRCILEAQNVPDRYFAVSWAFNSSLIATMGPNAVPVLNSEFAHREARGQLKVAKESDSVFVLKIYHLRQEDSGKYNCRVTEREKTVTGEFIDKESKRPKNIPIIVLPLTDNWVVKVPQHHQLLSQGHLESSISVEVASNASVILEGEDLRFSCSVRTAGRPQGRFSVIWQLVDRQNRRSNIMWLDRDGTVQPGSSYWERSSFGGVQMEQVQPNSFSLGIFNSRKEDEGQYECHVTEWVRAVDGEWQIVGERRASTPISITALEMGFAVTAISRTPGVTYSDSFDLQCIIKPHYPAWVPVSVTWRFQPVGTVEFHDLVTFTRDGGVQWGDRSSSFRTRTAIEKAESSNNVRLSISRASDTEAGKYQCVAELWRKNYNNTWTRLAERTSNLLEIRVLQPVTKLQVSKSKRTLTLVENKPIQLNCSVKSQTSQNSHFAVLWYVHKPSDADGKLILKTTHNSAFEYGTYAEEEGLRARLQFERHVSGGLFSLTVQRAEVSDSGSYYCHVEEWLLSPNYAWYKLAEEVSGRTEVTVKQPDSRLRLSQAQGNLSVSGDPAGTAGVCGSQPHQHNLPAHGGMVCMEAQPPERETVARLSRDATFHYGEQAAKNNLKGRLHLESPSPGVYRLFIQNVAVQDSGTYSCHVEEWLPSPSGMWYKRAEDTAGQTALTVMRPDASLQVDTVVPNATVSEKAAFQLDCSIVSRSSQDSRFAVAWYSLRTKAGGKRSSPGLEEQEEEREEEEEEEEDDDDDDPTERTALLSVGPDAVFGPEGSPWEGRLRFQRLSPVLYRLTVLQASPQDTGNYSCHVEEWLPSPQKEWYRLTEEESAPIGIRVLDTSPTLQSIICSNDALFYFVFFYPFPIFGILIITILLVRFKSRNSSKNSDGKNGVPLLWIKEPHLNYSPTCLEPPVLSIHPGAID

SEQ ID NO: 35138 - protein, 1242 aa, Homo sapiens
  DOMAIN (491)..(523): 2 POLY-IG RECEPTOR domain identified by eMATRIX, accession number DM01688G, p-value=8.564e-10, raw score of 16.45
  DOMAIN (35)..(1132): Immunoglobulin domain identified by PFam, accession name ig, E-value=3.8e-51, PFam score of 169.8
MKCFFPVLSCLAVLGVVSAQRQVTVQEGPLYRTEGSHITIWCNVSGYQGPSEQNFQWSIYLPSSPEREVQIVSTMDSSFPYAIYTQRVRGGKIFIERVQGNSTLLHITDLQARDAGEYECHTPSTDKQYFGSYSAKMNLVVIPDSLQTTAMPQTLHRVEQDPLELTCEVASETIQHSHLSVAWLRQKVGEKPVEVISLSRDFMLHSSSEYAQRQSLGEVRLDKLGRTTFRLTIFHLQPSDQGEFYCEAAEWIQDPDGSWYAMTRKRSEGAVVNVQPTDKEFTVRLETEKRLHTVGEPVEFRCILEAQNVPDRYFAVSWAFNSSLIATMGPNAVPVLNSEFAHREARGQLKVAKESDSVFVLKIYHLRQEDSGKYNCRVTEREKTVTGEFIDKESKRPKNIPIIVLPLKSSISVEVASNASVILEGEDLRFSCSVRTAGRPQGRFSVIWQLVDRQNRRSNIMWLDRDGTVQPGSSYWERSSFGGVQMEQVQPNSFSLGIFNSRKEDEGQYECHVTEWVRAVDGEWQIVGERRASTPISITALEMGFAVTAISRTPGVTYSDSFDLQCIIKPHYPAWVPVSVTWRFQPVGTVEFHDLVTFTRDGGVQWGDRSSSFRTRTAIEKAESSNNVRLSISRASDTEAGKYQCVAELWRKNYNNTWTRLAERTSNLLEIRVLQPDRMGVSARALRGELSPSQIPQACCHGNTGALVIGIKEPGSLPYLQTVTKLQVSKSKRTLTLVENKPIQLNCSVKSQTSQNSHFAVLWYVHKPSDADGKLILKTTHNSAFEYGTYAEEEGLRARLQFERHVSGGLFSLTVQRAEVSDSGSYYCHVEEWLLSPNYAWYKLAEEVSGRTEVTVKQPDSRLRLSQAQGNLSVSGDPAGTAGVCGSQPHQHNLPAHGGMVCMEAQPPERETVARLSRDATFHYGEQAAKNNLKGRLHLESPSPGVYRLFIQNVAVQDSGTYSCHVEEWLPSPSGMWYKRAEDTAGQTALTVMRPDASLQVDTVVPNATVSEKAAFQLDCSIVSRSSQDSRFAVAWYSLRTKAGGKRSSPGLEEQEEEREEEEEEEEEDDDDDDPTERTALLSVGPDAVFGPEGSPWEGRLRFQRLSPVLYRLTVLQASPQDTGNYSCHVEEWLPSPQKEWYRLTEEESAPIGIRVLDTSPTLQSIICSNDALFYFVFFYPFPIFGILIITILLVRFKSRNSSKNSDGKNGVPLLWIKEPHLNYSPTCLEPPVLSIHPGAID

SEQ ID NO: 35139 - protein, 106 aa, Homo sapiens; identical to SEQ ID NO: 35134
  misc_feature (1)...(106): Xaa = X or * as defined in Table 2

SEQ ID NO: 35140 - protein, 501 aa, Homo sapiens
  DOMAIN (105)..(137): 2 POLY-IG RECEPTOR domain identified by eMATRIX, accession number DM01688G, p-value=9.138e-10, raw score of 16.45
  DOMAIN (39)..(434): Immunoglobulin domain identified by PFam, accession name ig, E-value=5.1e-10, PFam score of 37.3
MWNSKINHDHDDQFLKTYYVLESSISVGVASNASVILEGDDLRFSCSVRMAGRPQGRFSVIWQLVDRQNCRSNIMWLDRDGTVQPGSSYWERSSFGSVQMEQVQPNSFSLGIFNSRKEDEGQYECHVTEWVRVVDGEWQIVGERRASTPISIIALEMGFAVTAISRTPGVTYSDSFDLQCIIKPHYPAQVPVSVTWRFQPVGTVEFHDLVTFTRDGGVQWGDRSSSFRTRTATEKAESSNNVRLIISRASDTEAGKYQCVAELWWKNYNNTWTQLAERTSNLLVIRVLQPDRMGVSARALRGEPSPSQMPQACCHGNTGALVIGINEPESLPCLQTVTKLQVSKSKRTLTLVENKPIQLNCSVKSQTSQNSHFAVLWYVHKPSDANGKLILKTTHNSAFEYGTYVEEEGLRARLQFERHVSGDLFSLTVQRAEWLLSPNYAWYKLAEEVSGRTEVTVKQPGGSLGLGCSVSGWAAEPVCTQGPRPCSWNTPLALTAACAEP

SEQ ID NO: 35141 - protein, 209 aa, Homo sapiens
  DOMAIN (43)..(130): Immunoglobulin domain identified by PFam, accession name ig, E-value=0.00029, PFam score of 18.8
RKTLQTWETAGIAGTGLSGAFLGVVSAQRQVTVQEGPLYRTEGSHITIWCNVSGYQGPSEQNFQWSIYLPSSPEREVQIVSTMDSSFPYAIYTQRVRGGKIFIERVQGNPTLLHITDLQARDAGEYECHTPSTEKQYFGSYSAKMNLVGEREGCLIRESLKKILWLQASAECEGDPGYFLSCFHQILLSFVANTPGKAWGPRLLLDAEP

SEQ ID NO: 35142 - protein, 90 aa, Homo sapiens
KSHHFLSSAGQHHQNHPDPQNPHPCSQNMLRSLQKCCCKVEEHHLQPVQVLQTLLHSATAGTGCRRPARPPPAPPTPTPWRSRQQGSRAS

SEQ ID NO: 35143 - protein, 79 aa, Homo sapiens
  DOMAIN (29)..(49): ALPHA-2A ADRENERGIC RECEPTOR SIGNATURE domain identified by eMATRIX, accession number PR00558C, p-value=7.824e-09, raw score of 6.54
MALALAALAAVEPACGSRYQQASLAGPRPTRRRGLAGRAGPGGAGRAPGSDSRLPRARPARLRPQMLSVHTDVNPPFIK

SEQ ID NO: 35144 - protein, 96 aa, Homo sapiens
  misc_feature (1)...(96): Xaa = X or * as defined in Table 2
VVPASSPGAASEPRRRRRCLQPEKSVSPGSGGGHRDPPKARPPRPPSAPKPXRPRPFSXLARSLCFPAAGCAYGVGVGGAGGGRAGLRQPVPAVAE

SEQ ID NO: 35145 - protein, 280 aa, Homo sapiens
VSVGSAPSDMPAAATRWCNSRCQHGQRLSARPVAGPGTRTSSFPWLAPRNVVVPGSLEMPGTAGPQRGSHSSPQGSSALLSFSCVHNVESKEPVCLLLPSMASRLLTPRGTCRPVPGCLQHPLSLPPVLVGTQSPSQAPKSAKRPSPQPQLGWLQLHPGGSGLCLLPAPAGSMECAALESVPSQLGIGAPGPCWAQAGVQGWSNVATSSPSGPSAQGQPRAPPCLVCGPAQCGTSGSRSRATGLRPSCLECQVWWSPQCGANPGDTTSSQDAGTRCSKVG

SEQ ID NO: 35146 - protein, 162 aa, Homo sapiens
  DOMAIN (9)..(115): Sec7 domain identified by PFam, accession name Sec7, E-value= 4.4e-36, PFam score of 133.3
PEFPSRRFRLDGALRTFLKAFPLMGETQERGRVLTHFSRRYCQCKPLMTALRKMGSHTLTCALMLLNTDLHGHVNIGKKMSCQQFIANLDQLNDGQDFAKDLLKTLYNSIKNEKLEWAIDEDELRKSLSELVDDKFGTGTKKVTRILDGGNPFLDVPQALSA

SEQ ID NO: 35147 - protein, 203 aa, Homo sapiens
  DOMAIN (83)..(139): Sec7 domain identified by PFam, accession name Sec7, E-value= 4.2e-21, PFam score of 80.3
RGARGPEWDGQLDGPGSQMCGMASAPRLRRSGVRAAAGHPVQQPRLLDGLSLTDESDSCVSFEPPSHPSSSSGPVTALSRGWNFLKAFPLMGETQERERVLTHFSRRYCQCNPDAQPSEDGIHTLTCALMLLNTDLHGHVIGEVTGETNRTDKQQNRTEQSKRQANADKHNEHANNEQQHEHDKDNDTRTRDTEMRHAKRDNA

SEQ ID NO: 35148 - protein, 40 aa, Homo sapiens
QKNFPWQNAQYEKSKNKCQSEKNICKSYYRKKLISQMYKE

SEQ ID NO: 35149 - protein, 495 aa, Homo sapiens
CLKISTGYTGSMAEEASGNLTIMAEGEGEAGTSTHGQSRRKREKEEVLHPFKQPDLVRSHYRENSKEEICPHDSVTSCQTPPPTLGITIRHEIAASICHVADTAGVAGDAMMRKTDLIPPFIGLTLQGGRSADMGNQKKWRKGSENLATLVAMASERFHWQYSGNSTIQPKQKQHGMITRLVTAPVCPGLVQPSLCAVGLRNIMSLSSHTCALQNTKQAWEGYDDCHSQRVSQPGENMTKLSFLNLLNQMPSWGEGKMVPADFSGSCWEGTGTGSPAGSQVSFLNRHNDGQLAGDSPGLPPPPCPRGLQGAEQRSALRRHKADVHRDQWLVISFSKKLRTSARKWYEAGPFSGVPRVLPAAAQGGTDFPFSPSEEPFQPSPFSMVQAHTVRSKPQFHFPAAGENCLNRSELSRNQGLQARVGPLAIMSSDPSGDFVLYTPTILGFVGLEVLVSREGTFLWRYSTCPLNYKLWLPPGYLGLLVPKDQKVRAVFLGM

SEQ ID NO: 35150 - protein, 184 aa, Homo sapiens
AHLEAAGWSSSVQPGPSPRVLGRAEEHGQQSGRAKEIGHKIPKETFDELTAELETISSKCLYLAKKNQVIQQELLSMKEVQQKCKKLEEVNKILEQEVVNLKTHEKNMVEFGDVEECKLQLEERAGQEIEKLEEINLQRACLSAKKVRAEGELEPRRHHNHTLGFTEGPWGLMSVITGAYDLIR

SEQ ID NO: 35151 - protein, 44 aa, Homo sapiens
  misc_feature (1)...(44): Xaa = X or * as defined in Table 2
LGNLTSPFFNXKHRSTKGFTTLSTVALLLTGHVGIKTSNCHPGY

SEQ ID NO: 35152 - protein, 141 aa, Homo sapiens
DWFDELTAELETISSKCLYLAKKNQVIQQELLSMKEVQQKCKKLEEVNKILEQEVVNLKTHEKNMVEFGDVEECKLQLEERAGQEIEKLEEINLQRACLSAKKVRAEGELEPRRHHNHTLGFTEGPWGLMSVITGAYDLIR

SEQ ID NO: 35153 - protein, 250 aa, Homo sapiens
  DOMAIN (154)..(178): PROHIBITIN SIGNATURE domain identified by eMATRIX, accession number PR00679F, p-value=9.151e-23, raw score of 8.03
  DOMAIN (12)..(179): SPFH domain / Band 7 family domain identified by PFam, accession name Band_7, E-value=1.2e-43, PFam score of 158.4
MAAKVFVSIGKFGLALAVVGSMLNSALYNVDAGHRAVIFDRFCGVQDIVVGEGTHFPIPWVQKPIIFDCHSRPLNVPVITGSKDLQNVNITLHILSWPVASQLPCIFTSIREDYDERVLPSITTKILKSVVSHFDAGELITQRELLSRQEFTEAVEAKEVDQQEAERARFVVEKAEQQKIAAIISAEGDSMEAKLIPNSLATAGDGLIELSVLEAAEDITYQLSALRTSPTCLLQLSQWGPTLPAPLQAD

SEQ ID NO: 35154 - protein, 62 aa, Homo sapiens
EFRVETGVRGFNRRKHSCQVFESIGKFGLALSVAEGMVNSALYNMDAGHRTVIFDRFCGVQD

SEQ ID NO: 35155 - protein, 62 aa, Homo sapiens
EFRVETGVRGFNRRKHSCQVFESIGKFGLALPVAEGMVNSALYNMDAGHRTVIFDRFCGVQD

SEQ ID NO: 35156 - protein, 62 aa, Homo sapiens; identical to SEQ ID NO: 35154

SEQ ID NO: 35157 - protein, 284 aa, Homo sapiens
  DOMAIN (194)..(218): PROHIBITIN SIGNATURE domain identified by eMATRIX, accession number PR00679F, p-value=3.250e-30, raw score of 8.03
  DOMAIN (24)..(225): SPFH domain / Band 7 family domain identified by PFam, accession name Band_7, E-value=3.6e-63, PFam score of 223.3
GGVRGVQQKETCAFKVLESIGKLGLALSVAGGAENSALYNVDAGHRAVIFDRFRGEQDIVVGEGTHFLIPWVQKPPIIFDCRSRPRNVPVITGSKDLQNVNITLRILFRPVASQLPRIFTSIGEDYDERVLPSITTENLKSVVAPFDAGELITQRELVSRQVSDDLTERAATFGLILDDVSLTHLTFGKEFTEAVEAKQVAQQEAQRARFVVEKAEQQKKAAIISAEGDSKAAELIANSLATAGDGLIELRKLEAAEDIAYQLSRSRNITYLPTGQSVLLQLPQ

SEQ ID NO: 35158 - protein, 86 aa, Homo sapiens
  misc_feature (1)...(86): Xaa = X or * as defined in Table 2
QPLPEPLELRPKALXLTPSQIFSAXRLKTAARLPRKPWAVLPQGFTDTPPHFSQAQISSSSVTYLSIILVKTHVLCSPEFHRTGVV

SEQ ID NO: 35159 - protein, 28 aa, Homo sapiens
  misc_feature (1)...(28): Xaa = X or * as defined in Table 2
PCESYLEHLXWSCRLLRRLGSVSLQLLS

SEQ ID NO: 35160 - protein, 24 aa, Homo sapiens
MFPGLVGLRTRGRRWIFPRAEFLQ

SEQ ID NO: 35161 - protein, 246 aa, Homo sapiens
MSGHLWGIAPGSLEVYREKLAIGKALGNLVPKLSGGERLTCILVGQIKVATREEMSVSVAMEHRNQTKNKPQAIRQYQSSAAKPRSGKESVREPWARVPGALEVAARWTRDLNVKPKTIKVLEDNLGNTIQDTGTGKDFMMKMAKAIATKAKIGKLVLIKLRCYCTAKKTINRENRHPIEWEKIFANYVSDKGLKSSISKELKQVYKKNTNNTIKKWAKDMNRHFTKEDIDAANNHRRKKLNITDH

SEQ ID NO: 35162 - protein, 30 aa, Homo sapiens
CWNSSWGVLRGLEAWPSTPTTVMKAKETGP

SEQ ID NO: 35163 - protein, 100 aa, Homo sapiens
  DOMAIN (15)..(54): PROTEIN ZINC FINGER ZINC-FINGER METAL-BINDING NU domain identified by eMATRIX, accession number PD01066, p-value=5.875e-28, raw score of 19.43
  DOMAIN (13)..(78): KRAB box domain identified by PFam, accession name KRAB, E- value=3.2e-21, PFam score of 83.9
  misc_feature (1)...(100): Xaa = X or * as defined in Table 2
QEQQKMNTLQGPVSFKDVAVDFTQEEWRQLDPDEKITYGDVMLENYSHLVSLAYEVATSCTSEILKPSNLPKSFFFSHXQDMISPSQTSSLSWSRERSCG

SEQ ID NO: 35164 - protein, 89 aa, Homo sapiens
  misc_feature (1)...(89): Xaa = X or * as defined in Table 2
VLHFISAGNTFAHQQEHSPRKGPNNLSKRKLLPAVGPRVFHGEDRHLLFSTRKEXARSLCYVQGGVQAPAAAFCSLLSLWGWAGCAFWC

SEQ ID NO: 35165 - protein, 208 aa, Homo sapiens
  DOMAIN (106)..(139): PROLINE-RICH PROTEIN 3 domain identified by eMATRIX, accession number DM00215, p-value=8.071e-10, raw score of 19.43
RSVTRAPPRSTFPLAQAPSPRSHHIREPTPSPHLGPLRGSHRGPPSRPLPPALAALSLLETLQPRLLHPHLHLLHDQGRACVRAYAHPSYLWRCHALGVWVESARLRPSALPPAHSPPLAAPLLSSSVQPPAPALEPPPRPPAAGAAARCLAAQHHHPSRLGVRQPPLAVGALGSTWPPQAPAPPPELSALEQDRVGAQPPPPPSQGA

SEQ ID NO: 35166 - protein, 65 aa, Homo sapiens
VAKYPKKGSQAVHRHSRKQSEPPANDIFNAAKAAKSDMQDWMVSMIVDREYSVAVEAVRLLILIL

SEQ ID NO: 35167 - protein, 110 aa, Homo sapiens
  misc_feature (1)...(110): Xaa = X or * as defined in Table 2
MVXXXXXXXXXXXXXXXXXXXXXXXXXXXXXXXXXXXXXXXXXXXXXXXXXXXXXXXXXXXXXXXXXXXXXXXXXXXXXXXXXXXXXXXXXXXXXXLSTKKDSRSWKKVL

SEQ ID NO: 35168 - protein, 116 aa, Homo sapiens
  DOMAIN (31)..(70): PROTEIN ZINC FINGER ZINC-FINGER METAL-BINDING NU domain identified by eMATRIX, accession number PD01066, p-value=5.875e-28, raw score of 19.43
  DOMAIN (29)..(94): KRAB box domain identified by PFam, accession name KRAB, E- value=3.2e-21, PFam score of 83.9
  misc_feature (1)...(116): Xaa = X or * as defined in Table 2
PASAPLGLSATVSACFQEQQKMNTLQGPVSFKDVAVDFTQEEWRQLDPDEKITYGDVMLENYSHLVSLAYEVATSCTSEILKPSNLPKSFFFSHXQDMISPSQTSSLSWSRERSCG

SEQ ID NO: 35169 - protein, 124 aa, Homo sapiens
  misc_feature (1)...(124): Xaa = X or * as defined in Table 2
VQWLFMQICLGGKHQQLRHQGVQEKMLPLEGSXVIEAGSPTLIGETLSLEIINYIIGAGLESVHTHKSRQLGGWTRPGSHFQQVLIPAHTPMNLEPSQLSLEPRLVPAQQSLPSAPTPSKALSQ

SEQ ID NO: 35170 - protein, 59 aa, Homo sapiens
  misc_feature (1)...(59): Xaa = X or * as defined in Table 2
MGGSALNQGVLEGDDAPGQSLYERLSQRMLDISGDRGVLKDVIREGAGDLVAPDASVLX

SEQ ID NO: 35171 - protein, 1186 aa, Homo sapiens
  DOMAIN (12)..(25): w SPAC8A404C RESISTANCE SPAC8A4.05C DAUNORUBICIN. domain identified by eMATRIX, accession number DM00191A, p-value=5.440e- 09, raw score of 8.16
MSTPLQRAVGDTKRALSASSSSSASLPFDDRDSNHTSEGNGDSLLADEDTDFEDSLNRNVKKRAAKRPPKTTPVAKHPKKGSRVVHRHSRKQSEPPANDLFNAVKAAKSDMQSLVDEWLDSYKQDQDAGFLELVNFFIQSCGCKGIVTPEMFKKMSNSEIIQHLTEQFNEDSGDYPLIAPGPSWKKFQGSFCEFVRTLVCQCQYSLLYDGFPMDDLISLLTGLSDSQVRAFRHTSTLAAMKLMTSLVKVALQLSVHQDNNQRQYEAERNKGPGQRAPERLESLLEKRKELQEHQEEIEGMMNALFRGVFVHRYRDVLPEIRAICIEEIGCWMQSYSTSFLTDSYLKYIGWTLHDKHREVRLKCVKALKGLYGNRDLTTRLELFTSRFKDRMVSMVMDREYSVAVEAVRLLILILKNMEGLLTDADCESVYPVVYPSNRGLASAAGEFLYWKLFYPECEIRTMGGREQRQSPGAQRTFFQLLLSFFVESELHDHAAYLVDSLWDCAGARLKDWEGLTSLLLEKDQNLGDVQESTLIEILVSSARQASEGHPPVGRVTGRKGLTSKERKTQADDRVKLTEHLIPLLPQLLAKFSADAEKVTPLLQLLSCFDLHIYCTGRLEKHLELFLQQLQEVVVKHAEPAQELEELLQSSFLDEDEVYNLAATLKRLSAFYNTHDLTRWELYEPCCQLLQKAVDTGEVPHQVILPALTLVYFSILWTLTHISKSDASQKQLSSLRDRMVAFCELCQSCLSDVDTEIQEQAFVLLSDLLLIFSPQMIVGGRDFLRPLVFFPEATLQSELASFLMDHVFIQPGDLGSGDSQEDHLQIERLHQRRRLLAGFCKLLLYGVLEMDAASDVFKHYNKFYNDYGDIIKETLTRARQIDRSHCSRILLLSLKQLYTELLQEHGPQGLNELPAFIEMRDLARRFALSFGPQQLQNRDLVVMLHKEGIQFSLSELPPAGSSNQPPNLAFLELLSEFSPRLFHQDKQLLLSYLEKCLQHVSQAPGHPWGPVTTYCHSLSPVENTAETSPQVLPSSKRKRVEGPAKPNREDVSSSQEESLQLNSIPPTPTLTSTAVKSRQPLWGLKEMEEEDGSELDFAQGQPVAGTERSRFLGPQYFQTPHNPSGPGLGNQLMRLSLMEEDEEEELEIQDESNEERQDTDMQASSYSSTSERGLDLLDSTELDIEDF

SEQ ID NO: 35172 - protein, 72 aa, Homo sapiens
MHNSQSYLCVCHLALHKEGQQKLEESPLGTWGSGVALFHPSFLSRTQGRKVWWEWTQGKGLSTGGKQGGVID

SEQ ID NO: 35173 - protein, 729 aa, Homo sapiens
  misc_feature (1)...(729): Xaa = X or * as defined in Table 2
RRRLHYSGSTRPWRTRAMLPRTLSLRPHLSLSLHLPLPCLLLHLLPTHLPPGPKHQPTVRELARRCRLPRACHPAQNLLEQQPLRPSHLQRHLSLLPPLGLSQSGPPGLAPQPLLXLQTPDHFAGADPCSIHGTSHXHQGTSNPSGRDGYQTPSHICPSPAPKQSFLFGTQNTSPSSPAAPAASSAPPMFKPIFTAPPKSEKEGPTPPGPSVTATAPSSSSLPTTTSTTAPTFQPVFSSMGPPASVPLPAPFFKQTTTPATAPTTTAPLFTGLASATSAVAPITSASPSTDSASKPAFGFGINSVSSSSVSTTTSTATAASQPFLFGAPQASAASFTPAMGSIFQFGKPPALPTTTTVTTFSQSLHTAVPTATSSSAADFSGFGSTLATSAPATSSQPTLTFSNTSTPTFNIPFGSSAKSPLPSYPGANPQPAFGAAEGQPPGAAKPALAPSFGSSFTFGNSAAPAPATAPTPAPASTIKIVPAHVPTPIQPTFGGATHSAFGLKATASAFGAPASSQPAFGGSTAVFSFGAATSSGFGATTQTASSGSSSSVFGSTTPSPFTFGGSAAPAGSGSFGINVATPGSSATTGAFSFGAGQSGSTATSTPFTGGLGQNALGTTGQSTPFAFNVGSTTESKPVFGGTATPTFGQNTPAPGVGTSGSSLSFGASSAPAQGFVGVAPFGNTFAHQQEHSPRKGPNNLSKRKLLPAVRAQGPPRRGQASSFPTRKE

SEQ ID NO: 35174 - protein, 307 aa, Homo sapiens
  misc_feature (1)...(307): Xaa = X or * as defined in Table 2
IPCFGCAMPMYQTRRQENDLRTASIAVXRRKQQDDHXKQRRWQNIQRKGPKRYIVIAGNSQSHQPMIFSMLRKLPKVTCRDVLPEIRAICIEEIGCWMQSYSTSFLTDSYLKYIGWTLHDKHREVRVKCVKALKGLYGNRDLTARLELFTGRFKDWMVSMIMDREYSVAVEAVRLLILILKNMEGVLMDVDCESVYPIVXASNXALASAVGEFLYWKLFYPECEIRTMGGREQRQSPGAQRTFFQLLLSFFVESKSHFVTQGGGSGQFSAHRNLCLPGSGNFHVSASRVAGIAGAPPHTWLIYVFFS

SEQ ID NO: 35175 - protein, 583 aa, Homo sapiens
  DOMAIN (103)..(142): PROTEIN ZINC FINGER ZINC-FINGER METAL-BINDING NU domain identified by eMATRIX, accession number PD01066, p-value=7.319e-29, raw score of 19.43
  DOMAIN (101)..(151): KRAB box domain identified by PFam, accession name KRAB, E- value=1e-23, PFam score of 92.2
MVQALKYTRGQNEVPTLMHQRVQTGECPDTNKGRLSATVSACFQEQQEMNTLQDPLSAFDIRYFETDIFSMESLFSWLLKRFIFVDNEHFINTYLSGKGPVSFKDVAVDFTQEEWRQLDPDEKITYGDVMLENYSHLVSLGPPERGVWPAVQHLPETAKNQDGVPHQRSLVLYQPHASYSGAIVASKDLQREIVESGRHREVRVKCVKALKGLYGNRDLTARLELFTGRFKDWMVSMIMDREYSVAVEAVRLLILILKLFYPECEIRTMGGREQRQSPGAQRTFFQLLLPSFGEQVQCLVNSRPSTIKECLLFEKQQATSLDDLQALKGKHFLLDSLMPELLVFPAQTDLHEHPLYRAGHLILQDRRLASMATLLAWVGVSCCELAEEDFLAVSPLDPRYREVHYVLLDPSCSGSGEMRLVYSMCSLCQEENEDMVPDALQQNPGAFRLVPPSCPPHRGLSTFPGAEHCSGLPPRPRLGGFFVAVIERVEMPTPGSLKRGLNSQSSDDHLNKRSRSSSMSSLTGAYTSGIPSSSRNAITSSYSSTRGISQITSSPRSHPFPAASSNWRKAGASIWPAQKSSYE

SEQ ID NO: 35176 - protein, 159 aa, Homo sapiens
  DOMAIN (108)..(134): NOL1/NOP2/sun family proteins domain identified by eMATRIX, accession number BL01153D, p-value=6.609e-11, raw score of 19.69
  misc_feature (1)...(159): Xaa = X or * as defined in Table 2
MNEWFFPGSLDDLRALKGKHFLLDPLMPELLAIKTSHLGCSSEEPREDLLPFDLDAKRAGIHGPRCWPGVGVSCCELAEEDFLGGLPLRIRAIVRSTMSCWIPSCSGSGEMRLVYSMCSLCQEENEDMVPDALQQNPGAFRLAPALPARPHRGLSTFPX

SEQ ID NO: 35177 - protein, 228 aa, Homo sapiens
FEDSFNRGVKKKAAKRPLKTTPVAKYPKKGSQAVHRHSRKQSEPPANDIFNAAKAAKSDMQHREVRVKCVKALKGLYGNRDLTARLELFTGRFKDWMVSMIMDREYSVAVEAVRLLILILKNMEGVLMDVDCESVYPIVLFYPECEIRTMGGREQRQSPGAQRTFFQLLLSFFVESKLHDHAAYLVDNLWDCAGTQLKDWEGLTSLLLEKDQSTCHMEPGPGTFHLLG

SEQ ID NO: 35178 - protein, 786 aa, Homo sapiens
  DOMAIN (260)..(300): RECEPTOR FC IMMUNOGLOBULIN AFFIN domain identified by eMATRIX, accession number PD01270A, p-value=7.581e-09, raw score of 17.22
  DOMAIN (21)..(350): Immunoglobulin domain identified by PFam, accession name ig, E-value=3.9e-10, PFam score of 37.7
MTCHTGSPLEGAPRERAQVSRWFKGTETGQELIYSSKGGHFPKIACISDITKRNNTDFSMCITSITRANTGTYNCVKFWKGGPDMELKSGPGTELSVHSEYSVGLLRPPVQNTPDIQTSSLTGKQVHSSPCGCCGDGSRSQVTGLTFRRGVLLPVLHRRVRTWNGLPKSVPALVGVRAFPHCLDFQGPWWGCLSPRQSLPSSHSGDSQPLPDSQCRRQPPASFKRSYLNTVVNEIGVSFTNKSPFLLLTLLLGLTGVAGEELQVIQPEAFVSVAAGEMATLNCTVTSLLPVGPIQWFRGACPGQKLIYSPKRCHSPRVTTISDQRKRNSTDYSIRISSITLEDAGTYYCMKLRRAIPANVEIKSGPGTQMSVRGEYSVGLLHPPSATKSEPFAVPFTDEDIEAQRGNLSGEQVSSWAPRCCCWLMSLLPMSTGSRRPDSLKSLPLGFQGFQTNTSAPKDEAKRGIVSASKALGKFMANMSGEETPTGMKEVGKIFIEKRNELSGFQINVDPAGESMPYSTCSTARMVLASGDLCLQVICEVAHITLQGDPLCGTENLSETIQVPPFLEVTQQPIKAGNQVNVTCQNLQLTWLENRNVSQIETASILIENMEGTYDWTSWLLVNISAHRDDVLTYQMAHDGQLVVSKSLALEVSAHQEQSSEATLVGEPGTGRWGDWKEGASFPGFCLGLDPGHPGKDSDSKVLEPCWAQVALDGSNAEKPQIGNSESCSHSDPLSACVEGMRERAPGLRRRAELAQSYLRAACPTTTDISGGDQHREHNRLSGNIS

SEQ ID NO: 35179 - protein, 268 aa, Homo sapiens
MSGEETPTGMKEVGKIFIEKRNELSGFQINVDPAGESMPYSTCSTARMVLASGDLCLQVICEVAHITLQGDPLCGTENLSETIQVPPFLEVTQQPIKAGNQVNVTCQNLQLTWLENRNVSQIETASILIENMEGTYDWTSWLLVNISAHRDDVLTYQMAHDGQLVVSKSLALEVSAHQEQSSEATLAHLDSPCHFLCYQDSQQFQISTSTAKEGQGLDIVQEQKIRELSTFSVDLQLATRGIKPLLRYWITKLAGVIYILLLKGIAKV

SEQ ID NO: 35180 - protein, 104 aa, Homo sapiens
  DOMAIN (17)..(104): Intermediate filament proteins domain identified by PFam, accession name filament, E-value=6.5e-22, PFam score of 86.2
MPHTPRCLFRPQASCLVHFLEQQNKLLETKLQFFQNRECCKSNLEPLFEGYTLRREAECMEANSGRLASELNHVQEVLEGYKKKYEEEVALKATAENEFVALKK

SEQ ID NO: 35181 - protein, 55 aa, Homo sapiens
HHLQICGSLLVRCSTVCGEEKGRRGENCTGSRRSSHRPAVGLFTIGSKGKRRRSI

SEQ ID NO: 35182 - protein, 80 aa, Homo sapiens
  misc_feature (1)...(80): Xaa = X or * as defined in Table 2
LPLISDQVSYSPPLMSKSLASLYQESYXTILARIPLPLISPFVNSLSTDLFILLIGNTSIAIFAEFGVSAISLPSCNSLE

SEQ ID NO: 35183 - protein, 194 aa, Homo sapiens
  DOMAIN (46)..(61): Ribosomal protein L15 proteins domain identified by eMATRIX, accession number BL00475A, p-value=7.188e-09, raw score of 10.62
MSSGEGKRTWLGSLWGGVRVPVPPPICGLRVAVTSAGTSSFSLAPKPTRIRGERGKGQGRGSSGNGGRGRAGASAGGSRGEVVSVANDGRWRGRGRGVGCPRSSKREDNRFAKHGRASGKAWEPHPPSQALRALFGPIRRRGRAAETRIVYWIKDRQLTNRDSTILELQKVLKTCCAQSMKIFCCLWNFVYKQL

SEQ ID NO: 35184 - protein, 152 aa, Homo sapiens
  misc_feature (1)...(152): Xaa = X or * as defined in Table 2
MXXXXXXXXXXXXXXXXXXXVHEGVRAVGTASTEALWGHMPAATGXXXXXXXXXXXXXXXXXXXXXXXXXXXXXXXXXXXXXLKEXXXXXXXXXXXXXXXXXXPQXKXHPLFLTKRGGXPPFSFFYXXXXXAIFLFCFVFXXPKGRGXELRP

SEQ ID NO: 35185 - protein, 385 aa, Homo sapiens
MAFRKKIITAGCIDHVLSVSDSQQMQANLTQRTEAEIRKQTQIAPTFPAHSLPDKYLGFALLNRKIIGTFLVFNMCKRNHEDKNEAFTVLREKKVFNLEFCTLQNYSSEVKEKERQRFSDKQTLREFATRKPALKEMLKVLQRYKERKHIRKRNVKYSADHTTDHTANQADPNQQEPHVPGHAPDNKTIRQKQNQHKDNTTRKHNQMTSDTSRTNTKVSGQPRGKQTRRRHERQQKARERGQHRQKRDAQTREHTQRQRQARAEEQVIENKREEKRTSERTNDSTRREGTRRPRRTEKGERQEEGDRATATHRKDHDRQQPHGAPHCSRSSRHGAPTGPLYCCSPLPGTPSCTICTVQYGRLWPHMATEQLNMAGPNQDFQDVVW

SEQ ID NO: 35186 - protein, 526 aa, Homo sapiens
  DOMAIN (145)..(159): LEUCINE-RICH REPEAT SIGNATURE domain identified by eMATRIX, accession number PR00019B, p-value=9.500e-11, raw score of 11.36
  DOMAIN (49)..(219): Leucine Rich Repeat domain identified by PFam, accession name LRR, E-value=2.4e-19, PFam score of 77.7
MAPALLLLLLASGAAACPLPCVCQNLSESLSTLCAHRGLLFVPPNVDRRTVELRLADNFIQALGPPDFRNMTGLVDLTLSRNAITRIGARAFGDLESLRSLHLDGNQAGGAGHPRALRGPVNLQHLILSGNQLGRIAPGAFDDFLESLEDLDLSYNNLRQVPWAGIGAMPALHTLNLDHNLIDALPPGAFAQLGQLSRLDLTSNRLATLAPDPLFSRGRDAEASPAPLVLSFSGNPLHCNCELLWLRRLARPDDLETCASPPGLAGRYFWAVPEGEFSCEPPLIARHTQRLWVLEGQRATLRCRALGDPAPTMHWVGPDDRLVGNSSRARAFPNGTLEIGVTGAGDAGGYTCIATNPAGEATARVELRVLALPHGGNSSAEGGRPGPRTSPPPLALLPRYNSSEDETLIYRIVPASSHHFLLKHLVPGADYDLCLLALSPAAGPSDLTATRLLGCAHFSTLPASPLCHALQAHVLGGTLTVAVGGVLVAALLVFTVALLVRGRGAGNGRLPLKLSHVQSQTNARLY

SEQ ID NO: 35187 - protein, 134 aa, Homo sapiens
  DOMAIN (51)..(66): G-PROTEIN BETA WD-40 REPEAT SIGNATURE domain identified by eMATRIX, accession number PR00320C, p-value=1.391e-11, raw score of 13.01
  DOMAIN (26)..(117): WD domain, G-beta repeat domain identified by PFam, accession name WD40, E-value=8.8e-12, PFam score of 52.6
FFVPGDRQVVIGTKTGKLQLYDLASGNLLETIDAHDGALWSMSLSPDQRGFVTGGADKSVKFWDFELVKDENSTQKRLSVKQTRTLQLDEDVLCVSYSPNQKLLAVSLLDCTVKIFYVDTLKFFLSLYGHKLPV

SEQ ID NO: 35188 - protein, 118 aa, Homo sapiens
  misc_feature (1)...(118): Xaa = X or * as defined in Table 2
PVFPWHPYSKDQKEESQSVLVIWQKTAGGGWSTWWILSFSPETEKVVKKAHVDTLXNEMWDVTKXTAFKIPSCTXHQQHPXSFFRKSESQVIVFAGQGVKIHXYILLHSNVIHYMNEI

SEQ ID NO: 35189 - protein, 215 aa, Homo sapiens
  DOMAIN (11)..(49): WD domain, G-beta repeat domain identified by PFam, accession name WD40, E-value=4e-09, PFam score of 43.7
  misc_feature (1)...(215): Xaa = X or * as defined in Table 2
EFIKQWDADKFEHIQTLEGHHQEIWCLAVSPSGDYVVSSSHDKSLRLWERTREPLILEEEREMEREAEYEESVAKEDQPAVPGEIQGDSYFTXKKTIETVKAAERIMEAFELYREETAKMKEHKAICKAAGKEVPLPSNPILMAYGSISPSAYVLEIFKGIKSSELEESLLVLPFSYVPDILKLFNEFIQLGSDVELICRCLFFLLRIHFGQITS

SEQ ID NO: 35190 - protein, 234 aa, Homo sapiens
  misc_feature (1)...(234): Xaa = X or * as defined in Table 2
MGLTKQYLRYVASAVFGVIGSQKGNIVFVTLRGEKGRYVAVPACEHVFIWDLRKGEKGLKQEVTCLCPSPDGLHLAVGYEDGSIRIFSLLSGEGNVTFNGHKAAITTLKYDQLGGRLASGSKRQPGGIVFTESILAYSSACQDKQNHYWGSSQXCADFVIQLRQYCCSFSCSXFHXNMEQVYTAVYSHNDLXICTLLILCTWXXTGSHRNKAPKTMFPRCTEGLDRGNRPATHS

SEQ ID NO: 35191 - protein, 871 aa, Homo sapiens
  DOMAIN (125)..(140): G-PROTEIN BETA WD-40 REPEAT SIGNATURE domain identified by eMATRIX, accession number PR00320C, p-value=1.391e-11, raw score of 13.01
  DOMAIN (50)..(737): WD domain, G-beta repeat domain identified by PFam, accession name WD40, E-value=9.6e-32, PFam score of 118.9
MGLTKQYLRYVASAVFGVIGSQKGNIVFVTLRGEKGRYVAVPACEHVFIWDLRKGEKGLKQEVTCLCPSPDGLHLAVGYEDGSIRIFSLLSGEGNVTFNGHKAAITTLKYDQLGGRLASGSKRGFVTGGADKSVKFWDFELVKDENSTQKRLSVKQTRTLQLDEDVLCVSYSPNQKLLAVSLLDCTVKIFYVDTLKRRRPRQRLGKEPNQHARKWRQARSSRENFGGPIRAGAGTDQVLGRRRPTNISGDPKQERAEYGESKSQETGVTSCKCSGLKNTGFRSWPELTKQRPVSTWFFTTFSVSGLKDKIHHVDSLHQLFSAISPEQIDFPPFVLEYDARISTKDLKKLALNVNHALLYFIHVMDHIAVKEYVLVYFHTLTSEYNHLYSDFLKKLYDVVDVNVMYLQFVPKSHLFFTAGKDHKIKQWDADKFEHIQTLEGHHQEIWCLAVSPSGDYVVSSSHDQSLRLWERTREPLILEEEREMEREAEYEESVAKEDQPAVPGETQGDSYFTGKKTIETVKAIEDPEEPDPKKIKGSSPGIQDTLEAEDGAFETDEAPEDVIHFHFLSLIVLNNGKRILSCRKAGSIMREGRDRVVNLAVDKTGRILACHGTDSVLELFCILSKKEIQKKMDKKMKKARKKAKLHSSQGEEEDPEVNVEMSLQDEIQRVTEYKNFCQNQNNLVELYSLNPSLPTPQPVRTSRITIGGHRSDVRTLSFSSDNIAVLSAAADSIKIWNRSTLQCIRTMTCEYALCSFFVPVIDSYNRWLCQARSEDLSDIASLKALYQTGVDNCGRTVMVVVGRNIPVTLIDMDKTRLGMCGRSVATVQAFSASWKHRFGGCRLGSGDHGVSEEGLVVNCQKGGESCARGTK

SEQ ID NO: 35192 - protein, 223 aa, Homo sapiens
  DOMAIN (129)..(154): Bromodomain proteins domain identified by eMATRIX, accession number BL00633B, p-value=1.257e-15, raw score of 13.82
  DOMAIN (98)..(188): Bromo domain identified by PFam, accession name bromodomain, E-value=1.9e-37, PFam score of 133.7
PECTGRTLRSASQQHDTFYILACELNSLADDAQRYDVPNSCLYPPDLPWRPVMQAKKKELARRDDIEDGDSMISSATSDTGSAKRKSKKNIRKQRMKILFNVVLEAREPGSGRRLCDLFMVKPSKKDYPDYYIIILEPMDLKIIEHNIRNDKYAGEEGMIEDMKLMFRNARHYNEEGSQVYNDAHILEKLLKEKRKELGPLPDDDDMASPKLKLSKAASHFII

SEQ ID NO: 35193 - protein, 141 aa, Homo sapiens
VQKLLVCGLSLLFHLTICTTLPVEYNIDEHFQATASWPTKIIYLYISLLAARPKYYFAWTLADAINNAAGFGFRGYDENGAARWDLISNLRIQQIEMSTSFKMFLDNWNIQTALWLKRVCYERTSFSPTIQTFILSAIWHG

SEQ ID NO: 35194 - protein, 371 aa, Homo sapiens
LCSVPTLCLASSHLVSNLSTFKQTSSFIRHVVATLLGLYLALFCFGWYALHFLVQSGISYCIMIIIGVENMHNYCFVFALGYLTVCQVTRVYIFDYGQYSADFSGPMMIITQKITSLACEIHDGMFRKDEELTSSQRDLAVRRMPSLLEYLSYNCNFMGILAGPLCSYKDYITFIEGRSYHITQSGENGKEETQYERTEPSPNTAVVQKLLVCGLALLFHLTICTTLPVEYNIDEHFQATASWPTKIIYLYISLLAARPKYYFAWTLGTAPRKWSPCPGPQCIQLRAADPSGPEPLLMLSSQERQPKAKPPKEAHADIAGTPREGEKTRTGGPGKAFLRDPGASSSVELSRTQLWVLTPPPIAKAPCECLQ

SEQ ID NO: 35195 - protein, 113 aa, Homo sapiens
MGPVPLVWAMSQLSLSAKMDRRRTGVMMTSTPITWGTLEKTMQEAEKLLERQGQTKTPDSMFLAMEESLNVTFVKNITTQFMVCGFNPYVFLAAKADQLQVVVSHTTTASQER

SEQ ID NO: 35196 - protein, 60 aa, Homo sapiens
MIQLSPTGSLPQHMGIMGATVQDEIWCADDNNEACGNATAVIVTWIRDILERNMSLIHGP

SEQ ID NO: 35197 - protein, 62 aa, Homo sapiens
  misc_feature (1)...(62): Xaa = X or * as defined in Table 2
GLFPLEPGANGIXGCSGRIRAQRWLPGRPKFTGESFIRXPPRVAKESGQLIWFGCVPTQISS

SEQ ID NO: 35198 - protein, 1685 aa, Homo sapiens
  DOMAIN (1159)..(1203): Synapsins proteins domain identified by eMATRIX, accession number BL00415N, p-value=4.229e-10, raw score of 4.29
  DOMAIN (42)..(1456): Collagen triple helix repeat (20 copies) domain identified by PFam, accession name Collagen, E-value=3.2e-176, PFam score of 598.8
MKLRGVSLAAGLFLLALSLWGQPAEAAACYGCSPGSKCDCSGIKGEKGERGFPGLEGHPGLPGFPGPEGPPGPRGQKGDDGIPGPPGPKGIRGPPGLPGFPGTPGLPGMPGHDGAPGPQGIPGCNGTKGERGFPGSPGFPGLQGPPGPPGIPGMKGEPGSIIMSSLPGPKGNPGYPGPPGIQGLPGPTGIPGPIGPPGPPGLMGPPGPPGLPGPKGNMGLNFQGPKGEKGEQGLQGPPGPPGQISEQKRPIDVEFQKGDQGLPGDRGPPGPPGIRGPPGPPGGEKGEKGEQGEPGKRGKPGKDGENGQPGIPGLPGDPGYPGEPGRDGEKGQKGDTGPPGPPGLVIPRPGTGITIGEKGNIGLPGLPGEKGERGFPGIQGPPGLPGPPGAAVMGPPGPPGFPGERGQKGDEGPPGISIPGPPGLDGQPGAPGLPGPPGPAGPHIPPSDEICEPGPPGPPGSPGDKGLQGEQGVKGDKGDTCFNCIGTGISGPPGQPGLPGLPGPPGSLGFPGQKGEKGQAGATGPKGLPGIPGAPGAPGFPGSKGEPGDILTFPGMKGDKGELGSPGAPGLPGLPGTPGQDGLPGLPGPKGEPGGITFKGERGPPGNPGLPGLPGNIGPMGPPGFGPPGPVGEKGIQGVAGNPGQPGIPGPKGDPGQTITQPGKPGFRGNPGRDGDVGLPGDPGLPGQPGLPGIPGSKGEPGIPGIGLPGPPGPKGFPGIPGPPGAPGTPGRIGLEGPPGPPGFPGPKGEPGFALPGPPGPPGLPGFKGALGPKGDRGFPGPPGPPGRTGLDGLPGPKGDVGPNGQPGPMGPPGLPGIGVQGPPGPPGIPGPIGQPGLHGIPGEKGDPGPPGLDVPGPPGERGSPGIPGAPGPIGPPGSPGLPGKAGRSGFPGTKGEMGMMGPPGPPGPLGIPGRSGVPGLKGDDGLQGQPGLPGPTGEKGSKGEPGLPGPPGPMDPNLLGSKGEKGEPGLPGIPGVSGPKGYQGLPGDPGQPGLSGQPGLPGPPGPKGNPGLPGQPGLIGPPGLKGTIGDMGFPGPQGVEGPPGPSGVPGQPGSPGLPGQKGDKGDPGISSIGLPGLPGPKGEPGLPGYPGNPGIKGSVGDPGLPGLPGTPGAKGQPGLPGFPGTPGPPGPKGISGPPGNPGLPGEPGPVGGGGHPGQPGPPGEKGKPGQDGIPGPAGQKGEPGQPGFGNPGPPGLPGLSGQKGDGGLPGIPGNPGLPGPKGEPGFHGFPGVQGPPGPPGSPGPALEGPKGNPGPQGPPGRPGLPGPEGPPGLPGNGGIKGEKGNPGQPGLPGLPGLKGDQGPPGLQGNPGRPGLNGMKGDPGLPGVPGFPGMKGPSGVPGSAGPEGEPGLIGPPGPPGLPGPSGQSIIIKGDAGPPGIPGQPGLKGLPGPQGPQGLPGPTGPPGDPGRNGLPGFDGAGGRKGDPGLPGQPGTRGLDGPPGPDGLQGPPGPPGTSSVAHGFLITRHSQTTDAPQCPQGTLQVYEGFSLLYVQGNKRAHGQDLGTAGSCLRRFSTMPFMFCNINNVCNFASRNDYSYWLSTPEPMPMSMQPLKGQSIQPFISRCAVCEAPAVVIAVHSQTIQIPHCPQGWDSLWIGYSFMMHTSAGAEGSGQALASPGSCLEEFRSAPFIECHGRGTCNYYANSYSFWLATVDVSDMFSKPQSETLKAGDLRTRISRCQVCMKRT

SEQ ID NO: 35199 - protein, 547 aa, Homo sapiens
  DOMAIN (316)..(351): Prion protein domain identified by eMATRIX, accession number BL00291A, p-value=5.862e-09, raw score of 4.49
  DOMAIN (81)..(540): Collagen triple helix repeat (20 copies) domain identified by PFam, accession name Collagen, E-value=3.7e-17, PFam score of 70.4
EDEGRAKGHHTWQQTRENESQAKGETPYKTIRFRETYYHKNSMGETTPMIQLSPTGSLPQHVGIMGATIQDKIWVTPGLPGFPGTPGLPVKRGFPGSPGFPGLQGPPVIPGPTGIPGPIGPPGPPGLMVTPGPPGLPGPKVNMGLNFQGPKGEKVKQGLQGPPGPPGQISEQKRPIDVEFQKGDQVIPGDRGPPGPPGIRGPPVTPGGEKGEKGEQGEPGKRVKPGKDGENGQPGIPVMPGDPGYPGEPGRDGEKGNAVMGPPGPPGFPGERGQKGDEGPPGISIPGPPGLDGQPGAPGLPGPPGPAGPHIPPSNKGDTCFNCIGTGISGPPGQPGLPGLPGPPGIPGAPGAPGFPGSKGEPGDILTFPGMKGDKGELGSPGAPGLPGLPGTPGQDGLPGLPGPKGEPVRITFKGERGPPGNPGLPGLPGNIGPMGPPGFGPPGPVGEKGIQGVAGNPGQPGIPGNKGDPGQTITQPGKPGLPGNPGRDGDVGLPGIPGLPGQPGLPGIPGSKGEPGIPGIGLPGPPGPKGIILTNGKSTQWSEDSS

SEQ ID NO: 35200 - protein, 49 aa, Homo sapiens
CSGTYRCYSFHSRDPYLWSAPSDPLELVVTGPARQYYTKGNLVRIASGL

SEQ ID NO: 35201 - protein, 962 aa, Homo sapiens
  DOMAIN (150)..(170): CORONAVIRUS NUCLEOCAPSID PROTEIN domain identified by eMATRIX, accession number DM01206B, p-value=3.589e-10, raw score of 10.69
LSDPCSSRWDERSLSQRSRSWSYNGYYSDLSTARHSGHHKKRRKEKKVKHKKKGKKQKHCRRHKQTKKRRILIPSDIESSKSSTRRMKSSCDRERSSRSSSLSSHHSSKRDWSKSDKDVQSSLTHSSRDSYRSKSHSQSYSRGSSRSRTASKSSSHSRSRSKSRSSSKSGHRKRASKSPRKTASQLSENKPVKTEPLRATMAQNENVVVQPVVAENIPVIPLSDSPPPSRWKPGQKPWKPSYERIQEMKAKTTHLLPIQSTYSLANIKETGSSSSYHKREKNSESDQSTYSKYSDRSSESSPRSRSRSSRSRSYSRSYTRSRSLASSHSRSRSPSSRSHSRNKYSDHSQCSRSSSYTSISSDDGRRAKRRLRSSGKKNSVSHKKHSSSSEKTLHSKYVKGRDRSSCVRKYSESRSSLDYSSDSEQSSVQATQSAQEKEKQGQMERTHNKQEKNRGEEKSKSERECPHSKKRTLKENLSDHLRNGSKPKRKNYAGSKWDSESNSERDVTKNSKNDSHPSSDKEEGEATSDSESEVSEIHIKVKPTTKSSTNTSLPDDNGAWKSSKQRTSTSDSEGSCSNSENNRGKPQKHKHGSKENLKREHTKKVKEKLKGKKDKKHKAPKRKQAFHWQPPLEFGEEEEEEIDDKQVTQESKEKKVSENNETIKDNILKTEKSSEEDLSGKHDTVTVSSDLDQFTKDDSKLSISPTALNTEENVACLQNIQHVEESVPNGVEDVLQTDDNMEICTPDRSSPAKVEETSPLGNARLDTPDINIVLKQDMATEHPQAEVVKQESSMSESKVLGEVGKQDSSSASLASAGESTGKKEVAEKSQINLIDKKWKPLQGVGNLAAPNAATSSAVEVKVLTTVPEMKPQGLRIEIKSKNKVRPGSLFDEVRKTARLNRRPRNQESSSDEQTPSRDDDSQSRSPSRSRRSRSYSRSRSRGWYSRGRTRSRSSSYRSYKSH

SEQ ID NO: 35202 - protein, 212 aa, Homo sapiens
  DOMAIN (46)..(76): Flocculin repeat proteins domain identified by eMATRIX, accession number PF00624I, p-value=4.975e-10, raw score of 9.10
  misc_feature (1)...(212): Xaa = X or * as defined in Table 2
LWGGGSARLLRLPRGPCLPPASPSSPSSSSELSXSCSLGPSSSSSSSSSSCSLCPSSSSSSSSPXLPPSSSSSSSRPLPPPSSSSSSSSSSSSSSSSSSECLCSPSSRPRTTVAGLGPAPGFPSGPVDTCSVWLLRFTSTMIWDCSLRLXVPEPPSSSSNSSPPSSLHKLAGGPPASSTPPSFSSLKKGWAGPMVAGTVPPAVPAPSSTRTE

SEQ ID NO: 35203 - protein, 164 aa, Homo sapiens
  DOMAIN (14)..(34): CORONAVIRUS NUCLEOCAPSID PROTEIN domain identified by eMATRIX, accession number DM01206B, p-value=3.589e-10, raw score of 10.69
SQSYSRGSSRSRTASKSSSHSRSRSKSRSSSKSAVLASTARCAGSRKQCVPLPIRLCQLQSRSLQPSMVPWRWGLTGPRGIALPPAARPGPLHEAPRWGPPPRRAPRPWPPGARPGRRRRRAAASPAPSSCGPRASGAAGGGRGAPIGARASAGAAVWTPISTT

SEQ ID NO: 35204 - protein, 1524 aa, Homo sapiens
  DOMAIN (121)..(161): Cyclophilin-type peptidyl-prolyl cis-trans isomerase signatur domain identified by eMATRIX, accession number BL00170B, p-value= 7.857e-36, raw score of 20.97
  DOMAIN (70)..(239): Cyclophilin type peptidyl-prolyl cis-tr domain identified by PFam, accession name pro_isomerase, E-value=6.1e-109, PFam score of 375.3
TLAVFVPTLAGFSVALGGPAWGRRRRSVSGVGVWLQWQCFLFCSRGPAQAGGQPALAATSVAMGAQDRPQCHFDIEINREPVGRIMFQLFSDICPKTCKNFLCLCSGEKGLGKTTGKKLCYKGSTFHRVVKNFMIQGGDFSEGNGKGGESIYGGYFKDENFILKHDRAFLLSMANRGKHTNGSQFFITTKPAPHLDGVHVVFGLVISGFEVIEQIENLKTDAASRPYADVRVIDCGVLATKSIKDVFEKKRKKPTHSEGSDSSSNSSSSSESSSESELEHERSRRRKHKRRPKVKRSKKRRKEASSSEEPRNKHAMNPKGHSERSDTNEKRSVDSSAKREKPVVRPEEIPPVPENRFLLRRDMPVVTAEPEPKIPDVAPIVSDQKPSVSKSGRKIKGRGTIRYHTPPRSRSCSESDDDDSSETPPHWKEEMQRLRAYRPPSGEKWSKGDKLSDPCSSRWDERSLSQRSRSWSYNGYYSDLSTARHSGHHKKRRKEKKVKHKRKGKKAEHCRGHKQTKRRGILIPSDIESSKSSTRRMKSSCDRERSSRSSSLSSHHSSKRDWSKSDKDVQSSLTHSSRDSYRSKSHSQSYSRGSSRSRTASKSSSHSRSRSKSRSSSKSGHRKRASKSPRKTASQLSENKPVKTEPLRATMAQNENVVVQPVVAENIPVIPLSDSPPPSRWKPGQKPWKPSYERIQEMKAKTTHLLPIQSTYSLANIKETGSSSSYHKREKNSESDQSTYSKYSDRSSESSPRSRSRSSRSRSYSRSYTRSRSLASSHSRSRSPSSRSHSRNKYSDHSQCSRSSSYTSISSDDGRRAKRRLRSSGKKNSVSHKKHSSSSEKTLHSKYVKGRDRSSCVRKYSESRSSLDYSSDSEQSSVQATQSAQEKEKQGQMERTHNKQEKNRGEEKSKSERECPHSKKRTLKENLSDHLRNGSKPKRKNYAGSKWDSESNSERDVTKNSKNDSHPSSDKEEGEATSDSESEVSEIHIKVKPTTKSSTNTSLPDDNGAWKSSKQRTSTSDSEGSCSNSENNRGKPQKHKHGSKENLKREHTKKVKEKLKGKKDKKHKAPKRKQAFHWQPPLEFGEEEEEEIDDKQVTQESKEKKVSENNETIKDNILKTEKSSEEDLSGKHDTVTVSSDLDQFTKDDSKLSISPTALNTEENVACLQNIQHVEESVPNGVEDVLQTDDNMEICTPDRSSPAKVEETSPLGNARLDTPDINIVLKQDMATEHPQAEVVKQESSMSESKVLGEVGKQDSSSASLASAGESTGKKEVAEKSQINLIDKKWKPLQGVGNLAAPNAATSSAVEVKVLTTVPEMKPQGLRIEIKSKNKVRPGSLFDEVRKTARLNRRPRNQESSSDEQTPSRDDDSQSRSPSRSRSKSETKSRHRTRSVSYSHSRSRSRSSTSSYRSRSYSRSRSRGWYSRGRTRSRSSSYRSYKSHRTSSRSRSRSSSYDPHSRSRSYTYDSYYSRSRSRSRSQRSDSYHRGRSYNRRSRSCRSYGSDSESDRSYSHHRSPSESSRYS

SEQ ID NO: 35205 - protein, 563 aa, Homo sapiens
  DOMAIN (330)..(383): ANTIGEN MELANOMA-ASSOCIATED MULTIGENE FAMILY TUM domain identified by eMATRIX, accession number PD01876C, p-value=2.017e- 09, raw score of 21.73
  DOMAIN (243)..(462): MAGE family domain identified by PFam, accession name MAGE, E -value=5.6e-74, PFam score of 259.2
MVGEGGTKLEDTRVLLSNPHDKPIWIEQWLLSKEKLEALEDLVTEQLENGHIAPTFSPWNSPVFVIKKKSELDLTRNNERACLGRFHCRTGRGAGNESYGIIIDWSPKGMFSLNCTSQSASHDHTMFSWSKQNGQMVEMFTHFLGQARLFLSLVRIKLMFTKPPRPFSGTLIFNLILDIPSRWPRPRSRRRSAASRRRPALPVAAEGAARSNAHFLSRNPRRERRLEELLDAEALPLPDGADMSEQSKDLSDPNFAAEAPNSEVHSSPGVSEGVPPSATLAEPQSPPLGPTAAPQAAPPPQAPNDEGDPKALQQAAEEGRAHQAPSAAQPGPAPPAPAQLVQKAHELMWYVLVKDQKKMIIWFPDMVKDVIGSYKKWCRSILRRTSLILARVFGLHLRLTSLHTMEFALVKALEPEELDRVALSNRMPMTGLLLMILSLIYVKGRGARESAVWNVLRILGLRPWKKHSTFGDVRKLITEEFVQMNYLKYQRVPYVEPPEYEFFWGSRASREITKMQIMEFLARVFKKDPQAWPSRYREALEEARALREANPTAHYPRSSVSED

SEQ ID NO: 35206 - protein, 534 aa, Homo sapiens
  DOMAIN (459)..(512): Clathrin light chain proteins domain identified by eMATRIX, accession number BL00224B, p-value=1.736e-09, raw score of 16.94
  DOMAIN (121)..(232): gag gene protein p24 domain identified by PFam, accession name gag_p24, E-value=4.7e-34, PFam score of 126.5
MGISCPGSSKMLNSRALPVLKLTQGALRDCKERANYTNFNIYKAVESQGKFVCVLYNGQQSPEYVMIPCTSVSPTGQEVPEDRGMRMVMKNKPNKPSKMQSLKSSKHLTNSVIVIAVGIFFSVTLQARDPQLDDAIEQLRGVCIRAWEKITSGGEQYPSFSAIKQGPKEPYIDFIARLQESLKKMIADSAAQDIVLQLLAFDNANPDCQAALRPIRGKAHLVDCIKACDDIGDGSSNGKASYFGSKSKVFQTSYTSAQKAELVAVIEVLTAFDMPINVISDSSYMVYSTQLIENAQLRFHTDEQLMTLFTQLQTAFRSTMHPFYITHIRARHTPLPGPLTEGNQMADCLVANAISNARHFHNLTHVNASGLKHRYSITWKEAKNIIQRCPTCQMVHSSSFRGGVNPRGLEPNSLWQMDVTHIPLFGRLAYVHKRRRIRGGGGGEGEGEGEGEGEEEEEEEEEEEEEEEEEEEEEEEQEQEQEEQEQEEQEQEEQEQEERRRKDTEELSYSLPLNRTQPCWHPDFGLPATRTVRR

SEQ ID NO: 35207 - protein, 382 aa, Homo sapiens
MVGECGTKLEVMQVHLSNPRDELEGELRSIRVTMGQVWALVHSTLEPFHTNEEEEGLYNKVTEEVTEQVCLPAKAKAAKEGEVHPYPSPFPHYFEETEWPDPPDLSFLEDTGGDPSLTSHWQLTKEAEAELQLIEKQVHKAQINRIDPEKIPDLLIFSTQHSPTGVIVQEQDLVEWLFLPHTNSWTLTPYLDQNATMIGNERTQIVKLHGYDPRKIIVLLMKANIQQAFINGLTWQTHLANFVVILDNHFPKMKLFQFLKLTNWILPKITKFKPIKGAENVFTDGSSNGKASYSGSKGLSQQLIWISSRNLKPYHESDAEEEIPGRTQGTPGCSHVETDTEEDPNCHEQHPLNTATHLGTDQEAVTDGGRKPEERGTTSHNE

SEQ ID NO: 35208 - protein, 525 aa, Homo sapiens
  DOMAIN (93)..(104): dUTPase domain identified by eMATRIX, accession number PF00692B, p-value=5.891e-09, raw score of 8.14
  DOMAIN (27)..(154): dUTPase domain identified by PFam, accession name dUTPase, E- value=4.2e-26, PFam score of 100.1
MGQVWALVHSTLETFHTDEEEGEYNEVTEQVCLPAKAGSAAVDLCCTKAVSLLPGESPQKVPTGAGGPLPAGMTGLLLGRSSLNIKAVQVQTGVTDSDYNGEIQIVTSTSVPWKAKPGDHIAQLLIVPKKFEGLKEPLQVERQSSCQGLGYPFLMAAIVKPPEPIPLKWLTDKPIWTEQWPLSKEKLEALEDLITQQLKKGHIAPTFSPWNSPVFIIKKKSAEQDCEWFVFTILAVNNLQLKPAKRFHWKVLPQGPNQQPIWIPSRYLKPYHKPDAKEEIPEGSQGFPVAAMSRLTLRRTPTVTSNTHRTQPPTWGQIEKLPQMAEENLRKAGQPVTISNWILPRITKFKPIEGAENVFTDGSSNGKASYSGSKGPLTEGNQMADRLVAKVISNARHFHNLTHVNASGLKRRYSITWKEAKAIIQRCPTCQVMLSAAEQHLQKSAAKTEAEKLVWWRDPITKSREIGKIITWGRGYACVSPGPNQQPIWIPSKHLKPYHKPDAGEKISGGNCGPHPHPRLQPCPD

SEQ ID NO: 35209 - protein, 141 aa, Homo sapiens
MTNISTTLKDLKDAGMIDPIKSTFNLPIWIPQKPDGSWKTTANNRKLNQATISIAAIVLDVASLPGKARSYHGFSSHAGRVIDSNNQKDIEGCTYILNVAGKNMFGIQLRRSVIFPCPNLMYTDNCSSHGPRGPSDYDSDP

SEQ ID NO: 35210 - protein, 160 aa, Homo sapiens
  misc_feature (1)...(160): Xaa = X or * as defined in Table 2
PEHILPGAQEGPSCPLEPELEVXNMSSWNTLSESCKMHGDLKYLFVITAKDQQVSIAASTXGFCWNQXVSASPSQAPGMPLVLGRRLWQGSRLGGLSISLSDDCHGAHNHSFKRVTTTLQVFSWTVPQAEPAMDCIHTADSPRQRLPXQAHESVAEVIIT

SEQ ID NO: 35211 - protein, 216 aa, Homo sapiens
MSSWNPLPESFKKHGYLLYLFVITAKDQQVSITASTWGFYWNHSQGKNPEQMEASQKPVAGLWAWWLNISLSAASHGAQNHPFKRVTTTLQSQGWNKDLWIMRELLCNNRPEQLLQETATIKAPIAPADPWSQEVIYNFCKAVSSVSCMPFNIHFNSNIPPESSGDWRMQQPCKVEQSILGAQRGGGGCRPGSLRELFPCLLAEPNMEEEVAALRA

SEQ ID NO: 35212 - protein, 198 aa, Homo sapiens
  DOMAIN (55)..(92): Type I fibronectin domain proteins domain identified by eMATRIX, accession number BL01253E, p-value=3.415e-13, raw score of 16.01
  DOMAIN (5)..(149): Trypsin domain identified by PFam, accession name trypsin, E- value=1.8e-22, PFam score of 73.5
GTLEPAAEWSVLLGVHSQDGPLDGAHTRAVAAIVVPANYSQVELGADLALLRLASPASLGPAVWPVCLPRASHRFVHGTACWATGWGDVQEADPLPLPWVLQEVELRLLGEATCQCLYSQPGPFNLTLQILPGMLCAGYPEGRRDTCQPSPEPGPMCISVSHIQRLRDAVSHTWQRGTEPARLGSWERRQRQQQQGPV

SEQ ID NO: 35213 - protein, 56 aa, Homo sapiens
  misc_feature (1)...(56): Xaa = X or * as defined in Table 2
XSFHCESYRKLGIRDGPGGFRGDRVVQSSAAKPRDLGRSSQRALGQDPGAPGVAAS

SEQ ID NO: 35214 - protein, 197 aa, Homo sapiens
DPGYILSRGLRCALRVPEPCVYEHAGTFKHPLLSRRAGSFVFWAFVARWNAGYKFTSTPFTLKDILLGDREISAGISSYQLLSYEDESDVPLYGRRGNHIVNDVGINVAGSHSIAEKASFGIATIHEVVVSTLLKEITTRKINFDHSLIRQSRSSRKAVLCVVMESIRTTRQCSLSVHAGIRGEAMRFHFMDEQNPK

SEQ ID NO: 35215 - protein, 55 aa, Homo sapiens
  misc_feature (1)...(55): Xaa = X or * as defined in Table 2
TGLSSSQNPKATKSIPWHNRLLPNVDSQVQQNSQAIIYTNXGNSESQYPFSKMDT

SEQ ID NO: 35216 - protein, 77 aa, Homo sapiens
LLWTNLLSMTDISLKEGTHIRVNLLNHNIPKGPCILCGMGNFKRETVYGCFQCSVDGQKYVRLHAVPCFDIWHKRMK

SEQ ID NO: 35217 - protein, 176 aa, Homo sapiens
KKDAENHEAQLKNGSLDSPGKQDTEEDEEEDEKDKGKLKPNLGNGADLPNYRWTQTLSELDLAVPFCVNFRLKGKDMVVDIQRRHLRVGLKGQPAIIDGELYNEVKVEESSWLIEDGKVVTVHLEKINKMEWWSRLVSSDPEINTKKINPENSKLSNLDSETRSMVEKMMYDQRLY

SEQ ID NO: 35218 - protein, 471 aa, Homo sapiens
  misc_feature (1)...(471): Xaa = X or * as defined in Table 2
XYKLTSTPFTLKDILLGDREISAGISSYQLLNYEDESDVSLYGRRGKQKTEEDEEEEDEKDKGKLKPNLGNRADLPDYRWTKTLSELDLAVPFCVDFQLKGKDVVVGLKGQPAIIDGELYNEVKAEESSWLIEDGKVVTVHLEKIKKMEWWSRLVSSDPEINTKKINPENSKLSDLDSETHIMVEKTIYDQKINFDHSLIRQSRSSRKAVLCVVMESIRTTRQCSLSVHAGIRGEAMRFHFMDEQNPKGRDKAIVFPAHTTIAFSVFELFIYLDGAFDRRVMDVISRSQLYLDDLFSDYYDKPLSMTDISLKEGTHIRVNLLNHNIPKGPCILCGMGNFKRETVYGCFQCSVDGQKYYQIKSTLNSTWGFVYTVNKVTDSSNGLPFYDVDMLTSFVFIKRNTVIVKLRQIPFLGIREANNPRSENTGLATILEVACRHFGSRPPPSWELWEQGPPVTLWRPRRDLQGELKL

SEQ ID NO: 35219 - protein, 59 aa, Homo sapiens
LCRNNGQAFSRIGSGNGCLIGSGAQWTPCRIQTDGSQQRVCDSDKQQWWTASKSSARTM

SEQ ID NO: 35220 - protein, 125 aa, Homo sapiens
WCDFSSSLHRSVQALRTFCVTLSGAFVRDCTTVLSSTTCEPSTDVCWAMNIVTSVLLLYGSEEEAFWLLVALCERMLPDYYNTRVVVIRTYDQRYEQCVDLYDGLPTTLFTTDDWHVWPDLTGLP

SEQ ID NO: 35221 - protein, 84 aa, Homo sapiens
TEARKAAAVMPKTAVLAAERPKKAWGVLIPKKSTKRTPKAFAGGGCWTKVGWSKVAKKVPKPEASKPKKAAPKTRRYKSTLKTK

SEQ ID NO: 35222 - protein, 48 aa, Homo sapiens
PSVSKESPLNSPASQAGSATFATTPLTPPKPAATSSVAAAALLPALPR

SEQ ID NO: 35223 - protein, 329 aa, Homo sapiens
  DOMAIN (234)..(284): Protein prenyltransferases alpha subunit repeat proteins proteins domain identified by eMATRIX, accession number BL00904A, p -value=3.745e-09, raw score of 8.30
SRGWSRLPVPCCAPALLSPWAVNGIRRRGAGDGTRRGGSGCAGAHSAGLVASGPESWIPGPVPPGAEPPRRGDSGLARCPAPGHPSRASPQRPAEGFDALAAPSRVPGDSRQLSRNNTRSRCEGRGGKTPPAWAGVHRHGPPPAAPPGRARVHGHRLRGGLGPGGGKRGLPGCCPRAADPRGRPGETSRSGERGPPGRSAPLSLQPRHRTGLETRQPSPLARSRPGLGPRPSARRPSRPAPPPPPPELHRGAPQRGRVASQTRPGARARPAADTHSSLKSPASQAGSAAFATAPLTPQKPQLRAPWQPLHSFRPCRGVTSRLRTAPPPD

SEQ ID NO: 35224 - protein, 69 aa, Homo sapiens
MEEGNNNEEVIHLNNFHCHRGQEWINLRDGPITISDSSDEERIPMLVTPAPQQHEEEDLDDDVILTETL

SEQ ID NO: 35225 - protein, 116 aa, Homo sapiens
  DOMAIN (9)..(33): DEAD-box subfamily ATP-dependent helicases proteins domain identified by eMATRIX, accession number BL00039C, p-value=6.250e- 25, raw score of 15.63
  DOMAIN (7)..(82): DEAD/DEAH box helicase domain identified by PFam, accession name DEAD, E-value=1.4e-17, PFam score of 58.4
RRYLSPKYIKMFVLDEADEMLSRGFKDQIYDIFQKLNSNTQVVLLSATMPSDVLEVTKKFMRDPIRILVKKEELTLEGIRQFYINVEREEWKLDTLCDLSAMHGDMDQKERDVIMR

SEQ ID NO: 35226 - protein, 136 aa, Homo sapiens
  misc_feature (1)...(136): Xaa = X or * as defined in Table 2
NLQEWKLDTLCDLYETLTITQAVIFINTRRKVDWLTEKMHARDFTVSAMVCLPAASLLWVCPSEVSYLKPGFLEPRCLPGLLHICFLFQHGDMDQKERDVIMREFRSGSSRVLITTDLLVSRGNXXQRQKGGSKVI

SEQ ID NO: 35227 - protein, 77 aa, Homo sapiens
MLSYVLEVTKKFMRDPIWILVKKEELILESIHQFCINVEQEKWKLDTLRDLYETLTITQAVIFTNTRRKCCSKVREI

SEQ ID NO: 35228 - protein, 103 aa, Homo sapiens
  DOMAIN (37)..(100): Helicases conserved C-terminal domain identified by PFam, accession name helicase_C, E-value=0.027, PFam score of 6.6
  misc_feature (1)...(103): Xaa = X or * as defined in Table 2
NSNVEREEWKLDTLCDLYETLTITQAVIFINTRRKVDWLTEKMHARDFTVSAMHGDMDQKERDVIMREFRSGSSRVLITTDLLVSRGNXXQRGTRGVEAGHTM

SEQ ID NO: 35229 - protein, 292 aa, Homo sapiens
  DOMAIN (236)..(282): DEAD-box subfamily ATP-dependent helicases proteins domain identified by eMATRIX, accession number BL00039D, p-value=1.000e- 40, raw score of 21.67
  DOMAIN (15)..(160): DEAD/DEAH box helicase domain identified by PFam, accession name DEAD, E-value=3.2e-33, PFam score of 108.0
AQFPTRLDLKATQALVLAPTRELAQHIQKVVMALGDYMGASCHACIGGTNVRAEVQKLQMEAPHIIVGTPGRVFDMLNRRYLSPKYIKMFVLDEADEMLSRGFKDQIYDIFQKLNSNTQVVLLSATMPSDVLEVTKKFMRDPIRILVKKEELTLEGIRQFYINVEREEWKLDTLCDLYETLTITQAVIFINTRRKVDWLTEKMHARDFTVSAMHGDMDQKERDVIMREFRSGSSRVLITTDLLARGIDVQQVSLVINYDLPTNRENYIHRIGRGGRFGRKGVAINMVTEEDK

SEQ ID NO: 35230 - protein, 587 aa, Homo sapiens
  DOMAIN (391)..(587): Metalloenzyme of unknown function UPF0006 domain identified by PFam, accession name UPF0006, E-value=2.7e-15, PFam score of 64.3
MASLEEGIYSLKINSKRSSYNSMNPQFTAGSEGQNETEEPNKFQSRKGRPQDSGSSLSLSVLQEILGDDIPKVKEEAVISSQSDLGECPYCGERPARNATIFAPQKEKESAPEMSSSCDKRVTVNPPEKFSEGRPKTQNTLICEKCSQPSNFLDDYNPHVIIQKRLSNQSRVICEKSSPPLNVPDNYNSHSVIQKHKEKMAIERPSSGSDWSDVGGTTVIFSEEKPFSLCLPVVSEPPYYATDYTTFPPHYSPWHDYTSSWFSSTKSSCYPSLGSSSNTLQAGKSSCSSSSRSNNNIFQGERSSHQSFLSDYSTSFPVSSENTSRDLKMTEEGRSKNSSLFYYSRNVEAEAKEERVYQEETLGHPYGGRASSFPPRTIWQPEQPGFIDTHCHLDLLYSRLPFKGTFTKFRKIYSNTFPKEFQGCISCFCNPQNLSDNLWEDQLKDDLVWGVFGCRPHFAHYYNNYQERSILKALRHPKAVAFGEMGLDYSSKCTTHIPEQQKVFKRLLRLAVSLKKPMMIHCREADEDLLGILKKYVPSDHKMYQHCFTGSYPVIKPLLSCFPNLYVGFMAILTYSSAEQARETVKK

SEQ ID NO: 35231 - protein, 232 aa, Homo sapiens
  DOMAIN (137)..(170): PROLINE-RICH PROTEIN 3 domain identified by eMATRIX, accession number DM00215, p-value=8.627e-09, raw score of 19.43
VLAPNYHITFRNLSSVSSPVTSAEPVLQAGQARELSFSSLHPASPLLVPSTPALTLHAFNALVLFPSFPLEKAAKRERPKSKIQITARVGKMRRTWSPHTTISAGGSVNGASTLKNSLVWEAKPADTTNPTPPTTHPNPGPTPPTNTNRHPPPHHPLTNTPAPPHQPPATTPSPQTQTPNYCPNTDHTTPTHDTPNPVPPTRRTPPNRTGKRTNTSQNYRLVSPAPKIHWEA

SEQ ID NO: 35232 - protein, 116 aa, Homo sapiens
QLEGTEDHEPKHLCKRNQGISPGSWGLSWAHRSGRMLNPWEILPTVKGKAPPPCAKHTFSLGNFSNTPPMIMEQMAMVVSAGIPTSQGSQYLAIRPSICMSPGCTNKEHFSLSAGA

SEQ ID NO: 35233 - protein, 141 aa, Homo sapiens
  DOMAIN (60)..(101): 2'-5'-oligoadenylate synthetases proteins domain identified by eMATRIX, accession number BL00832B, p-value=9.833e-10, raw score of 15.45
GKTSTKSQNASSPPKDHNSSPAREQNWIENEFNELTEVGFRRITSLEKNINDLMELKNTARELREAYTSINSQINQVEERISEIEDQLNEIKHEDKIREKRMKRNQQSLQEIWDYVKRPNLRLIGVPESDIENGTKLENTL

SEQ ID NO: 35234 - protein, 755 aa, Homo sapiens
  DOMAIN (597)..(642): kw TRANSCRIPTASE REVERSE II ORF2 domain identified by eMATRIX, accession number DM01354N, p-value=1.000e-40, raw score of 13.17
MTGQFQDVVREEARPLPNRIMRLRFNHFATECSWDHLYVYDGDSIYAPLVAAFRCEVENRYQGNPLRGTCYYTLLIDYQFTFSLSQEDDRYYTAINFVATPDEETPPIRGRQTAHTGELQLTSGGYPSGMKLPEEGTGERNRITINKKDVHTETPSKGHQHQRPKVDKSTKIKKNQRKKAENSKNKNASSSPEDHNSSPAREQNWMENEFDELTEVGFRRWVITNSSKLKKHVLTQCKEAKNLEKRLGQLLTRITSLEKNVKELMELKNKAQELCEAYTSINSQIDQAEESISEIEDQLNEIKHEDKIREKRIKRNKQSLQEIWDYVKRPNLRLIGVPESDGENGTKLENTLQDIVQDNFPSLARQANIQIQEILKTPQRYFSRRATPRNIIITFTKVEIKGKMLRAVREKDHSAIKLELRIKKLTQNCTTMWKLNNLLLNEYWVHNEIKAEINKFFETNEKKDTTYQDLWDTAKAVFKGKFIALNAHRRKWERSRIDTLTSQLKELEKQEQTNSKASKRQEITKIRAELKEIETQKTLQKINESRSWFFEKINKIDRLLARPIKKKREKNQIDTIKNDKGDITTEPTEMQTTIREYYKHLYANKLENLEEMDKFLDTYTLPRLNQEEVESLNRPTTSSEIEAIINSLPTKKSPGPDGFTAKLYQRYKEEVVPLLLKLFQTVGKEGPLPNSFYWANIILIPKPGRHTTKKENFWPISLMNIDAKILNKIRANQIQQHIKKLIRHDQMGFNPGMQG

SEQ ID NO: 35235 - protein, 51 aa, Homo sapiens
MFFSKLVIPVSSSYNLLSRFLASSHWVRTCSFSLEEFVITHLLKPSTRPRI

SEQ ID NO: 35236 - protein, 102 aa, Homo sapiens
FNQEKTFDQEKTSRLISGDTFRISPKQVKVRSSVVIEDKSTRDPEYIYSQPYGENQLPVWIPTRHLKFYNEPIGDAKKRASTEMSAGVPNSSEETATIENGP

SEQ ID NO: 35237 - protein, 512 aa, Homo sapiens
  DOMAIN (235)..(246): RNase H domain identified by eMATRIX, accession number PF00075F, p-value=9.471e-10, raw score of 12.87
  DOMAIN (185)..(315): RNase H domain identified by PFam, accession name rnaseH, E- value=8.6e-44, PFam score of 158.9
MPIQMQYPQYKLVENKTQPPVIYQYWPPADLQYRPPPEVKYRPQVVCPVPNSTAPYQQPTAVVFNPTAPPSGQGIIAQNTDLVEWFFLPHSTIKTFTLYLDQMATLIGQARLRIIKLCESDSDKIIVPLNKEQVRQAFINSGAWQIGLADFVGIIDNHYPKTKIFQFLKLTTWILPKITRHKPLENALTVFTDGSSNGKAAYTRPKERLIETQYHWAQRAELVAVITVLQDFNQSINIVSDSAYVVQATKDVETALIKYSIDDQLNQLFNMLQQTVRKRNFPFYVTHIRAHTNLPEPLTKANEQVDLLVSSAFLEAQELHALTHVNATGLKNKFDITWKQAKNIVQHYTQCQIPHLPTQEAGVNPREQHFTGKKNSPHEGKLIWWKDKKNKTWEIGKVITWERGFACVSQGENQLPGWIPTRNLKFYNEPLGDAKKSASAETKNPQLSIIDSPGKAPGCLMPTTQNWLVEVPTVSATSKFTYHMVYPPAPKRQRPARTGHNDDGSFVKKGDM

SEQ ID NO: 35238 - protein, 252 aa, Homo sapiens
  misc_feature (1)...(252): Xaa = X or * as defined in Table 2
FRMVIRCLPQRELDCDRGNWTATSAELTGIKWRRYNFGGHGDCGPIISVPAQDDPILLSFIRCLQANLLCVWRRDVXPDCXELWIFWWGDEPNLVGVYIMNCRLWKKDSGKMAFPMNVGRCFFKAIHNLLERCLMDKNFVRIGKWFVRPYEKDEKPVNKSEHLSCAFTFFLHGESNVCTSVEIAQHQPIYLINEEHIHMAQSSPAPFQVLVSPYGLNGTLTGQAYKMSDPATRKLIEEWQYFYPMVLKKKKK

SEQ ID NO: 35239 - protein, 179 aa, Homo sapiens
MRHPCDGNSLYFDHISVNMLAVMLYYGFGRVSIGKTGLRGVQRHLWPLPLDASSTKTVSSSHSDKGEIFSPFPCSLINCNNFEMRNTTKCLMDKNFVRIGKWFVRPYEKDEKPVNKRVTSQEIWLFDEYGVSLPCFAVERCALLPLCLLPRLMISISSTSRQPQYISRRGLKAKISWVV

SEQ ID NO: 35240 - protein, 140 aa, Homo sapiens
VADLQQGNDQTFQGLLDTGSELTLIPGDPKHHCGPPGPKVRAYGDQVINGVLAQVQLIVGPVGPWTHPVVISPVPECVIGIAILNSWQNPHIGSLTGRVRAIMVGISWQGQQYTFTVLPQRYINFPALCHKTAKRHTARR

SEQ ID NO: 35241 - protein, 401 aa, Homo sapiens
  DOMAIN (296)..(401): dUTPase domain identified by PFam, accession name dUTPase, E- value=0.00023, PFam score of 12.8
RNRILRMEFFDWFWAFWSWLLNMIRSQNAKDSSSNSMENTDSPWCELFRELCKINALDVPDSLLVRGNEFSASVHNTFDHMWRTKERYEAGWLLLSSADRVMKENDELRDSVSWLQKQILSLKSAKIALSGSLISYRERAEIVEKQTQTLIMRVADLQQKGYINSPALCHNLIWRDLDHFSFPYDITLFHYIDDIMLIGSSEQEVANTLDILKGQRFVLTVIDTYSRYWFASPECNASAKTTIHGFTECIIHYHGIPHSIASYQGTHFMAEEPGWSKNQGVEVTPFTITPSDPVATFLLPVPMTLRSAGLEVLVPEGGTLPPGDTTMIPLNWMLRLPPGHFGLLLPLSQQAKKGVTVLAVVIDPDYQDEISLLFHNGAIISDGNGVILIGLLQWFSTLDAI

SEQ ID NO: 35242 - protein, 736 aa, Homo sapiens
  DOMAIN (542)..(589): kw TRANSCRIPTASE REVERSE II ORF2 domain identified by eMATRIX, accession number DM01354V, p-value=1.000e-40, raw score of 12.97
KQDIKSTNCSKTRLTAKCLQTSPQRLHELCIVPITHITPRATFPTSRGDKHAYGFHFNGSSWFTCSAWPNYPSPASEHRPLRPGAPEPPARSDAPSARRASAGPGVPAAAAQRSDNDGAGTRLAVPGPAGTPTTNRGVTMKEPRNHREAQLPEQQVCGHSSFPWKERGPGRPAEACPVQYYERCDKADKVGCPGTWFLWTSAGSEQVSLHLPGSDSFSQGSCKPKFKKDKLGRQAPDSQVYLMLKLMILSAERIWFSRLEFQPFQQGIPHSMLIVIIILVNVFLAKEITRKQILKLDTGLVKVLCTLAESLSGSENALPIAFSVSMCSHCSVPTYKCKDCSSSPAMEQSWMENDFDKLIEVRFRRINSAEKTLNDLMELKTMAQELRDTCTSFNSRFNQVEERISVIEDQINEIKQEDKKYKLPSEYYKHLYANKLENLEEMEKFLDTYTLPILNQEEVEPLNRPMTGSEIEAIIYSLPTKNVQGQMDSQSNTTRVWGILARAIRQEKEIKDIQLENEEVKLSLFADDMTVYLENSIVSAQNLLKLRIKYLGIQLTTDVKDLFKENYKPLLNKIKEDTNKWKNIPCSWIRGINIMKMAILPKLIYRFNAIPIKLPMTFFTELEKATLKFIWNQKRAHIAKTILSKKNKAGGIMLPDFKLYYKATATKAAWYWYQNRDIDKKLTQIYKKKTNNPIKKWAKDMNRHLSKEDIYGANRHMKKCSSSLVIREKQIKTTMR

SEQ ID NO: 35243 - protein, 679 aa, Homo sapiens
  DOMAIN (37)..(83): kw TRANSCRIPTASE REVERSE II ORF2 domain identified by eMATRIX, accession number DM01354O, p-value=1.000e-40, raw score of 8.73
  DOMAIN (70)..(344): Reverse transcriptase domain identified by PFam, accession name rvt, E-value=1.9e-83, PFam score of 290.7
  misc_feature (1)...(679): Xaa = X or * as defined in Table 2
MDTFLDTYTLPRLNQEEVESLNRPITGAEIVAIINSLPTKKSPGPDGFTAEFYQRYKEELVPFLLQLFQSIEKEGILPNSFYEASIILIPKPGRETTKKENFRPISLMNIDAKIVNKILAKRIQQHIKKLIHHDQVGFIPGMQGWLNTCKSINVIQHINRAKDKNHMIISIDAEKAFDKIQQPFMLKTLKKLGTDGTYFKIVRAIYDKPTANIILNGQKLEAFPLKTGTRQGCPLSPFLFNIVLEVLARAIRQKEIKGIQLGKEEVILSLFADDMIVYLENPIVSAQNLLKLISNFSKVSGYKTNVQKSQAFLYTNNIQTGSQIMSDLPFTIASKRIKYLGIQLTRDMKDLFKNYKPLLTEMKTKKWKNIPCSWELEKTTLKFIWNRKRARIAKSILSQKNKAGGITLPDFKLYYKATVTKTAWYWDQNRDIDQWNRTEPSEITPHIYNYLIFDKPEKNKQWGKESLFNKWCWENWLAICRKLKLDPFLTPYTKINSRWIKDLNLRPKTIKTLEENLGITIQDIGMGKDFMSKTPKAMATQAKIDKWELIKLKSFCTAKETIIRVNRQPTKWEKIFTTYSSDKGLISRIYNELKQIYKKKKQPHQKDFAYHFTVFVFYFGAFLLEAAATSLHDLHCNTTITGHATPEXXPVXHKRSSLTITYLCRSGXIIWWCDPHTHS

SEQ ID NO: 35244 - protein, 453 aa, Homo sapiens
  DOMAIN (109)..(164): kw TRANSCRIPTASE REVERSE II ORF2 domain identified by eMATRIX, accession number DM01354Q, p-value=1.000e-40, raw score of 9.23
  DOMAIN (64)..(337): Reverse transcriptase domain identified by PFam, accession name rvt, E-value=2.7e-76, PFam score of 266.9
MDKFLDTYTLPRLNQEEVESLNRPIIGSEIEAIINSLPTKKSPGPDGFTAEFYQRYKEELVPFLLKLFQSTEKEEASIILIPKPGRDTTKKENFRPISLMNINAKILNNILAHRIQQHIKKLIHHDQVGFIPGMQGWFNMHKSINVIQHINRTKDKKHMIISIDAEKAFDKIQQPFMLKTLNTLGIDGTYLKIIRAMYDKPTANIILNGQKLEAFPLKMGTRQGCPLSPLLFNIVLEVLARAIRQEKEIKGIQLGKEEVKLSLFADDMIVYLENPIISAQNLLKLISNFSKVSGYKISVQKSQVFLDTNNRQTESQIMSELSFTIASKRRKYLGIQLTRDVKDLFKENYKPLLSEIKEDTKKWKNIPCSWVGGIDIMKMAILPKVIYRFNAIPIKLPMTFFTELEKTTLKFMWNQKRACIAKSILSQKNKAGGITLPDFKLYYKATVTRTAWY

SEQ ID NO: 35245 - protein, 315 aa, Homo sapiens
  DOMAIN (150)..(197): kw TRANSCRIPTASE REVERSE II ORF2 domain identified by eMATRIX, accession number DM01354V, p-value=1.000e-40, raw score of 12.97
  DOMAIN (1)..(163): Reverse transcriptase domain identified by PFam, accession name rvt, E-value=0.00098, PFam score of -16.6
MDKFLDTYTLPRLNQEEAESLNRSITGSEIEAITNGLPTKKKPRTRRIHSRILPEVQRGAVLEVLARAIRQEKEIKAIQLGKEEVKLSLFADDMIVYLENPIISAQNLLKLIRNFSKVSGYKINVQKSQAFLYTNHRQTESQIMSELPFTIASKRIKYLGIQLTRDVKDLFKENYKPLLNKIKEDTNKWRNIPCSWIGRINIVKIAILPKAIYRFNAVPIKLTMTFFTELEKTTLKFIRNQKRAHIAKTILSKKNKAEGIMLPDFIPYYKATVTKTAWYWYQNRDIDQWNRTEPSEIIPHIYNHLIFDKPEKNKK

SEQ ID NO: 35246 - protein, 327 aa, Homo sapiens
  DOMAIN (149)..(194): kw TRANSCRIPTASE REVERSE II ORF2 domain identified by eMATRIX, accession number DM01354N, p-value=1.000e-40, raw score of 13.17
MKAEIKMFFETNENKDTTYQNLWDTCKAVCRGKFIVLNAYKRRQERSKIDTLTSQLKELQKQEQTLSKANRRQEITKIRAELKEIETEKSLQKINESRSWFFKKINKIDRLLARLIKKKREKNQIDAVKNDKGDITTDPTEIQTTIREYYKHLYANKLENLEEMDKFLDTYTLPRLNQEEVESLNRPITGSEIEAIINSLPTKKSPGPDGFTAKFYQRYKEELNWKNYLKFRWNQKRAHIAKSILSQKNKAGGITLPDFKLYYKATVTKTACFLKYEHGGKSLSSHTRTGCKLCTEDGGAESWESGSLMTGYSHHYSPYSPPLDLEK

SEQ ID NO: 35247 - protein, 1249 aa, Homo sapiens
  DOMAIN (118)..(161): kw TRANSCRIPTASE REVERSE II ORF2 domain identified by eMATRIX, accession number DM01354T, p-value=1.000e-40, raw score of 9.48
  DOMAIN (705)..(1213): STAT protein domain identified by PFam, accession name STAT, E-value=2e-292, PFam score of 940.4
MDKFLDTYTLPRLNQEEVESLNRPITGSEIEAIINSLSTKKSPGPDGFIAQFYQRTKDKNHMIISIDAEKAFDKIQQHFMLKTLNKLGIDGTYLKIIRAVYDKPTASIILNGQKLEAFPLKTGTRQGCPLSPLLFNIVLEVLARAIRQEKEIKGIQLGKEEVKLSLFADDMIVYLENPIVSAQNFLKLISKFSKVSGYKINVQKSQAFLHANNRQTESQIISELPFTIATKRIKYLGIQLTRDVKDLFKENYKPLLNEIKEDTNKWKNIPCSWRGKINIVKMAILPRVIYRFNAIPIKLPITFFRELEKTTLKFMWNQKRAHIAKTILSQKNKPGGIMLPDFKLYYKATVTKTAWYLYQNKYIDQWNRTEPSEIILHIYNHLIFGKPDKNKKWGKDSLFNKWCWENWLAICRKLKLDPFLIPYTKINSRWIKDLNVRPKTIKILQENLGNTIQDIGMGKDFMTKIPKAMATKAKIDKWDLIKLKSFCTAKETTIRVNRQPTEWEKIFTIYPSDKGAEEPQPAATTTPGHREYCQTTIDVPLRPNISSISLCASFSNMKLKPGISLASELGDGSCPLRSVPLPSVWLPTLTATGLPANKAINDLPFPKRNRIHHSVFDVKSLQLSKPQCPRESSGDHLKALNRDKCEGTTGSPPASPSMSTEGSTGPGGPPGRATWLCRGQTQERLAEQWELAYCLYQATSKSQIMSLWGLVSKMPPEKVQRLYVDFPQHLRHLLGDWLESQPWEFLVGSDAFCCNLASALLSDTVQHLQASVGEQGEGSTILQHISTLESIYQRDPLKLVATFRQILQGEKKAVMEQFRHLPMPFHWKQEELKFKTGLRRLQHRVGEIHLLREALQKGAEAGQVSLHSLIETPANGTGPSEALAMLLQETTGELEAAKALVLKRIQIWKRQQQLAGNGAPFEESLAPLQERCESLVDIYSQLQQEVGAAGGELEPKTRASLTGRLDEVLRTLVTSCFLVEKQPPQVLKTQTKFQAGVRFLLGLRFLGAPAKPPLVRADMVTEKQARELSVPQGPGAGAESTGEIINNTVPLENSIPGNCCSALFKNLLLKKIKRCERKGTESVTEEKCAVLFSASFTLGPGKLPIQLQALSLPLVVIVHGNQDNNAKATILWDNAFSEMDRVPFVVAERVPWEKMCETLNLKFMAEVGTNRGLLPEHFLFLAQKIFNDNSLSMEAFQHRSVSWSQFNKVILLPFGPPTPKLFIPGALRACSASMQGPSTGFSTVPPQVL

SEQ ID NO: 35248 - protein, 625 aa, Homo sapiens
  DOMAIN (272)..(317): kw TRANSCRIPTASE REVERSE II ORF2 domain identified by eMATRIX, accession number DM01354N, p-value=1.000e-40, raw score of 13.17
MGDFNTPLSTLDRSMRQKVNKDIQEFNSALHQADLIDIYRTLHSKSTECTFFSAPHRTYSKIDHIVVSKALLSKSKRKEIITNCLSDYSAIKLELRIKKLTQNHSTTWKLKNLLLNDCWVNNEMKAEIKMFFETNENKDTIHQNLWDTFKAVCRGKFIALNAHKRKQERSKIDTLTSQLKELGKQEQTHSKASRRQKITKIRAELKETETQKTLQKINESRSWFFEKINKIDRPLARLIKKKREKNQIDSIKNDKEDITTHPTEIQTTIREYYKHLYTNKLENLEEMDKFLDTYTLPRLNQEEVESLNRPITGSEIEAIINCLPTKKSPGPDGLTPEFYQRYKEELGCEGPLQGELQTTAEQNERGHKQMEEHATLMDRKNQYCENGYTAQGKNLLNYPISSPAGSPGNGSQKPTAGNLERSHCLCSRIKDATCLFITHDLGRFYTKSYFLNQLQIKKISKSTSCVRNWFLPWVLGLADFKNEAADPRGMKPQTFAVSVTALKRGTLLARFAPPGGLLVSLTAGVKLQTFACQIPQAVGSVPKTAPLPSDTNRKSGPTELPTNQLQVEVPMNPSVGSINLLEWLTELWGTLTLTGVLKGFNEEVYRKLAVGAESPNPLILPWSFQ

SEQ ID NO: 35249 - protein, 746 aa, Homo sapiens; identical to SEQ ID NO: 33424
  DOMAIN (678)..(733): kw TRANSCRIPTASE REVERSE II ORF2 domain identified by eMATRIX, accession number DM01354Q, p-value=1.000e-40, raw score of 9.23
  DOMAIN (4)..(360): AP endonuclease family 1 domain identified by PFam, accession name AP_endonucleas1, E-value=1e-32, PFam score of 122.1

SEQ ID NO: 35250 - protein, 1308 aa, Homo sapiens
  DOMAIN (125)..(170): kw TRANSCRIPTASE REVERSE II ORF2 domain identified by eMATRIX, accession number DM01354N, p-value=1.000e-40, raw score of 13.17
  DOMAIN (211)..(484): Reverse transcriptase domain identified by PFam, accession name rvt, E-value=4.7e-74, PFam score of 259.4
MELETIILSEVTQEWKTKYRMFSLISGSEAMRTQRHKDDKMDLVTQGEDDYTLGTVYTVRLSSCTIKSVVENGWIHFFEKINKIDRPLARLIKKKREKNQIDAIKNDKGDITTDPTEIQTTIREYYKHLYANKLENLEEMDKFLDTYILPRLNQEEVESLNRPITGSEIEAIINSLPTKKSPGPDGFTAKFYQRYKEELVPFLLKLFQPIEKEGILPNSFYEASIILIPKPGRDTAKKENFRPISLMNIDAKILNKILAHRIQQHIKKLIHHDQVGFIPGMQGWFNIHKSINVTQHINRTKDKNHIIISIDAEKALDKIQQRFMLKTLNKLGIDGTYLKIITATYDKSTTNIILNGQKLEAFPLKMGTRQGCPLSPLLFNIVLEVLARAVRQEKEIKGIQLGKEEVKLSLFADGMIVYLENPIISAQNLLKLISNFSKVSGYKINVQKLQAFLYTNNRQTESQIMSELPFTIASKRIKYLGIQLTRDVKDLFKENYKPLLKEIKEDTNKWKNIPCLWVGRINIVKMAILPKVIDRFNAIPIKLPMTFFAELEKTTLKFIWNQKRAHITKSILSQKNKAGGIALPDFKLYYKATVTKTAWYWYQNRDIDQWNRTEPSEIMPHIYNYLIFDKPDKNKQWGKDSLFNKWCWENWLAICRKLKLDPFLTPYTKINSRWTKDLNIRPKTIKTLEENLGNTIQDIGMGKDFMFKTPKAMATKAKIDKWDLIKLKSFCTAKETTIRVHNTDLDLTLTMYSKTCVSNEIMYVKVPKGHWQDSEDSAGVTPVLQSPRSPVPLRPSICLLDARLLSGAEEAVVNKTKDQASILEEKNKRSSLSPDLMAMASLLQSDRVLYLVQGEKKVRAPLSQLYFCRYCSELRSLECVSHEVDSHYCPSCLENMPSAEAKLKKNRALAFAKFAGLMKLACDNDDLEVISADLIPESEETAWKRGDPQKPSDMSTATRRVCGNVEGEPETPWSLPSLAGSFLPERSPQGTLEEELSWSCRGPGTGRSGGGPQQPRIPEPAARPGRSCALPPPGARRSRGTFQELPRAEVPGLGVASSCQIPCSPGDPEKHRAIPDPGTFRRLAAIWAGTSCSQLSWDCESCCGGYKSCFMNSPTSDLSEPQNCGSMTLKIWGVPENSQRTTESRKIHILGNITAPLTPGPSSPPQSPAPEHMESELEFELIGPSKSTSGNPRGLRSERPVLFCLQHLLRVETFWKGSYKVDNAGKPSSPVPWEPSALFTFCKILEESCIFGRLSISDLELVIAVCSLATVAGGNKTAAAWSAQSSGSAGLRPHLQEATCLYLPCLPL

SEQ ID NO: 35251 - protein, 356 aa, Homo sapiens
  DOMAIN (19)..(64): kw TRANSCRIPTASE REVERSE II ORF2 domain identified by eMATRIX, accession number DM01354N, p-value=1.000e-40, raw score of 13.17
MADLMTDWKEEIQTNIREYYKHLYTNKLENLEEMDKFLDTYTLPRLNQEEVESVTRPITSSEIEGVINSPPTKKSSGPDGFTAEFYQRSWFFEKINKIDRPLARLIKKKREKNQIDAIKNDKGDITTDPTEIQTTIREYYKHLYANKLENLEEMDKFLETYTLPRLNQEEVESLNRPITGSEIEAIINSLPTKKCPGPDGFTAKFYQRYKEELVPFLLKLFQSTEKEGILPNSFYEASIILIPTPGRDTTKKENFRPISLMNIDAKILNKILANRIQQHIEKLIHHDQVGFIPGMQDVVCYHLRSNPEDSKDTDSSGKSMVDEAVLSREKSKRRALMGPCQLATVALNTFGAVAYF

SEQ ID NO: 35252 - protein, 109 aa, Homo sapiens
  misc_feature (1)...(109): Xaa = X or * as defined in Table 2
XKASLAADIPRLGYSSSSHHKYIPRRAVLYVPGNDEKKIKKIPSLNVDCAVLDCEDGVAANKKIRVNPTPAHVGRRGGSRGCPGDDRPGDDRPQDDREMPALCLSIAWV

SEQ ID NO: 35253 - protein, 1221 aa, Homo sapiens
  DOMAIN (493)..(534): kw TRANSCRIPTASE REVERSE II ORF2 domain identified by eMATRIX, accession number DM01354I, p-value=1.000e-40, raw score of 15.55
  DOMAIN (2)..(479): Glycosyl hydrolases family 2 domain identified by PFam, accession name Glyco_hydro_2, E-value=5e-07, PFam score of -211.3
MATECWNVAGLNCNVLERHEGWGLKPYPIRGRGLETGQSGVQLERPGRFRIRRFMAERPGSPGSREMVSAGSVIVRGAGDGWNRLKVACSRTQTSSQSALESEDPNPPCPSSAFSPLEPAGELPDLLKCSNQIQLEVHLLEAENKAMATGAFTQGQLKVRLTAQTSLGPLSDFYTLPVGIRTVAVTESQFFINGKPFYFHSINKHEDADLRLCSWVLVGAASGHLPLLPSILGKGFNWLLLVKDFNLLHWLGANAFCTSHYPYAGEVLQMCDRYGIVVIDECPAVGLVLAAFQQCVCASTHVGDGGTGVQGQEPPRRGDVVCGQQACILPGTCRLLLQDHSLLPATEQSWMENDFDELTEVGFRRSVITNFSELKEDVRTHCKEAKNLEKRLDEWLTRINSVEKTLNNRMELKTMALELCDACTSFSSRFNQVKERYHITLIPKIHHIVGSKALLSKCKRTEITTNCLSDHIAIKLELRIKKLTQNRSTTWKLNNLLLNDYWVHNEMKAEIKMFFETNENKDTTYQNLWDTFKAVCRGKFILLNAHKRKQEISKINTLISQLKELEKQEKTNSKASRRQETAKIKAELKEIETQKTLQKINESRSWLFEQITKIDRPLARLIKNKREKNQIDTIKNDKGDTTTDPTEIQTTIREYYKHLYTNKLENLEEMDKFLDTYTLPRLKQEEVESLNRPITGSEIEAIINSLPTKKSPGPDGFTAEFYQRYKEELIPLLLKLFQSIEKEGILPNSFYEANIILIPKPGRDTTKKENFRPISLMNIDAKILNKILANRIQQHIKKLIHHDQVSFISGMQGWFNIHKSINLISNFSKVSRYKTNVQKSQAFLYTNNRQTESQIMSELPFTIATNRIKYLGIQLTRDVKDLFKENFKPLLNEIKEDTNKWKNIPCSWIGRMNIVKMAILPKVIYRFNAIPIKLPMTFFAELEKTTLKFIWNQKRAHIAKTILSQKNKAGGITLPDFKLYYKATVTKTAWYWYQNRDIDQWNRTEPSEITPHIYNHLIFDKPDKNKKWGKDSLFNKWCWENWLAICRKLKLDSFLIPYTKINSRLIKDSNVRSKTIKTLEENLGNTIQDIGMGKDFMTKTLKAIATKAKMDKWDLIKLKSFCTAKETTIRVNRQPTEWEKIFAIYPSDKGLISGIYKELKQICKKKSNNPIKNWAKDMNRHFSKEDIYAANRHVKKCSSSLVIREMQIKTTMRYHLTPVRM

SEQ ID NO: 35254 - protein, 490 aa, Homo sapiens
  DOMAIN (320)..(345): 7 kw REVERSE TRANSCRIPTASE RNA POLYMERASE domain identified by eMATRIX, accession number DM00895E, p-value=9.111e-11, raw score of 15.72
  DOMAIN (293)..(470): Reverse transcriptase domain identified by PFam, accession name rvt, E-value=2.3e-11, PFam score of 51.2
MAVSTTVRVDMPCCAVMLYCWGRSGKEQQPDEALKGKGFTVCFEGLRFGQKPGSYFSLDQIGHVEIQMITPPWRGTTLSTKRGGRKRGKTESDREHNLAPPKGRDTPKKEGAHVRGGPLSGTPPTEKKGKARSPRYGDTHRGEGLNKTHRAPQNFSESPEPTINKIDRPLARLIKKKREKNQIDTIKNDKGDITTNPTEIQTTIREYYKHLYANKLENLEETDKFLDTYTLPRLNQEEVESLNRPITGSEIEAIINSLPTKKSPGTDGFTAKFYQRYKEELVPFLLKLFQSIEKEGILPNSFYEASIILIPKPGRDTQKKENFRPISLMNIDAKIVSKILANRIQVHIKKLIHHDQVGFIPGMQGCVGSSARAIGQEKEIKGIQLGKEEAKLSLFADDTIECLENPIVSAQNLFKLISNFSKVSGYKIHVPKSVSFLYTNNIQAESQIKNAIPFTIASKRIKYLGIQLTLEVKELYNKNYKTLLKEIRDE

SEQ ID NO: 35255 - protein, 195 aa, Homo sapiens
  DOMAIN (51)..(96): kw TRANSCRIPTASE REVERSE II ORF2 domain identified by eMATRIX, accession number DM01354N, p-value=1.000e-40, raw score of 13.17
CYQRWKVLKKSSGPLARLIKKREKNQIDAIKNDKGDITTDPTEIQTTIREYYKHLYINKLENLEETDKFLDTYTLPRLNQEEVESLNRPITGSEIEAIINSLQTKKSPGPDGFTAKLYQRYKEELVIYRFNAIPIKLPMTFFTELEKTTLKFIWNQKRIRIAKSILSQKNKAGGITLPDFKLYYKATVTKTAWYW

SEQ ID NO: 35256 - protein, 833 aa, Homo sapiens
  DOMAIN (198)..(244): kw TRANSCRIPTASE REVERSE II ORF2 domain identified by eMATRIX, accession number DM01354O, p-value=1.000e-40, raw score of 8.73
  DOMAIN (232)..(457): Reverse transcriptase domain identified by PFam, accession name rvt, E-value=1.9e-48, PFam score of 174.4
  misc_feature (1)...(833): Xaa = X or * as defined in Table 2
MFFETNENKDTTYQNLWDTFKAVCRGKFIALNTHKRKQERSKIDTLTSQLKEPEKQEQTHSKASRRQEITKIRAELKEIETQKTLQKILQKINESRSWFFEEINKIDRLLARLIKKKREKNQIDAIKNDKGDITTDRTEIQTTIREYYKHLYANKLENLEEMDKFLDTYNLPRLNQEEVESLHRLITGSEIEAIINSLPTKKSPGPDGFTAKFYQRYKEELVPFLLKLFQSIEKEGILPNSFYEANIILIPKPGTDTTKKENFRPISLMNIDVKILNKILANRIQQQIKKLIHHDQVGFIPGMQGWFNIHKSINVIQHINRTKDKNHMIISIDAEKAFDKIQQPFMLKSLNKLVLEVLARAIRQEKEMKGIQLGKEEVKLSLFADDMIVYLENPIISAQDLLKLISNFSKVSGYEINVQKSQASLYTNNRQTESQIMSELPFTIASKRIKYLGIQLTRDVKDLFKENYKPLLNEIKEDTNKWKNIPCSWVGRINIVKMAILPKVIYRFNAILIKLPMTFFTELEKTTLKFIRNQKRACIAKSILSKKEKAGGIMLPEFKLXYKATVTKTVWYWCQNRYIDQWNRTEPSEIIPHIYNHLIFDKPDKNKKWGKDSLFNKWCWEHWLAICRKLKLDPFLTPYTKINSRWIKDLNVRPKTIKTLAGHLGNTIRDIGLGKDFMTKTPKAMATKAKIDKWDLIKLKSFCTAKETAIRVNRQPTEWEKIFTIYPSDTGLIPRIYKELKQIYNKKINNPINKWAMDMNRHFSKEDIYAANRHMKILSSSVAIREMQIKTTMRYHLTPIRMTIIKTSGNNSCWRGCGETGTLLHCWWDCKLV

SEQ ID NO: 35257 - protein, 1391 aa, Homo sapiens
  DOMAIN (1333)..(1354): RHS PROTEIN SIGNATURE domain identified by eMATRIX, accession number PR00394D, p-value=2.170e-28, raw score of 6.56
  DOMAIN (370)..(646): Reverse transcriptase domain identified by PFam, accession name rvt, E-value=1.1e-74, PFam score of 261.6
  misc_feature (1)...(1391): Xaa = X or * as defined in Table 2
MGDFNTPLSTLDRSMRQKVNKDSQELNSALHQADLTDICRTLHPKSTEYTFFAAPHHTYSKIDHIVGSKALFSKCKRTEIITNCLSDHSAIKLELRIKKLTQNRSTTWKLNNLLLNDYWVHNEMKAEIKMFFETNENKDTTYQNLWDTFKAVYRGKFIAFKAVCRGKFIALNAQNRKQERSKIDTLTSQLKELEKQEQTHSKASRRQEITKIRAELKEIETQKTLQKISESRSWFFEKTNKIDRPLARLIKKKREKNQMDAIKNDKWDITTDPTEIQTTIREYYKHLYANKLENLEEMDKFLDTYTLPRLNQEEVESLNRPITGSEIEAITNSLTTKKSPGPDGFTAKFYQRYKEELVPFLLKLFQSIEKEGILPTAFYEASIILIPKPGRDTTKRENFKPISLMNIDAKILNKILANQIQQHIQKLIHHDQVSFIPGMQGWFNICKSINIIQHIKRTDDKNHMIISIDAEKAFDKIQQPFILKTLNKLGIDGKYLKIMRAIYDKPTANIILNEQKLEAFPLKTATRQGCPLSPLLFNIVLEVLARVIRQEKEIKGIQLGKEEVKLSLFVDDMIVYLENPIVSAQNLLKLISNFGKLSGYKINVQKSQAVLYTNNRQTESQIMSELPFTIASKRIKYLGIQLTRDVKDIFKESYKPLLKEIKRDTKKWKNIFIPCLWVGRINIMKMAILPKGIYRFNAIPIKLPMTFLPQNWEKTTLKFIYWNQKRARIAQVNPXAQKNKVGGITLPDFKLILTRLTVTKTAWYGTWYQNRDIDQWNRTDPSEIMPHIYNYLIFDKPEKNRQWGEDSLFNKWCWENWLAICRKLKLDPFLTLYAKINXRWIKDLNVRPKTIKALEENLGITIQDIGMGKDFMSKTSKAMATKAKIDKWDLIKLKSFCTAKQATIRVNRQPTKWEKIFATYSSDKGLISRIYNELKQIYKKKKNNKPTKKWVKDVNRHFSKEDIYAAKNHMKKCSPSLAIGEMQIKTTITKIDRPLARLIKKKLEKNQIDAINNDKGDITTDPTEIQTTIREYYKHLYTNKPENLEEMDKFLDTYTLPRLNQEEVESLNRPIKGSEIEAIINSLLTKKSPGPDGFTAKFYQRYKEELVPFLLKLFQSIEKEGILPNSFYEASIILILKPGRDTTKKENFRPISLMNIDAKSLNKYWPTESSNSSKAYPHDQVGFIPGMQTVYEPGSFTPLIRVETENGEREKAQRRSLAETLQQEGSENGHGVVFPAELVRLLDRLEEEIRADRVSSESRAWLAQCGLTVEQLARQVEPEYTPARKAHLYHCDHRGLPLALISEDGNTAWSAEYDEWGNQLNEENPHHVYQPYRLPGQQHDEESGLYYNRHRYYDPLQGRYITQDPMGLKGGWNLYQYPLNPLQQIDPIGIL

SEQ ID NO: 35258 - protein, 604 aa, Homo sapiens
MSSRGPCTLETLINPSPSVADDIPHLRPKPVYITTTRDNENIYSTKIPYMAARVVFIKWIVTFFLEKKYLTATQNTKNGVDVLPKIIQTVGGGAVQERAPELDGGGPTEQDKSHSNSSTLSDRRLSNSSLCSIEEEHRMVYEMVQRILLSTRGYVNFVNEVFHQAFLLPSCEIAVTRKVVQVYRKWILQDKPVFMEEPDRKDVAQEDAEKLGFSETDSKEASSESSGHKRSSSWGTHNSFTSAMSRGCVTEEGTIQMLKAGVQALLQPVLCVFPLIPLPPLCNQAARPAVVSIPLGDLLPWLSVLGGPADQWHLSYLKPEGSSAYACILEALESAGKGLWKVSAVGRKPWTRGRSDRKGTVGHQVQFLFFKDEGRVDSRILTLMVAWIRPNLCVYISRELWDDFLGVLSSLTEWEELINEWANIMDSLTAVLARTVYGVEMTNLPLDKLSEQKEKKQRGKGCVLDPQKGTTVGRSFSLSWRSHPDVTEPMRFRSATTSGAPGVEKARNIVRQKATAKRSQSISNCVHLSEALPATKSVPLLLHTLYKNKALKAALGQPVGKADQLVVAGSPSVCCVEDQWGRSNLEAMVLWLYCIPPDGDVLYL

SEQ ID NO: 35259 - protein, 60 aa, Homo sapiens
  DOMAIN (11)..(22): dUTPase domain identified by eMATRIX, accession number PF00692B, p-value=4.717e-09, raw score of 8.14
  misc_feature (1)...(60): Xaa = X or * as defined in Table 2
MAKKGVTVSAGVIDPDYQNEISLLLHNGVTXEHAWNTGDALGHXLLLPCPVIKVNGTLQE

SEQ ID NO: 35260 - protein, 87 aa, Homo sapiens
  misc_feature (1)...(87): Xaa = X or * as defined in Table 2
KLRLPPGHFGLLLLLSQQAKKGVTVLAGVIDPDYHNEISLLLHNGGKKKTRPAEMLAEGKGNTEWVGEEVSHQYQLXPHDQLQKRGL

SEQ ID NO: 35261 - protein, 116 aa, Homo sapiens
  DOMAIN (20)..(66): Integrase core domain identified by PFam, accession name rve, E-value=1.5e-05, PFam score of 23.2
MLMEFTGLTMIPIILKQLLNGLLKSRLQCQLGDNTLQAWGKVLQKAVYALNQCPIYGTVSPIDRIHGSRNQRVEVEVEVAPLTITHSVPLAKFLLPVPMALCSAGLEVLVPEGGTL

SEQ ID NO: 35262 - protein, 783 aa, Homo sapiens
  DOMAIN (43)..(171): dUTPase domain identified by PFam, accession name dUTPase, E- value=1.9e-05, PFam score of 24.9
MYALNQHPIYGTVSSIAKIHGSRNQGVEVEVAPLTNTPSDLLAKFLLPVPATLHSAGLEVLVPEGGTLPPGDTTKISLNWKLRLPPGHFGLLLHLSQQAKKGVTVLAGMTDPDYQDEIILLLHNGGKEEYAWNSRDSLRLLLVLPSPVSKVNGKLRQPNPNRTTNGPDPSGMKPADGLLRDLVIILAQEREAAKAKKEESTTGNANLLEKTGGVDFHMKAVPGTEVPGHKLVTLVSVSKGNSSSLTWELEGGNDPMSKKRRGEFSDFHGPPKKIIKVQKDESSTGSLAMSTRPRRVIERPPLTQQQAAQKRTCDSITPSKSSPVPVSDTQKLKNLPFKTSGLETAKKRNSISDDDTDSEDELRMMIAKEENLQRTTQPSINESESDPFEVVRDDFKSGVHKLHSLIGLGIKNRVSCHDSDDDIMRNDREYDSGDTDEIIAMKKNVAKVKNSTEFSQMEKSTKKTSFKNRENCELSDHCIKLQKRKSNVEFKERQCLKGPNEDTKREGPEPPPPCKFDRGSKSPKTPTGLRRGRQCIRPAEIVASLLEGEENTCGKQKPKENNLKPKFQAFKGVGCLYEKESMKKSLKDSVASNNKDQNSMKHEDPSIISMEDGSPYVNGSLGEVTPCQHAKKANGPNYIQPQKRQTTFESQDRKAVSPSSSEKRSKNPISRPLEGKKSLSLSAKTHNIGFDKDSCHSTTKTEASQEERSDSSGLTSLKKSPKVSSKDTREIKTDFSLSISNSSDVSAKDKHAEDNEKRLAALEARQKAKEVQKKLVHNALANL

SEQ ID NO: 35263 - protein, 118 aa, Homo sapiens
  misc_feature (1)...(118): Xaa = X or * as defined in Table 2
QLAEPPHWIPGTRKDAQCLVGLFGFWRQHIPHLGGLLWPIYRVTQKAASFEWGPEXEKALQQIQPSVQAALPLGPXDLADPMVLEVSMADRCAGWSLWQAPIGELQQKPLGFWSKALP

SEQ ID NO: 35264 - protein, 457 aa, Homo sapiens
  DOMAIN (71)..(94): TRANSTHYRETIN SIGNATURE domain identified by eMATRIX, accession number PR00189D, p-value=5.592e-09, raw score of 5.14
  DOMAIN (346)..(432): Integrase core domain identified by PFam, accession name rve, E-value=9.9e-17, PFam score of 61.9
MSTTQLDTMGAESLCNMETVQVEDEGIQKLKEIRMVEWITPFRPTHPSCEGPEDIPLTNALQNTFVRAAPASLKSPVVALLLSPVGYRTHAVVISPVPECRFGIDILSSWQNPHIGSLAGRAHQKQFVGSWQGQQYAFTVLPQGHINSLALCHNLIWRDLDHFLLSQGITLVHYTDDIMLIGSNLADPMVLEVSMADRCAGWSLWQAPIGELQQKPLGFWSKALPSSADNYSPFERQFFACYWALVETECLPTGHQLTMQPELPIMNWVLSDPSSHKWVHGQSGHGGRDSGYSWTQQHGLPLTKGDLSMTTAECQIFQQQRPILSPRYGTIPWGDQPATWRQKWQRFVLTGIDTYSRYEFAYPACHASTKTTIHGLMEFLIHHHGIPHSIASDQGTHLMAKEVRQWAHAHGIHWSYHVPHHPEVAGLIERWNEGLLKSQLQHQLVNRLRRELQCWLG

SEQ ID NO: 35265 - protein, 109 aa, Homo sapiens
INCLRNCKTYQARKPLWFYNTSLKFFLNKPMLADVVFEIQGTTVPAHRAILVARCEVMAAMFNAGIFQAMCLLICAEMYQVSRLQHICELFIITQLQSMPSRELASMNL

SEQ ID NO: 35266 - protein, 731 aa, Homo sapiens
  DOMAIN (345)..(358): BTB (also known as BR-C/Ttk) domain proteins domain identified by eMATRIX, accession number PF00651, p-value=7.857e-10, raw score of 15.00
  DOMAIN (483)..(600): BTB/POZ domain identified by PFam, accession name BTB, E- value=0.014, PFam score of 18.9
  misc_feature (1)...(731): Xaa = X or * as defined in Table 2
VAAAYPPPASPPWSPARSLAGAAPAPLCVGPAAVEAREGDAAGDERIAGELAARGPREAVSRCFSPSRRPALGFEIMSIHIVALGNEGDTFHQDNRPSGLIRTYLGRSPLVSGDESSLLLNAASTVARPVFTEYQASAFGNVKLVVHDCPVWDIFDSDWYTSRNLIGGADIIVIKYNVNDKFSFHEVKDNYIPVIKRALNSVPVIIAAVGTRQNEELPCTCPLCTSDRGSCVSTTEGIQLAKELGATYLELHSLDDFYIGKYFGGVLEYFMIQALNQKTSEKMKKRKMSNSFHGIRPPQLEQPEKMPVLKAEASHYNSDLNNLLFCCQCVDVVFYNPDLKKVVEAHKIVLCAVSHVFMLLFNVKSPTDIQDSSIIRTTQDLFAINRDTAFPGASHESSGNPPLRVIVKDALFCSCLSDILRFIYSGAFQWEELEEDIRKKLKDSGDVSNVIEKVKCILKTPGKINCLRNCKTYQARKPLWFYNTSLKFFLNKPMLADVVFEIQGYGQCPAHRAILVAPCEVMAAMFNGNLHGKAKSVLIPVYGVSKETFLSFLEYLYTDSCCPAGIFQAMCLLICAEMYQVSRLQHICELFIITQLQSMPSRGTGHPWNLDISVDLLXKGPSFHHSWIAFSTWAYFHFHCYLTYLIFQFKRPGIFRDLFSEGRNGSFLFGKRHRWGPSNMLLGRQLAGITGKYYFTSPGNVGCLGNGKPGSLLYTTFLFYYYEEWDTSRFQ

SEQ ID NO: 35267 - protein, 1038 aa, Homo sapiens
  DOMAIN (256)..(277): Heavy-metal-associated domain proteins domain identified by eMATRIX, accession number BL01047B, p-value=8.105e-15, raw score of 19.73
  DOMAIN (73)..(304): Mur ligase family domain identified by PFam, accession name Mur_ligase, E-value=1.4e-19, PFam score of 78.5
METRMTPPGLDKVPEAVERHTGSLNDEWLMAADLIVASPGIALAHPSLSAAADAGIEIVGDIELFCREAQAPIVAITGSNGKSTVTTLVGEMAKAPGVNVGVGGNIGLPALMLLDDECELYVLELSSFQLETTSSLQAVAATILNVTEDHMDRYPFGLQQYRAAKLRIYENAKVTCKRLQYTGGCTFPHRDTASNTDNVRNALPVGTKKLFQNCLTAQIRAYIEVQQTPKPEDKVKAVTELNQHAPLAMVGDGINDAPAMKAAAIGIAMGSGTDVALETADAALTHNHLRGLVQMIELARATHANIRQNITIALGLKGIFLVTTLLGMTGLWLAVLADTGATVLGPKHVPCPNRRDEENMPGSRREVKNAREEGVEFKFNVQPLGIEVNGNGKVSGVKMVRTEMGEPDAKGRRRAEIVAGSEHIVPADAVIMAFGFRPHNMEWLAKHSVELDSQGRIIAPEGSDNAFQTSNPKIFAGGDIVRGSDLVVTAIAEGQLEQQGFTGDTATSYADRLTMSTDNSIYQLLPDAVVFPRSTADVALIARLAAQERYSSLIFTPRGGGTGTNGQALNQGIIVDMSRHMNRIIEINPEEGCMTAACVKPSVSQSMAPRQGLFEDLPSSQCRLLALKHVLLNLLRDRYDDRQSALFTTTNPALAADRRISLEGETREITSYFPMQFVRYSLLIHAAAGISLIHAILIHRYMAFWVKGSIKGMIEGKTPTPLSSFRSLPTIEICCMVSIPEPINVAPFTGFVTLPFSIRYASEVEKTNLPENLLYDVSQVAIPFDNVDDEQIQKPQRWNPADLGRFMIFFGPISSIFDILTFCLMWWVFHANTPETQTLFQSGWFVVGLLSQTLIVHMIRTRRVPFIQSCASWPLMIMTVIVMIVGIALPFSPLASYLQLQALPLSYFPWLVAILAGVFVVATDHAAEAITGFFTKYGDVGTDINPLYRLNKRQGKQLLAALACPEHLYKKAPTADLEDDRPSLPDEVALGVTYDNIDDYLEGKNVPQQVARTIENWYLKTEHKRRPPITVFDDFWKK

SEQ ID NO: 35268 - protein, 386 aa, Homo sapiens
  DOMAIN (288)..(309): Heavy-metal-associated domain proteins domain identified by eMATRIX, accession number BL01047B, p-value=8.105e-15, raw score of 19.73
MRVCARACVRTRTRMCVYAHTCVCVRTYAYVRVRVRVHVRARVRVCAYARTRVRNSLSILPFIQLTLATPIHHIHQEEFNIRGIVPVLRRVKPDLAIGIDITPSCDTPDLHDYSEVRINQGVGITCLNYHGRGTLAGLITPPRLIRMLEQTALEHNIPVQREVAPGVITETGYIQLFLPGWEIGFSPLALLLAFLCSTSPGFGDPDGLGVIAYQDTVRPNAATAISELNALAVKGVILTGDNPRAAAAIAGELGLEFKAGLLPEDKVKAVTELNQHAPLAMVGDGINDAPAMKAAAIGIAMGSGTDVALETADAALTHNHLRGLVQMIELARATHANIRQNITIALGLKGIFLVTTLMTGLWLAVLADTGATVLVTANALRLLRRR

SEQ ID NO: 35269 - protein, 501 aa, Homo sapiens
  DOMAIN (203)..(224): Heavy-metal-associated domain proteins domain identified by eMATRIX, accession number BL01047B, p-value=8.105e-15, raw score of 19.73
  misc_feature (1)...(501): Xaa = X or * as defined in Table 2
QWAIKQFKHAEKENPYLFGGGHLRAIFRXSGFQXRQLHTMHWGASQQAEHPLAQPSTRAQLRTPIPTADSQRALVGSGMKPRLNGERVLICAAGKHPADAFTGLINELESAGQTVVLVVRNDDVLGVIALQDTLRADAATAISELNALGVKGVILTGDNPRAAAAIAGELGLEFKAGLLPEDKVKAVTELNQHAPLAMVGDGINDAPAMKAAAIGIAMGSGTDVALETADAALTHNHLRGLVQMIELARATHANIRQNITIALGLKGIFLVTTLLGMTGLWLAVLADTGATVLFFPRLFEARNSQVGNGETNQTRFRLCAAPGGTFIADFTAGTGRRARPRRNRRRVVVSFDFHQNMRRFLMEIVAARFVVSKVAAHFRTFHYGGVIFISRENVIWRGFESIFDHLEQRFRLLFTIDNPVGVKNFVAAVLGVRLGKHIQFDVVRVTTKLCESILQIVNFIFRQSQAKTQVSVDQRLTALPQQINAGNRSRLMVGKQLLCII

SEQ ID NO: 35270 - protein, 655 aa, Homo sapiens
  DOMAIN (92)..(124): ABC transporters family proteins domain identified by eMATRIX, accession number BL00211B, p-value=6.250e-18, raw score of 13.37
  DOMAIN (1)..(166): ABC transporter domain identified by PFam, accession name ABC_tran, E-value=2.6e-25, PFam score of 97.5
MRYDDIDLLRLSARERRKLVGHNVSMIFQEPQSCLDPSERVGRQLMQNIPAWTYKGRWWQRFGWRKRRAIELLHRVGIKDHKDAMRSFPYELTEGECQKVMIAIALANQPRLLIADEPTNSMEPTTQAQIFRLLTRLNQNSNTTILLISHDLQMLSHGNIAEARVGDDATSSYTQALIARYKIRNPMRITSLNSSRAIPCEQYRWCLWGTCGSSGVEFTLHYGLELGHFFQTGMHGFSGLIRLNSQLLHTFTSNDRIVPDVPAAQCILKAFQQTCGITCTLYPSLGIVYGRFQGPVIICSGHHQGCAFSNHSVLPDNESQPVHVTCRCRTEMQVPQHRRKKTFNPTVLLNHFVMEIIVLWTSKFINLAYRFCQSVFGASLKSGHAAGFDGWDDPLRKTYPLQLTGFHYKARTHSSCGNIDVLQQACPQEVWINPIDAQARGIRHGDTVRVFNNNGEMLIAAKVTPRILPGVTAIGQDFKDLGPEVSFRRIYEYAGGDWQEDNGVWHQNVFAYYLSISCNHCDDPACTKVCPSGAMHKREDGFVVVDEDVCIACRYCHMACPYGAPQYNAEKGHMTKCDGCYSRVAEGKQPICVESCPLRALEFGPIEECARSTALLLPVATARAHFTKPNIVIKPNANSRPTGDTTGYLANPEEV

SEQ ID NO: 35271 - protein, 404 aa, Homo sapiens
  DOMAIN (1)..(89): Molydopterin dinucleotide binding dom domain identified by PFam, accession name Molydop_binding, E-value=1e-10, PFam score of 49.0
MQANRARTHYRSGNINVLQQACPQEVWINPIDAQARGIRHGDTVRVFNNNGEMLIAAKVTPRILPGVTAIGQAPRLCRYPLQSRWRQFHRWRVVNTVTDHRQRMLIQLGHRFDFIFRQQARFKLQPQLPGNCARCAWIIAGEDHPFDAQRVQFTDGSCSIGAQGYPAQINTRSPLTCASMPDPTSARCGFGGGNGEFSNLCFAYDGLRQWMRRALLDRRRQCQQFRFTNTRCRMNRGNARFTDGQRTGFIKRHLSNTTQLFQRRSAFNQRPTTRCRRQPGAGGKQQRWHQRHQQSDGHNRGRIDTAETVDKPLNGSATLFGFFDQFQNPHFQRHQTVYAGGTSRDFIARCALHRNGFAGQGAFIKERPAGFTQLPPPPCAKCRGANSFIEDDIMFRPVKCTPPL

SEQ ID NO: 35272 - protein, 88 aa, Homo sapiens
YEFNRPYPEIQRSGISKLLEPLLFAATSDSQLSKTEISSIKINSETVPVYQLRYNGNNALMFATYQDKMLVFSSTDMLFKDDQQDTEA

SEQ ID NO: 35273 - protein, 574 aa, Homo sapiens
  DOMAIN (331)..(566): AcrB/AcrD/AcrF family domain identified by PFam, accession name ACR_tran, E-value=3.8e-97, PFam score of 336.2
MANSICCMSGIGGLREEQVWETAGGIREIELICAECFHASFAGVREPVACKSRICTLQLLTLPLPEAAVVHLLRNRMSESSVRAGPNLIPDGALCELGVRASGRVWLSVGRRTEPWAGCTVSTTEPTDATGLVFTEVDCGRSNGKLNSVKQVRSAVIRNQSDRLTRWWTRKCRQHGNRERALGSHSRTSGHRPYERKTAEADESPPRGNRSRDREPDTRCPHPGGPENRKCMQIVCRGTDRLIVYLLVFAYFANTDCCRFRELGIWAPGKQNAHGTIIAIHNNALSFTTPQRGGTRFLLGRYKPQSARNRPCDLTPADDRRHRQQHGNRPGVVKEYQGVIDPQRLAQYGISLAEVKSALDASNQEAGGSSIELAEAEYMVRASGYLQTLDDFNHIVLKASENGVPVYLRDVAKVQIGPEMRRGIAELNGEGEVAGGVVILRSGKNAREVIAAVKDKLETLKSSLPEGVEIVTTYDRSQLIDRAIDNLSGKLLEEFIVVAVVCALFLWHVRSALVATISLPLGMGIALIVMHFQGLNGNIMSMGGIDNGDRAMVDAAIAMIENAIKGGRMADPAY

SEQ ID NO: 35274 - protein, 479 aa, Homo sapiens
  DOMAIN (107)..(157): Sugar transport proteins domain identified by eMATRIX, accession number BL00216B, p-value=7.283e-12, raw score of 27.64
  DOMAIN (282)..(478): AcrB/AcrD/AcrF family domain identified by PFam, accession name ACR_tran, E-value=4e-81, PFam score of 282.9
MANIPWYRHLTGAQWRAFSAAWLGYLLDGFDFVLIALVLTEVQGEFGLTTVQAASLISAAFISRWFGGLMLGAMGDRYGRRLAMVTSIVLFSAGTLACGFAPGYITMFIARLVIGMGMAGEYGSSATYVIESWPKHLRNKASGFLISGFSVGAVVAAQVYSLVVPVWGWRALFFIGILPIIFALWLRKNIPEAEDWKEKHAGKAPVRTMVDILYRGEHRIANQLGPMGGKPLFFLKIPKNGLVGEVWDHGPTRIVGLIISLGPRSHSYRRSDNQTGTTVPLVSSVQGKLPAGVSAELGPDATGVGWIYEYALVDRSGKHDLADLRSLQDWFLKYELKTIPDVAQVASVGGVVKEYQVVIDPQRLAQYGISLAEVKSALDASNQEAGGSSIELAEAEYMVRASGYLQTLDDFNHIVLKASENGVPVYLRDVAKVQIGPEMRRGIAELNGEGEVAGGVVILRSGKNAREVIAAVKDKLEQY

SEQ ID NO: 35275 - protein, 244 aa, Homo sapiens
  DOMAIN (23)..(185): AcrB/AcrD/AcrF family domain identified by PFam, accession name ACR_tran, E-value=1.1e-65, PFam score of 231.6
QCPYPYIAATGRILVVTHLICLAPQIVENQVTYPLTTTMLSVPGAKTVRGFSQFGDSYVYVIFEDGTDPYWARSRVLEYLNQVQGMLPAGVSAELGPDATGVGWIYEYALVDRSGKHDLADLRSLQDWILKYELETIPCVSEVASVGGVVKEYQVVIDPQRLAQYGISLAEVKSALDASNQEAGGSSIELAEAEYMGGTCSAHGRALSRGVLWCRFSAIVRGPPRGMFCGAGAAPNLIRAPPSL

SEQ ID NO: 35276 - protein, 33 aa, Homo sapiens
SPSHNNPSDTGYPGWFSPALPPPGRFCRYRRPG

SEQ ID NO: 35277 - protein, 26 aa, Homo sapiens
WRSGARQRNSVPHPRKQVRVCRHAGD

SEQ ID NO: 35278 - protein, 174 aa, Homo sapiens
LGVEATAIGDFGKAAEKLPVPVELAQACAHAVMKSGIDLAVSYCMQVNHGFAQPLEFLLGGLDKVPVLLVFINGVATPLPGFQRTRMLGEAIGRFTSTPQYAGDTVNDEDISNTIRALFATGNFEDVRVLRDGELRKFPTCESDDNFRPVTFSVNYVIRHDWVGIRRVVPENEH

SEQ ID NO: 35279 - protein, 923 aa, Homo sapiens
  DOMAIN (161)..(188): PROTEIN TRANSMEMBRANE TRANSPORT INNER MEMBRANE R domain identified by eMATRIX, accession number PD01612B, p-value=5.500e- 24, raw score of 11.68
  DOMAIN (1)..(192): AcrB/AcrD/AcrF family domain identified by PFam, accession name ACR_tran, E-value=4.4e-96, PFam score of 332.6
MAPLSAYSSTEWTYGSPRLERYNGIPSMEILGEAAAGKSTGDAMKFMADLVAKLPAGVGYSWTGLSYQEALSANQAPALYAISLVVVFLSLAALYESCVVGALLATDLRGLSNDVYFQVGLLTTIGLSAKNAILIVEFAVEMMQKEGKTPIEAIIEAARMRLRPILMTSLAFILGVLPLVISHGAGSGAQNAQFVIILYQHILTPETDKIHTPRIVPQKLERTHLTPVALAVATVFMLAGCEKSDETVSLYQNADDCSAANPGKSAECTTAYNNALKEAERTAPKYATREDCVAEFGEGQCQQAPAQAGMAPENQAQAQQSSGSFWMPLMAGYMMGRLMGGGAGFAQQPLFSSKNPASPAYGKYTDATGVHFHHFVDQCTTGNFGWFRLVFQFTQGAGDHFRVAGSFAFRRNAVVLLGGVGQVQELTKRTRNGHAARRSTNFVRCLSAKCDLWYNPGGYTVQDSSVPFIPPTIGKLKRCKSFSEQMQGRNQVDINEIQTAVENQLMSGPYKQLARAYIEYRHDRDIEREKRGRLNQEIRGLVEQTNASLLNENANKDSKVIPTQRDLLAGIVAKHYARQHLLPRDVVQAHERGDIHYHDLDYSPFFPMFNCMLIDLKGMLTQGFKMGNAEIEPPKSISTATAVTAQIIAQVASHIYGGTTINRIDEVLAPFVTASYNKHRKTAEEWNIPDAERKIQVSPTKPLATQRDLALAYSPGVAAPCLEIEKDPLKAYKYTARGNLVAVISNGTAVLGLGNIGALAGKPVMEGKGVLFKKFAGIDVFDIEVDELDPDKFIEVVAALEPTFGGINLEDIKAPECFYIEQKLRERMNIPVFHDDQHGTAIISTAAILNGLRVVEKNISDVRMVVPARVRSNRLYELLVALGLQNITSWFSIQKALSIRAVSQHGGNKAAYRWWIRQRTSMM

SEQ ID NO: 35280 - protein, 227 aa, Homo sapiens
MTPHVMKRDGCKVPFKSERIKEAILRAAKAAEVDDADYCATVAAVVSEQMQGRNQEIRGLVEQTNASLLNENANKDSKVIPTQRDLLAGIVAKHYARQHLLPRDVVQAHERGDIHYHDLDYSPFFPMFNCMLIDLKGMLTQGFKMGNAEIEPPEVESRTGKPRRLGEARSFGIRRNNLAGVGVISGDYDQRVTLLFSEFQRPLYGFIEIDRLANLPTRIRSMILSID

SEQ ID NO: 35281 - protein, 410 aa, Homo sapiens
SPAPAVPAQIIAQAATHIYGGTTITRIDEVLAPFVTASYNKHRKTAEEWNIPDAEGYANSRTIKECYDAFQSLEYEVNTLHTANGQTPFVTFGFGLGTSWESRLIQESILRNRIAGLGKNRKTAVFPKLVFAIRDGLNHKKGDPNYDIKQLALECASKRMYPDILNYDQVVKVTGSFKTPMGCRSFLGVWENENGEQIHDGRNNLGVISLNLPRIALEAKGDEATFWKLLDERLVLARKALMTRIARLEGVKARVAPILYMEGACGVRLNADDDVSEIFKNGRASISLGYIGIHETINALFGGEHVYDNEQLRAKGIAIVERLRQAVDQWKEETAQQVSTPRCGEEGEPVRQQRGDRQHTEAQYAAPGGMANPNTYESAVQPQTRGDPAVKKNWKTKGAKKTVTLRPPLS

SEQ ID NO: 35282 - protein, 258 aa, Homo sapiens
MLRTSDRPPYQYPKRCIPLSVLEVLRCARRWSLRPYKQLARAYIERYRHDRDIEREKRGRLNQEIRGLVEQTNASLLNENANKDSKAHERGDIHYHDLDYSPFFPMFNCMLIDLKGMLTQGFKMGNAEIEPPKSISTATAVTAQIIGSVHIYGGTTINRIDEVLAPFVTASYNKHRKTAEEWNIPDAAGYANSRTIKECYDAFQSLEYEVNTLHTANVEGLTGDDGIAVEALKKNSQKPRMSASHNCELVSLRGRQYT

SEQ ID NO: 35283 - protein, 426 aa, Homo sapiens
  DOMAIN (12)..(36): ACRIFLAVIN RESISTANCE PROTEIN FAMILY SIGNATURE domain identified by eMATRIX, accession number PR00702G, p-value=1.000e- 23, raw score of 9.63
  DOMAIN (1)..(424): AcrB/AcrD/AcrF family domain identified by PFam, accession name ACR_tran, E-value=2.6e-142, PFam score of 486.2
MGDIVGRLFREFAITLAVAILISAVVSLTLTPMMCARMLSQESLRKQNRFSRASEKMFDRIIAAYGRGLAKVLNHPWLTLSVALSTLLLSVLLWVFIPKGFFPVQDNGIIQGTLQAPQSSSFANMAQRQRQVADVILQDPAVQSLTSFVGVDGTNPSLNSARLQINLKPLDERDDRVQKVIARLQTAVDKVPGVDLFLQPTQDLTIDTQVSRTQYQFTLQGPSLDALNTWVPQLMEKLQQLGQLFEVFHDWAGQKAAPARWGISMADVDNAPCATRLGLAALDTIRLTSSDGGVVPLSSIAKIEQRFAPLSINHLDQFPVTTISFNVPDNYSLGDAVQAIMDTEKTLNLPVDITTQFQGSTLAFQSALGSTVWLIVAAVVAMYIVLGILYESFIHPITILSTLPTAGVGALLALLIAGIIYSVAII

SEQ ID NO: 35284 - protein, 180 aa, Homo sapiens
  DOMAIN (27)..(45): ACRIFLAVIN RESISTANCE PROTEIN FAMILY SIGNATURE domain identified by eMATRIX, accession number PR00702H, p-value=9.486e- 14, raw score of 12.94
  DOMAIN (18)..(175): AcrB/AcrD/AcrF family domain identified by PFam, accession name ACR_tran, E-value=6.6e-41, PFam score of 149.3
SLSTKGYAAAKWCSTACAGSTLLLIVLLWVFIPKGFFPGQDNGIIQGTLQAPQSISFANMAQLQRQVADVILQDPAVQSLTSFVGVDGTNPSLNSARLQINLKPLDERDDRVQKVIARLHTAVDKVPGVDLFLQPTQDLTIDTQGSRTQYQFTLHATSLDALNTWVPQLMEKIQQLPKLS

SEQ ID NO: 35285 - protein, 96 aa, Homo sapiens
MNPVDRPLLDIGLTRLEFLRISGKGLAGLTIAPALLSLLGCKQEDIDSGTVGLINTPKGVLVTQRARCTGCHRCEISCTNFNDGSVGTFFSRIKPH

SEQ ID NO: 35286 - protein, 101 aa, Homo sapiens
  DOMAIN (38)..(57): Phosphoribulokinase proteins domain identified by eMATRIX, accession number BL00567A, p-value=9.862e-10, raw score of 10.66
MKNFEVLQPLQNSLSGLPLWVSERILQQINQLTHYEPVIGIMGKTGAGKSSLCNALFAGEVSPVSDVAGCTRDPLRFRLQIGEHFMTIVDLPGVGESGVRD

SEQ ID NO: 35287 - protein, 36 aa, Homo sapiens
KPVVLESRGAHSRFDFPDRDDENWLCHSLYLPESES

SEQ ID NO: 35288 - protein, 101 aa, Homo sapiens
  DOMAIN (24)..(65): Fumarate reductase / succinate dehydrogenase FAD-binding site proteins domain identified by eMATRIX, accession number BL00504H, p-value=4.635e-22, raw score of 24.86
GDLDGSRHRAFLCHLPVELKTALMFPVTLTRALMETAYATAVSANFRTESRGAHSRFDFPDRDDENWLCHSLYLPESESMTRRSVNMNPKLRPAFPPKIRT

SEQ ID NO: 35289 - protein, 377 aa, Homo sapiens
  DOMAIN (296)..(310): UvrD/REP helicase domain identified by eMATRIX, accession number PF00580D, p-value=1.692e-15, raw score of 13.15
  DOMAIN (233)..(367): UvrD/REP helicase domain identified by PFam, accession name UvrD-helicase, E-value=3.7e-14, PFam score of 54.6
MASTTTHHHSDSLLAVSNNRRVYSLISCRDTVYVTRRLSETYRTDYGGSFTAKTAARRTLHNVEYGRQNTWPGKRLIWAGKNEPLPLTPEDLDYRFPWQIAENSGVLTCLIEAQKQCSKKVPIVSKLENDTAARHELFIAEWRKQCSEKKAQAKGWRQWLTEEMQWSVPEGNFWDDEKLQRRLASRLDRWVSLMRMHGGAQAEMIASAPEEIRDLFSKRIKLMAPLLKAWKGALKAENAVDFSGLNHQAIVILEKGRFISPWKHILVDEFQDISPQRAALLAALRKQNSQTTLFAVGDDWQAIYRFSGAQMSLTTAFHENFGEGERCDLDTTYRFNSRIGEVANRFIQQNPGQLKKPLNSLTNGDKKAVTLLDESQL

SEQ ID NO: 35290 - protein, 60 aa, Homo sapiens
  misc_feature (1)...(60): Xaa = X or * as defined in Table 2
RNLPDAAGQSCAGEIRLYRQQTQRSRLQRWLHLACFRRCNLHRRELDATAXQHVRSCRWR

SEQ ID NO: 35291 - protein, 103 aa, Homo sapiens
MRKLTALFVASTLALGAANLAHAADTTTAAPADAKPMMHHKGKFGPHQDMMFKDLNLTDAQKQQIREIMKGQRDQMKRPPLEERRAMHDIIASDTFDKVKAEA

SEQ ID NO: 35292 - protein, 67 aa, Homo sapiens
  misc_feature (1)...(67): Xaa = X or * as defined in Table 2
KDHIKGVLEAQNSLSTQVSLFFXSFFGXNSNMRNLIQIYRSLCTKAIXLMNFKRHKNQLVINYLSRS

SEQ ID NO: 35293 - protein, 304 aa, Homo sapiens
  DOMAIN (113)..(158): kw TRANSCRIPTASE REVERSE II ORF2 domain identified by eMATRIX, accession number DM01354N, p-value=1.000e-40, raw score of 13.17
MTGVATARARGLRRPLSVGQVPPFARLWKGVQTVERHMLANIGTGSQHPGCGFQLINQNSVIVFAAGEVNGFTSGDVQCLKMRSGDMNDIQRRQRLLPDGNKFGEIQTTIREYYKHLYANKLEDLEEMDKFLDTYTLPRLNQEEVESLNRPITGSEIEAVVNSLPTKKSPGPERLTAEFYQRYKEELVPFLLKLFQTTEKEGLLPNSFYEASVLLIPKPGKDTTKKENFRPISLMNIDVKILNKILANRIQQHIKKLIHHNQVGFIIGVQGWFNICKSTNVIYHVNRTNDKNHIISIDTEKAFD

SEQ ID NO: 35294 - protein, 446 aa, Homo sapiens
  DOMAIN (108)..(153): kw TRANSCRIPTASE REVERSE II ORF2 domain identified by eMATRIX, accession number DM01354N, p-value=1.000e-40, raw score of 13.17
  DOMAIN (194)..(441): Reverse transcriptase domain identified by PFam, accession name rvt, E-value=3e-37, PFam score of 137.2
MKRNEQSLQEIWNYVKRPNLRLIGVSESEGEIGTKLENTPQDIIQENFPNLARQVNIKIQEIQRTPQRYSSRIATPRHIIIRFTKVEMKEKMLSAAREKEIQTTFREYYKHLYENKLENLEEMDKFLDTYTLPRLNQEEVESLNRPMTSSEIEAVINSLPTKKSPGPDGFTAEFYQRYEEELVPFLLRLFQTIEKEGILPNSFYEASIILIPKPGRDTTKNENFRPISLMNIDAKTLNKIMANRIQQHSKKLIHHNQVGFISGMQGWFNICKSINIIHHINRTNDKNHMIISIDAEKAFDKIQHPFMLKALNKLGIDGTHLKIIRAIFDKPTANIILNGQKLEAFLLKTDTRQGCPLSPLLFNVVLEVLARAIRQEKEITGIQIGKEEAPQKQQRLFCRYYHGKRAPQLLITHLEEDDEWDIIRYYNVMSEEEIKRMKEIVKPKII

SEQ ID NO: 35295 - protein, 637 aa, Homo sapiens
  DOMAIN (179)..(225): kw TRANSCRIPTASE REVERSE II ORF2 domain identified by eMATRIX, accession number DM01354O, p-value=1.000e-40, raw score of 8.73
  DOMAIN (225)..(505): Reverse transcriptase domain identified by PFam, accession name rvt, E-value=4.1e-72, PFam score of 253.0
  misc_feature (1)...(637): Xaa = X or * as defined in Table 2
PPLVIHRQTGSGEDLQQTPTDLQLRVLTIRRKTNKQKGHPHQNPISSRRHEITKIRAELKETETQKTLQKKSMNPRSWFFERINKIDRLLARLIKKKREKNQIDAIKNDKWDITHRIPTEIETIIREYYKHLYTNKLENLEEMDKFLDTYTLPRLNQEEVESLHRLITGSEIEAITNSLTTKKSPGPDGFTAEFYQRYKEELVPFLLKLFQSIEKEGILPNSFYEASIILISKPGRDTTKKENFRPISLMNIDAKILNKILANQIQQHIKKLIHHHQVGFIPGMQGWFNILKSINVIHHINRTKDKNHMIISIEAEKAFDKIQQPFMLKTLNKLGIDGTYLTYLKIIRAVYEKPTANIILNGQKLEAFPLKTGTRQGCPLSPLLFNVVLEVLVGAIRQEKEIKGIQLGKEDVKLSLFADDMIVYLENPIVSAQNLLKLISNFSEVSGYKINVQKSQAFLYTNNRQTESQIMSELPFTIASKRIKYLGIQLTRDVKDLFKENYKPLLNEIKEDTNKWKNIPCSWIGRINIVKMAILPKTLNQKFSYWFRVNKHYIHQRTFPLKETEFNTIATLYNGASPRTAPKSTGTNGHQASGLPRFXRIAFCSALVKSKRKLYQGYLPGQTDRREEGVSWCPGGP

SEQ ID NO: 35296 - protein, 78 aa, Homo sapiens
QPVEDTWLSTPAAPMVDSLIARVRVMARGNAITLPVCGRDVKFTLEVLRGDSVEKTSRVWSGIETYQELVTEDALDDL

SEQ ID NO: 35297 - protein, 584 aa, Homo sapiens
  DOMAIN (399)..(454): kw TRANSCRIPTASE REVERSE II ORF2 domain identified by eMATRIX, accession number DM01354Q, p-value=1.000e-40, raw score of 9.23
  DOMAIN (353)..(584): Reverse transcriptase domain identified by PFam, accession name rvt, E-value=1.8e-40, PFam score of 147.9
MKLMETLNQCINAGHEMTKAIAIAQFNDDSPEARKITRRWRIGEAADLVGVSSQAIRDAEKAGRLPHPDMEIRGRVEQRVGYTIEQINHMRDVFGTRLRRAEDVFPPVIGVAAHKGGVYKTSVSVHLAQDLALKGLRVLLVEGNDPQGTASMYHGWVPDLHIHAEDTLLPFYLGEKDDVTYAIKPTCWPGLDIIPSCLALHRIETELMGKFDEGKLPTDPHLMLRLAIETVAHDYDVIVIDSAPNLGIGTINVVCAADVLIVPTPAELFDYTSALQFFDMLRDLLKNVDLKGSQFDQVEERVSVIEDQMSEMKRKENFREKRVKRNEQSLQELWHYVRRPNLRRIGVPESDGENGTKLENTLQDIVQENLPNLPGRDTTKKENFRPISLMNIDAKILNKILANQIQQHIKTFIHRDQVGFIPGMQGWFNIHKSVNVIHHINRTKDKNHMIISIDAEKAFDKIQQHFMLKTLNKLGIDGMYLKIVRAIYDKLTANIILNGQKLDAFPLKTGTRQGCPLSPLLFNTVLEVLARAIRQEKEIKGIQLGKEEVKLSLFADDMTVYLENPIVSAQNLLKLISNFSKVSG

SEQ ID NO: 35298 - protein, 241 aa, Homo sapiens
  DOMAIN (82)..(109): Mrp family proteins domain identified by eMATRIX, accession number BL01215A, p-value=4.964e-11, raw score of 9.75
  DOMAIN (108)..(240): Reverse transcriptase domain identified by PFam, accession name rvt, E-value=0.037, PFam score of -38.9
MKLMETLNQCINAGHEMTKAIAIAQFNDDSPEARKITRRWRIGEAADLVGVSSQAIRDAEKAGRLPHPDMEIRGRRRAEDVFPPVIGVAAHKGGVYKTSVSVHLAQDLALKGLRVLLVEEDRWILRMTVDYCKLNQVVIPIAAAVSDVVSLLEQINTSPGTWYAAIDLANAFFSIPVHKAQQKQFAFSWQGQQYTFTVLPQWYINSPALCHNLIRRDLDCFSLPLDITLVHYIDDIMLIGS

SEQ ID NO: 35299 - protein, 567 aa, Homo sapiens
  DOMAIN (105)..(132): Mrp family proteins domain identified by eMATRIX, accession number BL01215A, p-value=4.964e-11, raw score of 9.75
  DOMAIN (496)..(523): Vertebrate galactoside-binding lectin domain identified by PFam, accession name Gal-bind_lectin, E-value=0.00032, PFam score of 18.7
MKLMETLNQCINAGHEMTKAIAIAQFNDDSPEARKITRRWRIGEAADLVGVSSQAIRDAEKAGRLPHPDMEIRGRVEQRVGYTIEQINHMRDVFGTRLRRAEDVFPPVIGVAAHKGGVYKTSVSVHLAQDLALKGLRVLLVEALWLQERQAQFRHSLPLQSFLLKPVQRILKSHLLLQTKTWATTCPIKYIPDATPAVSRESPDGGIRALQNFQRYTGIQHVHRIGMAERMWCDRNRERHTVSSSGGNRLPNPDRSAGYYGLFKDRKGGYPLEKDVGFMPQDVVRHLSSDEKSVYSTLTIPNVQQFIDEGNYTSGDNHTLRDPHYVEDKGHKYLVFEANTGTENGYQGEESLFNKAYYGGGTNFFRKESQKLQQSAKKRDAELANGALGIIELNNDYTLKKVMKPLITSNTVTDEIERANVFKMNGTWYLFTDSRGSKMTIDGINSNDIYMLGYVSNSLTGPYKPLNKTGLVLQMGLPPNDVTFTYSHFAVPQAEVMVSGQHCYSFAHRLLPGSVKMVQVWRGIPLTSIELLEDLENSSSAGGIAECFVQRSEDFDIYTLYCMNYPR

SEQ ID NO: 35300 - protein, 482 aa, Homo sapiens
  DOMAIN (377)..(420): 1 kw MIND INHIBITOR DIVISION CONTROL domain identified by eMATRIX, accession number DM01756B, p-value=4.822e-15, raw score of 22.91
  DOMAIN (342)..(456): ParA family ATPase domain identified by PFam, accession name ParA, E-value=2.7e-28, PFam score of 107.5
MKLMETLNQCINAGHEMTKAIAIAQFNDDSPEARKITRRWRIGEAADLVGVSSQAIRDAEKAGRLPHPDMEIRGRVEQRVGYTIEQINHMRDVFGTRLRRAEDVFPPVIGVAAHKGGVYKTSVSVHLAQDLALKGLRVLLVEGNDPQGTASMYHGWVPDLHIHAEDTLLPFYLGEKDDVTYAIKPTCWPGLDIIPSCLALHRIETEFMGKFDEDNNAGMVRVLQPFTSDEKKSVISTLTFPGKHLRRDKSLTTAQGCDKINNKTSPEPTSPDLALKGLRVLLVEGNDPQGTASMYHGWVPDLHIHAEDTLLPFYLGEKDDVTYAIKPTCWPGLDIIPSCLALHRIETELMGKFDEGKLPTDPHLMLRLAIETVAHDYDVIVIDSAPNLGIGTINVVCAADVLIVPTPAELFDYTSALQFFDMLRDLLKNVDLKGFEPDVRILLTKYSNSNGSQSPWMEEQIRDAWGSMVLKNVEPENGEVGK

SEQ ID NO: 35301 - protein, 133 aa, Homo sapiens
MKLMETLNQCINAGHEMTKAIAIAQFNDDSPEARKITRRWRIGEAADLVGVSSQAIRDAEKAGRLPHPDMEIRGRVEQRVGYTIEQINHMRDVFGTRLRRAEDVFPPVIGVAAHKGLALKGLRVLLVEVRHRV

SEQ ID NO: 35302 - protein, 458 aa, Homo sapiens
  DOMAIN (228)..(271): 1 kw MIND INHIBITOR DIVISION CONTROL domain identified by eMATRIX, accession number DM01756B, p-value=4.822e-15, raw score of 22.91
  DOMAIN (193)..(311): ParA family ATPase domain identified by PFam, accession name ParA, E-value=1.2e-21, PFam score of 85.3
MKLMETLNQCINAGHEMTKAIAIAQFNDDSPEARKITRRWRIGEAADLVGVSSQAIRDAEKAGRLPFPDMEIRGRVEQRVGYTIEQINHMRDVFGTRLRRAEDVFPPVIGVAAHKVSVHLAQDLALNGLRVLLVEGNDPQGTASMYHGWVPDLHIHAEDTLLPFYLGEKDDVTYAIKPTCWPGLDIIPSCLALHRIETELMGKFDEGKLPTDPHLMLRLAIETVAHDYDVIVIDSAPNLGIGTINVVCAADVLIVPTPAELFDYTSALQFFDMLRDLLKNVDLKGWQPDRQIPFHDVRFPPPVGYNKDINESDEVEMCPEFFPSGGFVVSLTSGVKPQTLAVSVTALKGSASGVVHFSRWVCGLAGFRSKAADLQRSSASLTSHWHSPRDFEAPSLRELIQTAAQQPRGLQRAPAAQRELIPDNQEEKRGSEKETETCYRGQRSHEEGTVVHMQDPAL

SEQ ID NO: 35303 - protein, 753 aa, Homo sapiens
  DOMAIN (577)..(606): kw REPLICATION REPB REPA INITIATION domain identified by eMATRIX, accession number DM00653A, p-value=7.207e-27, raw score of 20.40
  DOMAIN (240)..(353): ParA family ATPase domain identified by PFam, accession name ParA, E-value=2.2e-08, PFam score of 41.3
  misc_feature (1)...(753): Xaa = X or * as defined in Table 2
MKLMETLNQCINAGHEMTKAIAIAQFNDDSPEARKITRRWRIGEAADLVGVSSQAIRDAEKAGRLPHPDMEIRGRVEQRVGYTIEQINHMRDVFGTRLRRAEDVFPPVIGVAAHKGGVYKTSVSVHLAQDLALKGLRVLLVEVHKRWSXNDEGYRHCTVXXXHPEARKITRRWRIGEAADLVGVSSQAIRDAEKAGRLPHPDMEIRGRVEQRLVIQLNKLIICVMCLVRDCDVLKTYFHRXSGLLPIKVAFTKPHVSVHLAQDLALKGLRVLLVEEPPSAPNLGIGTINVVCAADVLIVPTPAELFDYTSALQFFDMLRDLLKNVDLKGFEPDVRILLTKYSNSNGSQSPWMEEQIRDAWGSMVLKNVVRETDEVGKAAPMVDSLIARVGVMARGNAITLPVCGRDVKFTLEVLRGDSVEKTSRCDNLKTCHTSHGSVMAETAVINHKKRKNSPRIVQSNDLTEAAYSLSRDQKRMLYLFVDQIRKSDGTLQEHDGICEIHVAKYAEIFGLTSAEASKDIRQALKSFAGKEVVFYRPEEDAGDEKGYESFPWFIKRAHSPSRGLYSVHINPYLIPFFIGLQNRFTQFRLSETKEITNPYAMRLYESLCQYHPLTIEKVMKPLITSNTVTDEIERANVFKMNGKWYLFTDSRGSKMTIDGINSNDIYMLGYVSNSLTGPYKPLNKTGLVLQMGLDPNDVTFTYSHFAVPQAKGNNVVITSYMTNRGFFEDKKATFAPSFLMNIKGNKTSDKLPH

SEQ ID NO: 35304 - protein, 582 aa, Homo sapiens
  DOMAIN (235)..(278): 1 kw MIND INHIBITOR DIVISION CONTROL domain identified by eMATRIX, accession number DM01756B, p-value=4.822e-15, raw score of 22.91
  DOMAIN (200)..(308): ParA family ATPase domain identified by PFam, accession name ParA, E-value=4.7e-22, PFam score of 86.7
  misc_feature (1)...(582): Xaa = X or * as defined in Table 2
MKLMETLNQCINAGHEMTKAIAIAQFNDDSPEARKITRRWRIGEAADLVGVSSQAIRDAEKAGRLPHPDMEIRGRVEQRVGYTIEQINHMRDVFGTRLRRAEDVFPPVIGVAAHKGGVYKTSVSVHLAQDLALKGLRVLLVEGNDPQGTASMYHGWVPDLHIHAEDTLLPFYLGEKDDVTYAIKPTCWPGLDIIPSCLALHRIETELMGKFDEGKLPTDPHLMLRLAIETVAHDYDVIVIDSAPNLGIGTINVVCAADVLIVPTPAELFDYTSALQFFDMLRDLLKNVDLKGFEPDGIGTINVVCAADVLIVPTPAELFDYTSALQFFDMLRDLLKNVDLKGFEPDVRALFSAGSGLGDPIEAQALIATYGRDRDPGRPLWLGSVKSNIGHTQAAAGVAGVIKMVMAMRHGQLPRTLHVESPSPEVDWSAGTVQLLTENTPWPRSGRVRRVGVSSFGISGTNAHVILEQPPGVPSQSAGPGSGSVVDVPVVPWMVSGKTPEALSAQATALMTYLDERPDVSSLDVGYSLALTRSALDERAVVLGSDVKLVVRCEALSAGHEASGLVTGSVGARGRIGFVFSX

SEQ ID NO: 35305 - protein, 789 aa, Homo sapiens
  DOMAIN (235)..(278): 1 kw MIND INHIBITOR DIVISION CONTROL domain identified by eMATRIX, accession number DM01756B, p-value=4.822e-15, raw score of 22.91
  DOMAIN (200)..(308): ParA family ATPase domain identified by PFam, accession name ParA, E-value=1.1e-23, PFam score of 92.2
MKLMETLNQCINAGHEMTKAIAIAQFNDDSPEARKITRRWRIGEAADLVGVSSQAIRDAEKAGRLPHPDMEIRGRVEQRVGYTIEQINHMRDVFGTRLRRAEDVFPPVIGVAAHKGGVYKTSVSVHLAQDLALKGLRVLLVEGNDPQGTASMYHGWVPDLHIHAEDTLLPFYLGEKDDVTYAIKPTCWPGLDIIPSCLALHRIETELMGKFDEGKLPTDPHLMLRLAIETVAHDYDVIVIDSAPNLGIGTINVVCAADVLIVPTPAELFDYTSALQFFDMLRDLLKNVDLKGFEPDSIREDRNGRSQKTVHTEGDMNMNIKKIVKQATVLTFTTALLAGGATQAFAKENNQKAYKETYGVSHITRHDMLQIPKQQQNEKYQVPQFDQSTIKNIESAKGLDVWDSWPLQNADGTVAEYNGYHVVFALAGSPKDADDTSIYMFYQKVGDNSIDSWKNAGRVFKDSDKFDANDPILKDQTQEWSGSATFTSDGKIRLFYTDYSGKHYGKQSLTTAQVNVSKSDDTLKINGVEDHKTIFDGDGKTYQNVQQFIDEGNYTSGDNHTLRDPHYVEDKGHKYLVFEANTGTENGYQGEESLFNKAYYGGGTNFFRKESQKLQQSAKKRDAELANGALGIIELNNDYTLKKVMKPLITSNTVTDEIERANVFKMNGKWYLFTDSRGSKMTIDGINSNDIYMLGYVSNSLTGPYKPLNKTGLVLQMGLDPNDVTFTYSHFAVPQAKGNNVVITSYMTNRGFFEDKKATFAPSFLMNIKGNKTSVVKNSILEQGQLTVN

SEQ ID NO: 35306 - protein, 405 aa, Homo sapiens
  DOMAIN (346)..(375): kw REPLICATION REPB REPA INITIATION domain identified by eMATRIX, accession number DM00653A, p-value=1.857e-20, raw score of 20.40
  DOMAIN (330)..(372): Initiator RepB protein domain identified by PFam, accession name RepB_protein, E-value=0.011, PFam score of 12.0
MKLMETLNQCINAGHEMTKAIAIAQFNDDSPEARKITRRWRIGEAADLVGVSSQAIRDAEKAGRLPHPDMEIRGRVEQRVGYTIEQINHMRDVFGTRLRRAEDVFPPVIGVAAHKERNQNISRYISNRLARRECHDSPEEGTGNTRSKERLQGRLPSRGLTESQEHLLDTRKQFWFEDFKDGLGPILKCDNLKTCHTSHGSVMAETAVINHKKRKNSPRIVQSNDLTEAAYSLSRDQKRMLYLFVDQIRKSDGTLQEHDGICEIHVAKYAEIFGLTSAEASKDIRQALKSFAGKEVVFYRPEEDAGDEKGYESFPWFIKRAHSPSRGLYSVHINPYLIPFFIGLQNRFTQFRLSETKEITNPYAMRLYESLSASNYQRMPDFRRRFLQVWCYGDQQADFNAPLIH

SEQ ID NO: 35307 - protein, 314 aa, Homo sapiens
  DOMAIN (235)..(278): 1 kw MIND INHIBITOR DIVISION CONTROL domain identified by eMATRIX, accession number DM01756B, p-value=4.822e-15, raw score of 22.91
  DOMAIN (200)..(304): ParA family ATPase domain identified by PFam, accession name ParA, E-value=2.9e-22, PFam score of 87.4
MKLMETLNQCINAGHEMTKAIAIAQFNDDSPEARKITRRWRIGEAADLVGVSSQAIRDAEKAGRLPHPDMEIRGRVEQRVGYTIEQINHMRDVFGTRLRRAEDVFPPVIGVAAHKGGVYKTSVSVHLAQDLALKGLRVLLVEGNDPQGTASMYHGWVPDLHIHAEDTLLPFYLGEKDDVTYAIKPTCWPGLDIIPSCLALHRIETELMGKFDEGKLPTDPHLMLRLAIETVAHDYDVIVIDSAPNLGIGTINVVCAADVLIVPTPAELFDYTSALQFFDMLRDLLKNVDLKGQAPCMKLTMRSSSSSAPSPWML

SEQ ID NO: 35308 - protein, 524 aa, Homo sapiens
  DOMAIN (158)..(187): kw REPLICATION REPB REPA INITIATION domain identified by eMATRIX, accession number DM00653A, p-value=7.207e-27, raw score of 20.40
  DOMAIN (428)..(522): ParA family ATPase domain identified by PFam, accession name ParA, E-value=1.6e-18, PFam score of 74.9
CDNLKTCHTSHGSVMAETAVINHKKRKNSPRIVQSNDLTEAAYSLSRDQKRMLYLFVDQIRKSDGTLQEHDGICEIHVAKYAEIFGLTSAEASKDIRQALKSFAGKEVVFYRPEEDAGDEKGYESFPWFIKRAHSPSRGLYSVHINPYLIPFFIGLQNRFTQFRLSETKEITNPYAMRLYESLCQYRKPDGLSIVSLENRLDHRAVPAASKLPAYALTSAAASCRMFRMKLMETLNQCINAGHEMTKAIAIAQFNDDSPEARKITRRWRIGEAADLVGVSSQAIRDAEKAGRLPHPDMEIRGRVEQRVGYTIEQINHMRDVFGTRLRRAEDVFPPVIGVAAHKGGVYKTSVSVHLAQDLALKGLRVLLVEGNDPQGTASMYHGWVPDLHIHAEDTLLPFYLGEKDDVTYAIKPTCWPGLDIIPSCLALHRIETELMGKFDEGKLPTDPHLMLRLAIETVAHDYDVIVIDSAPNLGIGTINVVCAADVLIVPTPAELFDYTSALQFFDMLRDLLKNVDLKGFEPD

SEQ ID NO: 35309 - protein, 539 aa, Homo sapiens
  DOMAIN (235)..(278): 1 kw MIND INHIBITOR DIVISION CONTROL domain identified by eMATRIX, accession number DM01756B, p-value=4.822e-15, raw score of 22.91
  DOMAIN (200)..(312): ParA family ATPase domain identified by PFam, accession name ParA, E-value=1.4e-24, PFam score of 95.1
MKLMETLNQCINAGHEMTKAIAIAQFNDDSPEARKITRRWRIGEAADLVGVSSQAIRDAEKAGRLPHPDMEIRGRVEQRVGYTIEQINHMRDVFGTRLRRAEDVFPPVIGVAAHKGGVYKTSVSVHLAQDLALKGLRVLLVEGNDPQGTASMYHGWVPDLHIHAEDTLLPFYLGEKDDVTYAIKPTCWPGLDIIPSCLALHRIETELMGKFDEGKLPTDPHLMLRLAIETVAHDYDVIVIDSAPNLGIGTINVVCAADVLIVPTPAELFDYTSALQFFDMLRDLLKNVDLKGFEPDAQALIATYGRDRDPGRPLWLGSVKSNIGHTQAAAGVAGVIKMVMAMRHGQLPRTLHVESPSPEVDWSAGTVQLLTENTPWPRSGRVRRVGVSSFGISGTNAHVILEQPPGVPSQSAGPGSGSVVDVPVVPWMVSGKTPEALSAQATALMTYLDERPDVSSLDVGYSLALTRSALDERAVVLGSDVNVVVRCDTLSAGHEASAVGDRICGGWGPIGFVFSGHGGQWLGMGRGLYRAFPVFAAAL

SEQ ID NO: 35310 - protein, 183 aa, Homo sapiens
  DOMAIN (105)..(132): Mrp family proteins domain identified by eMATRIX, accession number BL01215A, p-value=1.102e-10, raw score of 9.75
MKLMETLNQCINAGHEMTKAIAIAQFSDDSPEARKITRRWRIGEAADLVGVSSQAIRDAEKAGRLPHPDMEIRGRVEQRVGYTIEQINHMRDVFGTRLRRAEDVFPPVIGVAAHKGGVYKTSISVHLAQDLALRGLRGLLVEDAKSTADLDTIKTPETLSWAGCQGRDSRRTPRTPQLQPCQD

SEQ ID NO: 35311 - protein, 750 aa, Homo sapiens
  DOMAIN (255)..(298): 1 kw MIND INHIBITOR DIVISION CONTROL domain identified by eMATRIX, accession number DM01756B, p-value=4.822e-15, raw score of 22.91
  DOMAIN (220)..(334): ParA family ATPase domain identified by PFam, accession name ParA, E-value=3.4e-26, PFam score of 100.5
MKLMETLNQCINAGHEMTKAIAIAQFNDDSPEARKITRRWRIGEAADLVGVSSQAIRDAEKAGRLPHPDMEIRGRVEQRVGYTIEQINHMRDVFGTRLRRAEDVFPPVIGVAAHKGGVYKTSVSVHLAQDLALKGLRVLLVEVSVHLAQDLALKGLRVLLVEGNDPQGTASMYHGWVPDLHIHAEDTLLPFYLGEKDDVTYAIKPTCWPGLDIIPSCLALHRIETELMGKFDEGKLPTDPHLMLRLAIETVAHDYDVIVIDSAPNLGIGTINVVCAADVLIVPTPAELFDYTSALQFFDMLRDLLKNVDLKGFEPDVRILLTKYSNIDGLLACRGCRDFADFGTTIKQDFRLLGQTSVDRLLQLSQGQAVKGNQLLPVSLVKRKTTLAPNTQTASPRALADSLMQLARQVSRLESGQVKLGACNKITFRTALLAGGATQAFAKENNQKAYKETYGVSHITRHDMLQIPKQQQNEKYQVPQFDQSTIKNIESAKGLDVWDSWPLQNADGTVAEYNGYHVVFALAGSPKDADDTSIYMFYQKVGDNSIDSWKNAGRVFKDSDKFDANDPILKDQTQEWSGSATFTSDGKIRLFYTDYSGKHYGKQSLTTAQVNVSKSDDTLKINGVEDHKTIFDGDGKTYQNVQQFIDEGNYTSGDNHTLRDPHYVEDKGHKYLVFEANTGTENGYQGEESLFNKAYYGGGTNFFRKESQKLQQSAKKRDAELANGALGIIELNNDYTLKKVMKPLITSNTE

SEQ ID NO: 35312 - protein, 1057 aa, Homo sapiens
  DOMAIN (171)..(200): kw REPLICATION REPB REPA INITIATION domain identified by eMATRIX, accession number DM00653A, p-value=7.207e-27, raw score of 20.40
  DOMAIN (492)..(606): ParA family ATPase domain identified by PFam, accession name ParA, E-value=2.7e-28, PFam score of 107.5
AFGADAPACFQALCVILMMSEAGDTRPTKVPEVEQELESPVGLLELTLQGPPRVDNSGCEIHSVLAFADTQGKELENWTAREHDGICEIHVAKYAEIFGLTSAEASKDIRQALKSFAGKEVVFYRPEEDAGDEKGYESFPWFIKRAHSPSRGLYSVHINPYLIPFFIGLQNRFTQFRLSETKEITNPYAMRLYESLCQYRKPDGSGIVSLKIDWIIERYQLPQSYQRMPDFRRRFLQVCVNEINSRTPMRLSYIEKKKGRQTTHIMLLTFGIVAEGMSPQEDPPMKLMETLNQCINAGHEMTKAIAIAQFNDDSPEARKITRRWRIGEAADLVGVSSQAIRDAEKAGRLPHPDMEIRGRVEQRVGYTIEQINHMRDVFGTRLRRAEDVFPPVIGVAAHKGGVYKTSVSVHLAQDLALKGLRVLLVEGLRVLLVEGNDPQGTASMYHGWVPDLHIHAEDTLLPFYLGEKDDVTYAIKPTCWPGLDIIPSCLALHRIETELMGKFDEGKLPTDPHLMLRLAIETVAHDYDVIVIDSAPNLGIGTINVVCAADVLIVPTPAELFDYTSALQFFDMLRDLLKNVDLKGFEPDVRILLTKYSNSNGSQSPWMEEQIRDAWGSMVLKNVVRETDEVGKGQIRMRTVFEQAIDQRSSTDTSLSTPAAPMVDSLIARVGVMARGNAITLPVCGRDVKFTLEVLRGDSVEKTSRVWSGNERDQELLTEDALDDLIPSFLLTGQQTPAFGRRVSGVIEIADGSRRRKAAALTESDYRLPDVDSLMRGDYRVLVGELDDEQMAALSRLGNDYRPTSAYERGQRYASRLQNEFAGNISALADAENISRKIITRCINTAKLPKSVVALFSHPGELSARSGDALQKAFTDKEELLKQQASNLHEQKKAGVIFEAEEVITLLTSVLKTSSASRTSLSSRHQFAPGATVLYKGDKMVLNLDSQAPCMKSNNALIVILGTVTLDAVGIGLVMPVLPGLLRDIVHSDSIASHYGVLLALYALMQFLCAPVLGALSDRFGRRPVLLASLLGATIDYAIMATTPVLWIYPLVNSPSC

SEQ ID NO: 35313 - protein, 806 aa, Homo sapiens
  DOMAIN (708)..(739): Galactose-1-phosphate uridyl transferase family 1 proteins domain identified by eMATRIX, accession number BL00117A, p-value= 5.083e-09, raw score of 15.79
ARCQRVPGRPVPDLLRCLPRATTPAPSPAPGLVVRRLAAPVPAAAPVPAAAPVPAAAPVPAAAPVPAAAPVPAAAPVPVAAPVPVAAPVPAAAPVPAAAPVPAAAPVPAAAPVPAAAPVPVAAPVPAAAPVPRFQSPNQTASTSDSPHIGQLPHQTVPISDSFHTGQSPHRTDSTPDSPHTGQLPHRTVPTPDELPHRTVPTPDSFHTRQSPHQTASTPDSPHIGQLPHQTVPISDSFHTRQSPHQTASTQDSPHTGQIPHRTVPTPDSFHTRQSPYRTASTPDSPHIGQLAHRTVPTPDSFHTGQSPHRTDSTPDSPHTRQLPHQTVPISDSFHTGQSPYRTASTPDSPHTRQLPHQTASTPDSPHTRQSPHRTVPTPDSSPHQTVSTPDSPHTRQLPHQTVPTPDSFHTRQSPHQTVPTPDSPHTRQLPHQTASTPDSPTPDSPHTGQSPHQFPHQTVPTADSPHTRQLPHQTVPTADSPTPDSFHTRHSPHQTASTPDSPHIGQLPHRTVPTPDSFHTRQSPHQTASTPDTPHTRQLPQQTVPTADSPTPDSFHTRQSPHQTVPTPDSPHTRQSPHRTVPTPDSFHTRQYPQRTVPTQTASTPGSPHTKQSPHQTVPTPDCPHTGQSPYQTVSTPDSPHTRHSPHQTASTPDSPHIGQLPHQTASTLDSPHIGRHPRQMAPTPESPHARQLPCQMAPTPDSPTLDGPHIKHLPLQTPSTLDSPHTRQLPCQTATTLDGIHARQLPSWMSPTSDSPHARWPPRCTVPTVDGLHARWHQCFRQSDPMDREDHTGSETLTKPKMTL

SEQ ID NO: 35314 - protein, 296 aa, Homo sapiens
  DOMAIN (112)..(133): PROTEIN TYROSINE PHOSPHATASE SIGNATURE domain identified by eMATRIX, accession number PR00700B, p-value=3.032e-18, raw score of 16.80
  DOMAIN (75)..(244): Protein-tyrosine phosphatase domain identified by PFam, accession name Y_phosphatase, E-value=2.9e-31, PFam score of 117.3
METSRLYNKSLHAAVDDKGENNNGKSKVAHVMICCQELKYDVGGGERYDSLTDLVEHYKKNPMMETWGTVLQLTVVLHDGDPNEPVSDDINANIIMPKFETKCNNSKPKKSYIATQGCLQNMVNDFWRMVGQGNMERMVWQYHFWTWPDHGVPIDPRGVLDFLEEVHHKQERIMHARPVVVHGSAGIGRTGTYVVIDILTDINREKGVDCNIDVLKTIQMVQSQKSGMVQTETQYRFIYMAVQHYTETLQRRIEEEQKSKRKGHEYTNIKYSLADQTSGDQSPPPRLVLQLHAVQK

SEQ ID NO: 35315 - protein, 611 aa, Homo sapiens
  DOMAIN (341)..(362): PROTEIN TYROSINE PHOSPHATASE SIGNATURE domain identified by eMATRIX, accession number PR00700B, p-value=4.682e-22, raw score of 16.80
  DOMAIN (287)..(538): Protein-tyrosine phosphatase domain identified by PFam, accession name Y_phosphatase, E-value=2.4e-135, PFam score of 463.0
ARSGSVAEPEGGRNMTSRRWFHPNITGVEAENLLLTRGVDGSFLARPSKSNPGDFTLSVRRNGAVTHIKIQNTGDYYDLYGGEKFATLAELVQYYMEHHGQLKEKNGDVIELKYPLNCADPTSERWFHGHLSGKEAEKLLTEKGKHGSFLVRESQSHPGDFVLSVRTGDDKGESNDGKSKVTHVMIRCQELKYDVGGGERFDSLTDLVEHYKKNPMVETLGTVLQLKQPLNTTRINAAEIESRVRELSKLAETTDKVKQGFWEEFETLQQQECKLLYSRKEGQRQENKNKNRYKNILPFDHTRVVLHDGDPNEPVSDYINANIIMPEFETKCNNSKPKKSYIATQGCLQNTVNDFWRMVFQENSRVIVMTTKEVERGKSKCVKYWPDEYALKEYGVMRVRNVKESAAHDYTLRELKLSKVGQALLQGNTERTVWQYHFRTWPDHGVPSDPGGVLDFLEEVHHKQESIMDAGPVVVHCSAGIGRTGTFIVIDILIDIIREKGVDCDIDVPKTIQMVRSQRSGMVQTEAQYRFIYMAVQHYIETLQRRIEEEQKSKRKGHEYTNIKYSLADQTSGDQSPLPPCTPTPPCAEMREDSARVYENVGLMQQQKSFR

SEQ ID NO: 35316 - protein, 718 aa, Homo sapiens
  DOMAIN (84)..(133): Matrix protein (MA) p15. domain identified by eMATRIX, accession number PF01140C, p-value=1.364e-09, raw score of 15.21
MIIIIIITIISITIIILITTIIPIPIILTILTIITIIIITITIILTITIITIILTITIIITVILTPIILTITIITIILTITSSSSSPSPPPPSSSSSPPSSPSFSPPPSSSSSSPSSPSFSPPPSSSSPPSSPSFSPPLSSSSSSLSISSSPPPPLYLLIMSHTVITGYYVLITNDYSRDSLPLLLTPIWPAGSACEGWVPGYCLMGDGKLVPRREGQGGEEKKEHSEERGERGKTAVLDSLAEKTIRYTSSGGLGESDPAEVSFKLRLEDKKQELLLPAPRSNPGSAGAIASRTTLALVLRLQPECTQSPTTPEFLNSLGPEAATPFVFMRSVLRHFFHTYPGLQRAQGPLEVKAAGLPRPFLNTHIDLVYAQLCAFPHVHGFFLEKRWFKGFRSETSVSSSSSGPAAPATLGRSLPCEVESRNIQPSVSLRRPILTACSRQLRNDSCGDGISKDVHVLLNLPKARQKEASYSQTFWKVPKRCEQQERIDSSGAVRRRRPGSCSLDVKEVNLKAGLWVLTKNWPPRLQLRFVLGADPTHDRDMWTGRTVAEVPTEPSPTLSDCHSSAGYAASQHSPGPEEHTQLPPVCPHETVFIPQYRTCHTVIQGFLVSPLRDGDSARVSAHLRHERESETRGPHFIHPNSTLQSTLLKINTRERFTGIRRTAGSPGGSEPPSRVGSETPGKAATFLSNTVQGIRSLILVLHENQSALGPQHICF

SEQ ID NO: 35317 - protein, 126 aa, Homo sapiens
  DOMAIN (74)..(121): kw TRANSCRIPTASE REVERSE II ORF2 domain identified by eMATRIX, accession number DM01354V, p-value=7.353e-22, raw score of 12.97
MSIKGTYLKVIKAIYDKPTASSILNGENLKAFLLRTGTRQGCPLYKINVYKSVALLYTTNDQGENQINNSTPYTTAPRKIKYIGIYLTKEVKDLYKENYKTLLKEVIDDTRWKHIPCSWMGRINIV

SEQ ID NO: 35318 - protein, 130 aa, Homo sapiens
  DOMAIN (74)..(96): Acyltransferases ChoActase / COT / CPT family proteins domain identified by eMATRIX, accession number BL00439B, p-value=2.174e- 15, raw score of 16.82
ASNYVSDWWEEFVYLRSRNPLMVNSNYYMMAFLYVTPTPLQAARAGNAVHALLLYRHRLSRQEIPPTLLMGMRPLCSDQYEKIFITTRIPGVQKDYIRHLHDRQHGAVFHRGRFFRIGDPLPKQPCMRPL

SEQ ID NO: 35319 - protein, 521 aa, Homo sapiens
  DOMAIN (445)..(498): Acyltransferases ChoActase / COT / CPT family proteins domain identified by eMATRIX, accession number BL00439F, p-value=9.000e- 40, raw score of 26.22
  DOMAIN (16)..(521): Carnitate acyltransferase domain identified by PFam, accession name Carn_acyltransf, E-value=2.1e-53, PFam score of 190.8
ETDFAFVGQAGVQWCDLSSPQPLPPWVQAILLPQPPRQGCWSGIPKWSGISEDVQVWKNCKLDLAAATGKNCLGQGEEALLTQMRTGNQREVSDWWEEFVYLRSRNPLMVNSNYYMMDFLYVTPTPLQAARAGNAVHALLLYRHRLNRQEIPPVRGPQWVRDGGVVLWPLGHVGPGRQLTAHGFLQTLLMGMRPLCSAQYEKIFNTTRIPGVQKDYIRHLHDSQHVAVFHRGRFFRMGTHSRNSLLSPRALEQQFQRILDDPSPACPHEEHLAALTAAPRGTWAQVRTSLKTQAAEALEAVEGAAFFVSLDAEPAGLTLEDPAASLDAYAHALLAGRGHDRWFDKSFTLIVFSNGKLGLSVEHSWADCPISGHMWEFTLATECFQLGYSTDGHCKGHPDPTLPQPQRLQWALPDHIHSSISLALRGAKILSENVDCHVVPFSLFGKSFIRRCHLSLDSFIQIALQLAHFRDRGQFCLTYESAMTRLFLEGRTETVRSCTREACNFVRAMEDKKKTVGAALA

SEQ ID NO: 35320 - protein, 340 aa, Homo sapiens
  DOMAIN (53)..(66): PROTEIN ZINC-FINGER METAL-BINDI domain identified by eMATRIX, accession number PD00066, p-value=8.200e-16, raw score of 13.92
  DOMAIN (35)..(340): Zinc finger, C2H2 type domain identified by PFam, accession name zf-C2H2, E-value=1.9e-85, PFam score of 297.2
MPAKSPGQDVLGTDNIKIDVFKQTNQKSHTGEKPYECPECGKAFSEKSRLRKHQRTHTGEKPYKCDGCDKAFSAKSGLRIHQRTHTGEKPFECHECGKSFNYKSILIVHQRTHTGEKPFECNECGKSFSHMSGLRNHRRTHTGERPYKCDECGKAFKLKSGLRKHHRTHTGEKPYKCNQCGKAFGQKSQLRGHHRIHSGEKPYKCNHCGEAFSQKSNLRVHHRTHTGEKPYQCEECGKTFRQKSNLRGHQRTHSGEKPYECNECGKAFSEKSVLRKHQRTHTGEKPYNCNQCGEAFSQKSNLRVHQRTHTGEKPYKCDKCGRTFSQKSSLREHQKAHPGD

SEQ ID NO: 35321 - protein, 102 aa, Homo sapiens
  misc_feature (1)...(102): Xaa = X or * as defined in Table 2
IPAAATCMGSLLGGXETPGLWARRSVKSRGLFPGLPSPSRASVRSLLLLPAWAAFLEGIVDTRPTAWRAFPWTLFLSVFCQFLDFPETSLDSQKLSLDTPSF

SEQ ID NO: 35322 - protein, 265 aa, Homo sapiens
PEPKPAAVAPPPESPLPAGDSEGCLQPGHLLPASPRLPRPRQAASLAHRPEKSAPGADCPSGRRGRPWTCGGLSGPAAAPRPCPLAPAFAPAFLALGAQRGPGPEQGGHERQAERPGRRSRRTRAYSARIYLPVAAEWPMGPGPEPGAGGRRRGEVPGPGAQRSPARRRRGGPAAVSSGGRGVGGLRGAVLFQHPEQQQRPVGLAGLGAQQPAHVWRYGPLSTPPALGPPAAARGPGRRLFLPFSFSPSAGAPGAASRPSPRRSP

SEQ ID NO: 35323 - protein, 138 aa, Homo sapiens
MMNVPGGGAAAVMMTGYNNGRCPRNSLYSDCIIEEKTVVLQKKDNEGFGFVLRGAKADTPIEEFTPTPAFPALQYLESVDEGNIPCGSESLLTRSLLHLQHAAQFREIKKPAQGPPGRSESKLTPKLVSFALCLSDAP

SEQ ID NO: 35324 - protein, 67 aa, Homo sapiens
MTGYNNGRCPRNSLYSDCIIEEKTVVLQKKDNEGFGFVLRGAKADTPIEEFTPTPAFPALQYLGVRG

SEQ ID NO: 35325 - protein, 187 aa, Homo sapiens
  DOMAIN (30)..(60): kw TRANSCRIPTASE REVERSE II ORF2 domain identified by eMATRIX, accession number DM01354R, p-value=1.491e-26, raw score of 8.50
  DOMAIN (1)..(187): Reverse transcriptase domain identified by PFam, accession name rvt, E-value=1.8e-05, PFam score of 8.0
MDPNHEEIPDLPEKEFRRVKSKNHMTISIDAEKAFDNIQHRFMIKTLSKIGIQGTHFNIIKAIYDKPTASIILNGENLKAFPLRTGTSIVLEVLARAIRREKEIKGIQIGKEEVKLLLFADDMIVYLENPKDSYRKLLEQIKEFSKVSRYKINVQKSIALLYANSDQAENQINNPTSFTIAAKNKIK

SEQ ID NO: 35326 - protein, 98 aa, Homo sapiens; identical to SEQ ID NO: 33998

SEQ ID NO: 35327 - protein, 280 aa, Homo sapiens
  DOMAIN (208)..(273): Integrase core domain identified by PFam, accession name rve, E-value=7.6e-07, PFam score of 27.7
  misc_feature (1)...(280): Xaa = X or * as defined in Table 2
EFRMDPAIALVLALSLTVPKLTVPDSPLRLYRSFCTSACTSNLVVHFAXKEKWPDVXLYTDSWAVANGLAGWSGTWKKHDWKIDDNEIWGRGMWIDLSEWSKTVKIFVSHESAHHITXKSSAEEDFNNQVDRMIHSVDTTRPLSPATPVITQWAHEQSGHGDRDGGYAWAQQHGLPLTKADLAMVTAECPICQQQRPTLSPXYGTIPRGDQPATWWQVDYIGPLSSWKGQRFVLTGIDTSGYEFAYPARSSANSTIRGLMECLIHHHGIPHSIASNQLYS

SEQ ID NO: 35328 - protein, 5081 aa, Homo sapiens
  DOMAIN (811)..(833): Domain in SPla and the RYanodine Receptor domain identified by eMATRIX, accession number PF00622B, p-value=5.821e-14, raw score of 21.00
  DOMAIN (44)..(689): Calcium channel extracellular region domain identified by PFam, accession name RYDR_ITPR, E-value=0, PFam score of 1582.7
LPRGCLWCLQRSPTPARPQPSRPARSPLPLFPDLRPWASDLDIMGDAEGEDEVQFLRTDDEVVLQCSATVLKEQLKLCLAAEGFGNRLCFLEPTSNAQNVPPDLAICCFVLEQSLSVRALQEMLANTVEAGVESSQGGGHRTLLYGHAILLRHAHSRMYLSCLTTSRSMTDKLAFDVGLQEDATGEACWWTMHPASKQRSEGEKVRVGDDIILVSVSSERYLHLSTASGELQVDASFMQTLWNMNPICSRCEEGFVTGGHVLRLFHGHMDECLTISPADSDDQRRLVYYEGGAVCTHARSLWRLEPLRISWSGSHLRWGQPLRVRHVTTGQYLALTEDQGLVVVDASKAHTKATSFCFRISKEKLDVAPKRDVEGMGPPEIKYGESLCFVQHVASGLWLTYAAPDPKALRLGVLKKKAMLHQEGHMDDALSLTRCQQEESQAARMIHSTNGLYNQFIKSLDSFSGKPRGSGPPAGTALPIEGVILSLQDLIIYFEPPSEDLQHEEKQSKLRSLRNRQSLFQEEGMLSMVLNCIDRLNVYTTAAHFAEFAGEEAAESWKEIVNLLYELLASLIRGNRSNCALFSTNLDWLVSKLDRLEASSGILEVLYCVLIESPEVLNIIQENHIKSIISLLDKHGRNHKVLDVLCSLCVCNGVAVRSNQDLITENLLPGRELLLQTNLINYVTSIRPNIFVGRAEGTTQYSKWYFEVMVDEVTPFLTAQATHLRVGWALTEGYTPYPGAGEGWGGNGVGDDLYSYGFDGLHLWTGHVARPVTSPGQHLLAPEDVISCCLDLSVPSISFRINGCPVQGVFESFNLDGLFFPVVSFSAGVKVRFLLGGRHGEFKFLPPPGYAPCHEAVLPRERLHLEPIKEYRREGPRGPHLVGPSRCLSHTDFVPCPVDTVQIVLPPHLERIREKLAENIHELWALTRIEQGWTYGPVRDDNKRLHPCLVDFHSLPEPERNYNLQMSGETLKTLLALGCHVGMADEKAEDNLKKTKLPKTYMMSNGYKPAPLDLSHVRLTPAQTTLVDRLAENGHNVWARDRVGQGWSYSAVQDIPARRNPRLVPYRLLDEATKRSNRDSLCQAVRTLLGYGYNIEPPDQEPSQVENQSRCDRVRIFRAEKSYTVQSGRWYFEFEAVTTGEMRVGWARPELRPDVELGADELAYVFNGHRGQRWHLGSEPFGRPWQPGDVVGCMIDLTENTIIFTLNGEVLMSDSGSETAFREIEIGDGFLPVCSLGPGQVGHLNLGQDVSSLRFFAICGLQEGFEPFAINMQRPVTTWFSKGLPQFEPVPLEHPHYEVSRVDGTVDTPPCLRLTHRTWGSQNSLVEMLFLRLSLPVQFHQHFRCTAGATPLAPPGLQPPAEDEARAAEPDPDYENLRRSAGGWSEAENGKEGTAKEGAPGGTPQAGGEAQPARAENEKDATTEKNKKRGFLFKAKKVAMMTQPPATPTLPRLPHDVVPADNRDDPEIILNTTTYYYSVRVFAGQEPSCVWAGWVTPDYHQHDMSFDLSKVRVVTVTMGDEQGNVHSSLKCSNCYMVWGGDFVSPGQQGRISHTDLVIGCLVDLATGLMTFTANGKESNTFFQVEPNTKLFPAVFVLPTHQNVIQFELGKQKNIMPLSAAMFQSERKNPAPQCPPRLEMQMLMPVSWSRMPNHFLQVETRRAGERLGWAVQCQEPLTMMALHIPEENRCMDILELSERLDLQRFHSHTLRLYRAVCALGNNRVAHALCSHVDQAQLLHALEDAHLPGPLRAGYYDLLISIHLESACRSRRSMLSEYIVPLTPETRAITLFPPGRSTENGHPRHGLPGVGVTTSLRPPHHFSPPCFVAALPAAGAAEAPARLSPAIPLEALRDKALRMLGEAVRDGGQHARDPVGASVEFQFVPVLKLVSTLLVMGIFGDEDVKQILKMIEPEVFTEEEEEEDEEEEGEEEDEEEKEEDEEETAQEKEDEEKEEEEAAEGEKEEGLEEGLLQMKLPESVKLQMCHLLEYFCDQELQHRVESLAAFAERYVDKLQANQRSRYGLLIKAFSMTAAETARRTREFRSPPQEQINMLLQFKDGTDEEDCPLPEEIRQDLLDFHQDLLAHCGIQLDGEEEEPEEETTLGSRLMSLLEKVRLVKKKEEKPEEERSAEESKPRSLQELVSHMVVRWAQEDFVQSPELVRAMFSLLHRQYDGLGELLRALPRAYTISPSSVEDTMSLLECLGQIRSLLIVQMGPQEENLMIQSIGNIMNNKVFYQHPNLMRALGMHETVMEVMVNVLGGGESKEIRFPKMVTSCCRFLCYFCRISRQNQRSMFDHLSYLLENSGIGLGMQGSTPLDVAAASVIDNNELALALQEQDLEKVVSYLAGCGLQSCPMLVAKGYPDIGWNPCGGERYLDFLRFAVFVNGESVEENANVVVRLLIRKPECFGPALRGEGGSGLLAAIEEAIRISEDPARDGPGIRRDRRREHFGEEPPEENRVHLGHAIMSFYAALIDLLGRCAPEMHLIQAGKGEALRIRAILRSLVPLEDLVGIISLPLQIPTLGKDGALVQPKMSASFVPDHKASMVLFLDRVYGIENQDFLLHVLDVGFLPDMRAAASLDTATFSTTEMALAVNRYLCLAVLPLITKCAPLFAGTEHRAIMVDSMLHTVYRLSRGRSLTKAQRDVIEDCLMSLCRYIRPSMLQHLLRRLVFDVPILNEFAKMPLKLLTNHYERCWKYYCLPTGWANFGVTSEEELHLTRKLFWGIFDSLAHKKYDPELYRMAMPCLCAIAGALPPDYVDASYSSKAEKKATVDAEGNFDPRPVETLNVIIPEKLDSFINKFAEYTHEKWAFDKIQNNWSYGENIDEELKTHPMLRPYKTFSEKDKEIYRWPIKESLKAMIAWEWTIEKAREGEEEKTEKKKTRKISQSAQTYDPREGYNPQPPDLSAVTLSRELQAMAEQLAENYHNTWGRKKKQELEAKGGGTHPLLVPYDTLTAKEKARDREKAQELLKFLQMNGYAVTRGLKDMELDSSSIEKRFAFGFLQQLLRWMDISQEFIAHLEAVVSSGRVEKSPHEQEIKFFAKILLPLINQYFTNHCLYFLSTPAKVLGSGGHASNKEKEMITSLFCKLAALVRHRVSLFGTDAPAVVNCLHILARSLDARTVMKSGPEIVKAGLRSFFESASEDIEKMVENLRLGKVSQARTQVKGVGQNLTYTTVALLPVLTTLFQHIAQHQFGDDVILDDVQVSCYRTLCSIYSLGTTKNTYVEKLRPALGECLARLAAAMPVAFLEPQLNEYNACSVYTTKSPRERAILGLPNSVEEMCPDIPVLERLMADIGGLAESGARYTEMPHVIEITLPMLCSYLPRWWERGPEAPPSALPAGAPPPCTAVTSDHLNSLLGNILRIIVNNLGIDEASWMKRLAVFAQPIVSRARPELLQSHFIPTIGRLRKRAGKVVSEEEQLRLEAKAEAQEGELLVRDEFSVLCRDLYALYPLLIRYVDNNRAQWLTEPNPSAEELFRMVGEIFIYWSKSHNFKREEQNFVVQNEINNMSFLTADNKSKMAKAGDIQSGGSDQERTKKKRRGDRYSVQTSLIVATLKKMLPIGLNMCAPTDQDLITLAKTRYALKDTDEEVREFLHNNLHLQGKVEGSPSLRWQMALYRGVPGREEDADDPEKIVRRVQEVSAVLYYLDQTEHPYKSKKAVWHKLLSKQRRRAVVACFRMTPLYNLPTHRACNMFLESYKAAWILTEDHSFEDRMIDDLSKAGEQEEEEEEVEEKKPDPLHQLVLHFSRTALTEKSKLDEDYLYMAYADIMAKSCHLEEGGENGEAEEEVEVSFEEKQMEKQRLLYQQARLHTRGAAEMVLQMISACKGETGAMVSSTLKLGISILNGGNAEVQQKMLDYLKDKKEVGFFQSIQALMQTCSVLDLNAFERQNKAEGLGMVNEDGTVINRQNGEKVMADDEFTQDLFRFLQLLCEGHNNDFQNYLRTQTGNTTTINIIICTVDYLLRLQESISDFYWYYSGKDVIEEQGKRNFSKAMSVAKQVFNSLTEYIQGPCTGNQQSLAHSRLWDAVVGFLHVFAHMMMKLAQDSSQIELLKELLDLQKDMVVMLLSLLEGNVVNGMIARQMVDMLVESSSNVEMILKFFDMFLKLKDIVGSEAFQDYVTDPRGLISKKDFQKAMDSQKQFSGPEIQFLLSCSEADENEMINCEEFANRFQEPARDIGFNVAVLLTNLSEHVPHDPRLHNFLELAESILEYFRPYLGRIEIMGASRRIERIYFEISETNRAQWEMPQVKESKRQFIFDVVNEGGEAEKMELFVSFCEDTIFEMQIAAQISEPEGEPETDEDEGAGAAEAGAEGAEEGAAGLEGTAATAAAGATARVVAAAGRALRGLSYRSLRRRVRRLRRLTAREAATAVAALLWAAVTRAGAAGAGAAAGALGLLWGSLFGGGLVEGAKKVTVTELLAGMPDPTSDEVHGEQPAGPGGDADGEGASEGAGDAAEGAGDEEEAVHEAGPGGADGAVAVTDGGPFRPEGAGGLGDMGDTTPAEPPTPEGSPILKRKLGVDGVEEELPPEPEPEPEPELEPEKADAENGEKEEVPEPTPEPPKKQAPPSPPPKKEEAGGEFWGELEVQRVKFLNYLSRNFYTLRFLALFLAFAINFILLFYKVSDSPPGEDDMEGSAAGDVSGAGSGGSSGWGLGAGEEAEGDEDENMVYYFLEESTGYMEPALRCLSLLHTLVAFLCIIGYNCLKVPLVIFKREKELARKLEFDGLYITEQPEDDDVKGQWDRLVLNTPSFPSNYWDKFVKRKVLDKHGDIYGRERIAELLGMDLATLEITAHNERKPNPPPGLLTWLMSIDVKYQIWKFGVIFTDNSFLYLGWYMVMSLLGHYNNFFFAAHLLDIAMGVKTLRTILSSVTHNGKQLVMTVGLLAVVVYLYTVVAFNFFRKFYNKSEDEDEPDMKCDDMMTCYLFHMYVGVRAGGGIGDEIEDPAGDEYELYRVVFDITFFFFVIVILLAIIQGLIIDAFGELRDQQEQVKEDMETKCFICGIGSDYFDTTPHGFETHTLEEHNLANYMFFLMYLINKDETEHTGQESYVWKMYQERCWDFFPAGDCFRKQYEDQLS

SEQ ID NO: 35329 - protein, 323 aa, Homo sapiens
  DOMAIN (181)..(322): RyR domain identified by PFam, accession name RyR, E-value= 2.1e-59, PFam score of 210.8
MALALNRYLCLAVLPLITKCAPLFAGTEHRAIMVDSMLHTVYRLSRGRSLTKAQRDVIEDCLMSLCRLLRRLVFDVPILNEFAKMPLKLLTNHYERCWKYYCLPTGWANFGVTSEEELHLTRKLFWGIFDSLAHKKYDPELYRMAMPCLCAIAGALPPDYVDASYSSKAEKKATVDAEGNFDPRPVETLNVIIPEKLDSFINKFAEYTHEKWAFDKDKEIYRWPIKESLKAMIAWEWTIEKAREDLDPREGYNPQPPDLSAVTLSRELQAMAEQLAENYHNTWGRKKKQELEAKGGGTHPLLVPYDTLTAKEKARDREKAQSY

SEQ ID NO: 35330 - protein, 68 aa, Homo sapiens
HLVNPISWALCESNTASLSPSIKWTTSLPKPRNPLEHPLPLHEEARSLSPSFLLPIKLYALKPKKKKK

SEQ ID NO: 35331 - protein, 206 aa, Homo sapiens
GAPRSLSEKERQLMGMINQLSSFREQLLHAHYEQKKLAASQIEKQRQHMKLGKQQQEQIARQQQRLIQQQHKINLLQQQIQQLYAAQLAAMQVSPGGKLPGIPQGNLGAAVSPTSIHTDKSTNSPPPKSKTCCLLLWEDEHSASIPEVTNQQIHLHLASSITDHGGKVIWERCLEESGKGVTGFPDWSPRWGRIPPEGSKEGFTKE

SEQ ID NO: 35332 - protein, 170 aa, Homo sapiens
  DOMAIN (34)..(47): PROTEIN ZINC-FINGER METAL-BINDI domain identified by eMATRIX, accession number PD00066, p-value=9.000e-13, raw score of 13.92
  DOMAIN (16)..(66): Zinc finger, C2H2 type domain identified by PFam, accession name zf-C2H2, E-value=2.9e-10, PFam score of 47.5
EEALKKKRKPQKPGKYICQYCSRPCAKPSVLQKHIRSHTGERPYPCGPCGFSFKTKSNLYKHRKSHAHRIKAGLASGMGGEMYPHGLEMERIPGEEFEEPTEGESTDSEEETSATSGHPAELSPRPKQPLLSSGLYSSGSHSSSHERCSLSQSSTAQSLEDPPLYAAALE

SEQ ID NO: 35333 - protein, 214 aa, Homo sapiens
  DOMAIN (59)..(69): C2H2-TYPE ZINC FINGER SIGNATURE domain identified by eMATRIX, accession number PR00048B, p-value=1.563e-10, raw score of 6.02
  DOMAIN (44)..(66): Zinc finger, C2H2 type domain identified by PFam, accession name zf-C2H2, E-value=0.0006, PFam score of 26.5
MHAQTYAHTDTRAQPCTSMEKQVSLKPTEEAHKKERKPQKPGKYICQYCSRPCAKPSVLQKHIRSHTGYGCEMYPHGLEMERIPGEEFEEPTEGESTDSEEETSATSGHPAELSPRPKQPLLSSGLYSSGSHSSSHERCSLSQSSTAQSLEDPPPFVEPSSEHPLSHKPEDTHTIKQKLALRLSERKKHQVIDRLGSGILAGLSWQLLPQGEAL

SEQ ID NO: 35334 - protein, 227 aa, Homo sapiens
TLNRRQGCCLGSWLTRSNGILLFEISRPTYLPILLILFLVKRHKLKMSVLNMVVRHDPGSTESAKAKEELIFRCRSRHFRASPLFSQHAAADKHKFQRFLTADMALAVTVYAPTTFPPSSLLLFKQKSNGMHNLIATGHLLLVDPNRMVIKRVVLSDPPFKICTKMAVVCYMFFNREDVQWFKPVELRTKWSRRGHIQEPSGTHGRMKCSFDRKLKSQNTELMNLYK

SEQ ID NO: 35335 - protein, 283 aa, Homo sapiens
EKAQALEDLAGFKDPAPGHTEESMTHDKTTKIPCKSPPELVDTATSSKKWPRACGQKVEVKEELLAVGKLTQTSGETTHTNKEPEGEGKGMKAFKQPAKQKLDPENVTGSRRLPRVPKEKAQPLEDLASFQELSQTPGHTEELANGADSFTSAPKQAPDSGKPLKISRRVLQAPKVEPVGDLVGTRDPVKSQSKSNTSLPPLPFKRGCGKDGSVTGTKRPHCMPAPEEIIEELPASKKQRVVAPRVRGKSPEPLVIMKRSLRTSAKRIEPAEDLNSNNMKTNN

SEQ ID NO: 35336 - protein, 360 aa, Homo sapiens
IRHEEESMTDDKTTIIPCKSSPELEDTATSSKRRPRTRAQKVEVKEELLAVGKLTQTSGESTHTDKEPVGEGKGTKAFKQPAKRKLDAEDVIGSRRQPRAPKEKAQPLEDLASFQELSQTPGHTEELANGAADSFTSAPKQTPDSGKPLKISRRVLRAPKVEPVGDVVSTRDPVKSQSKSNTSLPPLPFKRGGGKDGSVTGTKRLRCMPAPEEIVEELPTSKKQRVAPRARGKSSEPVVIMKRSLRTSAKRIEPAEELNSNDMKTNKEEHKLQDSVPENKGISLRSRRQNKTEAEQQITEVFVLAERIEINRNEKKPMKTSPEMDIQNPDDGARKPIPRDKVTENKRCLRSARQNESSQP

SEQ ID NO: 35337 - protein, 153 aa, Homo sapiens
  DOMAIN (100)..(131): ENV polyprotein (coat polyprotein) domain identified by PFam, accession name ENV_polyprotein, E-value=0.00064, PFam score of 15.1
MAKPWRALCILLRSLDSFLQLSASLTCFGFMHNTYKNRPWGVLRSSTERSPRKGTAGDMRAGGRFNAPLIGQDLLFKEHFASKALDTCTNIARSAKTQGGPVAAILLLLAFGPCIFNLRVKFVSSRIKAIKLQMRLTIYRGPLDRPAGPSTGL

SEQ ID NO: 35338 - protein, 229 aa, Homo sapiens
  DOMAIN (155)..(200): kw TRANSCRIPTASE REVERSE II ORF2 domain identified by eMATRIX, accession number DM01354N, p-value=1.000e-40, raw score of 13.17
MSNNGLDIQDKPPAPPMRNTSTMIGAGSKDAGTLNHGSKPLPPNPEEKKKKDRFYRSILPGDKKLEKQEQTHSKASRRQEITKIRAELKEIETQKTLQKINESRSWFFERINKIDRPLARLIKKKREKNQIDAIKNDKGEITTDPTEIQTTIREYYKHLYANQLENLEEMDKFLDTYILPRLNQEEAESLNRPITGSEIEAIINSLPTKKSPGPDGFTAELYQRYKEEM

SEQ ID NO: 35339 - protein, 74 aa, Homo sapiens
  misc_feature (1)...(74): Xaa = X or * as defined in Table 2
MEACLSLTVPNDSLVMILKAHAAIRENPVYEKKPKKEVKKKRWNRPKMSLAQKKDRVAQKKASFLRAXERAAES

SEQ ID NO: 35340 - protein, 126 aa, Homo sapiens
  DOMAIN (40)..(61): RIBOSOMAL PROTEIN L5 SIGNATURE domain identified by eMATRIX, accession number PR00058C, p-value=2.286e-27, raw score of 7.38
  DOMAIN (3)..(90): Ribosomal L18p/L5e family domain identified by PFam, accession name Ribosomal_L18p, E-value=2.3e-07, PFam score of 32.5
PHPNYRMIVRVTNRDIICQIAYARIEGDMIVCAAYAHELPKYGVKVGLTNYAAAYCTGLLLARRMEEMYKKAHAAIRENPVYEKKPKKEVKKKRWNRPKMSLAQKKDRVAQKKASFLRAQERAAES

SEQ ID NO: 35341 - protein, 23 aa, Homo sapiens
MEEMYKKAHAAILENPVYEKKPK

SEQ ID NO: 35342 - protein, 326 aa, Homo sapiens
  DOMAIN (43)..(63): RIBOSOMAL PROTEIN L5 SIGNATURE domain identified by eMATRIX, accession number PR00058B, p-value=1.529e-27, raw score of 8.75
  DOMAIN (26)..(184): Ribosomal L18p/L5e family domain identified by PFam, accession name Ribosomal_L18p, E-value=3.5e-19, PFam score of 77.1
  misc_feature (1)...(326): Xaa = X or * as defined in Table 2
MGFVKVVKNKAYFKRYQVKFRRRREGKTDYYARKRLVIQDKNKYNTPKYRMIVRVTNRDIICQIAYARIEGIMIVCAAYAPELPKYGVKVGLTNYAAAYCTGLLAGPAGFFHRFGMDKFYEGQVEVTGDEYNVESIDGQPGCLHPAYWDARPLPRTSPLAIKVFWLPXRGAVDGGLVLFPPQYPNRFPWLWIPESQGNLNARRYHREGTIHGPRIVAGLHAPTLMEEDEDAYKKQFVRQYVKNSVTPDMMEEMYKKAHAAIRENPVYEKKPKKEVKRKRWNRPKMSLAQKKDRVAQKKASPLRAQERAAEKLNQTIFYKDFSDIAN

SEQ ID NO: 35343 - protein, 94 aa, Homo sapiens; identical to SEQ ID NO: 32444
  misc_feature (1)...(94): Xaa = X or * as defined in Table 2

SEQ ID NO: 35344 - protein, 79 aa, Homo sapiens; identical to SEQ ID NO: 32445
  DOMAIN (7)..(56): R3H domain identified by PFam, accession name R3H, E-value= 2.1e-09, PFam score of 44.6
  misc_feature (1)...(79): Xaa = X or * as defined in Table 2

SEQ ID NO: 35345 - protein, 366 aa, Homo sapiens
  DOMAIN (116)..(165): R3H domain identified by PFam, accession name R3H, E-value= 4.3e-07, PFam score of 37.0
RGETGNLQRRLEAQNQERRKSKSGAGKGKLTRSLAVCEESSARPGGESLQDQESIHLQLSSFSSLQEEDKSRKDDSEREKEKDKNKDKTSEKPKIRMLSKDCSQEYTDSTGIDLHEFLINTLKNNSSNHYKKFPQMSSYQRMLVHRVAAYFGLDHNVDQTGKSVIINKTSSTRIPEQRFCEHLKDEKGEESQKRFILKRDNSSIDKEDNQFPLHVWEGRDATGSELWRKALSVAYPDVCVTMAVVPLPTALSFSCAQIELDYQYGPMINRCSCKEQTLLCPQAFKMISSLSYLELATSSFFTGILPPSEESEPHSSAAPEETTSSESDGHTFLQLFHSHFSSSDLHAEQTKSKTWRRPEGKIPYAA

SEQ ID NO: 35346 - protein, 645 aa, Homo sapiens
  DOMAIN (298)..(342): Synapsins proteins domain identified by eMATRIX, accession number BL00415N, p-value=6.058e-12, raw score of 4.29
  DOMAIN (10)..(59): R3H domain identified by PFam, accession name R3H, E-value= 4.8e-12, PFam score of 53.5
RDRMILLKMEQEIIDFIADNNNHYKKFPQMSSYQRMLVHRVAAYFGLDHNVDQTGKSVIINKTSSTRIPEQRFCEHLKDEKGEESQKRFILKRDNSSIDKEDNQSVCSQESLFVENSRLLEDSNICNETYKKRQLFRGNRDGSGRTSGSRQSSSENELKWSDHQRAWSSTDSDSSNRNLKPAMTKTASFGGITVLTRGDSTSSTRSTGKLSKAGSESSSSAGSSGSLSRTHPPLQSTPLVAGVAAGSPGCVPYPENGIGGQVAPSSTSYILLPLEAATGIPPGSILLNPHTGQPFVNPDGTPAIYNPPTSQQPLRSAMVGQSQQQPPQQQPSPQPQQQVQPPQPQMAGPLVTQSIPAKKELNAFRVRNQEQRDTGTLHEGSGKISRMVLGWEPLSPYAPDRDDVATQFGQMTLSRQSSGETPEPPSGPVYPSSLMPQPAQQPSYVIASTGQQLPTGGFSGSGPPISQQVLQPPPSPQGFVQQPPPAQMPVYYYPSGQYPTSTTQQYRPMAPVQYNAQRSQQMPQAAQQAVLEVLSPLVSTVMPPKLAVLVMAGFRLRLELSESVLLQALWWSDHLSSFSELLCRLPDVLPEPSLLPLEYDHQKDAQGQDYLTCMVLVTLLLESPTGIQEDDSNEISVIGAGPSCK

SEQ ID NO: 35347 - protein, 450 aa, Homo sapiens
  DOMAIN (225)..(273): Eukaryotic protein kinase domain identified by PFam, accession name pkinase, E-value=0.0079, PFam score of 14.1
GDAYALVLRVTLYCGKCHNEVVLAPIFEILSTESIQDQLPYSVMLMSMLAITEGRRSFSVSVENACSNYVTTVQVKEVNQMHISPNSCNAIHPRDHILEISGTPTHTLQVEELEDAISQMSQTLLLLIEHDPVSRSPAQLRLDAWLSPHTQNAGHPHALSTLDTKDNLEGTLRRCSLRLSNSISKSPSPSSPKEPLLLSRDISCWESLCCSSTYSKQNFRSCDLIHGEVLGKGFFGQAIKVTHKATGKVLVMKELMRCDEENQKTFLTEVKVTLPSNLLPPGHDLLQTGAREQTGILKTGGLSVPGGAGHPAACRAGGVGPHCEHAVRPDPRLTPLALAQPPAGGCSTASIAPLFSIPAVSRVFRASRGLAACLEAEQAGRTILTCEVCKLVVGLSLDSQQQLSSVLCGWLCLSCPQLWSLNRHPQHQHHLVEMQNLKSHPRPGETESAL

SEQ ID NO: 35348 - protein, 195 aa, Homo sapiens
  DOMAIN (36)..(67): Protein kinases ATP-binding region proteins domain identified by eMATRIX, accession number BL00107A, p-value=9.182e-15, raw score of 18.39
  DOMAIN (1)..(132): Eukaryotic protein kinase domain identified by PFam, accession name pkinase, E-value=5.5e-32, PFam score of 119.3
MEYPDGGSTLDLLEPGPLDETQIITILREILKGLDYLHSEKKIHRGVKAANVLLSEHCEVKLVDFGMAGQLADTQTKRNTFVGTPFWIAPENNPPTLEENYSKPLKEFVEACLNKELSFRPTAKELLKHKFILRDTKKTSYLTELIDRYKRWRAKQSQEDSSSEDSNSETDGQDSGGSDSGDWIFTIQEKDPKNL

SEQ ID NO: 35349 - protein, 458 aa, Homo sapiens
  DOMAIN (160)..(179): TYROSINE KINASE CATALYTIC DOMAIN SIGNATURE domain identified by eMATRIX, accession number PR00109B, p-value=4.558e-14, raw score of 12.27
  DOMAIN (50)..(301): Eukaryotic protein kinase domain identified by PFam, accession name pkinase, E-value=1.8e-82, PFam score of 287.4
GPRASPPRADRRGPAVPSQEVAVLSAMAHSPVQSGLPGMQNLKADPEELFTKLEKIGKGSFGEVFKGIDNRTQKVVAIKIIDLEEAEDEIEDIQQEITVLSQCDSPYVTKYYGSYLKDTKLWIIMEYLGGGSALDLLEPGPLDETQIATILREILKGLDYLHSEKKIHRDIKAANVLLSEHGEVKLADFGVAGQLTDTQIKRNTFVGTPFWMVPEVIKQAGYDSKADIWSLGITAIELARGEPPHSELHPMKVLFLIPKNNPPTLEGNYSKPLKEFVEACLNKEPSFIPTAKELLKHKFILRNAKKTSYLTELIDRYKRWKAEQSHDDSSSEDSDAETDGQASGGSDSGDWIFTIREKDPKNLENGALQPSDLDRNKMKDIPKRPFSQWLSTIISPLFAELKEKSQACGGELGGPLKELRGAIYLAEEACPGISDTMVAQLVQRLQRYSLSGGGTSSH

SEQ ID NO: 35350 - protein, 114 aa, Homo sapiens; identical to SEQ ID NO: 34959

SEQ ID NO: 35351 - protein, 176 aa, Homo sapiens
  DOMAIN (119)..(176): Ribosomal protein L6e domain identified by PFam, accession name Ribosomal_L6e, E-value=0.09, PFam score of -85.2
SAAKSEMAGEKVEKPDTKEKKPEAKKVDAGGKVKKGNLKAKKPKKGKPHCSRNPVLVRGIGRYSRSAMYSRKAMYKRKYSAAKSKVEKKKKEKVLRNLLQNQVGGDKNGGTRVGLNFRKMPRIYPTEDVPRKLLSHGQKNPFSQHVREKLRASITPGTILIILTGRHRGKRVVFLN

SEQ ID NO: 35352 - protein, 33 aa, Homo sapiens
  misc_feature (1)...(33): Xaa = X or * as defined in Table 2
PVPGTSSCTDRYHYKKHXXKINTKLVSKYILNM

SEQ ID NO: 35353 - protein, 186 aa, Homo sapiens
  misc_feature (1)...(186): Xaa = X or * as defined in Table 2
LRTVPDLPGRRFRAMRTGQRRXPELPPDMNSLEQAEDLKAFERRLTEYIHCLQPATGRWRMLLIVVSVCTATGAWNWLIDPETQKVSFFTSLWNHPFFTISCITLIGLFFAGIHKRVVAPSIIAARCRTVLAEYNMSCDDTGKLILKPRPHVQXQSSLIVMGLRIAFLRISDTAKSHKGFLLRLDM

SEQ ID NO: 35354 - protein, 696 aa, Homo sapiens
  DOMAIN (260)..(271): VINCULIN SIGNATURE domain identified by eMATRIX, accession number PR00806A, p-value=7.508e-10, raw score of 6.63
  misc_feature (1)...(696): Xaa = X or * as defined in Table 2
MGAVFFMLFSWWITSGHIQLLCTRRRATVSTHQEFVVTVSPFSLGLVVSGCLDADTAMPGSAEEQFQWQSQDGQKDIEDELTTGLELVDSCIRSLQESGILDPQDYSTGERVIHFGKTLGLSSEDYSIMEKGQMVKEVTVTPQVSVLKANETMASALCGQEGHDDPLLLTVQMSTGNHYIKDNSLFPWVKWPSLLSQSALQLNSKPEGSFQYPASYHSNQTLALGETTPSQLPARGTQARATGQSFSQGTTSRAGHLAGPEPAPPPPPPPREPFAPSLGSAFHLPDAPPAAAAAALYYSSSTLPAPPRGGSPLAAPQGGSPTKLQRGGSAPEGATYAAPRGSSPKQSPSRLAKSYSTSSPINIVVSSAGLSPIRVTSPPTVQSTISSSPIHQLSSTIGTYATLSPTKRLVHASEQYSKHSQELYATATLQRPGSLAAGSRASYSSQHGHLGPELRALQSPEHHIDPIYEDRVYQKPPMRSLSQSQGDPLPPAHTGTYRTSTAPSSPGVDSVPLQRTGSQHGPQNAAAATFQRASYAAGPASNYADPYRQLQYCPSVESPYSKSGPALPPEGTLARSPSIDSIQKDPSKYPILCDGGNPFCALVYRPSSRERASSLLKSMCYQXNRLYPKFRRVLGSGFEGMQRRFCASKGIKGRFCGSSLEQDCEHGGQHPCYPKLVPTLWNPHQREGNQKNSERV

SEQ ID NO: 35355 - protein, 1233 aa, Homo sapiens
  DOMAIN (224)..(235): VINCULIN SIGNATURE domain identified by eMATRIX, accession number PR00806A, p-value=7.508e-10, raw score of 6.63
  DOMAIN (547)..(929): Armadillo/beta-catenin-like repeats domain identified by PFam, accession name Armadillo_seg, E-value=1.9e-23, PFam score of 91.4
GAVAGGGCMFARKPPGAAPLGAMPVPDQPSSASEKTSSLSPGLNTSNGDGSETETTSAILASVKEQELQFERLTRELEAERQIVASQLERCKLGSETGSMSSMSSAEEQFQWQSQDGQKDIEDELTTGLELVDSCIRSLQESGILDPQDYSTGERPSLLSQSALQLNSKPEGSFQYPASYHSNQTLALGETTPSQLPARGTQARATGQSFSQGTTSRAGHLAGPEPAPPPPPPPREPFAPSLGSAFHLPDAPPAAAAAALYYSSSTLPAPPRGGSPLAAPQGGSPTKLQRGGSAPEGATYAAPRGSSPKQSPSRLAKSYSTSSPINIVVSSAGLSPIRVTSPPTVQSTISSSPIHQLSSTIGTYATLSPTKRLVHASEQYSKHSQELYATATLQRPGSLAAGSRASYSSQHGHLGPELRALQSPEHHIDPIYEDRVYQKPPMRSLSQSQGDPLPPAHTGTYRTSTAPSSPGVDSVPLQRTGSQHGPQNAAAATFQRASYAAGPASNYADPYRQLQYCPSVESPYSKSGPALPPEGTLARSPSIDSIQKDPREFGWRDPELPEVIQMLQHQFPSVQSNAAAYLQHLCFGDNKIKAEIRRQGGIQLLVDLLDHRMTEVHRSACGALRNLVYGKANDDNKIALKNCGGIPALVRLLRKTTDLEIRELVTGVLWNLSSCDALKMPIIQDALAVLTNAVIIPHSGWENSPLQDDRKIQLHSSQVLRNATGCLRNVSSAGEEARRRMRECDGLTDALLYVIQSALGSSEIDSKTVENCVCILRNLSYRLAAETSQGQHMGTDELDGLLCGEANGKDAESSGCWGKKKKKKKSQDQWDGVGPLPDCAEPPKGIQMLWHPSIVKPYLTLLSECSNPDTLEGAAGALQNLAAGSWKWSVYIRAAVRKEKGLPILVELLRIDNDRVVCAVATALRNMALDVRNKELIGKYAMRDLVHRLPGGNNSNNTASKAMSDDTVTAVCCTLHEVITKNMENAKALRDAGGIEKLVGISKSKGDKHSPKVVKAASQVLNSMWQYRDLRSLYKKDGWSQYHFVASSSTIERDRQRPYSSSRTPSISPVRVSPNNRSASAPASPREMISLKERKTDYECTGSNATYHGAKGEHTSRKDAMTAQNTGISTLYRNSYGAPAEDIKHNQVSAQPVPQEPSRKDYETYQPFQNSTRNYDESFFEDQVHHRPPASEYTMHLGLKSTGNYVDFYSAARPYSELNYETSHYPASPDSWV

SEQ ID NO: 35356 - protein, 197 aa, Homo sapiens
  DOMAIN (76)..(105): PROTEIN PHOSPHATASE PP2A 55KD REGULATORY SUBUNIT SIGNATURE domain identified by eMATRIX, accession number PR00600F, p-value= 5.776e-28, raw score of 18.73
MQVCSSGGRILRVSGTERQLRREGGRFCLGRGVRNLREGGALRAPFTAPSLTALPPDIVDIKPANMEDLTEVTTASESHPHHCNLFVYSSSKGFLRLCDMRAAALCDKHSKHPCDDIGPIQIIQGHLRTSRGWMIILPALQSTFRCRMDEQNLRAFLAPRLCDFSTSQPQPGSPEQPVMSGLISPWTKPSRSSVFSM

SEQ ID NO: 35357 - protein, 298 aa, Homo sapiens
MDTGRGTRHTGPGQSILLSDESSEADSQSEDDDEEELNLSREELHNMLRLHKYKKLHQNKYSKDKEPAGTNIPGSRAVSIDVTSGKSNLASAVAGLESSRDIFSCEICLLTVAMTPSSSSPPPFGNLRQSQSRLICTQMAWIRVSPRTPVRTGRQVAAAGCELREADGSGTTGGHGQATSIECGRGGDTPYQEAECPECGSRRSECMSPWQTVLAAALMEGMDIHIPHQQGRRSPSMPNMEDHPCSMENFSNLPHAEEHRTLFADLMKIDRWMDRMLPLFTLPIFAGNSDNILLCIPF

SEQ ID NO: 35358 - protein, 1037 aa, Homo sapiens
  DOMAIN (681)..(704): 1 kw CHROMO BROMODOMAIN SHADOW GLOBAL domain identified by eMATRIX, accession number DM00547E, p-value=8.250e-21, raw score of 13.94
  DOMAIN (526)..(828): SNF2 and others N-terminal domain identified by PFam, accession name SNF2_N, E-value=4.1e-95, PFam score of 329.4
RQICSMASELGARDDGGCTELAKPLYLQYLERALRLDHFLRQTSAIFNRNISSDDSEDGLDDSNPLLPQSGDPLIQVKEEPPNSLLGETSGAGSSGMLNTYSLNGVLQSESKCDKGNLYNFSKLKKSRKWLKSILLSDESSEADSQSEDDDEEELNLSREELHNMLRLHKYKKLHQNKYSKDKELQQYQYYSAGLLSTYDPFYEQQRHLLGPKKKKFKEEKKLKAKLKKVKKKRRRDEELSSEESPRRHHHQTKVFAKFSHDAPPPGTKKKHLSIEQLNARRRKVWLSIVKKELPKANKQKASARNLFLTNSRKLAHQCMKEVRRAALQAQKNCKETLPRARRLTKEMLLYWKKYEKVEKEHRKRAEKEALEQRKLDEEMREAKRQQRKLNFLITQTELYAHFMSRKRDMGHDGIQEEILRKLEDSSTQRQIDIGGGVVVNITQEDYDSNHFKAQALKNAENAYHIHQARTRSFDEDAKESRAAALRAANKSGTGFGESYSLANPSIRAGEDIPQPTIFNGKLKGYQLKGMNWLANLYEQGINGILADEMGLGKTVQSIALLAHLAERENIWGPFLIISPASTLNKGRQEFTRFVPKFKVLPYWGNPHDRKVIRRFWSQKTLYTQDAPFHVVITSYQLVVQDVKYFQRVKWQYMVLDEAQALKSSSSVRWKILLQFQCRNRLLLTGTPIQNTMAELWALLHFIMPTLFDSHEEFNEWFSKDIESHAENKSAIDENQLSRLHMILKPFMLRRIKKDVENELSDKIEILMYCQLTSRQKLLYQALKNKISIEDLLQSSMGSTQQAQNTTSSLMNLVMQFRKVCNHPELFERQETWSPFHISLKPYHISKFIYRHGQIRVFNHSRDRWLRVLSPFAPDYIQRSLFHRKGINEESCFSFLRFIDISPAEMANLMLQGLLARWLALFLSLKASYRLHQLRSWGAPEGESHQRYLRNKDFLLGVNFPLSFPNLCSCPLLKSLVFSSHCKAVSGYSDQVVHQRRSATSSLRRCLLTELPSFLCVASPRVSAKYCSAWSGYASFS

SEQ ID NO: 35359 - protein, 507 aa, Homo sapiens
  DOMAIN (403)..(417): 1 kw CHROMO BROMODOMAIN SHADOW GLOBAL domain identified by eMATRIX, accession number DM00547D, p-value=2.317e-12, raw score of 11.60
  DOMAIN (215)..(507): SNF2 and others N-terminal domain identified by PFam, accession name SNF2_N, E-value=2.7e-17, PFam score of 66.4
MVAQASGQTIREAEVGGSLTAQEVEATSILLSDESSEADSQSEDDDEEELNLSREELHNMLRLHKYKKLHQNKYSKDKEWMSQLAALNYYLAGGDEQKLLDLSYSPPQNRQPAMAKAHNNNNNNNNNNNNNHNKNPKRLLDERELLTYSTATQSFDTRNTRSFDEDAKESRAAALRAANKSGTGFGESYSLANPSIRAGEDIPQPTIFNGKLKGYQLKGMNWLANLYEQRLERLRFLQLEQEHTCPQEGRAERLRGQPLKLWALLHFIMPTLFDSHEEFNEWFSKDIESHAENKSAIDETKLKKVKKKRRRDEELSSEESPRRHHHQTKVFAKFSHDAPPPGTKKKHLSIEQLNARRRKVWLSIVKKELPKKTLYTQDAPFHVVITSNQLVVQDVKYFQRVKWQYMVLDEAQALKSSSSLTRSNARYPLVSSQRKIHDQQVTTDKSSKMDPKEEEYIPAKHEMENTKLQFYLSAIGEKQVRWKILLQFQCRNRLLLTGTPIQNTMAE

SEQ ID NO: 35360 - protein, 324 aa, Homo sapiens
  DOMAIN (225)..(242): Zinc finger C2H2 type, domain proteins. domain identified by eMATRIX, accession number BL00028, p-value=4.938e-15, raw score of 16.07
  DOMAIN (111)..(302): Zinc finger, C2H2 type domain identified by PFam, accession name zf-C2H2, E-value=5.8e-37, PFam score of 136.2
MGFHHVARAGLELLTSGMCCYFAQDLRPEQSIKASLQRIILRKYEKCGHHNLQLKKGYKSVDEYKVHKGSYNGFNQCLTTTQSKIFQCDKYVKDFHKFSNSNRHMTEKNPFKCKECGKSFCVLSHLTQHKRIHTTVNSYKLEECGKAFNVSSTLSQHMRIHTGQKHYQCGEMGIAFNKSSHLNTHKIIHTGEKSYKREECGKAFNISSHLTTHKIIHTGENAYKCKECGKAFNQSSTLTRHKIIHAGEKPYICEHCGRAFNQSSNLTKHKRIHTGDKPYKCEECGKAFNVSSTLTQHKRIQQQQQQTIKQTKNLLNNNNKKLWV

SEQ ID NO: 35361 - protein, 221 aa, Homo sapiens
  DOMAIN (48)..(62): Phage integrase family domain identified by eMATRIX, accession number PF00589B, p-value=1.621e-11, raw score of 16.17
  DOMAIN (1)..(94): "Phage" integrase family domain identified by PFam, accession name Phage_integrase, E-value=0.0047, PFam score of -14.6
MERRNRRTGRTEKARIWEVTDRTVRTWIGEAVAAAAADGVTFSVPVTPHTFRHSYAMHMLYAGIPLKVLQSLMGHKSISSTEVYTKVFALDVAARHRIRKSDGTLQEHDGICEIHVAKYAEIFGLTSAEASKDIRQALKSFAGKEVVFYRPEEDAGDEKGYESFPWFIKRAHSPSRGLYSVHINPYLIPFFIGLQNRFTQFRLSETKEITNPYAMRVTNPC

SEQ ID NO: 35362 - protein, 446 aa, Homo sapiens
  DOMAIN (339)..(368): kw REPLICATION REPB REPA INITIATION domain identified by eMATRIX, accession number DM00653A, p-value=7.207e-27, raw score of 20.40
  DOMAIN (323)..(435): Initiator RepB protein domain identified by PFam, accession name RepB_protein, E-value=1.1e-07, PFam score of 29.7
MELKTKARELREECRSLRSRCNQLEERVSAMEDEMNEMKREGKFREKRIKRNEQSLQEIWDYVKRPNLRLIGVPESDVENGTKLENTLQDIIQENFPNLARQANVQIQEIQRTPQRYSSGRETPRHIIVRFTKVEMKEKMLRAAERKCDNLKTCHTSHGSVMAETAVINHKKRKNSPRIVQSNDLTEAAYSLSRDQKRMLYLFVDQIRKSDGTLQEHDGICEIHVAKYAEIFGLTSAEASKDIRQALKSFAGKEVVFYRPEEDAGDEKSYEQPSKDIRQALKSFAGKEVVFYRPEEDAGDEKGYESFPWFIKRAHSPSRGLYSVHINPYLIPFFIGLQNRFTQFRLSETKEITNPYAMRLYESLCQYRKPDGSGIVSLKIDWIIERYQLPQSYQRMPDFRRRFLQVCVNEINSRTPMRLSYIEKKKGRQTTHIVFSFRDITSMTTG

SEQ ID NO: 35363 - protein, 198 aa, Homo sapiens
  misc_feature (1)...(198): Xaa = X or * as defined in Table 2
MGMTDMGKSKKKSQGPPSFPPGGAPPPAIGAPAGRERPPGTGDPFNQRPCDNLKTCHTSHGSVMAETAVINHKKRKNSPRIVQSNDLTEAAYSLSRDQKRMLYLFVDQIRKSDGTLQEHDGICEIHVAKYAEIFGLTSAEASKDIRQALKSFAGKEVVFYRPGEDAGHEKGYESFPWFIKRSPEXRRGKFPFTQMGQD

SEQ ID NO: 35364 - protein, 302 aa, Homo sapiens
  DOMAIN (235)..(264): kw REPLICATION REPB REPA INITIATION domain identified by eMATRIX, accession number DM00653A, p-value=3.500e-23, raw score of 20.40
  DOMAIN (219)..(261): Initiator RepB protein domain identified by PFam, accession name RepB_protein, E-value=0.03, PFam score of 10.4
YEIPVVSIRKPGMGSSIVSLKNRLDHRAVPAASKLPAYGLTFAGGLLAGLVLMKSNSRNSMRLSYIEKKKGRQTTHICDNLKTCHTSHGSVMAETAVINHKKRKNSPRIVQSNDLTEAAYSLSRDQKRMLYLFVDQIRKSDGTLQEHDGICEIHVAKYAEIFGLTSAEASKDIRQALKSFAGKEVVFYRPEEDAGDEKGYESFPWFIKRAHSPSRGLYSVHINPYLIPFFIGLQNRFTQFRLIETKEITNPYAMRLYKSLCQYRKPDGSRHLSLKIDWIIERFQLPSNYQPMPDFPRRFLQV

SEQ ID NO: 35365 - protein, 350 aa, Homo sapiens
  DOMAIN (283)..(297): Phage integrase family domain identified by eMATRIX, accession number PF00589B, p-value=1.621e-11, raw score of 16.17
  DOMAIN (139)..(329): "Phage" integrase family domain identified by PFam, accession name Phage_integrase, E-value=4.9e-10, PFam score of 46.8
GGWQRAELQVMRDLAQEGRCDNLKTCHTSHGSVMAETAVINHKKRKNSPRIVQSNDLTEAAYSLSRDQKRMLYLFVDQIRKSDGTLQEHDGICEIHVAKYAEIFGLTSAEANRKPDGSSIVSLKMTDHKRSSCLRYQRCRLPAPFCRRDAPRIWFPVGEGRRRKYHRLRGDCGGRRNVILCQLSGAEVIAELAEQRRGSLESAAENLPASSRTQQLKPSGSTQHNFRDRRNTTSRQPLPFSGLDTAHGGEKISSVSNLVWTWIGEAVAAAAADGVTFSVPVTPHTFRHSYAMHMLYAGIPLKVLQSLMGHKSISSTEVYTKVFALDVAARHRVQFAMPESDAVAMLKQLS

SEQ ID NO: 35366 - protein, 122 aa, Homo sapiens
  DOMAIN (55)..(69): Phage integrase family domain identified by eMATRIX, accession number PF00589B, p-value=1.621e-11, raw score of 16.17
  DOMAIN (1)..(101): "Phage" integrase family domain identified by PFam, accession name Phage_integrase, E-value=0.00019, PFam score of 1.6
VFIRDKLMERRNRRTGRTEKARIWEVTDRTVRTWIGEAVAAAAADGVTFSVPVTPHTFRHSYAMHMLYAGIPLKVLQSLMGHKSISSTEVYTKVFALDVAARHRVQFAMPESDAVAMLKQLS

SEQ ID NO: 35367 - protein, 260 aa, Homo sapiens
  DOMAIN (193)..(207): Phage integrase family domain identified by eMATRIX, accession number PF00589B, p-value=1.621e-11, raw score of 16.17
  DOMAIN (41)..(239): "Phage" integrase family domain identified by PFam, accession name Phage_integrase, E-value=2.2e-11, PFam score of 51.2
MIAYSIVAPSGEASRTGRRPKRSDSAPRTVTGDAVGMDDIPQEARQYRPNQAYAYIIHGDGAEDDDHRIVRFHTQCLTAVTVDSDTLASDAARLTCRHGLGNQVFCPHNRAQKVVDKQDTASFHSRHTTAHRGYSVLQVFIRDKLMERRNRRTGRTEKARIWEVTDRTVRTWIGEAVAAAAADGVTFSVPVTPHTFRHSYAMHMLYAGIPLKVLQSLMGHKSISSTEVYTKVFALDVAARHRVQFAMPESDAVAMLKQLS

SEQ ID NO: 35368 - protein, 59 aa, Homo sapiens
  DOMAIN (17)..(29): Phage integrase family domain identified by eMATRIX, accession number PF00589C, p-value=9.609e-10, raw score of 14.62
MHMLYAGIPLKVLQSLMGHKSISSTEVYTKVFALDVAARHRVQFAMPESDAVAMLKQLS

SEQ ID NO: 35369 - protein, 181 aa, Homo sapiens
  DOMAIN (114)..(128): Phage integrase family domain identified by eMATRIX, accession number PF00589B, p-value=1.621e-11, raw score of 16.17
  DOMAIN (21)..(160): "Phage" integrase family domain identified by PFam, accession name Phage_integrase, E-value=1.1e-09, PFam score of 45.6
VTVDSDTLASDAARLTCRHGLGNQVFCPHNRAQKVVDKQDTASFHSRHTTAHRGYSVLQVFIRDKLMERRNRRTGRTEKARIWEVTDRTVRTWIGEAVAAAAADGVTFSVPVTPHTFRHSYAMHMLYAGIPLKVLQSLMGHKSISSTEVYTKVFALDVAARHRVQFAMPESDAVAMLKQLS

SEQ ID NO: 35370 - protein, 244 aa, Homo sapiens
  DOMAIN (105)..(132): Mrp family proteins domain identified by eMATRIX, accession number BL01215A, p-value=4.964e-11, raw score of 9.75
  DOMAIN (37)..(223): "Phage" integrase family domain identified by PFam, accession name Phage_integrase, E-value=3.3e-12, PFam score of 54.0
MKLMETLNQCINAGHEMTKAIAIAQFNDDSPEARKITRRWRIGEAADLVGVSSQAIRDAEKAGRLPHPDMEIRGRVEQRVGYTIEQINHMRDVFGTRLRRAEDVFPPVIGVAAHKGGVYKTSVSVHLAQDLALKGLRVLLVEARIWEVTDRTVRTWIGEAVAAAAADGVTFSVPVTPHTFRHSYAMHMLYAGIPLKVLQSLMGHKSISSTEVYTKVFALDVAARHRVQFAMPESDAVAMLKQLS

SEQ ID NO: 35371 - protein, 370 aa, Homo sapiens
  DOMAIN (303)..(317): Phage integrase family domain identified by eMATRIX, accession number PF00589B, p-value=1.621e-11, raw score of 16.17
  DOMAIN (167)..(349): "Phage" integrase family domain identified by PFam, accession name Phage_integrase, E-value=9.3e-09, PFam score of 42.5
MEKQYQKHSSIGDRAEFLLSIHPLTLLLGLALACLPRHRVGPASTMLSLQTAEGRRGAHSQRNNCLDAAKACNLDDICKKYRSAYITPCTTSVSNDVCNRRKCHKALRQFFDKVPAKHSYGMLFCSCRDIACTERRRQTIVPVCSYEEREKPNCLNLQDSCKTNYICRVPLLPAPPPDVDVWPFSSTQQRQSSISSGSQSSLEFSSSDYKHQDAVILTSTLPSEGTDSTFLNEHRLDASIARPVEGPQVFIRDKLMERRNRRTGRTEKARIWEVTDRTVRTWIGEAVAAAAADGVTFSVPVTPHTFRHSYAMHMLYAGIPLKVLQSLMGHKSISSTEVYTKVFALDVAARHRVQFAMPESDAVAMLKQLS

SEQ ID NO: 35372 - protein, 390 aa, Homo sapiens
  DOMAIN (323)..(337): Phage integrase family domain identified by eMATRIX, accession number PF00589B, p-value=1.621e-11, raw score of 16.17
  DOMAIN (135)..(369): "Phage" integrase family domain identified by PFam, accession name Phage_integrase, E-value=1.2e-12, PFam score of 55.5
MTKDSQNKWEVNQRKIRSSVIEKPREVSVLRRKWLTVWADADHQVKIDENKEWAFSLTHRAAWSLGRTATQACMEAQDTQACMEAQELYLLWHWAFRQNDCHSVRVQNRGEAEMAEMTEVEFRMWINTIFTDLKEHIVTQCRKAKNHKILQEVTDKIASIEKNVMNLMELKNTIQEFHNAITSINSRKDQVEERISEFEDCVSEIRQTDKNREKRMKRNEQNLQEIWDCVKRLDLQLIGVPERDVGPGLLDQQGHQDLFILRSDLPSQVFIRDKLMERRNRRTGRTEKARIWEVTDRTVRTWIGEAVAAAAADGVTFSVPVTPHTFRHSYAMHMLYAGIPLKVLQSLMGHKSISSTEVYTKVFALDVAARHRVQFAMPESDAVAMLKQLS

SEQ ID NO: 35373 - protein, 290 aa, Homo sapiens
  DOMAIN (223)..(237): Phage integrase family domain identified by eMATRIX, accession number PF00589B, p-value=1.621e-11, raw score of 16.17
  DOMAIN (82)..(269): "Phage" integrase family domain identified by PFam, accession name Phage_integrase, E-value=3.2e-11, PFam score of 50.7
MARYRLMHLRPTGLPDWKGASRISGARGAGWGPVRLGRLCADRALDGESRPGGGGQSGVPASEASQKAAHGRRLPPSLALGASLALAPTLAALERFNPPLHCGSPFLGWPRPEPAPSACGEVWRERRVRELGLRTGLRASASSGWPRAFRYQQGHQDLFILRSDLPSQVFIRDKLMERRNRRTGRTEKARIWEVTDRTVRTWIGEAVAAAAADGVTFSVPVTPHTFRHSYAMHMLYAGIPLKVLQSLMGHKSISSTEVYTKVFALDVAARHRVQFAMPESDAVAMLKQLS

SEQ ID NO: 35374 - protein, 418 aa, Homo sapiens
  DOMAIN (235)..(278): 1 kw MIND INHIBITOR DIVISION CONTROL domain identified by eMATRIX, accession number DM01756B, p-value=4.822e-15, raw score of 22.91
  DOMAIN (200)..(306): ParA family ATPase domain identified by PFam, accession name ParA, E-value=1.5e-24, PFam score of 95.0
MKLMETLNQCINAGHEMTKAIAIAQFNDDSPEARKITRRWRIGEAADLVGVSSQAIRDAEKAGRLPHPDMEIRGRVEQRVGYTIEQINHMRDVFGTRLRRAEDVFPPVIGVAAHKGGVYKTSVSVHLAQDLALKGLRVLLVEGNDPQGTASMYHGWVPDLHIHAEDTLLPFYLGEKDDVTYAIKPTCWPGLDIIPSCLALHRIETELMGKFDEGKLPTDPHLMLRLAIETVAHDYDVIVIDSAPNLGIGTINVVCAADVLIVPTPAELFDYTSALQFFDMLRDLLKNVDLKGFEPDVFIRDKLMERRNRRTGRTEKARIWEVTDRTVRTWIGEAVAAAAADGVTFSVPVTPHTFRHSYAMHMLYAGIPLKVLQSLMGHKSISSTEVYTKVFALDVAARHRVQFAMPESDAVAMLKQLS

SEQ ID NO: 35375 - protein, 208 aa, Homo sapiens
  DOMAIN (141)..(155): Phage integrase family domain identified by eMATRIX, accession number PF00589B, p-value=1.621e-11, raw score of 16.17
  DOMAIN (19)..(187): "Phage" integrase family domain identified by PFam, accession name Phage_integrase, E-value=2e-10, PFam score of 48.1
TARVAAARRRCQCWGSGACGSALTLPRTSSLTLTETPIVQQTRMVVRCPTASLPSQWRSCPSSTWAVPKTPPTWTCWRNSAILSLVVFIRDKLMERRNRRTGRTEKARIWEVTDRTVRTWIGEAVAAAAADGVTFSVPVTPHTFRHSYAMHMLYAGIPLKVLQSLMGHKSISSTEVYTKVFALDVAARHRVQFAMPESDAVAMLKQLS

SEQ ID NO: 35376 - protein, 426 aa, Homo sapiens
  DOMAIN (359)..(373): Phage integrase family domain identified by eMATRIX, accession number PF00589B, p-value=1.621e-11, raw score of 16.17
  DOMAIN (229)..(405): "Phage" integrase family domain identified by PFam, accession name Phage_integrase, E-value=1.2e-12, PFam score of 55.5
MGKDFMSNTPKAMATKAKIDKSDLIKLKSFCTAKETTIRVNRQPTKWEKIFRNFFFRRQGWLLLETIPALPPVGRTLSGLLESLIPELDSWMTFLDLLWAREETTSLKALVEEVYFAQKERDEAVMSRLQLAIEERDEAIARAKHMEMSLKVKKKSWGSHSDTQTKEQQQQKTQQSTVRKRTEEDTRGTQGNSFTVWHSDNLISSHRPSRQGCAGCELVDASQPTPLSSRLAKMSAKPEVSLVREASRQIVAGGSAVILCHYGESWNILRADQRLIFAKSWPRASRYQQGHQEKYILRSDLPSQVLIRDKLMERRNRRTGRTEKARIWEVTDRTVRTWIGEAVAAAAADGVTFSVPVTPHTFRHSYAMHMLYAGIPLKVLQSLMGHKSISSTEVYTKVFALDVAARHRVQFAMPESDAVAMLKQLS

SEQ ID NO: 35377 - protein, 297 aa, Homo sapiens
  DOMAIN (230)..(244): Phage integrase family domain identified by eMATRIX, accession number PF00589B, p-value=1.621e-11, raw score of 16.17
  DOMAIN (94)..(276): "Phage" integrase family domain identified by PFam, accession name Phage_integrase, E-value=1.3e-09, PFam score of 45.4
KSQKEDRTRQGTEQGSVVADQDSCYGPEEAHDSVTQILSRQPFGNIFHVPLLRDVGRSGGGDGSVKLEEQVNTYHYQRILLGISSDNAILLEEESEEGRPMHISTIKEPSPDSPILYLTLNLKLLTSLILFHYGESWNLLRADQRLIFAKSWPRASRYQQGHQDLFILRSDLPSQVFIRDKLMERRNRRTGRTEKARIWEVTDRTVRTWIGEAVAAAAADGVTFSVPVTPHTFRHSYAMHMLYAGIPLKVLQSLMGHKSISSTEVYTKVFALDVAARHRVQFAMPESDAVAMLKQLS

SEQ ID NO: 35378 - protein, 472 aa, Homo sapiens
  DOMAIN (405)..(419): Phage integrase family domain identified by eMATRIX, accession number PF00589B, p-value=1.621e-11, raw score of 16.17
  DOMAIN (230)..(324): Integrase core domain identified by PFam, accession name rve, E-value=1e-13, PFam score of 51.4
MAQYPILDFLKVGQLLGNCALGKGNDQTFRGLLDTGSELTLIPGDPKHHCDPPVKCAAIDLANAFFSIPVHKAHQKQFAFGWQGQQYTFTVLHQGCMNSLALCHNLIQRELDCFLTPEDITLDHYIDDIMLIGSSEKEVANTLDLLFWDYRHEPLRLANYSPFERQLLACYWALVETECLMMGHQVTMRPELPIMNWVLADPSRHKVGNAQQHWKCAVHTSSNGSGIYVIGLKQVLKGQVDYIGPLPSWKGQRFVLLGIDTYSGYGFAYPVCNASAKTTIHGLTECLIHCYGIPHSIASDEGTHFMAKEVQQWAYAHGIPRILSLYWPRASRYQQGHQDLFILRSDLPSQVFIRDKLMERRNRRTGRTEKARIWEVTDRTVRTWIGEAVAAAAADGVTFSVPVTPHTFRHSYAMHMLYAGIPLKVLQSLMGHKSISSTEVYTKVFALDVAARHRVQFAMPESDAVAMLKQLS

SEQ ID NO: 35379 - protein, 239 aa, Homo sapiens
  DOMAIN (172)..(186): Phage integrase family domain identified by eMATRIX, accession number PF00589B, p-value=1.621e-11, raw score of 16.17
  DOMAIN (41)..(218): "Phage" integrase family domain identified by PFam, accession name Phage_integrase, E-value=1.6e-10, PFam score of 48.4
MDGSSRFIIINSEIYWPNGLTLDYEEQKLYWADAKLNFIHKSNLDGTNRKNVDSILQDYANCKKSRGNTDNEYAVNEVVAGIEEYFNVMLGTQLLCKFDRPQYAEILADHPHALMSKVFIRDKLMERRNRRTGRTEKARIWEVTDRTVRTWIGEAVAAAAADGVTFSVPVTPHTFRHSYAMHMLYAGIPLKVLQSLMGHKSISSTEVYTKVFALDVAARHRVQFAMPESDAVAMLKQLS

SEQ ID NO: 35380 - protein, 264 aa, Homo sapiens
  DOMAIN (197)..(211): Phage integrase family domain identified by eMATRIX, accession number PF00589B, p-value=1.621e-11, raw score of 16.17
  DOMAIN (22)..(243): "Phage" integrase family domain identified by PFam, accession name Phage_integrase, E-value=7.5e-11, PFam score of 49.5
MGVFRMKTPRWEAVHCVSKSSNSPTGALREPWIQLRREEPLHGSPIEKFVKSSEEHFPVASLFAHLQVLVSVNHLSLPDTEPDPSQDSPGARQNNIHNLSVFYERELFRRTKSGPTWKGNDPAAVLRAYALPKDFLGFWVGGVFIRDKLMERRNRRTGRTEKARIWEVTDRTVRTWIGEAVAAAAADGVTFSVPVTPHTFRHSYAMHMLYAGIPLKVLQSLMGHKSISSTEVYTKVFALDVAARHRVQFAMPESDAVAMLKQLS

SEQ ID NO: 35381 - protein, 486 aa, Homo sapiens
  DOMAIN (144)..(173): kw REPLICATION REPB REPA INITIATION domain identified by eMATRIX, accession number DM00653A, p-value=7.207e-27, raw score of 20.40
  DOMAIN (248)..(428): "Phage" integrase family domain identified by PFam, accession name Phage_integrase, E-value=1.3e-07, PFam score of 38.3
  misc_feature (1)...(486): Xaa = X or * as defined in Table 2
MAETAVINHKKRKNSPRIVQSNDLTEAAYSLSRDQKRMLYLFVDQIRKSDGTLQEHDGICEIHVAKYAEIFGLTSAEASKDIRQALKSFAGKEVVFYRPEEDAGDEKGYESFPWFIKRAHSPSRGLYSVHINPYLIPFFIGLQNRFTQFRLSETKEITNPYAMRLYESLCQYRKPDGSGIVSLKIDWIIERYQLPQSYQRMPDFRRRFLQHFLAHAGCPKGTQNFTFRMKFIIFSIKKVLPPVDTILAHDPVIHTCHLRESFGSVSPSSPKSNRLPCPEVILFHYGESWNLLRADQRLIFAKSWPRASRYQQGHQDLFILRSDLPSQVFIRDKLMERRNRRTGRTEKARIWEVTDRTVRTWIGEAVAAAAADGVTFSVPVTPHTFRHSYAMHMLYAGIPLKVLQSLMGHKSISSTEVYTKVFALDVAARHRVQFAMPESDAVAMLKHYPEINALALYLKCGTEWICXFCLVNREAGWYSLEKRTKQ

SEQ ID NO: 35382 - protein, 106 aa, Homo sapiens
  DOMAIN (39)..(53): Phage integrase family domain identified by eMATRIX, accession number PF00589B, p-value=1.621e-11, raw score of 16.17
RPEKARIWGVTDRTVRTWIGRAVAAAAADGVTFSVPVPPHTFRHSYAMHMLYAGIPLKVLQSLMGHKSISSTEVYTKVFALDVAARHRVQFAMPESDAVAMLKQLS

SEQ ID NO: 35383 - protein, 231 aa, Homo sapiens
  DOMAIN (164)..(178): Phage integrase family domain identified by eMATRIX, accession number PF00589B, p-value=1.621e-11, raw score of 16.17
  DOMAIN (35)..(211): "Phage" integrase family domain identified by PFam, accession name Phage_integrase, E-value=5.4e-10, PFam score of 46.6
CCQTLPVFHPPHPSHLGPRPCPPTHHLPSEHRSLFLEAACHDSDSLEPLNLSSGSKTKSPSLPPKAKKPKGLEISARPAGALRHRHRLHRPQQPSPPLGIPHPSLLTAQVFIRDKLMERRNRRTGRTEKARIWEVTDRTVRTWIGEAVAAAAADGVTFSVPVTPHTFRHSYAMHMLYAGIPLKVLQSLMGHKSISSTEVYTKVFALDVAARHRVQFAMPESDAVAMLKQLS

SEQ ID NO: 35384 - protein, 145 aa, Homo sapiens
  DOMAIN (78)..(92): Phage integrase family domain identified by eMATRIX, accession number PF00589B, p-value=1.621e-11, raw score of 16.17
  DOMAIN (1)..(124): "Phage" integrase family domain identified by PFam, accession name Phage_integrase, E-value=1.6e-06, PFam score of 25.7
KRDAELANGALGIIELNMITIEKVFIRDKLMERRNRRTGRTEKARIWEVTDRTVRTWIGEAVAAAAADGVTFSVPVTPHTFRHSYAMHMLYAGIPLKVLQSLMGHKSISSTEVYTKVFALDVAARHRVQFAMPESDAVAMLKQLS

SEQ ID NO: 35385 - protein, 474 aa, Homo sapiens
  DOMAIN (407)..(421): Phage integrase family domain identified by eMATRIX, accession number PF00589B, p-value=1.621e-11, raw score of 16.17
  DOMAIN (269)..(453): "Phage" integrase family domain identified by PFam, accession name Phage_integrase, E-value=2.1e-10, PFam score of 48.0
MGMTVPALLLGIVMRFKLSDRAYVTVLAVKLLFLSTNPPLLWDAGAGTLQTTLPLPAAPCYDCQKRGMVTGHVPGQAEASKQGTWDAARQEALTLCVDPAVAQPHGNAKLCPFTISNLRTQTLISDEGLMRLTALPKVTHDEAQVIISVSVFYVWPKTILLPMWLREAKRLNTAALGFHIHSPLTDSPRATSSPASSIHGCPSHLKSMPGPEIAAILVGLQNAFFCQFDIFVTVDPHVLYLKYEDTYSGIINAPSRLCSPGGGPGQQQQHPPELIRNVPAPANPRPIESKTLRVGPSHLLFNKASRCTAKFENHCATTQGIGPDVKCSWPRASRYQQGHQDLFILRSDLPSQVFIRDKLMERRNRRTGRTEKARIWEVTDRTVRTWIGEAVAAAAADGVTFSVPVTPHTFRHSYAMHMLYAGIPLKVLQSLMGHKSISSTEVYTKVFALDVAARHRVQFAMPESDAVAMLKQLS

SEQ ID NO: 35386 - protein, 467 aa, Homo sapiens
  DOMAIN (235)..(278): 1 kw MIND INHIBITOR DIVISION CONTROL domain identified by eMATRIX, accession number DM01756B, p-value=4.822e-15, raw score of 22.91
  DOMAIN (200)..(308): ParA family ATPase domain identified by PFam, accession name ParA, E-value=4.7e-22, PFam score of 86.7
MKLMETLNQCINAGHEMTKAIAIAQFNDDSPEARKITRRWRIGEAADLVGVSSQAIRDAEKAGRLPHPDMEIRGRVEQRVGYTIEQINHMRDVFGTRLRRAEDVFPPVIGVAAHKGGVYKTSVSVHLAQDLALKGLRVLLVEGNDPQGTASMYHGWVPDLHIHAEDTLLPFYLGEKDDVTYAIKPTCWPGLDIIPSCLALHRIETELMGKFDEGKLPTDPHLMLRLAIETVAHDYDVIVIDSAPNLGIGTINVVCAADVLIVPTPAELFDYTSALQFFDMLRDLLKNVDLKGFEPDKATLLQDPFYASEFSPAIGSQKPYSWPRASRYQQGHQDLFILRSDLPSQVFIRDKLMERRNRRTGRTEKARIWEVTDRTVRTWIGEAVAAAAADGVTFSVPVTPHTFRHSYAMHMLYAGIPLKVLQSLMGHKSISSTEVYTKVFALDVAARHRVQFAMPESDAVAMLKQLS

SEQ ID NO: 35387 - protein, 173 aa, Homo sapiens
  DOMAIN (106)..(120): Phage integrase family domain identified by eMATRIX, accession number PF00589B, p-value=1.621e-11, raw score of 16.17
  DOMAIN (4)..(152): "Phage" integrase family domain identified by PFam, accession name Phage_integrase, E-value=3.4e-08, PFam score of 40.7
AWSSPRSRCPLHSRTPSLPRVEGQAHIGPGLHRYQQGHQDLFILRSDLPSQVFIRDKLMERRNRRTGRTEKARIWEVTDRTVRTWIGEAVAAAAADGVTFSVPVTPHTFRHSYAMHMLYAGIPLKVLQSLMGHKSISSTEVYTKVFALDVAARHRVQFAMPESDAVAMLKQLS

SEQ ID NO: 35388 - protein, 460 aa, Homo sapiens
  DOMAIN (234)..(282): Cadherins extracellular repeat proteins domain proteins domain identified by eMATRIX, accession number BL00232B, p-value= 2.269e-13, raw score of 32.79
  DOMAIN (142)..(242): Cadherin domain identified by PFam, accession name cadherin, E-value=0.0094, PFam score of 22.3
MWKRLWSWVTGRGWNSLEDSEEDKKMWESLEPPRDLLNGFDKNADSDMNNKVQAEVVSDVGEELVGNWSKGTPEDYPRFFHMHPRTAELSLLEPVNRDFHQKFDLVIKAEQDNGHPLPAFAGLHIEILDENNQSPYFTMPSYQGYILESAPVGATISDSLNLTSPLRIVALDKDIEDTKDPELHLFLNDYTSVFTVTQTGITRYLTLLQPVDREEQQTYTFSITAFDGVQESEPVIVNIQVMDANDNTPTFPEISYDVYVYTDMRPGDSVIQLLMATKDTGDYYGGREGEETIEKLTIVYYTQYLGDRINHTPNLNIMQYTQGASEAIKQCQSSAAKPRRSGKESVSLGPEFQGLWEWLPVILFHYGESWNLLRADQRLIFAKSWPRASRYQQGHQDLFILRSDLPSQVFIRDKLMERRNRRTGRTEKARIWGSGRTERSGTWICRGGLPAAAADGVTFI

SEQ ID NO: 35389 - protein, 143 aa, Homo sapiens
WGHWASPRLWWAWGSPGPAGLKPPGTVAASTGFSQWLLYIETISRTPVELELKNSKVRKDVLSRGPHSLYLVQDAQLEHAMEIAKVSVQALQAYRAPPPRMEQANPKTPPDANLYKKGPSPSPRRANTTRLGSRATKTIHPDS

SEQ ID NO: 35390 - protein, 165 aa, Homo sapiens
  DOMAIN (88)..(118): Electron transfer flavoprotein beta-subunit proteins domain identified by eMATRIX, accession number BL01065C, p-value=8.579e- 18, raw score of 16.45
  DOMAIN (34)..(165): Electron transfer flavoprotein beta subunit domain identified by PFam, accession name ETF_beta, E-value=5.4e-06, PFam score of - 31.0
PPLAQKQAVASQSHSPCGGFHRRWFRMRLTGEIMKIITCFKLVPEEQDIVVTPEYTLNFDNADAKISQFDLNAIEAASQLATDDDEIAALTVGGSLLQNSKVRKDVLSRGPHSLYLVQDAQLEHALPLDTAKALAAAIEKIGFDLLIWTSSRIQAVALASPLSNT

SEQ ID NO: 35391 - protein, 556 aa, Homo sapiens
  DOMAIN (182)..(212): Electron transfer flavoprotein beta-subunit proteins domain identified by eMATRIX, accession number BL01065C, p-value=8.579e- 18, raw score of 16.45
  DOMAIN (128)..(366): Electron transfer flavoprotein beta subunit domain identified by PFam, accession name ETF_beta, E-value=3.7e-15, PFam score of 63.8
MNIEFFDPPRIVSGLTLNRINIQHPFHLTGIRYCIDERQRTVNDVLQAHAGRVLQQYLPAPATATFRCQSRNRTENPQFLVCQWAGEDQITQLLQEQWRVLIVMIFRTHNHMAGPRRWFRMRLTGEIMKIITCFKLVPEEQDIVVTPEYTLNFDNADAKISQFDLNAIEAASQLATDDDEIAALTVGGSLLQNSKVRKDVLSRGPHSLYLVQDAQLEHALPLDTAKALAAALEKIGFDLLIFVKGTCLVLLVAFGLVTTHFQPCLFGVQNGEQETVQILLVGVVGGMERAERIIIPFTLAINNQPTTRLTKTIAQGMPAIIQRNIPNPRISLQPAPTPRHSANPATMQPHAQATPTPKPHTRTYPTRPPHPQRSATPGTQRTPTPGPQTARDRAPKPDHTRPQTAHTAHHTSNDPQQRHRTRQRHTNKQHPHPAPPRLPTLPQNNKRQKPAESDTRKHHTPHMRQPTAHAETTARNTQAAQHCHTQNTPQANRHATGDRPEHHQARDRTRIDPKPNPDPRTITGHTKGTTYAHKHTPLATHHMTRPTTGHRHGTHH

SEQ ID NO: 35392 - protein, 126 aa, Homo sapiens
  misc_feature (1)...(126): Xaa = X or * as defined in Table 2
GLLRPRFSVNSPHFNTWLLSANSINWRXYGFMPSLLILLLXLNPMGRYSGASLVSRRMASTTLPGHSIAMRQPVCGIFALTRAIISIAMWDFHVEDFMPERMALNLVLNSAIXLPKIFPARWMKFS

SEQ ID NO: 35393 - protein, 130 aa, Homo sapiens
  DOMAIN (31)..(86): LacY family proton/sugar symporters proteins domain identified by eMATRIX, accession number BL00896C, p-value=7.440e- 09, raw score of 16.68
CRFDESFWCDAHAIFVAPTLYAYDFYADKTLVPLTDALANTWQKQFPLDYGKGRLWGSVAFVIGSALTGKLVTMFDYRVILALLTLGVASMLLGFLIRPTIQPQGASLQQESTGWSAWLALVRQNWRFLA

SEQ ID NO: 35394 - protein, 89 aa, Homo sapiens
  misc_feature (1)...(89): Xaa = X or * as defined in Table 2
MDRSSSSLEFPLIGTGPFRLTQFTAELVRLESHDYYHLRHPLLKAEPSFNRALNCGMQNALSEIVHISAISAISANKPVPSASVFDCNX

SEQ ID NO: 35395 - protein, 156 aa, Homo sapiens
  misc_feature (1)...(156): Xaa = X or * as defined in Table 2
CLFRQVSAPHITRVCITRSAATIQTIDLNNLDTGDXLQPAFPPVWLISPGPFHPTPSVTRVPLEKEIRTFAQRLSVLHGINAPEFFDKPLFSSLVLTLRDEGYISDSGDAEPAETMKVYQLQTNIVIIHKCFKAGFTLAVGNQFLLINKQRASHQN

SEQ ID NO: 35396 - protein, 135 aa, Homo sapiens
  misc_feature (1)...(135): Xaa = X or * as defined in Table 2
LVWKVIPWRPAWKITLCVLNSCRRACLFAPATXTANRLQAVCWLQSANPSINRGTLEKESRTVAQRLSVLHGINAPEFFDKAVFSSLVLTLRDEGYISDSGDAEPAETMKVYQLLAELITSDVRLTIESATQGEG

SEQ ID NO: 35397 - protein, 605 aa, Homo sapiens
  DOMAIN (447)..(490): p53 tumor antigen proteins domain identified by eMATRIX, accession number BL00348F, p-value=8.714e-09, raw score of 23.19
MRNVPYSTDSTVPSASASELIDHALQMNKFEVEKDTIGDIIILPREQAVLMTYYRNNIAHMLVLPSLMAAIVTQHRHISRDVLMEHVNVLYPMLKAELFLRWDRDELPDVIDALANEMQRQGLITLQDDELHINPAHSRTLQLLAAGARETLQRYAITFWLLSANPSINRGTLEKESRTVAQRLSVLHGINAPEFFDKAVFSSLVLTLRDEGYISDSGDAEPAETMKVYQLLAELITSDVRLTIESATQGEGGYAAHRILDQRKGTREQMFYSYLDHLLGSQVRDKGGPRGHLPERAEELACTHTGLFAFYFSHIHIPSGDSTTAKTFMWGTHTLYPLSVQMVKWVRYALLRDVALNTSDTTLTRVLTRVLMRRYASTLFLSANFLVCGLLRNYMRLQRSLGFYSPIDGLCCKKKETTQRKKPRKTKQKTEKTEGGTRAGRGKGQETRKQNAEKGGENRRAEKRRKTKEEGGSQRNKKKKRGRGGQTEDRTEDKETEQKRREREEEKKGKGEGSEGRGERRRRKGETQKREGERKAGEAERPARRERSREKAEGDRESRRRRDKQRRERLRERKKEKKDEERDGSENEDINHIFHFTGNGFGTGE

SEQ ID NO: 35398 - protein, 117 aa, Homo sapiens
MHFIKTIPSRNSSGGIPPPTLCAQFHTDTMPPRSFCDHQCTIVRPHGGHPIPWNQPQRNNSTNITAMLDVAHGTKPINNITAAARIKPAGRKTRGFERSDTEPMSEFRKSIYIIIRT

SEQ ID NO: 35399 - protein, 226 aa, Homo sapiens
MTDKQQGEKQKQKTEDKTKTKQKQRKNKTDKRRKTKTERNTQRTPERQTNTNQTRTKQRRPDTGVTQADTRQDTSARRLMRQPRSAAAWMAALRGARDPKLITMVPHSKISRSIVRKGLPMTETQRRTETSKNYRPREQQTRNRQQQDPRQQRTVQTHQQEERRETKDNNTHTKPHETLARRHRRHNIHALAAADLVIEAASEVWKSKKRSLHSWRKFAPTNAIDH

SEQ ID NO: 35400 - protein, 212 aa, Homo sapiens
  DOMAIN (136)..(169): 3-hydroxyacyl-CoA dehydrogenase proteins domain identified by eMATRIX, accession number BL00067D, p-value=8.800e-28, raw score of 21.49
  DOMAIN (38)..(211): 3-hydroxyacyl-CoA dehydrogenase domain identified by PFam, accession name 3HCDH, E-value=8.4e-08, PFam score of -37.5
  misc_feature (1)...(212): Xaa = X or * as defined in Table 2
SADPRNRRDTRAAKFTRDAGKTDCXNLXTHIETPDPGDRYSRAGSCGPGPLKRRLNVWKSKKRSLHSWRKFARHKRYXPLTLRQSLYTAIAAEIKNPERVAGLHFFNPAPVMKLVEVVSGLATAAEVVEQLCELTLSWGKQPVRCHSTPGFIVNRVARPYYSEAWRALEEQVAAPEVIDAALRDGAGFPMGPLELTGPDWAGPPFCCHLFGV

SEQ ID NO: 35401 - protein, 299 aa, Homo sapiens
  misc_feature (1)...(299): Xaa = X or * as defined in Table 2
SILRLRQKRKQLTAYDFADNCDKALYXRNHRLIREILALVCAHDRQKKYLPSLAGFLXLKNEINRLSVRGWSRRRSFSVRXPFTNTDRARSHFYQFVIIDELQSLFQSHADRRNQNNGFVSTGSTHVGQFLTGQAVYSQVVRAAMNTDNLTFVNFCTVTEEQLTAILQTEQRERDRFTLTVRDQYAVLTLTHFTRTYVVVVAEGGVQQTSTGSHGHELRTEANQTTAWDHVVETYAAFTVWIHVFQVALTFAQRLHYRTLMLFFNVQSHVFIRLLFTTVDFTEDNFRTGYRQFETFTTH

SEQ ID NO: 35402 - protein, 1464 aa, Homo sapiens
  DOMAIN (375)..(399): SYNTHASE PHOSPHORIBOSYLFORMYLGLY domain identified by eMATRIX, accession number PD02711B, p-value=5.200e-26, raw score of 14.26
  DOMAIN (1080)..(1236): Delta-aminolevulinic acid dehydratase domain identified by PFam, accession name ALAD, E-value=9.3e-102, PFam score of 351.5
  misc_feature (1)...(1464): Xaa = X or * as defined in Table 2
YAPATFSAATQPTPKKINNPVPRNSAMHWQTRIQAQANGYWLEREQWLAVGEQWFWRMEWSGPHRAAAGRLCHHHGNDATWHRGXFHLCFRPCVXXRIEQPQEGYAIIMETTPPGTGVNFIFVSDPAFDKGYAFDFFCLEPMSHAPDDHHRPEGGDLIALAPGESTTSEMSLRVPVANCAVTTASLDSYYGEAMAIGERAPVALLDFAASARLAVGEALTNIAATQIGDIKRIKLSANWMAAAGHPGEDAGLYEAVKAVGEELCPALGLTIPVGKDSMSMKTRWQEGNEEREMTSPLSLVISAFARVEDVRHTITPQLSTEDNALLLIDLGKGNNALGATALAQVYRQLGDKPADVRDVAQLKGFYDAIQALVAQRKLLAYHDRSDGGLLVTLAEMAFAGHCGIDADIATLGDDRLAALFNEELGAVIQVRAADREAVESVLAQHGLADCVHYVGQAVSGDRFVITANGQTVFSESRTTLRVWCSRLNSRIMKWWSMLPPVMCVNVNRFSKILPVHACQTGSHQHANVNQRTSCSVTWHHPRQRRQKDNQQEQQTNNHCRQTGTTANRYAGRGLNISRNGRSTDKRTGHGRDTVDIQRLLHAREFPLLIRQTCFIGHANQRTGGVKQVDQHERENHPCQPEELTLVRNERLFAFILDALRDVDVTKLKKPLYILATADEETSHTVAESNDEKLFRIAKIRNRKMTKPIVFSGAQPSGELTIGNYMGALRHATQFAEVGLSHRSLVVESGRRALAIFLQNQVSVTSQVDIHPAAKIGRGIMLDHATGIVVGETAVIENDVSILQSVTLGGTGVMIGAGAKILGNIEVGRGAKIGAGSVVLQPVPPHTTAAGVPARIVEESPLPPEAQLMMQLSIENGYKRFITLVADARHSTPEQIDKIAQAHVWTGQDAKANGLVDSLGDFDDLNCSLYLYYKLHQQLSNRILSDISPLQRVIIAVAVVIQAGLLIILLPRQPDKLLQLMRVLFIANVSQVMHIIGDVAGRDCVLVDDMIDTGGTLCKAAEALKECLASLPFSSCQHRDNFRKTSLPCFRYTMPLDSTNIRQTMTDLIQRPRRLRKSPALRAMFEETTLSLNDLVLPIFVEEEIDDYKAVEAMPGVMRIPEKHLAREIERIANAGIRSVMTFGISHHTDETGSDAWREDGLVARMSRICKQTVPEMIVMSDTCFCEYTSHGHCGVLCEHGVDNDATLENLGKQAVVAAAAGADFIAPSAAMDGQVTFTNTDRGRSHFYQFVIIDELQSLFQSHADRRNQNNGFVSTGSTHVALGGGFPVGALLATEECARVMTVGTHGTTYGGNPLASAVAGKVLELINTPEMLNGVKQRHDWFVERLNTINHRYGLFSEVRGLGLLIGCVLNADYAGQAKQISQEAAKAGVMVLIAGGNVVRFAPALNVSEEEPRFIMMVIRPVERSDVSALMQLASKTGGGFKQLRISDKSILTVTARESPR

SEQ ID NO: 35403 - protein, 206 aa, Homo sapiens
MRASGTDEAVVLVPPIRMTLEQALEFIDDDELVEGAAAAFEALEMMGSGRDREIRYGEGSPWFDIVLPCGGGITLTLHKLRSAQPLLAVLNRLEQKKPVGLRYDPQAQSLVCLPTQTRTGWNLNGFEASITHRALRTSRYDGQYYCQGPRTLTIRRTVIMTGSSDPHDTTDSNNDRVLGPSRYDGQYYCQGPRTLTIRRTVIMTGS

SEQ ID NO: 35404 - protein, 171 aa, Homo sapiens
  DOMAIN (134)..(153): GLYCOSYL HYDROLASE FAMILY 2 SIGNATURE domain identified by eMATRIX, accession number PR00132C, p-value=9.182e-17, raw score of 18.68
  DOMAIN (1)..(171): Glycosyl hydrolases family 2 domain identified by PFam, accession name Glyco_hydro_2, E-value=0.062, PFam score of -329.7
ATLSCEVVLENLAASPVVTTLEYTLFDGERVVHSSAIDHLAIEKLTSASLAFTVEQPQQWSAESPYLYHLVMTLKDANGNVLEVVPQRVGFRDIKVRDGLFWINNRYVMLHGVNRHDNDHRKRRGVGMDRVEKDLQLMKQHNINSVRNAHYRKRRNKEVRTKKKIESIEEK

SEQ ID NO: 35405 - protein, 225 aa, Homo sapiens
  DOMAIN (48)..(93): PROTEIN OXIDOREDUCTASE NAD INTERGENIC RE domain identified by eMATRIX, accession number PD01311A, p-value=8.667e-17, raw score of 30.23
  DOMAIN (1)..(205): Oxidoreductase family domain identified by PFam, accession name GFO_IDH_MocA, E-value=4.7e-35, PFam score of 129.9
ASYYCTRNDLELVAVCDSRLSQRQALAEKYGNASVWDDPQAMLLAVKPDVVSVCSPNRFHYEHTLMALEAGCHVIQAREMCDTARKLGKVLAYDFHHRFALDTQQLREQVTNGVLGEIYVTTARALRRCGVPGWGVFTNKELQGGGPLIDIGIHMLDAAMYVLGFPRSVEDSLCGTIELHSGCILWLETSFALNIREHAIMNIRFCGDKAGASVFPAHIYTATQR

SEQ ID NO: 35406 - protein, 99 aa, Homo sapiens
YSFMVPIFGGRRWTVFSTAILIIPCVWLGIAVQNPNTPFGIFIVIALLCGFAGANFASSMGNISFFFPKAKQGAPVFAFLGVNGVPQADGSVMSLAMPH

SEQ ID NO: 35407 - protein, 278 aa, Homo sapiens
TSFYYPALPSVSGALLRVPYSFMVPIFGGRRWTVFSTAILIIPCVWLGIAVQNPNTPFGIFIVIALLCGFAGANFASSMGNISFFFPKAKQGSALGINGGLGNLGVSVMQLVAPLVIFVPVFAFLGVNGVPQADGSVMSLANAAWIWVPLLAIATIAAWSGMNDIASSRASIADQLPVLQRLHLWLLSLLYLATFGSFIGFSAGFAMLAKTQFPDVNILRLAFFGPFIGAIARSVGGAISDNFGGVRVTLINSIFMAIFSALLFLYLTGQNPLRPHRI

SEQ ID NO: 35408 - protein, 43 aa, Homo sapiens
QYASALVSTAIALLLVCLAFLYPAANSEIHLGVLSIFWGDPDG

SEQ ID NO: 35409 - protein, 108 aa, Homo sapiens
MQGGYNIHPLIDALDDAKLAPIAAKALSHTLLMFDNFYDVEEKAKRGNEYAQVMQSWADAEWFLNRPALAEKLTVTVFKVTGETNTDDLSPAPDAWSRPDIPLHALGC

SEQ ID NO: 35410 - protein, 286 aa, Homo sapiens
MGLAQAKLLIEAPVNGGRNYNGPKVAKFLVGGASLNDVYLHQHDKYRYDRYHLIRNREKTHIMPEWVTQNIMNGRGVNRLDDVNRPKSPEIKNDIRLFRQELRDAAYHFQGDADNDQLSVTPLVGLGKSSLLIKTIFHRMRWAEQNLSICSSSFNRPAIFVRNIIQLLREGKKVEITVGDKHENDFYIPEDEPFKIIGALPYLYEINLRRFLSRLQYYVNTDQLVVRVWKEDDNTYHLKGWWGDDKWMVITGNKLDPRAWRLDLENAILIHDPQLELAPQREKELE

SEQ ID NO: 35411 - protein, 1162 aa, Homo sapiens
  DOMAIN (774)..(808): Glycosyl hydrolases family 1 proteins domain identified by eMATRIX, accession number BL00572B, p-value=8.043e-32, raw score of 16.38
  DOMAIN (715)..(955): Glycosyl hydrolase family 1 domain identified by PFam, accession name Glyco_hydro_1, E-value=7.2e-76, PFam score of 265.5
  misc_feature (1)...(1162): Xaa = X or * as defined in Table 2
VMFFFLPGLLMASWATRTPAIRDILSVSIAEMGGVLFGLSIGSMSGILSLGVVSETLWDTXCHSWSRCPAHXSGXXYXVLALWLTSPLLFAVGLGVFGASFGSAEVAINVEGAAGEREMNKTGLPMMHGFYSLGTLAGAGVGMALTAFGVPATVHILLAALVAQIAAWYKALQEQIPDFIPRAPQRQMIADVAKTLAGEEGRHLAIEAPTGVGKTLSYLIPGIAIAREEQKTLVVSTANVALQDQIYSKDLPLLKKIIPDLKFTAAFGRGRYVCPRNLTALASTEPTQQDLLAFLDDELTPNNQEEQKRCAKLKGDLDTYKWDGLRDHTDIAIDDDLWRRLSTDKASCLNRNCYYYRECPFFVARREIQEAEVVVANHALVMAAMESEAAKSERISDISTQLNAFPGCEVAVSDAPTLIVVVEAEDSETLIQTIESVRNVEGVLAVSLVYHQQEEQANAVAAAAAAAGLSVPGVAAPLLVSRKPSNGINAVRFSVLVRRLVDAQDCVLQAPTTEEDKSTNRPYTSRYIGSLGADFHGNLLKGGIYLYPSTASHPDGKLRLLYECTRWHSWRNKRAVKRAMAKSVFWISSRKPCTSAVHSLSATTIWLKMSNALSVSSRTPSLIPFQRHRSKAYRQLPLRRYIQFHTYARQRISGLGINREDNPRQRCQSGGEHIDANSGAASGYPHQIRRRFVAANGVYLDTKPELTHLEPMIVKKLTLPKDFLWGGAVAAHQVEGGWNKGGKGPSICDVLTGGAHGVPREITKEVLPGKYYPNHEAVDFYGHYKEDIKLFAEMGFKCFRTSIAWTRIFPKGDEAQPNEEGLKFYDDMFDELLKYNIEPVITLSHFEMPLHLVQQYGSWTNRKVVDFFVRFAEVVFERYKHKVKYWMTFNEINNQRNWRAPLFGYCCSGVVYTEHENPEETMYQVLHHQFVASALAVKAARRINPEMKVGCMLAMLRLYRCALSGYYRSYVLTIGTFRDLHQNGVMHHITATSRVVVIGIGGLGHIAIKLLHAMGCEVTAFSSNPAKEQEVLAMGADKVVNSRDPQALKALAGQFDLIINTVNVSLDWQPYFEALTYGGNFHTVGAVLTPLSVPAFTLIAGDRSVSGSATGTPYELRKLMRFAARSKVAPTTELFPMSKINDAIQHVRDGKARYRVVLKADF

SEQ ID NO: 35412 - protein, 282 aa, Homo sapiens
MLVGKVVVSEGASFRTHGAVDTSKAYVSLENSGWTIIADITTTNQNTLLNLANLAMSDANVIMMDEPVTRSSVTASAENFITLTTNTLSGNGNFYMRTDMANHQSDQLNVTGQATAGDSLTLVTTGGGDAAFTLGNAGRVFDIGTYEYTLLDNGNHSWSLAENRAQITPSTTDVLNMAAAQPLVFDAELDTVRERLGSVKGVSYDTAMWSSAINTRNNVTTDAGLRAQAIKTVHHRQNRLIHFSLNGSTFNVYRHFRRTKTCPKDAETNGKEQGRCQPECQT

SEQ ID NO: 35413 - protein, 567 aa, Homo sapiens
  misc_feature (1)...(567): Xaa = X or * as defined in Table 2
XATKEPVERTRPPGHWLRTNNNGPGFAKWHYANGSTAGYAGGPGSMGSLGQTQILGTGALVPGANPSWGIGHLQKPPLSRQPLDGDPRPRRDPSAETPTGRQTRTPGETYPPPNHDYLFASAKKEKKNISRTLLAVYTDNTKELPLIVMKPSPQHREGVKDVMRFNEPMYKVGEQNSVCMSCHLPEQLQKAFWPHDVHYSKDPGNSAASFCWKGLSGESPFTAGSSKRAKHPDVVKLRVNERQARARGYAVNSSDKGSISDKYGRVPKASRSDPASSKLTRAGEETPELPQRLHMIIATAIRDHRQDTRAHQRGEALSDSRAHRRHKPGLPEAGTDIHQQMLSCRLPTDEYHAIRRCDSADILACDLNGKTRQADLEYPDIVLRGEYGNLLEAKQQRLVEGEMLFIPARAANLPVNNKPVMLLSLVFAPTWLGLSFYDSRTTSLLHPARQIQLPSLQRGEGEAMLTALTHLSRSPLEQNIIQPLVLSLLHLCRSVVNMPPGNSQPRGDFLYHSICNWVQDNYAQPLTRESVAQFFNITPNHLSKLFAQHGTMRLIEYVRWVRMAKAR

SEQ ID NO: 35414 - protein, 285 aa, Homo sapiens
  DOMAIN (249)..(281): Bacterial regulatory proteins araC family proteins. domain identified by eMATRIX, accession number BL00041, p-value=1.964e-19, raw score of 23.99
  DOMAIN (199)..(285): Bacterial regulatory helix-turn-helix protei domain identified by PFam, accession name HTH_AraC, E-value=3.9e-27, PFam score of 103.6
MKAPGLPADQQFFADLFSGLVLNPQLLGRVWFASQPASLPVGSLCIDFPRLDIVLRGEYGNLLEAKQQRLVEGEMLFIPARAANLPVNNKPVMLLSLVFAPTWLGLSFYDSRTTSLLHPARQIQLPSLQRGEGEAMLSALTLFSRSPLEQNIIQPLVLSLLHLCGSVVNMPPGNSQPRGDFLYHSICTWVQDNYAQPLTRESVAQFFNITPNHLSKLFAQHGTMRFIEYVRWVRMAKARMILQKYHLSIHEVAQRCGFPDSDYFCRVFRRQFGLTPGEYSARFQG

SEQ ID NO: 35415 - protein, 171 aa, Homo sapiens
  DOMAIN (111)..(141): Flocculin repeat proteins domain identified by eMATRIX, accession number PF00624I, p-value=6.175e-10, raw score of 9.10
MIPVSLVVVVVGGWTVVYLTDLVLKSSVYFKHSYEDWLENNGLSISPFHIRWQTAVFNRAFYSWGRRKAWMLYQWFNFGMVFGVIAMFSSFFLLGKTLMQTLAQMMADSPSSYSSSSSSSSSSSSSSSSSSSSSSSLHNEQVLQVVAPGINLPLNQLTYFFTAVLINGVVP

SEQ ID NO: 35416 - protein, 290 aa, Homo sapiens
  DOMAIN (13)..(48): Troponin domain identified by eMATRIX, accession number PF00992A, p-value=3.418e-11, raw score of 16.67
MVNKYIYDVSHTEEEEEEEEEEEEEEEEEEEEEEEEEEEEEEEEEEEEEDDFGKILIPICNFFNGYVSFGFTLSFRINSDKLYSSTNEILQAFSWACQRPSQQPLSSPARGLEGKNGFMGWDQSPLALCSLGTWCPAPQLLWLQPWLKGANIYFNQLPQSVQAPSLGILHVMLGLQIIPLSLKLLAERRTWSGLLLSVAGHPWSGKLLSTTGCPDVFQLLAEKLSPLCSWLSIICSALAEPRAFIDLRVEEVHADSSMGSHGQSWKRHHKFQIQSMGLVAQLPAFRSSLA

SEQ ID NO: 35417 - protein, 146 aa, Homo sapiens
  DOMAIN (96)..(146): Neuromodulin (GAP-43) proteins domain identified by eMATRIX, accession number BL00412D, p-value=6.918e-15, raw score of 16.54
VAPGDRHAFPLAPSGLSPELTLPQTQCCAQATVQGLEGTRSWSQSGTSSLSPWSHTSLRRRRKEEGEEEEEEEEEEEEEEEEEEEEEEEEEEEEEEEEEEEEEEEGEEEEEEEEEEEEEEEEEEEEEEEEEEEEEEEEEEEEAKTQ

SEQ ID NO: 35418 - protein, 183 aa, Homo sapiens
MDPVLVLLEARYPLRCLLAQCIQFSAHFSRDPISPLSPEQACDKDLAAAAWLFGPFLWSRGSLSLEEWKQPLEWRRPCQMPQMAVAAASRLGLAGMGIWPVPFSPDLYAKQSEILLSNHYTTSEVRVFGVPEVLENLEVKSGSPAVLALVKKSLGSHTRSASRNPRRQPGASVHYLDLLQPRD

SEQ ID NO: 35419 - protein, 103 aa, Homo sapiens
  DOMAIN (14)..(101): Carbamoyl-phosphate synthase small ch domain identified by PFam, accession name CPSase_sm_chain, E-value=0.0001, PFam score of -54.2
LTLNSHMAPALIPILAMSAPMTPMKNLSQVHAQGLVIRDLPLIASNFRNTEDLSSYLKRHNIVAIADIDTRKHAACAVPNTLVARGLRKHLKRVAAPQHWIAG

SEQ ID NO: 35420 - protein, 630 aa, Homo sapiens
  DOMAIN (11)..(27): Prokaryotic molybdopterin oxidoreductases proteins domain identified by eMATRIX, accession number BL00551A, p-value=5.500e- 18, raw score of 17.41
  DOMAIN (298)..(446): Carbamoyl-phosphate synthase small ch domain identified by PFam, accession name CPSase_sm_chain, E-value=1.3e-37, PFam score of 138.3
  misc_feature (1)...(630): Xaa = X or * as defined in Table 2
LKYPMKRVGKRGEGKFERISWDEALDTISDNLRRILKDYGNEAVHVLYGTGVDGGNITNSNVPYRLMNSCGGFLSRYGSYSTAQISAAMSYMFGANDGNSPDDIANTKLVVMFGNNPAETRMSGGGVTYYVEQARERSNARMIVIDPRYNDTAAGREDEWLPIRPGTDGALACAIAWVLITENMVDQPFLDKYCVGYDEKTLPANAPRNAHYKAYILGEGPDGIAKTPEWAAKITSIPAEKIIQLAREIGSAKPAYICQGWGPQRHSNGEQTSRAIAMLSVLTGNVGINGGNSGVREGATGSAVGEVVFNTSMTGYQEILTDLPIPSNRYSSYPILAMSAPMTPMKNLSQVHAQGLVIRDLPLIASNFRNTEDLSSYLKRHNIVAIADIDTRKLTRLLREKGAQNGCIIAGDNPDAALALEKARAFPGLNGMDLAKEVTTAEAYSWTQGSWTLTGGLPEAKKEDELPFHVVAYDFGAKRNILRMLVDRGCRLTIVPAQTSAEDVLKMNPDGIFLSNGPGDPAPCDYAITAIQKFLETDVPVFGICLGHQLLALASDVEKNVVMITAQNHGFAVDEATLPANLRVTHKSLFDRYVTGHSSHRXTGFSFQRHPEASPGPHDAAPLFDHFIEV

SEQ ID NO: 35421 - protein, 149 aa, Homo sapiens
  DOMAIN (38)..(94): Thrombospondin type 1 domain identified by PFam, accession name tsp_1, E-value=0.0039, PFam score of 19.5
RAYAVGRVEHALCGEMPFQDSILKQLCSVPCPGDCHLTEWSEWSTCELTCIDGRSFETVGRQSRSRTFIIQSFENQDSCPQQVLETRPCTGGKCYHYTWKASLWNNNERTVWCQRSDGVNVTGGCSPQARPAAIRQCIPACRKPFFYCA

SEQ ID NO: 35422 - protein, 284 aa, Homo sapiens
  DOMAIN (140)..(195): Thrombospondin type 1 domain identified by PFam, accession name tsp_1, E-value=0.066, PFam score of 8.8
KQARGRLCPAKPQGWSCPRPWQPTFCGQCDLKVRPGVIGDHFGALKFDCPTGFRTCLGRITPLFLPSSPIWNGCIFPIPVPGGDCGEGVQIRSLSCMVHSGSISHAAGRVEDALCGEMPFQDSILKQLCSVPCPGDCHLTEWSEWSTCELTCIDGRSFETVGRQSRSRTFIIQSFENQDSCPQQVLETRPCTGGCSPQARPAAIRQCIPACRKPFSYCTQGGVCGCEKGYTEIMKSNGFLDYCMKVPGSEDKKADVKNLSGKNRPVNSKIHDIFKGWSLQPLDP

SEQ ID NO: 35423 - protein, 173 aa, Homo sapiens
MLRILCLALCSLLTGTRADPGALLRLGMDIMNREVQSAMDESHILEKMAAEAGKKQPGMKPIKGITNLKVKDVQLPVITLNFVPGVGIFQCVSTGMTVTGKSFMGGNMEIIVALNITATNRLLRDEETGLPVFKSEGCEVILVNVKTNLPSNMLPKMVNKFLDSTLHKVLPGL

SEQ ID NO: 35424 - protein, 248 aa, Homo sapiens
MCPAIDAVLVYVNRKWTNLSDPMPVGQMGTVKYVLMSAPATTASYIQLDFSPVVQQQKGKTIKLADAGEALTFPRGVMPKAPPQLLVPATFLSAELALLQKSFHVNIQDTMIGELPPQTTKTLARFIPEVAVAYPKSKPLTTQIKIKKPPKVAMKTGKSLLHLHSTLEMFAARWRRKAPMSLFLLEEHFNLKGQHSLHENQLQMATSLDRRGNYTGFITSYLEEAYIPVVNDVLQVGLPLPDFLAMNY

SEQ ID NO: 35425 - protein, 370 aa, Homo sapiens
  DOMAIN (248)..(283): Prion protein domain identified by eMATRIX, accession number BL00291A, p-value=2.034e-09, raw score of 4.49
  DOMAIN (42)..(120): RNA recognition motif. domain identified by PFam, accession name rrm, E-value=6.9e-05, PFam score of 29.7
  misc_feature (1)...(370): Xaa = X or * as defined in Table 2
KTTTLEDNLGNTIQDIGPGKDFMMKIPKANATKIKIDEWDLIKLKSFCTAKATTKRVNKQDESLRSHYEXWGMLTDCVVMRDPNTKRSRGCGFVTYATVEEVDAATNARPHKVDGKVVEPKRTVSREDSQRPGAHLTVKKIFVGGIKEDTEGFAFVTFDDHDSVDKIVIPKYHTVNGHNCEVRKALSKQEMASASSSQRGRSGRGGGFGGNENFGCGGNFSGHGGFGGSHDGGGYGGSGDGYNGFGNDGGYPGGGPGYSGGSRGYGSGGQGCGNQDSGYGRSGSYDSCNKGGRGGFGSGSGSNFGGGGSYNDFGNYNNQYSNFGPMKGGNFGGRRSGPXGDGGQYFAKPPNHSGYGGSSSSSSYGSGRRC

SEQ ID NO: 35426 - protein, 212 aa, Homo sapiens
  DOMAIN (173)..(193): kw ALLERGEN POLLEN CIM1 HOL-LI domain identified by eMATRIX, accession number DM01724, p-value=5.737e-09, raw score of 8.14
  DOMAIN (53)..(117): RNA recognition motif. domain identified by PFam, accession name rrm, E-value=1.7e-13, PFam score of 58.3
MRDPNTKRSRGFGFVTCATVEEVDAAMNARPCKVVGRTVEPKRAVSREDSQRPEDTEELHLRDYFEQYGKIEVIEIMTDQGSGKKRGFAFVTFDNHDSMDKTVIQKYHTVNGHNCEARKALSKQEMARASSSQRGRSGSGNFGGGRGGGFGGNDNFGRGGNFSGHGGFGGSHGGGGYGGSGDGYNGFGNDGGGGSYNDFVNYNNQSSHFGPM

SEQ ID NO: 35427 - protein, 1205 aa, Homo sapiens
  DOMAIN (901)..(920): Eukaryotic  RNA-binding region RNP-1 proteins domain identified by eMATRIX, accession number BL00030A, p-value=1.000e- 12, raw score of 14.39
  DOMAIN (345)..(758): Zinc finger, C2H2 type domain identified by PFam, accession name zf-C2H2, E-value=7.9e-86, PFam score of 298.5
MTGICYTEDERSYKKNAQPTAASKKQKETQKFCLRVDGQQKVKLSVLQEKSAQLTVQLKSQKFLGHPTAGRGRSELCLDLPDPPEDPVALETRSVGTWVRERDLGMPDGEAALAAKVAVLETQLKKALQELQAAQARQADPQPQAWPPPDSPVRVDTVRVVEGPREVEVVASTAAGAPAQRAQSLEPYGTGLRALAMPGRPESPPVFRSQEVVETMCPVPAAATSNVHMVKKISITERSCDGAAEMKWEDQNIGDQCQNAKRNLRMALTSSLGCGFLQVVLRLQNLQQVIVSYFGQCKFGCLQGQSCEHQEYGEKPYTHKQRGKAISHQHSFQTHERPPTGKKPFYCKECAKTFSSLGNLRRHMAAHHGDGPYKCKLCGKAFVWPSLFHLHERTHTGEKPYECKQCSKAFPFYSSYLRHERIHTGEKAYECKQCSKAFPDYSTYLRHERTHTGEKPYKCTQCGKAFSCYYYTRLHERTHTGEQPYACKQCGKTFYHHTSFRRHMIRHTGDGPHKCKICGKGFDCPSSVRNHETTHTGEKPYECKQCGKVLSHSSSFRSHMITHTGDGPQKCKICGKAFGCPSLFQRHERTHTGEKPYQCKQCGKAFSLAGSLRRHEATHTGVKPYKCQCGKAFSDLSSFQNHETTHTGEKPYECKECGKAFSCFKYLSQHKRTHTVQKPYECKTCRKAFSHFSNLKVHERIHSGEKPYECKECGKAFSWLTCLLRHERIHTGEKPYECLQCGKAFTRSRFLRGHEKTHTGEKLYECVCKVDKQNRAGYSPIMLTALATLKTQDDIETVLQLFRLGNINAKASQPYVAQGDLSGFQDIGGYTKRKLDFYSTLLAGSPGPQHPGSHLCPQTNLEKSRFSARGHRRRSIVKVSLHPAVMSKSESPKEPEQLRKLFIGGLSFETTDESLRSHFEQWGTLTDCVVMRDPNTKRSRGFGFVTYATVEEVDAAMNARPHKVDGRVVEPKRAVSREDSQRPGAHLTVKKIFVGGIKEDTEVHHLRDYFEQYGKIEVIEIMTDRGSGKKRGFAFVTFDDHDSVDKTVIQKYHTVNGHNCEVRKALSKQEMASASSSQRGRSGSGNFGGGRGGGFGGNDNFGRGGNFSGRGGFGGSRGGGGYGGSGDGYNGFGNDGSNFGGGGSYNDFGNYNNQSSNFGPMKGGNFGGRSSGPYGGGGQYFAKPRNQGGYGGSSSSSSYGSGRRF

SEQ ID NO: 35428 - protein, 260 aa, Homo sapiens
MRRRLQLDSLLHPPSCFSSTLKCGKAAAAACDSSDQIQERLQTGHLPCEASHTICPPNHHSQSTLRPPLPPPHNHTLSHHHSSANSLNRNSLTNRRSQIHAPAPAPNDLATTPESVQLQDSWVLNSNVPLETRFWCCQRFLVFPGLQLQHLTLSLPVWSHGALPVSLCIFTWLSSHKDTSHFGLRVHLLSLPLEAKYSFYPGCPVLEPAPNPLKGPWCLWGVGTFRRYCTTFLFNESEPKDLVGEKFKSDRLCREAHLQE

SEQ ID NO: 35429 - protein, 620 aa, Homo sapiens
  DOMAIN (211)..(230): FIBRONECTIN TYPE III REPEAT SIGNATURE domain identified by eMATRIX, accession number PR00014C, p-value=9.400e-12, raw score of 15.44
  DOMAIN (156)..(245): Fibronectin type III domain identified by PFam, accession name fn3, E-value=3.2e-14, PFam score of 60.7
SDYEIKCCSSTEEQTLASCTIFKSLGRRSARTPWRQAGPDPSAWQARPPVQLRRGGPARLRGPFGCSPRLRNTVRSFSAELCPLWFLDVITPTLGTCRATHKFADCKAKRDTPTSCTVDYSTVYFVNIEVWVEAENALGKVTSDHINFDPVYKVKPNPPHNLSVINSEELSSILKLTWTNPSIKSVIILKYNIQYRTKDASTWSQIPPEDTASTRSSFTVQDLKPFTEYVFRIRCMKEDGKGYWSDWSEEASGITYEDRPSKAPSFWYKIDPSHTQGYRTVQLVWKTLPPFEANGKILDYEVTLTRWKSHLQNYTVNATKLTVNLTNDRYLATLTVRNLVGKSDAAVLTIPACDFQAKTVNSSILQYGLESLKRKTSYIVQVMASTSAGGTNGTSINFKTLSFSVFEIILITSLIGGGLLILIILTVAYGLKKPNKLTHLCWPTVPNPAESSIATWHGDDFKDKLNLKESDDSVNTEDRILKPCSTPSDKLVIDKLVVNFGNVLQEIFTDEARTGQENNLGGEKNGYVTCPFRPDCPLGKSFEELPVSPEIPPRKSQYLRSRMPEGTRPEAKEQLLFSGQSLVPDHLCEEGAPNPYLKNSVTAREFLVSEKLPEHTKGEV

SEQ ID NO: 35430 - protein, 174 aa, Homo sapiens
  DOMAIN (139)..(170): Receptor tyrosine kinase class V proteins domain identified by eMATRIX, accession number BL00790I, p-value=4.600e-10, raw score of 20.01
  DOMAIN (77)..(164): Fibronectin type III domain identified by PFam, accession name fn3, E-value=0.083, PFam score of 15.5
MTVNTTGAATGGRKRPTRVGRHPHEQDGVRWTRYRKSVLQRGGDTGHRTRQTKDADKVACFPENGSKQRPRYRAGFPSEGPETKVENIGVKTVTITWKEIPKSERKGIICNYTIFYQAEGGKGFSKTVNSSILQYGLESLKRKTSYIVQVMANTSAGGTNGSQHKFQDIVIQCL

SEQ ID NO: 35431 - protein, 116 aa, Homo sapiens
RPAVGAEKSNPSKRHRDRLNAELDHLASLLPFPPDIISKLDKLSVLRLSVSYLRVKSFFQVKRQRREIHGRNCQKKRNQNLKDRGWQWQMPKMWMTTRANEGPCRSGGPEHWTPRP

SEQ ID NO: 35432 - protein, 124 aa, Homo sapiens
RPLQKQRPAVGAEKSNPSKRHRDRLNAELDHLASLLPFPPDIISKLDKLSVLRLSVSYLGVKSFFQGQGLAVADAEDVDDHTGERRPMSFRRPRALDTQALRRTQFGLHLLMVNIAGLIATDRL

SEQ ID NO: 35433 - protein, 167 aa, Homo sapiens
  misc_feature (1)...(167): Xaa = X or * as defined in Table 2
NVTPAHYDEQQNFFAQIKGYIRCILFPPDQFECLYPYPVHHPCYRQSQVXLDNPDYERFPNFQNVVGYETVVGPGDVLYIPMYWWHHIESLLNGGITITVNFWYKGAPTPKRIEYPLKAHNKVAIMKNIEKMLGEALGNPQEVGPLLNTMIKGPIQLACQGSRPPAR

SEQ ID NO: 35434 - protein, 223 aa, Homo sapiens
  misc_feature (1)...(223): Xaa = X or * as defined in Table 2
HEKPGRQRETRSQNHHHHHHHHHHHQEKIRIQTFTERPXEDTERSDCPQAKKRSPRRNQPCXHLDFELPAARAATQPVNSGARAGRAGATVPRHTATLLLLHQRRDYAGGSLCDIDRAPDAKQGGKSXESETDSRFWKGTVCXDHTAGWVHGRPTTPHHSSPDSRNGGFQLHQQIALAAGWREGASRPKQEPLQPGPEQGQRRGRREPVQGKAPSGHQSWPAE

SEQ ID NO: 35435 - protein, 272 aa, Homo sapiens
  DOMAIN (143)..(195): ELEMENT TRANSPOSABLE INSERTION PROTEIN TRANSPOSITION DNA domain identified by eMATRIX, accession number PD02455C, p-value= 7.300e-09, raw score of 29.23
  DOMAIN (91)..(235): Integrase core domain identified by PFam, accession name rve, E-value=1.2e-22, PFam score of 82.4
  misc_feature (1)...(272): Xaa = X or * as defined in Table 2
SGLCTAAFHHQMEVVHTXSVSSRSXRPTTPVIAQWAHEQSGHGGRHGGYAWTQQHGLPLTKADLAMATAECPICQQQKPTLSPRYGTIPQGDQPATWWQVDYIGPLASRKGQRYGFAYLARNVSAKTTIHGLMECLIHHHGIPHIIASDQGTHFVAKEVRQWAHAHGIHWFHHVAYHPEAGGLTEWWNGLLKSQLQRQLGDNTLQDWGKVPQKAMYALIQCPIYGIVSPIARIHRSRNQGVKVEMAPFTITPSDPLAKCLLPVLVTLRSAGL

SEQ ID NO: 35436 - protein, 103 aa, Homo sapiens
QITMQPELPIMNWVLSVPSSHKMGHAQQHQEVAQMPRVSTPATLPSLPQPALMAPWTVPYDQLMEEEKARARYAGTIQKWTAAALQPLSRTSLKDSGEGTSKW

SEQ ID NO: 35437 - protein, 196 aa, Homo sapiens
DPADPMVLEVSEADRDAVPISESQQRPLGFWSKALPSSANNYSFFKRQLLACYWVLVEIEHLTMGHQVTMRPELPIINCVLSDPCSHKVGHAQQHSIIKWRWYIHDWAEGTSKLHEEVAQIPMVSTPSLPQPAPMASWEVPYDQLTEEEKTRAWFTDGSARHAGATQKWTAVALQPLSGTSLQDSSEEKSSQWTEI

SEQ ID NO: 35438 - protein, 194 aa, Homo sapiens
VQAAVLAALQLGPYDPADSMVLEVSVSDRDAVWRLWRAPIGESQRRSLGFWSKVLPYSADNYFPFERQLLACYWALLETDRLTVGHQVTLQPELPIMNWVLSDPSSHKVGHVHQHSIIKWKCHPCHHPMDTHEQSGLSGRDGGYAWAQQHGLPLTKADLAMATAECPICQQQRPTLSPRYSIIPRGDQPATWWQ

SEQ ID NO: 35439 - protein, 211 aa, Homo sapiens
  DOMAIN (33)..(45): RNase H domain identified by eMATRIX, accession number PF00075C, p-value=2.038e-09, raw score of 11.58
AGIDLANAFFSIPVHKAHQKQFVFSWKSQEYTFTVLPQRYINSPALSHNLIRRELDHFSLLDDITLVRYIGDIMLIGSSKQEVVNTLDLLVQAAVLAALQLGPYDPADSMVLEVSVSDRDAVWRLWRAPIGESQRRSLGFWSKVLPYSADNYFPFERQLLACYWALLETDRLTVGHQVTLQPELPIMNWVLSDPSSHKVGHVHQHSIIKWK

SEQ ID NO: 35440 - protein, 512 aa, Homo sapiens
  DOMAIN (319)..(474): Integrase core domain identified by PFam, accession name rve, E-value=5.7e-27, PFam score of 97.3
  misc_feature (1)...(512): Xaa = X or * as defined in Table 2
FFPIGFWRQHIPRLSVLLQHIYXVTXKAASFEWGPKQEKALXQVQAVVQVALPLGPYDPADPMLLEVSVADKDAGCSLWQAPIGESQWRSLGFRSKALPSSADNYSSFERQLLACYWALVETECLTLGHQVTIXPELPIMNWVLSDPSSHKVGHEQQHSIIKWRWYICDWAVVGRESTTNGLAGWSETWKKHHWEMGEKQIWGRSMWMELSEWSKTVKIFVSYVSAHQCVTSTEEDFNNQWDGMTCSVDTTHPLSLTTSVIAKWAHEQSDHGGRYGGYAGAQQHGLPLTKADLAMTTAECPICQQQRPSLSPQYGTISQGDQPATWWQVDYIGPLPSWKGQRFVLTVIDTYSGYGFAYPEHNTSAKTTVNGPMECLIHRHGIPHGIASDQGTRFTAKEVWQWAHAHGIHWFYYVPHHPEAAGLIGWWNGLLKSQLQCQLGDNTLQGWGKVLQKAVCALNQHPIYGTVSPVARIHGSRNQGVEVEVAPFIITSSDRLAKFLLPVSSTSCSAGL

SEQ ID NO: 35441 - protein, 159 aa, Homo sapiens
  misc_feature (1)...(159): Xaa = X or * as defined in Table 2
ILVGSKGQSVCPGPSSSGTRGSSSPGVAVSNKAAATVGPQXVTQQEGGPGSRQRTRAGSPELVPAGPSAVEGEEGSWTPGGPQVPRKRSAAPSRQRXHWLRCTPAXQRRGDWPRAAGRCHAARPPAAGSRAPTKISARPTRISRLGPRAASKAQRLQRL

SEQ ID NO: 35442 - protein, 74 aa, Homo sapiens
  misc_feature (1)...(74): Xaa = X or * as defined in Table 2
KLKATMNSFHKSXSCALVSTRPCSPRGDPRATLTTIPALVEPPCGTQDPKMAAEAPQRPGKRLGRNLLTRRRPT

SEQ ID NO: 35443 - protein, 1882 aa, Homo sapiens
LLEKLRQRIHDKAVALERAIDEKFSALEEKEKELRQLRLAVRERDHDLERLRDVLSSNEATMQSMESLLRAKGLEVEQLSTTCQNLQWLKEEMETKFSRWQKEQESIIQQLQTSLHDRNKEVEDLSATLLCKLGPGQSEIAEELCQRLQRKERMLQDLLSDRNKQVLEHEMEIQGLLQSVSTREQESQAAAEKLVQALMERNSELQALRQYLGGRDSLMSQAPISNQQAEVTPTGRLGKQTDQGSMQIPSRDDSTSLTAKEDVSIPRSTLGDLDTVAGLEKELSNAKEELELMAKKERESQMELSALQSMMAVQEEELQVQAADMESLTRNIQIKEDLIKDLQMQLVDPEDIPAMERLTQEVLLLREKVASVESQGQEISGNRRQQLLLMLEGLVDERSRLNEALQAERQLYSSLVKFHAHPESSERDRTLQVELEGAQVLRSRLEEVLGRSLERLNRLETLAAIGGAAAGDDTEDTSTEFTDSIEEEAAHHSHQQLVKVALEKSLATVETQNPSFSPPSPMGGDSNRCLQEEMLHLRAEFHQHLEEKRKAEEELKELKAQIEEAGFSSVSHIRNTMLSLCLENAELKEQMGEAMSDGWEIEEDKEKGEVMVETVVTKEGLSESSLQAEFRKLQGKLKNAHNIINLLKEQLVLSSKEGNSKLTPELLVHLTSTIERINTELVGSPGKHQHQEEGNVTVRPFPRPQSLDLGATFTVDAHQLDNQSQPRDPGPQSAFSLPGSTQHLRSQLSQCKQRYQDLQEKLLLSEATVFAQANELEKYRVMLTGESLVKQDSKQIQVDLQDLGYETCGRSENEAEREETTSPECEEHNSLKEMVLMEGLCSEQGRRGSTLASSSERKPLENQLGKQEEFRVYGKSENILVLRKDIKDLKAQLRNATRAIQNLKSRVRSLSVTSDYSSSLERPRKLRAVGTLEGSSPHSVPDEDEGWLSDGTGAFYSPGLQAKKDLESLIQRVSQLEAQLPKNGLEEKLAEELRSASWPGKYDSLIQDQARELSYLRQKIREGRGICYLITRHAKDTVKSFEDLLRSNDIDYYLGQSFREQLAQGSQLTERLTSKLSTKDHKSEKDQAGLEPLALRLSRELQEKEKVIEVLQAKLDARSLTPSSSHALSDSHRSPSSTSFLSDELEACSDMDIVSEYTHYEEKKASPSHSDSIHHSSHSAVLSSKPSSTSASQGAKAESNSNPISLPTPQNTPKEANQAHSGFHFHSIPKLASLPQAPLPSAPSSFLPFSPTGPLLLGCCETPVVSLAEAQQELQMLQKQLGESASTVPPASTATLLSNDLEADSSYYLNSAQPHSPPRGTIELGRILEPGYLGSSGKWDVMRPQKGSVSGDLSSGSSVYQLNSKPTGADLLEEHLGEIRNLRQRLEESICINDRLREQLEHRLTSTARGRGSTSNFYSQGLESIPQLCNENRVLREDNRRLQAQLSHVSREHSQETESLREALLSSRSHLQELEKELEHQKVERQQLLEDLREKQQEVLHFREERLSLQENDSSGPCLSLVRLQHKLVLLQQQCEEKQQLFESLQSELQIYEALYGNSKKGLKAYSLDACHQIPLSSDLSHLVAEVRALRGQLEQSIQGNNCLRLQLQQQLESGAGKASLSPSSINQNFPASTDPGNKQLLLQDSAVSPPVRDVGMNSPALVFPSSASSTPGSETPIINRANGLGLDTSPVMKTPPKLEGDATDGSFANKHGRHVIGHIDDYSALRQQIAEGKLLVKKIVSLVRSACSFPGLEAQGTEVLGSKGIHELRSSTSALHHALEESASLLTMFWRAALPSTHIPVLPGKVGESTERELLELRTKVSKQERLLQSTTEHLKNANQQKESMEQFIVSQLTRTHDVLKKARTNLEVKSLRALPCTPAL

SEQ ID NO: 35444 - protein, 51 aa, Homo sapiens
  misc_feature (1)...(51): Xaa = X or * as defined in Table 2
YLGRHLCLFSEHEEHSSRKEMVLVEGLCSEQGRRGXTLASSSERKPLENER

SEQ ID NO: 35445 - protein, 125 aa, Homo sapiens
  DOMAIN (9)..(47): Peptidase family U32 proteins domain identified by eMATRIX, accession number BL01276D, p-value=1.794e-09, raw score of 18.39
  misc_feature (1)...(125): Xaa = X or * as defined in Table 2
TDEPSLLSHTFCPKGALLSACSGACPLSSGTQAGMPPSTEALQPCRGLTVPHQLGXRPQGMLWWKALAADWSVEWQKGRRGLGKALSVTSRTGRLLCRXGSAEAAASPLAASPRRSSRALGAGIP

SEQ ID NO: 35446 - protein, 51 aa, Homo sapiens; identical to SEQ ID NO: 35444
  misc_feature (1)...(51): Xaa = X or * as defined in Table 2

SEQ ID NO: 35447 - protein, 289 aa, Homo sapiens
  DOMAIN (178)..(233): Eukaryotic initiation factor 1A proteins domain identified by eMATRIX, accession number BL01262, p-value=1.000e-40, raw score of 22.38
  DOMAIN (158)..(258): Eukaryotic initiation factor 1A domain identified by PFam, accession name eIF-1a, E-value=3.2e-71, PFam score of 250.0
EAEALENQSQPCDTGPNQHLAHQGPPSTRAPSCHNANNAIKISRRSCCYQKPLSLLRRTSWRNRELYLVGEPLLKQDSKQVQVDLQDLGYETCGQSKNEAEQEETTSPAPTWSRALPRVAPRSSSRRGRRYPERSQRRREVAATAMPKNKGKGGKNRRRGKNENESEKRELVFKEDGQEYAQVIKMLGNGRLEAMCFDGVKRLCHIRGKLRKKVWINTSDIILVGLRDYQDNKADVILKYNADEARSLQAYGELPEHAKINETDTFGPGDDDEIQFDDIGDDDEDIDDI

SEQ ID NO: 35448 - protein, 183 aa, Homo sapiens
  misc_feature (1)...(183): Xaa = X or * as defined in Table 2
RRYRPRRVQDPGGPAEAERGPPRRLLNARVHVCRAEASERAPGPCGRVSAHVERARDPRLEXQLEDKAAPRQDFTQQLRGPEKQHRMVWQEKEDMHKQLVEASETLKSQAKELKDAHQQQKLALQEFLELNELMAELYSQKQKVWDKEEEMEVAMQKADMMWQEIXRSKKLRKRMLFSQMRWL

SEQ ID NO: 35449 - protein, 167 aa, Homo sapiens
GSFPGPAPLGQTLVTLGLAWQSSGWILRGWLVPPRAKCSPRGQALAICLSLRGLGARSTWAETRPQGPRGSLASLCPAHMDLSIWKTGDGGPRSAFSKVHQGSLNTFGVDTAARRLSQARTAPSPSVSAPSSAAAPASAGPPPAPGAPPTPAQALRPAPPSPRPAER

SEQ ID NO: 35450 - protein, 139 aa, Homo sapiens
  misc_feature (1)...(139): Xaa = X or * as defined in Table 2
VGELLPFRFKISLRPFLALCLSSLGPCRQPHSGSVPAXNPLLGPRAKSSPHSGCGLAPFAIPELLRRLPLEGSAHCPAPEGAASPPTSWDSADPPCRETSIFAPPRVVLTPGPSAPQASPSQPLLFLTPRWDRLPESVL

SEQ ID NO: 35451 - protein, 61 aa, Homo sapiens
  misc_feature (1)...(61): Xaa = X or * as defined in Table 2
VGFFFFFWWGERGTGSYSVTQARVQXYDLGSLQLLPPSFKGFSCLSLPGSWYYRHGPPRLG

SEQ ID NO: 35452 - protein, 235 aa, Homo sapiens
  misc_feature (1)...(235): Xaa = X or * as defined in Table 2
EDGDWDQRRGGEAGDQDQRRGGEDEDQDQRRGGEDGNRDQKRDGENGDWDWKREDENKDQDEKREGEDGNQDQRRGGEDGDQDQRRGGEDGNQDQRRGGKDGDQDQGRGGEDGDQDQGREGEDGDQEQRRRGEDGEXDQRRGGEDGGQDQKRGGEDGNQDWSREGEDRDXHWRRGGEVGEXDQRRGGEDGEXGQRRGSEDGDWDRSRGGEDGDQDQRSVGHLCHSQGPPASGCVS

SEQ ID NO: 35453 - protein, 126 aa, Homo sapiens
  misc_feature (1)...(126): Xaa = X or * as defined in Table 2
RCSGQGGFDGNKGTKALPTISADTTRCWRTLRVTQMTCRFRRFKAFFIGIMSCGRTGRILFPPCSSMSWIPCRAKNSXGNVISQSPSKNRWQIMMVIQLLNFYLPGDFVSFRIMLKGNWEVTRTRG

SEQ ID NO: 35454 - protein, 406 aa, Homo sapiens
  misc_feature (1)...(406): Xaa = X or * as defined in Table 2
ERRKRAVGGFDLVLGEQPSDKIFRXVIVXGLALWLPLSKSFVIPPAELAINPSAKCKTDMTVMEDAVEVRXVWLQDXGLDSLEVLLDSFGPVRDCSKDNGGCSKNFRCISDRKLDSTGCVVGLPCKLVVDSSGCYDRHIGVDCSDGFNGGCEQLCLQQMAPFPDDPTLYNILMFCGXVELPARPLDGRSCQLITETCPEGSDCGESRELPMNQTLFGEMFFGYNNHSKEVAAGQVLKGTFRXTSYTXNXYQQLPDGLVVATVPLENQCLEEISEPTPDPDFLTGECAFSTLFGYPVLQHWKVRSVMYHIKLNQVAISQGEHCCRLSCDGATSRADFVALLDQFGNHYIQEAIYGFEESCSIWYPNKQVQRRLWLEYEDISKGEWHACWQILSTFPWIVISLHNCLP

SEQ ID NO: 35455 - protein, 58 aa, Homo sapiens
  DOMAIN (1)..(50): Hsp90 protein domain identified by PFam, accession name HSP90, E-value=5.3e-22, PFam score of 86.5
  misc_feature (1)...(58): Xaa = X or * as defined in Table 2
FYSAFLVADKVIVTSKHNNDTQHIWESDSNEFSVIADPRGNTLGRGTTITXVSIPPSL

SEQ ID NO: 35456 - protein, 818 aa, Homo sapiens
  DOMAIN (74)..(95): 90 KD HEAT SHOCK PROTEIN SIGNATURE domain identified by eMATRIX, accession number PR00775A, p-value=9.743e-18, raw score of 9.90
  DOMAIN (72)..(804): Hsp90 protein domain identified by PFam, accession name HSP90, E-value=0, PFam score of 1143.1
  misc_feature (1)...(818): Xaa = X or * as defined in Table 2
MRALWVLGLCCVLLTFGSVRADDEVDVDGTVEEDLGKSREGSRTDDEVVQREEEAIQLDGLNASQIRELREKSEKFAFQAEVNRMMKLIIHSLLXNKGIFLERLISNSSCALDRLSLISLTDENALSVNEXLTVNIKCDKEKNLLHVQHTGVGMTREELVKNLGTIAQIWDQASFLNKMPXSHRKMGPVNLPELIGPVWVSGFLFPPSLVADKVIVTSKHKQPIPQHIWGVWTPNGIFLXLLDPRGKHSXDRGNRQFTLCPXKEEASDLPWNLDTIKNLRQKNIHSFIKLFLIYVWSSKTETVXGAPWGEEEAAKEEKEESDDEAAVEEEEEEKKPKTKKVEKTVWDWELMNDIKPIWQRPSKEVEEDEYKAFYKSFSKESDDPMAYIHFTAEGEVTFKSILFVPTSAPRGLFDEYGSKKSDYIKLYVRRVFITDDFHDMMPKYLNFVKGVVDSDDLPLNVSRETLQQHKLLKVIRKKLVRKTLDMIKKIADDKYNDTFWKEFGTNIKLGVIEDHSNRTRLAKLLRFQSSHHPTDITSLDQYVERMKEKQDKIYFMAGSSRKEAESSPFVERLLKKGYEVIYLTEPVDEYCIQALPEFDGKRFQNVAKEGVKFDESEKTKESREAVEKEFEPLLNWMKDKALKDKIEKAVVSQRLTESPCALVASQYGWSGNMERIMKAQAYQTGKDISTNYYASQKKTFEINPRHPLIRDMLRRIKEDEDDKTVLDLAVVLFETATLRSGYLLPDTKAYGDRIERMLRLSLNIDPDAKVEEEPEEEPEETAEDTTEDTEQDEDEEMDVGTDEEEETAKESTAEKDEL

SEQ ID NO: 35457 - protein, 98 aa, Homo sapiens
  misc_feature (1)...(98): Xaa = X or * as defined in Table 2
RWGLAMFPSLDNKSETLSQKKKKKDLCPHISFEMDLTTADARWVQDAATRLLATTRCPPNSRGSRXXISWRAGCCPGGWAGPHWGHDGCLXPSCVSSS

SEQ ID NO: 35458 - protein, 158 aa, Homo sapiens
  misc_feature (1)...(158): Xaa = X or * as defined in Table 2
GRLPRHRGGEPGAAQPAGRQPRGGAAATAAGAPRAGGGAAAGNARRCREAAARDPHHGEGSGPEPSQCEGAAHQRAGRAQGDXGGSGATGEGGRRGHDSHNPLGRVRGSTLPPSXXNXVGLXVPSWPQCGPAHPPGQHPALQEIHQRLPLESGGHRVV

SEQ ID NO: 35459 - protein, 147 aa, Homo sapiens
  misc_feature (1)...(147): Xaa = X or * as defined in Table 2
RTGSWGWSASQQRHRKDRGLDSAGSGWVSHILPVPAPPPADARPSASRWRRQGSHPLPGRTECPSVQPLCLPPPAGHHRNHSIASPSQTPPPRSLPGSQDKSLFLPRDRRTGEGEGHMNXAPLSAPGTSCRSGGSTSWLPEILGPTQ

SEQ ID NO: 35460 - protein, 79 aa, Homo sapiens
  misc_feature (1)...(79): Xaa = X or * as defined in Table 2
DIFKVGGCFLFKRLRCQQRFFLLIFSSSTQSAXRVSNGPYHXEIKMAVYYGELRKNGLIQESCDNIQPRQGSFNMDSMQ

SEQ ID NO: 35461 - protein, 43 aa, Homo sapiens
MITSPEWWNSALGPGSPTEELFNLFPVRRELIFMIEFKRTMEP

SEQ ID NO: 35462 - protein, 164 aa, Homo sapiens
  misc_feature (1)...(164): Xaa = X or * as defined in Table 2
LSQRFPLSSRIKLQRLSLQNGIPQIKELDYLFRTNSNQINFNLLSHRVRARPPAPPGRPNPSPGPDRPPEPPARAGSSRRGPGEPPRRQPQRRFRRRGPDRPGRLSRGLXRRRARPASPQPRQHHSRGPAGRPGVAPRRPAGLAAAAERLTARGAAASPAIPRA

SEQ ID NO: 35463 - protein, 138 aa, Homo sapiens
  misc_feature (1)...(138): Xaa = X or * as defined in Table 2
HLRNRTRPSQITPHIYNHLIFDKPLFNIWWWENWLAICRKLKLDPFLTPYTKINSRWIKDXNIRPKSIKNLEENLGNTIQHLGIGKDFMTKTPKAMATKAKIDIWDLIKLKSFCTAKETIIRVNRLPTXWEKIFAIYP

SEQ ID NO: 35464 - protein, 253 aa, Homo sapiens
  DOMAIN (17)..(64): kw TRANSCRIPTASE REVERSE II ORF2 domain identified by eMATRIX, accession number DM01354V, p-value=1.000e-40, raw score of 12.97
  misc_feature (1)...(253): Xaa = X or * as defined in Table 2
LIGYQPKMSRTRRIHSRILPERIKYLGSQLIRDVKDLLKENYKPLLNEIKEDTNKWKNIPCSWIGRISIVKMAILPQAICGKLKLDPFLTPYTKINSRWIKDLNVGPTTIKTLEENLGNTIQAIGMGEDFMTKTPKAMATKAKIDKWDLIKLKSFCTAKETTIRVNRQPTEWENIFTIYPSDKGLISRIYKELNQIYKKKTRNPIKKXVRDMNRHFSKEDIYAAHRHMKKCSSLLDIREMQIKTTMRYHLTPI

SEQ ID NO: 35465 - protein, 103 aa, Homo sapiens
  misc_feature (1)...(103): Xaa = X or * as defined in Table 2
LKSFCMAKETTIRVNRXPTEWENIFAIYPSEKGLIYRIYNEATNKDLVRRSGPLKTPKKKSQLTVLNLVTFKRTPALSEEKESAQVLWQFKKPECVLTSKRVH

SEQ ID NO: 35466 - protein, 1015 aa, Homo sapiens
  DOMAIN (10)..(65): kw TRANSCRIPTASE REVERSE II ORF2 domain identified by eMATRIX, accession number DM01354Q, p-value=1.000e-40, raw score of 9.23
  DOMAIN (1)..(834): Reverse transcriptase domain identified by PFam, accession name rvt, E-value=1.3e-102, PFam score of 354.3
  misc_feature (1)...(1015): Xaa = X or * as defined in Table 2
MNIDAKILNKILANRIQQHIKKLIHHDQVGFIPEMQGWVNICKSINIIQHINRTKDKNHMIISIDAEKAFDKIQQRFMLKTLNKLGIDGTYLKIIRAIYDKPTANIILNGQKLEAFPLKTGTRQGCPLSPLLFNIVLEVLARAIMQEKEIKGIQLGKEEVKLSLFADDMIVYLENPIVSARNLLKLISNFSKVSGYKINVQKSQTFLHTNNRQRESQIMSELPFTIASKRIKYLEIQLTRDVKDLFKENYKPLLNEIKEDTSKWKNIPCLWIGRINIMKMSILPKVIHKFNAIPIKRPITFFTELEETTLKFIWNQKRARIAKTILSKKNKAGGITLPDFKLYYKATVTKTAWYWQKNRDTEQWNRTEASEIMPHIYYNYLIFDKPEKNKQWGKDSLFNKWCWENWLAICRKLKLDPFLTPYTKINSRWIKDLNVRPKTIKTLEENLGNTIQDIGMGQDLMTKTPKAMATKAKIDRWDLIKLKSFCTAKETISRVNRQPTEWEKIFGIYPSDKGLTSRIYNELQQIYKKKTNNPIKKWAKHMNKHFSKEDIYAAKKHMKKCSSPLAIREMQIKATMRYHLTSVRMAIIKKSGNNRCVRHFSSLAKLXHIKKLIHHDQVGFIPEMQGWVNICKSINIIQHINRTKDKNHMIISIDAEKAFDKIQQRFMLKTLNKLGIDGTYLKIIRAIYDKPTANIILNGQKLEAFPLKTGTRQGCPLSPLLFNIVLEVLARAIMQEKEIKGIQLGKEEVKLSLFADDMIVYLENPIVSARNLLKLISNFSKVSGYKINVQKSQTFLHTNNRQRESQIMSELPFTIASKRIKYLEIQLTRDVKDLFKENYKPLLNEIKEDTSKWKNIPCLWIGRINIMKMSILPKVIHKFNAIPIKRPITFFTELEETTLKFIWNQKRARIAKTILSKKNKAGGITLPDFKLYYKANSNQNSMVLAEKQRYRTMEQNRGLRNNATYIYNYLIFDKPEKNKQWGKGFPYLINGAGKTGLAICRKLKLGSLPYTLYKN

SEQ ID NO: 35467 - protein, 143 aa, Homo sapiens
  misc_feature (1)...(143): Xaa = X or * as defined in Table 2
GGVFFLRTPTDCCGMLQGAAGSTGFYASEARPRGPACSLDRGSSSLLSWGLHQDPLFPAAKQHRREAGRADQNSPRPRLSTGXQTPTLXRRPAAATGRRRAQPPRATSVSAPASPPCPRARPPHHARPPRVLACQPXATAPGP

SEQ ID NO: 35468 - protein, 115 aa, Homo sapiens; identical to SEQ ID NO: 34208
  DOMAIN (25)..(72): kw TRANSCRIPTASE REVERSE II ORF2 domain identified by eMATRIX, accession number DM01354V, p-value=1.000e-40, raw score of 12.97

SEQ ID NO: 35469 - protein, 444 aa, Homo sapiens
  DOMAIN (76)..(123): kw TRANSCRIPTASE REVERSE II ORF2 domain identified by eMATRIX, accession number DM01354V, p-value=1.000e-40, raw score of 12.97
LEVLARAIRQEKEIKGIQLGKEEVKLSVSADDMIVYLENPIVSAQNLLKLISNFSKVSGYKINVQKSQAFLYTNNRQRAKSIKYLGIQLTRDVKDLFKENYKPLLKEIKEDTNKWKNIPCSWVGRINIVKMAILPKVIYRFNAIPIKLPMPFFTELEKTTLKFIWNQKRARIAKSILSQKNKAGGITLPDFKLYYKATITKTAWYWYQNRDIDQWNRTEPSEITPHIYNYLIFDKPEKNKQWGKDSLFNKWCWENWLAVCRKLKLDPFLTPYTKINSRWIKDLNVRPKTIKTLEENLGITIQDIGMGKDFMSKTPKAMATKAKIDKWDLIKLKSFCTAKETTIRVNRQPTKWEKIFATYSSDKALISRIYNELKQIYKKKTNNPIKKRAKDMNRHFSKEDIYAARKHMKKCSPSLAIREMQIKTTMRYHLTPVRMAIIKKSGNN

SEQ ID NO: 35470 - protein, 92 aa, Homo sapiens
  DOMAIN (31)..(78): kw TRANSCRIPTASE REVERSE II ORF2 domain identified by eMATRIX, accession number DM01354V, p-value=1.000e-40, raw score of 12.97
TSMQKSSIKYWQTESSSTSKSLSTKIKMASSLGCKRIKYLGIQLTRDVKDLFKENYKPLLKEIKEDTNKWKNIPCSWVGRINIVKMAILPKE

SEQ ID NO: 35471 - protein, 456 aa, Homo sapiens
  DOMAIN (291)..(338): kw TRANSCRIPTASE REVERSE II ORF2 domain identified by eMATRIX, accession number DM01354V, p-value=1.000e-40, raw score of 12.97
MVSIFSCVFSAPHHTNSKIDHILGSKAVLSKCKRTEIITNYLSDHSAIKLQLRIKNLTQNHSTTWKLNNLLLNDYWVHNEMKAEIKMFFETKENKDTTYQNLWDAFKAVCRGKFIALNAHKRKQERSKIDTLTSQLKELEKQEQTHSKASRRQEIIKIRAELKEIETQKTLQKINESRSWFFERINKIDKPLARVIKKKREKNQIDTIKNDKGDITTIPTEIQTTIREYYKHLYANKLQNLEEMDKFPDTYTLPRLNQPITGSEIVAIINSLPTKKSPGPDGFTAEFHQRYKEELRIKYLGIQLTRDVKDLFKENYKPLLKEIKEETNKWKNIPCSWVGRINIVKMAILPKVIYRFNAIPIKLPMTFFTELEKTTLKFIWNQKRARIAKSILSQKNKAGGITLPDFKLYYKATVTKTAWYWYQNRDIDQWNRTEPSEITPHIYNYLIFDKPEKNKQ

SEQ ID NO: 35472 - protein, 280 aa, Homo sapiens
  DOMAIN (7)..(54): kw TRANSCRIPTASE REVERSE II ORF2 domain identified by eMATRIX, accession number DM01354V, p-value=1.000e-40, raw score of 12.97
  misc_feature (1)...(280): Xaa = X or * as defined in Table 2
MSELPFTIASKRIKYLGIQLTRDVKDLFKENYKPLLKEIKEDTNKWKNIPCSWVGRINIVKMAILPKVIYRFNAIPIKLPMTFFTELEKTTLKFIWNQKRACIAKAILSQKNKAGGITLPDFKLYYKATVTKTACLLNRRALPLANRGRKNPVFGGPPKTVPISPAKVGGHPETREQPPLSRNPPVFSLGPPEWGNPKLGATKAFGSKRASQPNPPEKRPGLKSPPGANPPRPLDPPVARENHQNPICGPPSPPQIPVTKPRSPHDRQTALSHRTSTFHX

SEQ ID NO: 35473 - protein, 320 aa, Homo sapiens
  DOMAIN (37)..(83): kw TRANSCRIPTASE REVERSE II ORF2 domain identified by eMATRIX, accession number DM01354O, p-value=1.000e-40, raw score of 8.73
MDKFLNTYTLPRLNQEEVETLKRPITGAEIEAIINNLPTKNSPGPDGFTAEFYQRYKEEMVPFLLKLFQSIEKEGILPISFYEASIILIPKPGRDTTKKENFRPISLTNIDVPEVLAGAIRPEKEIKGIHIDKEEVKLSLFADNTIVYLENPKDSSRKFLKLIKEFSKVSGYKINRATWQLCSTSKGNPTTASGLAWETYLTLWAEDSFPQLGKTRKPRLWKLFLSPQQILVQTETATYQGCQLKTLQAYLVHALSLTKLLCIRIKYLGIQLTRDVKELFKENYKPLLNEIKEDTNKWKNIPCSWVGRINIVKMAILPKE

SEQ ID NO: 35474 - protein, 23 aa, Homo sapiens
KSFYLFNKHKQLNKQTMEASPFA

SEQ ID NO: 35475 - protein, 263 aa, Homo sapiens
  DOMAIN (29)..(76): kw TRANSCRIPTASE REVERSE II ORF2 domain identified by eMATRIX, accession number DM01354V, p-value=1.000e-40, raw score of 12.97
  misc_feature (1)...(263): Xaa = X or * as defined in Table 2
GLQNPKHQSSQLVDLKMKKSLLQCMFQYLIVLQXYLKXYLGTQLTRDVKDLFKENYKPLLKEIKEDTNKWKNIPCSWIGRINIVKMAILPKDPTTAQLSPRGSTAQKGHWRPCPLPPRGVPRSPRGPTSHPHHDPCPGGAPVRNTGSERWQRKLRSGPKSDWAGRAQAPSLGEGGAKNGKSHPGSHRAFSLPRAPRRLGPGSQPGRFRGFLKQARGRAGEGHSAILLAPESPNAQVSNVTSATYRSNLSGLPRPCSVVLLGGP

SEQ ID NO: 35476 - protein, 740 aa, Homo sapiens
  DOMAIN (149)..(194): kw TRANSCRIPTASE REVERSE II ORF2 domain identified by eMATRIX, accession number DM01354N, p-value=1.000e-40, raw score of 13.17
  misc_feature (1)...(740): Xaa = X or * as defined in Table 2
MKAEIKTFFETNENKDTTYQNLWDAFKAVCRGKFTALNAHKRKQERSKIDTLTSQLKELEKQEQTHSKASRRQEITKIRAELKEIETQKALQKINESRSWCFEKIHKIDRPLARLIKKKREKNQIDAIKNDKGDITTDPTEIQTTIREYYKHLYANKLENLEEMDKFLDTYTLPRLNQEEVESLNRPITGSEIVAIINSLPTKNSPGPDGFTAEFYQRYKEELRIKYLGIQLTRDVKDLFKENYKPLLNEIKEDTNKWKNIPCSWVGRINIVKMAILAQGNLXIYKFNAISIKLPFTFFIGLEKNLTFKFIWNQKRSRIAKSILSQKNKAGGITLPDFQTITYKATVTKTAWYWYQNRDIDQWNRTEPSEITPHIYTILIFDKPEKNKHGGKASLFIKWCWENWLAICRKLKLDPFLTPYTTINSRWIKDLNLRCQIIKTLEENLDNTIQDTDIGKDFMTKTPKAMATKAKIDKWDLIKLKSFCTAKETTIRVNRQPIEREKIFAIYPSDKGLISKIYKELKQIYKKKNKQPHQKVGEGYEQILLKRRHLCSQQTHESMAHHHWPCREMQINTTMRYHLTPVRMAIIKKSGNNRCWRGCGEIGTLLHCWWDCKLVQPLWKSVWRFLRDLELEIPFDPAIPLLGIYPNDYKSCCYKDTCTRMFIAALFTIAKTWNQPKCPTMIDWIKKMWHIYTMEYYAAIKIDEFMSFVGTWMKLEIIILSKLSQEQKTKHRIFSLIGGN

SEQ ID NO: 35477 - protein, 118 aa, Homo sapiens
  misc_feature (1)...(118): Xaa = X or * as defined in Table 2
DLLTRTACAVPGWGCSSRATCQARGWRLLSSPPHPSGVQPLLCHLPYPPSPFSLLSNLTPFLRAFPRSLETSXKWARTWPGAVAHACNPSSLGGRGRWITXGREFETNLTNMEKPCLY

SEQ ID NO: 35478 - protein, 45 aa, Homo sapiens
  misc_feature (1)...(45): Xaa = X or * as defined in Table 2
YLTKIWPGAVAHTCNPSTLGGRGGWITXGQEFETSLANMVKPHLY

SEQ ID NO: 35479 - protein, 89 aa, Homo sapiens
  misc_feature (1)...(89): Xaa = X or * as defined in Table 2
PQVIHPPRAPKLLELQEPPRWIHDLNQDTPSALCQHXRTCXHRAEGVSWFKSWIHLGGSCNSSSLGARGGWITXGQEFETSLTNMAKPH

SEQ ID NO: 35480 - protein, 46 aa, Homo sapiens
MLVQAGLELLTSGDPPTLASQSAGITGVTPGARPTSIFLNQQNCLA

SEQ ID NO: 35481 - protein, 245 aa, Homo sapiens
MDGTRTSLDIEEYSDTEVQKNQVLTLEEWQDKWVNGKTAFHQEQGHQLLKKHLDTFLKGKSGLRVFFPLCGKAVEMKWFADRGHSVVGVEISELGIQEFFTEQNLSYSEEPITEIPGTKVFKSSSGNISLYCCSIFDLPRTNIGKFDMIWDRGALVAINPGDRKCYADTMFSLLGKKFQYLLCVLSYDPTKHPGPPFYVPHAEIERLFGKICNIRCLEKVDAFEERHKSWGIDCLFEKLYLLTEK

SEQ ID NO: 35482 - protein, 67 aa, Homo sapiens
MFVRNPLGTILFLFLFFNFFYYFFFWGRKCPLLVAPRLEVQMAVILAHCKPSPPGFKVILPASALPE

SEQ ID NO: 35483 - protein, 61 aa, Homo sapiens
  misc_feature (1)...(61): Xaa = X or * as defined in Table 2
MGSYQVACVTSNAEMCVMVQIYLLPKSAPVSPFHIHGKTDGKPHAKCLGSDGPQLLIPTGX

SEQ ID NO: 35484 - protein, 76 aa, Homo sapiens
  misc_feature (1)...(76): Xaa = X or * as defined in Table 2
HHHYCQHHHHHHHHHHHHHHLPAPCRNLRVXPVCFRYKLWFHYGKQHLLFLDFLLSHSEWCEMVSHCGFDLHFSDD

SEQ ID NO: 35485 - protein, 128 aa, Homo sapiens
  misc_feature (1)...(128): Xaa = X or * as defined in Table 2
TDTKPLSCSSCPPRGKKPVSHRDQXRRWGRRCRGEPGTEACWSAGALQFXKPRSRGGRTSKMTSGPSAEKGGGXAGRKPGRRHFGRRVLRHSCVLPVARELWGRHGPCGWRQKNVPWKWSELLPVVAP

SEQ ID NO: 35486 - protein, 92 aa, Homo sapiens
  misc_feature (1)...(92): Xaa = X or * as defined in Table 2
MPPPPPPSESPGPGPVGSRLPPGPAVTGNEKELRGNPXVGLAPPRPRFRASRREGVTGKVHRPNRLQLRAPPKGXSDQRGQNVPPSEAKSLC

SEQ ID NO: 35487 - protein, 1095 aa, Homo sapiens
  DOMAIN (632)..(673): PROTEIN GTPASE DOMAIN ACTIVATION domain identified by eMATRIX, accession number PD00930B, p-value=3.189e-22, raw score of 33.72
  DOMAIN (529)..(681): RhoGAP domain identified by PFam, accession name RhoGAP, E- value=4.4e-53, PFam score of 189.8
RTRGLDFFRGSINSQFEFGRKKENMTSPAKFKKDKEIIAEYDTQVKEIRAQLTEQMKCLDQQCELRVQLLQDLQDFFRKKAEIEMDYSRNLEKLAERFLAKTRSTKDQQFKKDQNVLSPVNCWNLLLNQVKRESRDHTTLSDIYLNNIIPRFVQVSEDSGRLFKKSKEVGQQLQDDLMKVLNELYSVMKTYHMYNADSISAQSKLKEAEKQEEKQIGKSVKQEDRQTPRSPDSTANVRIEEKHVRRSSVKKIEKMKEKRQAKYTENKLKAIKARNEYLLALEATNASVFKYYIHDLSDLIDQCCDLGYHASLNRALRTFLSAELNLEQSKHEGLDAIENAVENLDATSDKQRLMEMYNNVFCPPMKFEFQPHMGDMASQLCAQQPVQSELVQRCQQLQSRLSTLKIENEEVKKTMEATLQTIQDIVTVEDFDVSDCFQYSNSMESVKSTVSETFMSKPSIAKRRANQQETEQFYFTKMKEYLEGRNLITKLQAKHDLLQKTLGESQRTDCSLARRSSTVRKQDSSQAIPLVVESCIRFISRHGLQHEGIFRVSGSQVEVNDIKNAFERGEDPLAGDQNDHDMDSIAGVLKLYFRGLEHPLFPKDIFHDLMACVTMDNLQERALHIRKVLLVLPKTTLIIMRYLFAFLNHLSQFSEENMMDPYNLAICFGPSLMSVPEGHDQVSCQAHVNELIKTIIIQHENIFPSPRELEGPVYSRGGSMEDYCDSPHGETTPVEDSTQDVTAEHHTSDDECEPIEAIAKFDYVGRTARELSFKKGASLLLYQRASDDWWEGRHNGIDGLIPHQYIVVQDTEDGVVERSSPKSEIEVISEPPEEKVTARAGASCPSGGHVADIYLANINKQRKRPESGSIRKTFRSDSHGLSSSLTDSSSPGVGASCRPSSQPIMSQSLPKEGPDKCSISGHGSLNSISRHSSLKNRLDSPQIRKTATAGRSKSFNNHRPMDPEVIAQDIEATMNSALNELRELERQSSVKHTPDVVLDTLEPLKTSPVVAPTSEPSSPLHTQLLKDPEPAFQRSASTAGDIACAFRPVKSVKMAAPVKPPATRPKPTVFPKTNATSPGVNSSTSPQSTDKSCTV

SEQ ID NO: 35488 - protein, 63 aa, Homo sapiens
  misc_feature (1)...(63): Xaa = X or * as defined in Table 2
IPLSLQSKEVGQQLQDDLMKVLNELYSVNQMGCLALXQAEGSSIWQLAAIVHQQQNXTPSWGQ

SEQ ID NO: 35489 - protein, 108 aa, Homo sapiens
  misc_feature (1)...(108): Xaa = X or * as defined in Table 2
VQAPGKCHAQMPAPAAPVPLGRSRNPGRLASAVPVSSLLRFLPFLQPIPPSDILPLSFEAVPSSPAAESGLHPCTRRRKRARPSCXVPGLLLSPQPHPPPHVWRKGIL

SEQ ID NO: 35490 - protein, 264 aa, Homo sapiens
  misc_feature (1)...(264): Xaa = X or * as defined in Table 2
FRGFLDRGDCAALPCTYPHSPCSHXGGNCLPSLLTRPCVKAXPQMSGRKSSMRRWRRQSRLTAGTSSXTPTSSTMCXALVGSSTWNCMLQAGSTAPGAGTPGSRPTWSSSSTCSWTAPSGRARCACASSSSCAMSAARRGWTSPACWRRTSRAWWTTSSPACASSATASVAASTASTWPAARTTGGTAESSARPARRASCTGSPARSCWRRRRPPTPSPGRPAPPSRRTRRAQAGTSALSPGACFGPRSCCXSSTCSSLSVAPY

SEQ ID NO: 35491 - protein, 76 aa, Homo sapiens
  misc_feature (1)...(76): Xaa = X or * as defined in Table 2
RIGQGVPVVHSXVEGGPNVISIVLEYLRDTPPVPVVVCDGSGRASDILAFGHKYSEEGGXVKVFLWCTHKWKEDPM

SEQ ID NO: 35492 - protein, 442 aa, Homo sapiens
  DOMAIN (1)..(55): Matrix protein (MA) p15. domain identified by eMATRIX, accession number PF01140A, p-value=1.081e-11, raw score of 11.51
  DOMAIN (5)..(62): Matrix protein (MA), p15 domain identified by PFam, accession name gag_MA, E-value=4.7e-09, PFam score of 34.9
MDQEQSKPTPLGTVLKNFKKGFKGDYSVTMTPGKLRTLCEIDWPALEMGWPSEGSLDRSLVSKHNARQGLTVPPGIQAYGAAPFEELQVDFTEMHKCGDLIPRFRLPLQISLDNEPAFVADLVQKTAKGIPTDLQLRVLSVRRKTNNQKGHLHRKPICTSPSSKTKSKEVENFEKNLEECITRITNTEKCLKELMELKTQARELREECRSLRSRCDQLEERVSVMEDQMNEMKREGKFREKRIKRNAQSLQEIWDYVKRPNLRLIGVPESDVENGTKLENTLQDIIQENFPNLARQANVQIQEIQRTPQRYSSRRATPRHIIVRFTKVEMKEKMLRAAREKGRVTLKGKPIRLTADLSAETLQARREWGPIFNILKEKNFQPRISYPAKLSFISEGEIKYFIDKQMLRDFVTTRPALKELLKEALNLERNNRYQLLQNHAKM

SEQ ID NO: 35493 - protein, 111 aa, Homo sapiens
  DOMAIN (1)..(39): Matrix protein (MA), p15 domain identified by PFam, accession name gag_MA, E-value=3.4e-06, PFam score of 25.1
  misc_feature (1)...(111): Xaa = X or * as defined in Table 2
YSVTMTPGKLRTLCEIDWPALEVGWSSEGSLDRSLVXKVLCPELVPSGGFLVSLTSRMKPQTLTGSVKVLKDGMSGVCSFRCSDVSRVSSFWWVRGLAGWSTTLLRKLCVE

SEQ ID NO: 35494 - protein, 69 aa, Homo sapiens
MYGNWSGCLGLRVTLCHTFETRDLSRLPSDGQPTSNAGQSISHKVLSFPGCHSNTGKSPLNSFLNFFLT

SEQ ID NO: 35495 - protein, 136 aa, Homo sapiens
  misc_feature (1)...(136): Xaa = X or * as defined in Table 2
SQAFLPAASRRERPPEPVDPKATDPRSGTRRLPPRLPCQWTTPEHSHTSQLNLSRAFPKEPNPAATQXNPSGASPRERPHARAQEDRNGECXEGNGSRPDLEEEASTPRASPTPSDXPLWLHPPRPLVLETPLLQL

SEQ ID NO: 35496 - protein, 159 aa, Homo sapiens
  misc_feature (1)...(159): Xaa = X or * as defined in Table 2
FLHSTHIYWAHSMHELLKTAVVSISGQCTSLNTESGIWGGVPENARCPPAEGTVPASLQPRDPPRLPGSHASLPSASPPSRHVTWPPEPEAAGPKPSXIRCRWPPAGATTKANPKESGRLVESMLPLPKSRSAPVTFSAFACSGLPERVHEVFRVGKLR

SEQ ID NO: 35497 - protein, 82 aa, Homo sapiens
  misc_feature (1)...(82): Xaa = X or * as defined in Table 2
QSVSSPSWFPQFPVQVQKVPCYQVYRGDLVVXKHVAPPPSLPSSFSGHVRHDCFPFAFHDDRKFPEASPAMLPVSSLGPHYL

SEQ ID NO: 35498 - protein, 43 aa, Homo sapiens
MPSTPTARKPESPEALARVESIACLPSPAPPHECSPQASEETG

SEQ ID NO: 35499 - protein, 808 aa, Homo sapiens
  DOMAIN (642)..(696): Kinesin light chain repeat proteins domain identified by eMATRIX, accession number BL01160B, p-value=5.653e-09, raw score of 19.54
LQAQLKELQRENDLLRKELDIKDSKLGSSMNSIKTFWSPELKKERVLRKEEAARMSVLKEQMRVSHEENQHLQLTIQALQDELRTQRDLNHLLQQESGNRGAEHFTIELTEENFRRLQAEHDRQAKELFLLRKTLEEMELRIETQKQTLNARDESIKKLLEMLQSKGLPSKSLEDDNERTRRMAEAESQVSHLEVILDQKEKENIHLREELHRRSQLQPEPAKTKALQTVIEMKDTKIASLERNIRDLEDEIQMLKANGVLNTEDREEEIKQIEVYKSHSKFMKTKIDQLKQELSKKESELLALQTKLETLSNQNSDCKQHIEVLKESLTAKEQRAAILQTEVDALRLRLEEKESFLNKKTKQLQDLTEEKGTLAGEIRDMKDMLEVKERKINVLQKKIENLQEQLRDKDKQLTNLKDRVKSLQTDSSNTDTALATLEEALSEKERIIERLKEQRERDDRERLEEIESFRKENKDLKEKVNALQAELTEKESSLIDLKEHASSLASAGLKRDSKLKSLEIAIEQKKEECSKLEAQLKKAHNIEDDSRMNPEFADQIKQLDKEASYYRDECGKAQAEVDRLLEILKEVENEKNDKDKKIAELESLTLRHMKDQNKKVANLKHNQQLEKKKNAQLLEEVRRREDSMADNSQHLQIEELMNALEKTRQELDATKARLASTQQSLAEKEAHLANLRIERRKQLEEILEMKQEALLAAISEKDANIALLELSASKKKKTQEEVMALKREKDRLVHQLKQQTQNRMKLMADNYDDDHHHYHHHHHHHHHRSPGRSQHSNHRPSPDQDDEEGIWA

SEQ ID NO: 35500 - protein, 100 aa, Homo sapiens
  misc_feature (1)...(100): Xaa = X or * as defined in Table 2
CLTKNTSATREKQVTELHRRSKLQPEPAKTKALQTVIEXKDITLCXVKEHLYIVACWALRLHLVFLPTKAGISPALMKVSYPGKPLTLKQLGRLVILQEQ

SEQ ID NO: 35501 - protein, 135 aa, Homo sapiens
  misc_feature (1)...(135): Xaa = X or * as defined in Table 2
GVQNGVEELILVRRMQKSPGPGEMESGSLEKEPLGTQTGPVPSEGTEXTQGPPRTPSLQTQGPQRTPSLQTQGPPNTPSLXTQGPLRTLSLQTQGPPNTPSLQTQGPPRTPSLQTQGPQRTPSLQTQGPPNTPSL

SEQ ID NO: 35502 - protein, 59 aa, Homo sapiens
  misc_feature (1)...(59): Xaa = X or * as defined in Table 2
KRVFAHQADGRARSGFISSAGPGSQAGPGQGTGXQREDVEAAGQPGSTAEGVRTXSDPG

SEQ ID NO: 35503 - protein, 182 aa, Homo sapiens
  misc_feature (1)...(182): Xaa = X or * as defined in Table 2
RNERKPSQRTAVGLGAGQLQPGQPGVQSEEPGPLEAGCAAGVLPGPAEQDREGIYSKXKRVFAHQADGRARSGFISSAGPGSQAGPGQGTGXQREDVEAAGQPGSTAEGVRTXSDPGSSHPAAAAFYENIQDGEALGRCGAKRTATAAPXQRGXEGFXAGPTAAEKNEEGPPPVFSLFNSHL

SEQ ID NO: 35504 - protein, 105 aa, Homo sapiens
  DOMAIN (57)..(72): POLLEN ALLERGEN POA PI SIGNATURE domain identified by eMATRIX, accession number PR00833H, p-value=9.625e-10, raw score of 2.30
  misc_feature (1)...(105): Xaa = X or * as defined in Table 2
LTSLFSAISTKAKVSPLCSARACSPSPAARAALGSPGFTCXGAGVAPTPVPVAAPAPATAPATAVAAAATTTVVSAAMFTRRATRAAAATGAWGFVAGAPWPLQT

SEQ ID NO: 35505 - protein, 440 aa, Homo sapiens
  misc_feature (1)...(440): Xaa = X or * as defined in Table 2
MRRCVAAPLAHRWXQKLGLPGCTPTVCSFLSPQPPPRARSSSATLSSGAPRRAATPQPQTTPPSSVQPCAATPCARGGRPAPAGVTWPTTRPSMAXRTSXASTTAPRMAPPRSHACARSHRPETARSARTAPRSAITRRAFTSTRPPPTTRTVASSGTHTSGLSPTASRLARCRAPGRSSTIITXTCRSPTRLCCPAQRPLPPASSPSSSRTSRSVWTRRCTRLRWTSSRPPSWMALRTVGTSTGPTAXRSLRRCQASTWRSRPSTSAPPSWCARWAATXPLPSACQRKWSMLWRTGTARVSTSACGAAPSTSRSTSRPSTPMLRAPVPAGWQPPALHPQPPRPSHTRQPWPSARRSCRWRTCTTRPASSTSSPRATXTSHWPPTTRWRMSRCSTPTKTNCTCMRGLGTCQAGRLRGCPWPPGPSWAPWSRSWPCSLCSA

SEQ ID NO: 35506 - protein, 183 aa, Homo sapiens
  misc_feature (1)...(183): Xaa = X or * as defined in Table 2
ASGPASIVVLRQQFIKFFLDEICSLEERVWCRKLCLLYILWKEPRAVQAKSRCSDIRRELYRPVSLAGLSGDFLRAGRYSAHTVNGAWSAWTSWSQWAXXSRGLLLALHNMLKIIIAFCSLQVATRIQSTFISSWHLSPSLLGSRSFSLYMSFGSVLCPLFISHDTSSYSTKSFQSFSCLGVW

SEQ ID NO: 35507 - protein, 151 aa, Homo sapiens
  misc_feature (1)...(151): Xaa = X or * as defined in Table 2
LQNWSYLAEQCWNGGFIYLIMLRRFKHKAHSTYNGNSSNSSEPGETPTLXLGDRTAKKGKRTRKFGVISRPPANKAPEESKGSAGCEVSSDPSTELENGPDPELGNGHVFQLENGPDSLKEVAGPHLERSEVDRGTEHRIPKTDAPLTTSN

SEQ ID NO: 35508 - protein, 159 aa, Homo sapiens
  misc_feature (1)...(159): Xaa = X or * as defined in Table 2
WPFWAMVQRPSSAILCGPATLPPNCRGACCARCRATGALSAYPAIHRPATRPPAPPAPGPLTSPPPLSVQNSNPDPLPSARPSPGPAAPRHARHSPSELPALTLSARGSSALCTKLKVEAAAXSCSASAWNWRLLPRNHVDSRCQPEPDGARARDGRGP

SEQ ID NO: 35509 - protein, 50 aa, Homo sapiens
PGPVKAQRMEAIARRLQLSPWESSVVNRLLTPTHSFLARSKSTAALSGEA

SEQ ID NO: 35510 - protein, 79 aa, Homo sapiens
RRLQLSPWESSVVNRLLTPTHSFLARSKSTAALSGEAASCSPIIMPYKAAHSRNSMDRPKLFVTPPEGSSRRRIIHGTA

SEQ ID NO: 35511 - protein, 131 aa, Homo sapiens
KPKQKHNRWSWGGSLHGSPSIHSADPDRRSVSTMNLSKYVDPVISKRLSSSSATLLNSPDRARRLQLSPWESSVVNRLLTPTHSFLARSKSTAALSGEAVIPICPRSASCSPIIMPYKAAHSRNSMDRPMY

SEQ ID NO: 35512 - protein, 145 aa, Homo sapiens
RSIRTPRPTSSLPPGSVKAAPAQVRPPSPGNIRPVKREVKVEPEKKDPEKEPQKVANEPSLKGRAPLVKVEEATVEERTPAEPEVGPAAPAMAPAPASAPAPASAPAPAPVPTPAMVSAPSSTVNASASVKTSAGTTDPEEATRL

SEQ ID NO: 35513 - protein, 213 aa, Homo sapiens
  misc_feature (1)...(213): Xaa = X or * as defined in Table 2
XIISTFTSFSLSLVSQKEQLQLSALLRYSLAQQLPDSGFEVGMELARKCSSTLLLHYFIAYPEKVLEKDSSIFSVAIWLKEAAREIVWLEREERARQHYEKHLEERKKRLEEHCLKLKKLQTTSWNLILSSSIPSKERHEAVVRRTMERSQNWNSIGGGGRTFCWCRSTSSSIADEAPHVNIGQGFCKQASPKRFNIYTSCFNEGIDLILLDX

SEQ ID NO: 35514 - protein, 227 aa, Homo sapiens
  misc_feature (1)...(227): Xaa = X or * as defined in Table 2
DAGLSWREATRPGAPLHRPGCQDASTQMTRPGDPGSSALFPLPSPXPEREELPMSSRRSPKPELPGEACSRRPPTRPRPRTATRGPPLNGRLPRARLPVSAGAGALGGGRCRRRVAPRRVTPRLATRPSGVAPRGSGXAATTKLSLAFGVTPLALTPWSRTPFRKREERPPFXYPRPATPEASPAHVENFRSNQTRYTSAEXSGQQLERPSIAEISAQATVEPRSTI

SEQ ID NO: 35515 - protein, 88 aa, Homo sapiens
  DOMAIN (61)..(79): PROTEIN NUCLEAR BROMODOMAIN TRANS domain identified by eMATRIX, accession number PD01234B, p-value=5.500e-09, raw score of 15.53
AEAQGGAEAEGHGGGGGPAPSQGCPARAAGARGWQPAPSPQKPTPSDTTPPPRTQPPVTQPCHPVTQPPVTQPPVTQPRHPMKIPPPG

SEQ ID NO: 35516 - protein, 178 aa, Homo sapiens
  DOMAIN (118)..(156): Synapsins proteins domain identified by eMATRIX, accession number BL00415O, p-value=9.882e-09, raw score of 3.44
  misc_feature (1)...(178): Xaa = X or * as defined in Table 2
PRHKEPESQAPGRRAPQAAAYQQAASPARXQGGSCSRCPPGXAVEAAPAPXGQALGCVSQGPAXVGPTRSPHPTAGLSRPHGPPSVRSTGWSPSSRPLQAQEAPWPVAPTHIPPPLDPGQPHSCGLGAGCQPRAPAARAGHPXEGAGPPPPPWPSASAPPCASAQPVLWLRFPRETKT

SEQ ID NO: 35517 - protein, 815 aa, Homo sapiens
  DOMAIN (61)..(81): POTASSIUM CHANNEL SIGNATURE domain identified by eMATRIX, accession number PR00169A, p-value=4.090e-11, raw score of 16.77
  DOMAIN (18)..(117): K+ channel tetramerisation domain identified by PFam, accession name K_tetra, E-value=7.9e-36, PFam score of 132.5
MAGGHCGSFPAAAAGSGEIVQLNVGGTRFSTSRQTLMWIPDSFFSSLLSGRISTLRDETGAIFIDRDPAAFAPILNFLRTKELDLRGVSINVLRHEAEFYGITPLVRRLLLCEELERSSCGSVLFHGYLPPPGIPSRKINNTVRSADSRNGLNSTEGEARGNGTQPVLSGTGEETVRLGFPVDPRKVLIVAGHHNWIVAAYAHFAVWYRIKESSGWQQVFTSPYLDWTIERVALNAKVVGGPHGDKDKMVAVASESSIILWSVQDGGSGSEIGVFSLGVPVDALFFIGNQLVATSHTGKVGVWNAVTQHWQVQDVVPITSYDTAGSFLLLGCNNGSIYYIDMQKFPLRMKDNDLLVTELYHDPSNDAITALSVYLTPKTSVSGNWIEIAYGTSSGAVRVIVQHPETVGSGPQLFQTFTVHRSPVTKIMLSEKHLVSVCADNNHVRTWTVTRFRGMISTQPGSTPLASFKILSLEETESHGSYSSGNDIGPFGERDDQQVFIQKVVPITNKLFVRLSSTGKRICEIQAVDCTTISSFTVRECEGSSRMGSRPRRYLFTGHTNGSIQMWDLTTAMDMVNKSEDKDVGGPTEEELLKLLDQCDLSTSRCATPNISPATSVVQHSHLRESNSSLQLQHHDTTHEAATYGSMRPYRESPLLARARRTESFHSYRDFQTINLNRNVERAVPENGNLGPIQAEVKGATGECNISERKSPGVEIKSLRELDSGLEVHKIAEGFSESKKRSSEDENENKIEFRKKGGFEGGGFLGRKKVPYLASSPSTSDGGTDSPGTASPSPTKTTPSPRHKKSDSSGQEYSL

SEQ ID NO: 35518 - protein, 236 aa, Homo sapiens
  DOMAIN (48)..(68): POTASSIUM CHANNEL SIGNATURE domain identified by eMATRIX, accession number PR00169A, p-value=4.090e-11, raw score of 16.77
  DOMAIN (8)..(99): K+ channel tetramerisation domain identified by PFam, accession name K_tetra, E-value=4.8e-26, PFam score of 99.9
  misc_feature (1)...(236): Xaa = X or * as defined in Table 2
FSEGRNRFLNVGPTRFSTSRQTLMWIPDSFFSSLLSGRISTLRDETGAIFIDRDPAAFAPILNFLRTKELDLRGVSINVLRHEAEFYGITPLEKIKMEYCFSVCMYSXQVCFEMFLVRRLLLCEELERSSCGSVLFHGYLPPPGIPSRKINNTVRSADSRNGLNSTEGEARGNGTQPVLSGTGEETVRLANTIDSKYVANDDWLIFQYVDEEDLMNAIKDFSSVTKERTTFTDTHL

SEQ ID NO: 35519 - protein, 100 aa, Homo sapiens
  misc_feature (1)...(100): Xaa = X or * as defined in Table 2
YGGTATVQRWAESRHVPFPPSQEQNANKICSVCQEEKDSADSYGEIPWWQGPERCWPVRLMLATLGDYKWVLTGIGTDSXLGFTIPTDHANAFSAKEIPQ

SEQ ID NO: 35520 - protein, 244 aa, Homo sapiens
  misc_feature (1)...(244): Xaa = X or * as defined in Table 2
MISEVIVIQMLFLHAFSKVFSALIKNNKKPLQDAQIKWKAISGLSGGMRRSECNRERDQVTRTQCRDISQKRGPGDXGMATSKNGAMAXQLGPGCQGDASTGNAEFGESAHAWSGGGRVPGVTGPDREEVGRSWQGTSCGGGTSGCGRLQXDGVASRGRWDPARPREQRAGVRQLAAPLGGPXSRRPWEPPGGSSCGRYLFAISSWSGVTVAQEGQRKRGSGKXRTERSGPGLGRRLPPLLLTV

SEQ ID NO: 35521 - protein, 148 aa, Homo sapiens
  misc_feature (1)...(148): Xaa = X or * as defined in Table 2
EGQRSSSPATALSSSGPPSLKMATSKNGAMAXQLGPGCQGDASTGNAEFGESAHAWSGGGRVPGVTGPDREEVGRSWQGTSCGGGTSGCGRLQXDGVASRGRWDRRDRASSGRESGSWLHHSGARSLGAPGSRPVEAPAAGSEAKTPG

SEQ ID NO: 35522 - protein, 78 aa, Homo sapiens
  misc_feature (1)...(78): Xaa = X or * as defined in Table 2
CTVGFALPVFYXGFSHXCSSGILVXNSRFLLCLCQALVSGXCWPHKMSXGGFPLLLLTGIVSEGMVPASLCISGRIQL

SEQ ID NO: 35523 - protein, 103 aa, Homo sapiens
  misc_feature (1)...(103): Xaa = X or * as defined in Table 2
IPFISFSCLIALARTSNTMLNRSGERGHPCLVPVFKGNASSFCPFSMILAVGLSXIALIILKYVPSIPNLLRVFSMKGCXILSKAFSASIEIIMWFLSLALFI

SEQ ID NO: 35524 - protein, 272 aa, Homo sapiens
  DOMAIN (10)..(65): kw TRANSCRIPTASE REVERSE II ORF2 domain identified by eMATRIX, accession number DM01354Q, p-value=1.000e-40, raw score of 9.23
  DOMAIN (1)..(188): Reverse transcriptase domain identified by PFam, accession name rvt, E-value=4.8e-10, PFam score of 46.8
MNIDAEILDKILANRIQQDIKKLIHHDQVGFIPGMQGWFNICKSINVIQHINRTNDENHMTISIDAEKAFDKIQQRFMLKTLNKLVLEVLARAIRQEKEIKGIQLGKEEVKLSLFADDMIVYLENPIVSAQNLLKLISNFSKVSGYKISVQKSQAFLYTNNRQTESQIMSKLPFTIASKQIKYLGIQLTRDVKDLFKENYKPLLNEIKEDTNKWKNIPCSWVGRINIMKMAILPKQFRASFSVNMSDGLHDENALSVISCAADDVPPVATSM

SEQ ID NO: 35525 - protein, 74 aa, Homo sapiens
NKRGYKQREEHSMLMGRKNQYRENGHTAQGSWVHELVCYTGKLHVTGVWCTDCFTTQNQQQKPHDYVNRCRKGL

SEQ ID NO: 35526 - protein, 67 aa, Homo sapiens
  misc_feature (1)...(67): Xaa = X or * as defined in Table 2
FFKTICFMRVRVKRPPNRLCVSNMAVYFTWVQAGLHCESYPEHLXWSCRLPRRLGGVRLXPLEGEVN

SEQ ID NO: 35527 - protein, 399 aa, Homo sapiens
  DOMAIN (37)..(83): kw TRANSCRIPTASE REVERSE II ORF2 domain identified by eMATRIX, accession number DM01354O, p-value=1.000e-40, raw score of 8.73
  DOMAIN (70)..(251): Reverse transcriptase domain identified by PFam, accession name rvt, E-value=1.1e-26, PFam score of 102.1
MDKFLNTYTLPRLNQEEVESLNRPITGSEIVAIINSLPTKKSPGPDGFTAEFYQRYKEELVPFLLKLFQSIEKEGILPNSFYEASIILIPKPGRDTTKKENFRPISLMNIDAKILNKILANRIQQHIKKLIHHDQVGFIPGMQGWFNIRKSINVIQHINRTKDKNHMIISIDAEKAFDKIQQLFVLKTLNKLAQNLLKLISNFSKVSGYKINVQKSQAFLYTNNRQTESQIMSEFPFTIASKRIKYLGIQLTRDVKDLFKENYKPLLNEIKEDTNKWKNIPCSWVGRINIVKMAILPKPFAEGAKPGVRGVTVSVISLSHTASSGLAGCCPWPAAVLGKQGKEVLGTRECKHRQKQQPYDHISTFPSDGDLSAVGYSNVGIIWDHAQEVSMKQVVTTFN

SEQ ID NO: 35528 - protein, 86 aa, Homo sapiens
  misc_feature (1)...(86): Xaa = X or * as defined in Table 2
ILDISPLSDEXIAKIFSHSVGCLFTLMVVSLAVQKLFSLIISHLSILAFVAIAFGVLDVKCLVHAYVLNGIAXVFFXGFYGFRSNI

SEQ ID NO: 35529 - protein, 350 aa, Homo sapiens
  DOMAIN (195)..(242): kw TRANSCRIPTASE REVERSE II ORF2 domain identified by eMATRIX, accession number DM01354V, p-value=1.000e-40, raw score of 12.97
MKVEIKTFFETNENKDTTYQNLWDTFKAVCRGKFIALNAHKRKQERSKIDTLTSQLKELEKQEQTHSKASRRQIQTTIGEYYKHLYTNKLENLEEMDKFLDTYTLPRLNQEEGESLKRPMAGSEIEAIINSLPTKNSPGPDRFTAEFYQRYKEELLISNFSKVSGYKINGKKSQAFLYINNRQTESQIMSELPFTIASKRIKYLGIQLTRDVKDLFKENYKPLLSEIKEDTNKWKNIPCSWIGRTNIVKMAILPKVWVNLLRQRDRQIIKPDNVKIGDPSSGSAEGYLSIGTGGVITIQLDLNATAFEISSKEDTGTCPLGIPYTAVSTALKRQLCTSLEEQASGLATEM

SEQ ID NO: 35530 - protein, 51 aa, Homo sapiens
YHSVGFLFTLMVVSFAVQKLFSLIRSHLSILAFVAIAFGVLDMKSLPMPMS

SEQ ID NO: 35531 - protein, 54 aa, Homo sapiens
  DOMAIN (1)..(22): GLUTELIN SIGNATURE domain identified by eMATRIX, accession number PR00211B, p-value=6.917e-09, raw score of 0.86
FFPSPPPPPPLPPPPPPLPPPPPPSSLLGPLLHHGKQPRSWGVGSFCLSLSFWT

SEQ ID NO: 35532 - protein, 73 aa, Homo sapiens
  misc_feature (1)...(73): Xaa = X or * as defined in Table 2
QTVLEDRSPRARWIFXGXXGTICSIPIPSFWWFSSNLSHSFVCRSPPSSSPGGLPMCTCVSKFPWAVWPFSRY

SEQ ID NO: 35533 - protein, 82 aa, Homo sapiens
CCFFLFVCFSLTQSSPSSIGLLQFAGGPLQTLFASVPPLPGGVTSDCLGSMAIFTILILPTHERGMFFHLFVSSFISLSSGL

SEQ ID NO: 35534 - protein, 136 aa, Homo sapiens
  misc_feature (1)...(136): Xaa = X or * as defined in Table 2
DFAEVAYQLGISSGVCRTTDFHEPRMLLSDRSSGSFVTIISVFLSFSSLKCLXSPLVHDALHQAFHPGKSRLRFLGSMACCMSKFTCPPTLSTVPSSTPFSFSCSLIKTRSATLLKLWSISLRFRLHSWSSAFRVG

SEQ ID NO: 35535 - protein, 60 aa, Homo sapiens
  misc_feature (1)...(60): Xaa = X or * as defined in Table 2
IPQHIYPPKTKPGRIXISEXTNNRLXNCGNDQXLINQKESRTRWIHSRILPKTNREPNHE

SEQ ID NO: 35536 - protein, 663 aa, Homo sapiens
  DOMAIN (85)..(132): kw TRANSCRIPTASE REVERSE II ORF2 domain identified by eMATRIX, accession number DM01354V, p-value=1.000e-40, raw score of 12.97
MADYKNQMSQQIAAVWGTFKNLGKFDYWHACTLTLEDPLLQCIAKCKAFEKVVMDDENDSESRCVYCCSPIASPREPNMSELPFTIASKRIKYLGIQLTRNVKDLFKENYKPLLSKIKEDTNKWKNIPCSWIGRINIVKMATLPKVFIRDKLMERRNRRTGRTEKARIWEVTDRTVRTWIGEAVAAAAADRVTFSVPVTPHTFRHSYAMHMLYADPNLSSAPKEDRRQFGAPQVQRNIETLETFQKGATKLSCRLRGLSSGERVNSIKPLNKGHKYLVFEANTGTENGYQGEESLFNKAYYGGGTNFFRKESQKLQQSAKKRDAELANGALGIIELNNDYTLKKVMKPLITSNTLLQVTILLVDQKAAFSQTIDFKAGKQQPHCKPTVQTFSRIQTASALEGSAEKCDNLKTCHTSHGSVMAETAVINHKKRKNSPRIVQSNDLTEAAYSLSRDQKRMLYLFVDQIRKSDGTLQEHDGICEIHVAKYAEIFGLTSAEATNFLEALPRLPPPHERIQCFWEPVLICRVSAYLFAQPKGPQTLPPLSGRAGLGGTETLSLRPRKKVTGGATQAFAKENNQKAYKETYGVSHITRHDMLQIPKQQQNEKYQVPQFDQSTIKNIESAKGLDVWDSWPLQNADGTVAEYNGYHPVVLAAVERQGEALE

SEQ ID NO: 35537 - protein, 495 aa, Homo sapiens
  DOMAIN (239)..(294): ELEMENT INSERTION TRANSPOSABLE SEQUENCE TRANSPOSASE FOR domain identified by eMATRIX, accession number PD02662D, p-value= 3.973e-10, raw score of 21.71
MSAPLLVLPESGGAWLKTCYDAQNDAMLDDDSTLQKARTKFLQAYEGNMMVRGEGDDICHGPAGTKAFYRVASTHNDEVSQQNVEQPQLRHHIFKEWDHQLRCGRVFAGKVQGEGDTQRNDRHPEILPTSDQPFGVFTHHFAIIINKANNTVTYQHHQHAPDVRIGRAGVPTTGPMDHTVQGFSRTTGVGYVLIRGQAKILLYKSRSKGRKNQRSTRTHCHHPSPKIYSASAKEPWVLATNLPVEIRTPKQLVNIYSKRMQIEETFRDLKSPAYGLGLRHSRTSSSERFDIMLLIALMLQLTCWLAGVHAQKQGWDKHFQANTVRNRNMEMTDILSGAIVAAIAIAAGMVAVWCLPRMHAMMHQMGNPVLVLGIGGFILGILGVIGGPVSLFKGLDEMQQMVANQVSAPAITFCWRGFRGGRIFLAVFVGVALGLMLHEHVPAVPAAITVSCAILGIVLVVTRDGWLSLFMAAVVVPNTTLYRCSVSSCFRHGCY

SEQ ID NO: 35538 - protein, 93 aa, Homo sapiens
  misc_feature (1)...(93): Xaa = X or * as defined in Table 2
IPFISFSCPIALARTSNTMLNRICERGHPCLVPVFKGNASSFCPFSMILAVGLSXIALIILRYVPSILNLFRVFSMKGCXTLSKAFSVSIEII

SEQ ID NO: 35539 - protein, 133 aa, Homo sapiens
  misc_feature (1)...(133): Xaa = X or * as defined in Table 2
FSLKRSFTSLVSWIPRYFILFEAIVNGSSLMIWLSVCLLLMYRNACDFFPLILYPETLLKLLISSSSLYLWXNSAVNLSGPGLFLVGRLLIIASISEPAIGLFRDSPSSWFSLGRVYVSRNLSISSRFSSLFV

SEQ ID NO: 35540 - protein, 46 aa, Homo sapiens
SLLLSALQSHSPSSFVPLLVRNSVPLEEERRSAFQSFQFFCSVFSP

SEQ ID NO: 35541 - protein, 348 aa, Homo sapiens
  misc_feature (1)...(348): Xaa = X or * as defined in Table 2
XSPRVSGSPSGDPLEWGAPLNIRMGGKIPRVIRNLFGNGCRNSGITPGFTPLDHRCINANGQGHAGPDPACEPLIGAPVPPSALPGLIVALILGLAGGVSLGPEHPIMTVNIALAVAIGARLLPRVNRMEWTILASAGTIGALFGTPVAAALIFSQTLNGSSEVPLWDRLFAPLMAAAAGALTTGLFFHPHFSLPIAHYGQMEMTDILSGAIVAAIAIAAGIVPPYGASHGLDEMQQMVANQAFSTSDYFLLAVIKLAALVVAAASGFRGGRIFPAVFVGVALGLMLHEHVPAVPAAITVSCAILGIVLVVTRDGWLSLFMAAVVVPNTTLLPLLCIVMLPAWLLLAX

SEQ ID NO: 35542 - protein, 37 aa, Homo sapiens
QDYTHLQVFRHHRALEVPVLSDLCWKFWPGQLGRRRK

SEQ ID NO: 35543 - protein, 1106 aa, Homo sapiens
  DOMAIN (417)..(464): kw TRANSCRIPTASE REVERSE II ORF2 domain identified by eMATRIX, accession number DM01354V, p-value=1.000e-40, raw score of 12.97
  DOMAIN (815)..(1002): Reverse transcriptase domain identified by PFam, accession name rvt, E-value=2e-17, PFam score of 71.3
MLQSNRTAASHSPSIQPAIQPAIQPANQLSIHNLWTQFRHSTKIPVEWVNGEWLNGRMPGDHHEWQCNYQPAIQPAIQPANQLSIHNLWTQFRHSTKIPVEWVNGEWLNGRMPGDHHEWQCNYQTNHVHLYAYSSPDERTCMRRRVWGEEGGSFITFRQSDKRSWRHSPSIQPAIQPAIQPANQLSIHNLWTQFRHSTKIPVEWVNGEWLNGRMPGDHHEWQCNYQPAIQPAIQPANQLSIHNLWTQFRHSTKIPVEWVNGEWLNGRMPGDHHEWQCNYQPAIQPAIQPANQLSIHNLWTQFRHSTKIPVEWVNGEWLNGRMPGDHHEWQCNYQSKIIVFRNPLGTGLEGLRKVEPQKILVRSMCQISTSPLVDGTQLISNFSKVSGYKINVQKSQAFLYTNNSQPESQIMSELPFTIASKRIKYLGIQITRDVKDLFKENYKPLLNEIKEDTNKWKNIPCSWVGRINIVKMAILPKKHNSSPARKHNWTENEFDKLTEVGFRRWVITNSFKLKEHVITQWKEAKNLEKRLEELLTRITSIEKKINDLMELKTKARELREECRSLRSRCNQLEERVSVMEDEMNEMKINKIDRPLARLIKKKREKNQIDAIKNDKGDITTNPTEIQTTIREYYKHLYANKLENLEEMDTFLDTYTLPRLNKEEVESLNRPITGSQIVAIINSLPTKKSPGPDGFTAEFYQRYKEELGCEGPLQGELQTTAQGNKRGYKQMEEHSMLMGRNNQYRENGHTAQECLGENTGIQQKSDEDPLRHRDSGWQHREESKAPAQIDSEPRETHTVREKHALKGLKPVITRLLQHGVLKPINSPYHSPILPVLKPDKAYRLIQDLRLINQIVLPIHPVVPNPYTLLSSIPSSTTNCSVLDLKDAFFTIALHPSSQPLFASTWTNPDTHQSQQLTWAVLLQGFRDSPHYFSQALSHDLVSFHPSASHLIQYTDDLLLCSPSFESSQQDTLLLLQHLLSKGFQGPIGPVSPHPGTPPTSHYIHPKGYRVTILARSSSAAMTLALPTLHTTYNTTGWLHSPAIVAVLRQLQISPPLDAATGDRYTVLLPPLLMSPEKENLERLGLLLSRFLILLSWTTLDMAVGFPV

SEQ ID NO: 35544 - protein, 88 aa, Homo sapiens
  misc_feature (1)...(88): Xaa = X or * as defined in Table 2
CLFPVHYPRLHAMMHQMKNPVLVLGIGGFILGILGVIGGPVSLFKGSXKLLGLIETGKISLDHPVPGGTPTKMALYEHFMNTKEFGIE

SEQ ID NO: 35545 - protein, 72 aa, Homo sapiens
IFFFFLPSSFLLLPPSFLLLLLLLLLLLLLLLLPPPLSLLPLFSLLLLPSSPSPSSSSSSSSSWAVWPFSRY

SEQ ID NO: 35546 - protein, 38 aa, Homo sapiens
  misc_feature (1)...(38): Xaa = X or * as defined in Table 2
FVFLWDRWXYPLYHFLLCLFDSSLFFSLLVLLAVYQFC

SEQ ID NO: 35547 - protein, 149 aa, Homo sapiens
  misc_feature (1)...(149): Xaa = X or * as defined in Table 2
YLCMLHEVLVLCFSVPSGHFSFSLNXLFXLAVPVTFYQGLSFLAQAXASQVDFRQLCWQQEFQASGSXLAGLHGSGIHXARPLGSWLQLPFQESEWFCLSGVPGATVVSCTFXXSPFXLVXDGISLWFXFAFLXWPVMMSIFFMCLLAA

SEQ ID NO: 35548 - protein, 168 aa, Homo sapiens
  misc_feature (1)...(168): Xaa = X or * as defined in Table 2
AERNGSRQGVGAGAGDHEVLQLLPDKWKQKILCPVQLLRGAWSNYYSPDANRQPXVQGNAHLFAECWPHGEDSQPTVPTSQGRMLAGPARHLPHPHVPSPSGSLRGSDSEDTHXGTVAGSGCLHCLAPGHLHPGWPPSRVLPIPDRSVHQGPGRKAPPTPPRVTPLFT

SEQ ID NO: 35549 - protein, 156 aa, Homo sapiens
  DOMAIN (47)..(71): HMW KININOGEN SIGNATURE domain identified by eMATRIX, accession number PR00334B, p-value=7.390e-10, raw score of 8.69
  misc_feature (1)...(156): Xaa = X or * as defined in Table 2
LRKAAASGSFVFVAPDPNTDTGSSQCSESESGSRGCSMGHQRSLQHHYHHHHHHHHQHHHHHHHHLDTGWRGEXSRHSAGLCPPSQRRLHSCQTSPSCSPPSGHRCIXLTGIEAAXCHSLXPYQKDACHHFEEHSPPPXRPPHLPRHHLHPQPSSP

SEQ ID NO: 35550 - protein, 231 aa, Homo sapiens
  DOMAIN (47)..(71): HMW KININOGEN SIGNATURE domain identified by eMATRIX, accession number PR00334B, p-value=7.390e-10, raw score of 8.69
  misc_feature (1)...(231): Xaa = X or * as defined in Table 2
LRKAAASGSFVFVAPDPNTDTGSSQCSESESGSRGCSMGHQRSLQHHYHHHHHHHHQHHHHHHHHLDTGWRGEXSRHSAGLCPPSQRRLHSCQTSPSCSPPSGHRCIXLTGIEAAXWSXPLTLSKRCVSPLRRAQSSSVTSSTSAQASSAPPEKKXLXPERPYSSPHPASVADLQMCLPLNRITGQTNRPLHRAILLRWMRSCNLLTCTVLSNVSFSFSELSYSRNTMCRG

SEQ ID NO: 35551 - protein, 134 aa, Homo sapiens
  DOMAIN (13)..(37): HMW KININOGEN SIGNATURE domain identified by eMATRIX, accession number PR00334B, p-value=9.914e-09, raw score of 8.69
  misc_feature (1)...(134): Xaa = X or * as defined in Table 2
SVGLILPSSLQHHYHHHHHHHHQHHHHHHHHLHQRKLAPPLCXADLPTCAPHQGIRPFGGFPQTSGSPGLPVYAEEQGTERLSLQGTGCGCQAGLLCWGPPVASTSVGFSLESSVSPEQVPLSPGPAGTDAEAQ

SEQ ID NO: 35552 - protein, 429 aa, Homo sapiens
  DOMAIN (196)..(243): Glucose inhibited division protein A family proteins domain identified by eMATRIX, accession number BL01280H, p-value=3.308e- 18, raw score of 19.43
  DOMAIN (8)..(362): Glucose inhibited division protein A domain identified by PFam, accession name GIDA, E-value=0.0098, PFam score of -434.6
KRNLFALFDMAYQGFASGDGDKDAWAVRHFIEQGINVCLCQSYAKNMGLYECFGVVVPESGIWSRCSQPAIYSLSETAWKHGEDGREGSKRTAPYEARTGLTLILMQRLQGVLIRHSERSADRKQHGLFHSRVSASGIKRYLKHEGFARQQQILGKVLRKKKLGPEREVRRIRSQTFGEKEQPHLAQPIREKEQVGFLTLGVKPFLPRGPSKEYRLMLREDNADLRLTEIGRELGLVDDERWARFNEKLENIERERQRLKSTWDADWCIYNPEVYMQEETLVDVTSSMSMGWNFPLYKQVTTGPVAALHYDGTTTSMYNEFGDSTTTLTDPLWHASVSTLGWRVDSRLGDLRPWAQISYNQQFGENIWKAQSGLSRMTATNQNGNWLDVTVGADMLLNQNIAAYAALTQAENTTNNSDYLYTMGVSARF

SEQ ID NO: 35553 - protein, 436 aa, Homo sapiens
  DOMAIN (308)..(334): ASPARTATE AMINOTRANSFERASE SIGNATURE domain identified by eMATRIX, accession number PR00799D, p-value=4.682e-25, raw score of 16.46
  DOMAIN (31)..(436): Aminotransferases class-I domain identified by PFam, accession name aminotran_1, E-value=1.1e-172, PFam score of 587.0
  misc_feature (1)...(436): Xaa = X or * as defined in Table 2
STMALLHSGRVLPGIAAAFHPGLAAAASARASSWWTHVEMGPPDPILGVTEAFKRDTNSKKMNLGVGAYRDDNGKPYVLPSVRKAEAQIAAKNLDKEYLPIGGLAEFCKASAELALGENSEVLKSGRFVTVQTISGTGALRIGASFLQRFFKFSRDVFLPKPTWGNHTPIFRDAGMQLQGYRYYDPKTCGFDFTGAVEDISKIPEQSVLLLHACAHNPTGVDPRPEQWKEIATVVKKRNLFAFFDMAYQGFASGDGDKDAWAVRHFIEQGINVCLCQSYAKNMGLYGERVGAFTMVCKDADEAKRVESQLKILIRPMYSNPPLNGARIAAAILNTPDLRKQWLQEVKGMADRIIGHAGLQLVSNLQGREGSTHNWATHSPTKLGMFCFHRGXKLEQVERLIKEFSIYMTKDGRISVAGVTSSNVGYLAHAIHQVTK

SEQ ID NO: 35554 - protein, 110 aa, Homo sapiens
YRAKDGFGTGGSKVERIEKRCLELFGRDYCFSVIPNTNGDICGHYPRHIVFLEYESSEKEKDTSGDTHLFDKVRGYDIKLLRYLSVKYICDLMVENKKVKFGMNVTSSEK

SEQ ID NO: 35555 - protein, 132 aa, Homo sapiens
DPLLHLDHSAGCARLSLPLQGSDDKPLRPGWLLYHKDYKKSGWLWCQRDCSTRYSAGPRQTHGEKPSGHTNTATSRRPGRRAGTNERQKKQERRKRREDKDKDNRRNRDREEREKPEREQGEESRKEKEKRR

SEQ ID NO: 35556 - protein, 148 aa, Homo sapiens
  misc_feature (1)...(148): Xaa = X or * as defined in Table 2
XNQPPQELGLGELLEEFSRTQYRAKDGSGTGGSKVERIEKRCLELFGRDYCFSVIPNTNGDICGHYPRHIVFLDKMARCRGRFVCPVILFKGKHICRSATLAGWGELYGRSGYNYFFSGGADDAWADVEDVTEEDCALRSGDTHLFDK

SEQ ID NO: 35557 - protein, 183 aa, Homo sapiens
MAGARAAAAAASAGSSASSGNQPPQELGLGELLEEFSRTQYRAKDGSGTGGSKVERIEKRCLELFGRDYCFSVIPNTNGDICGHYPRHIVFLEYESSEKEKDTPQSALAFATPVIVKLECAGITCPADGSSAIGKKQASVGAEDSAAAGALEDGCLFSLHTFSLGNFIYAQIHTMMPQIAIHS

SEQ ID NO: 35558 - protein, 43 aa, Homo sapiens
HVLILQQAEMLVPGAPEESYQVPSSFTSAAPKGYILQHSSPDK

SEQ ID NO: 35559 - protein, 371 aa, Homo sapiens
  misc_feature (1)...(371): Xaa = X or * as defined in Table 2
TPDPGQGCSEGGIVHETRPSPQPLCQGSCAVGCSPLGLLRXRMMALGKIPPGHRGPAFLPAVESAHVVPGLPGLTRETLPAPLGPHRPPQPPQGPLSTAPPAPLVSPLGPHVPGLPGPPPGCPSPLPLRPCPPPSWLRPHRPVQPWWGTXGSGWRPRCRPGAAGRNPGLPRACCRGLCRGPHXRPGGPRPGHSGPRTSSWGRTMGNRPRPSASAGXXPRHRRXTSAERPGSPPQQSASRTGGRSPLSHPGSWWGVMGPPGLWAGAPSMWGXGPGSRVAGGSGRRPTSPRPPHYPPHPPGTWPSGAQSGRRXQAQTPGAATEGXGGWGLPPKPWCPQDQFLGVQDWVLPPNGARVGGTWAWKRESVLVPGAR

SEQ ID NO: 35560 - protein, 97 aa, Homo sapiens
  misc_feature (1)...(97): Xaa = X or * as defined in Table 2
MRNVLGLQRVTTHLGFFTLLFLDPCWVLETGMEERHLGNWFLIFIPVWDIWILSFLSCWIVKMGWGXVSSGLWTLRHGITQYLKKKPGYLIGNVTLN

SEQ ID NO: 35561 - protein, 324 aa, Homo sapiens
MTAEYYKLKQVVTPIAAAVPDVVSLLEQINISLCTWYAVIDLGNACFYIPVHKAHQKQFAISRHGQQYTFTVLLQRRDLDLFSLPQDITLVHYVDGIMLIGSSEQEVASTLDLLVRHLHARGWEINLTKIQGLATSVKFLGVQWYGACRDIPSKVKDKLLHLAPPTTKKEAQHLAASFEWGPEQKGLQQVQVAVQAALPLGLYDPADPMVLEVSVADRDAVWSLWQAPIGESQWRPLGFQNKALPSADNYSPFERQLLACYWALVETEATPVITQRAHEQSGHGGRDGGYAWAQQHGLPLNKADLAVATAKCPISQQQRPILSS

SEQ ID NO: 35562 - protein, 81 aa, Homo sapiens
VLLWPIYPVTQRTASFEWGPEQEKALQQVQAAVQAALPLGPYDPTDPMVLEVRKVGRAQQHSIIKWKWYIHDRAQAGPEGT

SEQ ID NO: 35563 - protein, 279 aa, Homo sapiens
  DOMAIN (84)..(268): Reverse transcriptase domain identified by PFam, accession name rvt, E-value=7.9e-07, PFam score of 27.3
RPVGPRTHPVVISPVPECIISIDILRSWQNPHIGTLTGRVRAVMVRKAKWKPLELSLPRKIVNQKQYCVPGGIVEISATTKDLKDAKVVIPTISLFNYPIWLVQKNDGSWRMAVDYHKLTQGVTPIAAAVPNVISLLEQINTSSGTWYAAIYLVNVFFSIPVHKALKKQFAFSWQGQPYTFTILPWGHINSPTLCYNLIWRELDHFSLPQDITLVHYIDDIMLIGSSEQEVANTLDLLEKALQQVQAAVQAALPLGPYDPADPVVLEVSVADRDTVWSL

SEQ ID NO: 35564 - protein, 248 aa, Homo sapiens
RDLDLFSLPQDITLVHYVDGIMLIGSSEQEVASTLDLLVRHLHARGWEINLTKIQGLATSVKFLGVQWYGACRDIPSKVKDKLLHLAPPTTKKEAQHLAASFEWGPEQKGLQQVQVAVQAALPLGLYDPADPMVLEVSVADRDAVWSLWQAPIGESQWRPLGFQNKALPSADNYSPFERQLLACYWALVETEATPVITQRAHEQSGHGGRDGGYAWAQQHGLPLNKADLAVATAKCPISQQQRPILSS

SEQ ID NO: 35565 - protein, 161 aa, Homo sapiens
MEASAFVEASGNLQSWQKWGPEQEKALQLVQAAVQAALPLGSYDPADPMVLEVSVADRDAVCSLWQAPIGESHHKVGRAQQHSIIKWKWYICDRARASPEGTSKLHEEVAQMPMVSTPATLPSLPKPALMALWRVPYDQLTEEEKTRDWFTDGSAGYAGTT

SEQ ID NO: 35566 - protein, 636 aa, Homo sapiens
  DOMAIN (253)..(276): PHOSPHOLIPASE D SIGNATURE domain identified by eMATRIX, accession number PR00718F, p-value=9.909e-09, raw score of 11.34
MLLSYPISQEVLEVLDLCQEPRPLQALKFVSPLQNDGVKRGAENTDLWLISEQSDFKIQKVSTMRSESIASASKALICHGTYTLRMGCMCMYLSVSPSSLENPKGNSKVVVDSGDNSHIYSEGKEPSSLIRGALISRCRSKHLLLFSSVFLPLGPKCKQSQEVRPILMSHLCGWKSKKGNPREGGSHGEIDLHKYNQLILGKDLWPFTRVTVHWGKGNDQTFQGLQDTGSELMLIPGDPKRHCSPPVKVGSYGGQVINGVLAQVRLTVAAVSDVVSLLEQINISPGTWYAAIDVANAFFSIPVHMAHLKQFAFSWQGQQYTFTVLPQRGWEINPTKIQGPSTSVKFLGIQWYGACQDIPSKVKEKLLHLAPPTTKKEAQRLVDLFGFRRQHIPHVGVLLWPIYQVTRKAASFEWGPEQEKALQQVQAAVQAALPLGPYDPADPLVLEVDAVWSPQQAPIGESQRRPLGFWSKALPPSAGNYSPFERQLFVCYWALLETEHLTMGHQVTMQPELPIMNWVPSNQSSYKVGHAQQHSIIKWKWYIRDCARAHPEGTIRIHRSRNQGVEVEVVPLTITPSDPLAKALLPVPATLCSAGTGVLVPEGGTLPPGDTTMIPLNWKLRLPPGHFGLLLPLSQD

SEQ ID NO: 35567 - protein, 905 aa, Homo sapiens
  DOMAIN (204)..(262): Integrase core domain identified by PFam, accession name rve, E-value=0.0012, PFam score of 16.7
MDIETETIDSGNYRKWQGGRGTRAEQLPVGYYSHYLGAGINHTPNLSVTQYTHDKNLHTFPSRKSKKTSKCDIIIKQKRHKSPKEKALQQVQAAVQAVLPLGPYDPADPMVLEVPVADRDAVWSLCQAPIATPVIAQWAHEQSGHGGRDGGYTWAQQHGLPSSKAKLATATAECPICQQQRATLSPRCGTIPRGDQPATWWQKGKRFVLTGIDTYCGYGSAYSARNASAKTTIHGLTECLFHCLGIPHSIASDRGTHFMDKEAPSASVLGLALALLAPQLADSLLWDLVIISNMGTAVTELQNLNTMGMIGSQSGSGQVAALNCQKQGGRSYHNRQQRQSSNQNSLTQETSGFLPEHICIGKGNDQTFRGLLDTGSELMLIPVDAKYHCGPPVKIQLTMGPVGPQSPPVVIYPVPECIIGIDILSSWQNPPPVGFLTGRVRAIMMGKAKWRPLEVSLPRKIVNQKQYHIHGGTVEISVTFKELKDAGVVIPTIFLFNSPIWPVQKTDGTCGSWRMTVDYCKLNQVVTPTVAAVLDVVSLLEQIYTSPGTWYVANDLTNAFFSITVHKAHQKQSAFSWQGQQYTFTVLPQGMSLVHLAPPTTKKEAQCLVGLFGFWGNTFLIWKKALQLVQAAMQAALPLGPYDPADPMVFEVSVADWDAVWSLWQGPIATKWVMHSTIPSSHGSGIHVIGLEQVLKAQGVPYDQLTEEEKTRAWFTDGSARYAGTIRRWTAAALQPLSRTSLKESGEGKSSQWAEVRAVHLVVHFTWKEKWPDLMVWLDDQGLGRSMIGKLVTNKFGEEMCGWTSLSEWPKTVKILVSRVSAHQRVTSAEENFNNQVDEISHSVDTTQPLSPATPVIAQWAHEQSGHGGRDRGYEWAQQHVLPLTKADLATATADAQFASSRDQQ

SEQ ID NO: 35568 - protein, 57 aa, Homo sapiens
  misc_feature (1)...(57): Xaa = X or * as defined in Table 2
LDFFLVFLQQFLPRPSSSEIXMLPGFPAAAYGPVAAAAVAAARGSGRKVYGTGDSQA

SEQ ID NO: 35569 - protein, 137 aa, Homo sapiens
  misc_feature (1)...(137): Xaa = X or * as defined in Table 2
MGRNQSRKAENSKHESTYSPPKDHSSSQAMEQSWTENGFEKLGFRRKEALYYLDLTASCQSQELFQKWVSLCCPDXSXTYSPPKDHSSSQAMEQSWTENGFEKLGFRRKEALYYLDLTASCQSQELFQKWVSLCCPD

SEQ ID NO: 35570 - protein, 375 aa, Homo sapiens
  DOMAIN (322)..(351): kw REPLICATION REPB REPA INITIATION domain identified by eMATRIX, accession number DM00653A, p-value=4.553e-22, raw score of 20.40
  DOMAIN (306)..(345): Initiator RepB protein domain identified by PFam, accession name RepB_protein, E-value=0.012, PFam score of 11.9
PWISAPVPVDVVEGAMDSVTVLSFGGLMLYFCAGWPPARRWCFPESISCGSMERDQWWGLQVAKRAGLAGGQSGRTVLRERVRIEIASTHIALAARHSDWRCCRNGRYPARGPAALQNFQRYTGIQHVHRIGMAERMWCDRNRERHTVSSSGGNRLPNPGPDRSCDNLKTCHTSHGSVMAETAVINHKKRKNSPRIVQSNDLTEAAYSLSRDQKRMLYLFVDQIRKSDGTLQEHDGICEIHVAKYAEIFGLTSAEASKDIRQALKSFAGKEVVFYRPEEDAGDEKGYESFPWFIKRAHSPSRGLYSVHINPYLIPFFIGLQNRFTQFRLSETKEITDPYAMRLYKSLCQYRAFVNGGGEEKARGKPILCRYGVGM

SEQ ID NO: 35571 - protein, 584 aa, Homo sapiens
  DOMAIN (238)..(281): 1 kw MIND INHIBITOR DIVISION CONTROL domain identified by eMATRIX, accession number DM01756B, p-value=4.822e-15, raw score of 22.91
  DOMAIN (203)..(317): ParA family ATPase domain identified by PFam, accession name ParA, E-value=4e-27, PFam score of 103.5
  misc_feature (1)...(584): Xaa = X or * as defined in Table 2
MVDSLIARVGVMARGNAITLPVCGRDVKFTLEVLRGDSVEKTSRVWSGNERDQELLTEDALDDLIPSFLLTGQQTPAFGRRVSGVIEIADGSRRRKAAALTESDYRVLVGELHDEQMAALYRLGNDYRPTSAYERGQRYASRLQNEFAGNISALADAENISHLHIHAEDTFLPFYLGKKDDVTYAIKPTCWPGLDIIPSCLALHGIEIELMGKFDEGKLPTDPHLMLGLAIETVAHDYDVIVIDSAPNLGIGTINVVCAADVLIVPTPAELFDYTSALQFFDMLRDLLKNVDIKGFEPDVRILLTKYSNSNGSQSPWMEEQIRDAWGSMVLKNVVRETDEVGKAVINHKKGKNSPRMVQSNDLTKAAYSLSRDQKRMLYLFVDQIRKSDGTLQEHDGICEIHVAKYAEIFGLTSAEASKDIRQALKSLAGKEVVFYRPEEDAGDEKGYESFPWFIKQSEEPQSGNFYTDTLGMAEFRRGGLRATAGPRLSRTRDCQGTEKVHGKTVFDKTVPWVPKRLKSPSCKNRWPXKMQKLSVCTASSPGQQLSTVRVTQREICFPVVRREVLLLIGTLTQTRKGQISVRA

SEQ ID NO: 35572 - protein, 547 aa, Homo sapiens
AAALTESDYRVLVGELDDEQMAALSRLGNDYRPTSAYERGQRYASRLQNEFAGNISALADAENISRKIITRCINTAKLPKSVVALFSHPGELSARSGDALQKAFTDKEELLKQQASNLHEQKKAGVIFEAEEVITLLTSVLKTVQSKNLSHFTWICHAETAVINHKKRKNSPRIVQSNDLTEAAYSLSRDQKRMLYLFVDQIRKSDGTLQEHDGICEIHVAKYAEIFGLTSAEASKDIRQALKSFAGKEVVFYRPEEDAGDEKGYESFPWFIKHWVTISPQTSAYERGQRYASRCKNEFAGNISALADAENISRKIITRCINTAKLPKSVVALFSHPGELSARSGDALQKAFTDKEELLKQQASNLHEQKKAGVIFEAEEVITLLTSVLKTSSASRTSLSSRHQFAPGATVLYKGDKMVLNLDRSRVPTECKRKLRPFLRNLKSQGGPLESTGIPNLLLHPRGLRAITIAVFGKQNTYIRLEPFKINVLEQITKHIEKLQCGGVVKQLSRRGNNQHISSTYDINRADTQVRRAVNNYDIIVMSNGVF

SEQ ID NO: 35573 - protein, 595 aa, Homo sapiens
  DOMAIN (232)..(261): kw REPLICATION REPB REPA INITIATION domain identified by eMATRIX, accession number DM00653A, p-value=7.207e-27, raw score of 20.40
  DOMAIN (410)..(535): ParA family ATPase domain identified by PFam, accession name ParA, E-value=1.7e-22, PFam score of 88.2
VSGVIEIADGSRRRKAAALTESDYRVLVGELDDEQMAALSRLGNDYRPTSAYERGQRYASRLQNEFAGNISALADAECDNLKTCHTSHGSVMAETAVINHKKRKNSPRIVQSNDLTEAAYSLSRDQKRMLYLFVDQIRKSDGTLQEHDGICEIHVAKYAEIFGLTSAEASKDIRQALKSFAGKEVVFYRPEEDAGDEKGYESFPWFIKRPSRGLYSVHINPYLIPFFIGLQNRFTQFRLSETKEITNPYAMRLYESLCQYRKPDGSGIVSLKIDWIIERYQLPQSYQRMPDFRRRFLQGFCRFRNHHQTGFSPAGANQRGPLAATLSGPGGEGQSAVARLTGEKKNHPGAQYANRLSPRVGRFINAAGTTGFPTWKAGSERNAINDDVTYAIKPTCWPGLDIIPSCLALHRIETELMGKFDEGKLPTDPHLMLRLAIETVAHDYDVIVIDSAPNLGIGTINVVCAADVLIVPTPAELFDYTSALQFFDMLRDLLKNVDLKGNSNGSQSPWMEEQIRDAWGSMVLKNVVRETDEVGKGQIRMRTVFEQAIDQRSSTGAWRNALSIWEPECNEISIGVSLDQDGGSNSVLRKLVERE

SEQ ID NO: 35574 - protein, 461 aa, Homo sapiens
  DOMAIN (285)..(332): kw TRANSCRIPTASE REVERSE II ORF2 domain identified by eMATRIX, accession number DM01354V, p-value=1.000e-40, raw score of 12.97
  DOMAIN (26)..(298): Reverse transcriptase domain identified by PFam, accession name rvt, E-value=6e-06, PFam score of 14.8
MSYSSKSALHLKILQAGQEVLKCDNLKTCHTSHGSVMAETAVINHKKRKNSPRIVQSNDLTEAAYSLSRDQKRMLYLFVDQIRKSDGTLQEHDGICEIHVAKYAEIFGLTSAEASKDIRQALKSFAAKESVFYRPEEDAGDEKSYESFPWFIKRAHSPSRGLYSVHINPYLIPFFIGLQDPVTQFRLSETKEITNPVGSSGQGNQAGEEIKGIQFGKEEVKLSLFADDMIVYLENPIVSAQNLLKLISNFSKVSGYKINVQKSQAFLYTNNRQTESQIMSELPFTIASKRIKYLGIQLTRDVKDLFKENYKPLLNEIKEDTNKWKNIPCSWVGRINIVKMAILPKLSRMHGRPHQPPNAASTLPFPKRRSHYGQKSERLSRSGDNRKSHPECRHWQSCAKKSRCLAFTRTVRHTPRSAYLLTRTIELLESSALWHVQTQRIYAPLYETLDPGNRTHCEWDT

SEQ ID NO: 35575 - protein, 577 aa, Homo sapiens
  DOMAIN (410)..(439): kw REPLICATION REPB REPA INITIATION domain identified by eMATRIX, accession number DM00653A, p-value=7.207e-27, raw score of 20.40
  DOMAIN (394)..(436): Initiator RepB protein domain identified by PFam, accession name RepB_protein, E-value=0.0091, PFam score of 12.3
MEWGKFKRLVLPSQGKSKPEQRCQYRHTVGDQATLPLRSRVEKRNGEAEGRIYRKLWDVALLCCVQEVINGERKPLRALTEVKSGFRLREDSDKFDANDPILKDQTQEWSGSATFTSDGKIRLFYTDYSGKHYGKQSLTTAQNVQQFIDEGNYTSGDNHTLRDPHYVEDKGHKYLVFEANTGTENGYQGEESLFNKAYYGGGTNFFRKESQKLQQSAKKRDAELANGALGIIELNNDYTLKKVMKPLITSNTCDNLKTCHTSHGSVMAETAVINHKKRKNSPRIVQSNDLTEAAYSLSRDQKRMLYLFVDQIRKSDGTLQEHDGICEIHVAKYAEIFGLTSAEASKDIRQALKSFAGKEVVFYRPEEDAGDEKGYESFPWFIKRAHSPSRGLYSVHINPYLIPFFIGLQNRFTQFRLSETKEITNPYAMRLYESLCQYQGGGEEEEEEEEEGGGGERGGEGGGEKNQAPCMKSNNALIVILGTVTLDAVGIGLVMPVLPGLLRDIVHSDSIASHYGVLLALYALMQFLCAPVLGALSHRFGRRPDLLASLLGATIDYSIMATTPVLWIYPLINSPSC

SEQ ID NO: 35576 - protein, 429 aa, Homo sapiens
MAESAVINHKKRKNSPRIVQSNDLTEAAYSLSRDQKRMLYLFVDQIRKSDGTLQEHDGICEIHVAKYAEIFGLTSAEASKDIRQALKSFAGKEVVFYRPEEDAGDEKGYESFPWFIKRPGGEGQSAVARLTGEKKNHPGAQYANRLSPRVGRFINAAGTTGFPTGKRAQSCVNAGKAERMHFMARFGKGRKYAMAYKRMRNYMSIPSVVHLLSMGTQNSAARSRLDQRPIQRPYRLSKQEDTIERTHQAAQNSGNWPDAISLHFNVECDHVLLAEGRCDGAGFTKAQVFTNKVSYPWGKPPSWLKMSRAVRPIDWESWTQARQVVRVKCNPCNGKGVISNSCRCHGKGKVLDKAESDRQGVPVMKACDRCGGRGYARLKFSTVIEGVNTVAEIKKTAAYEQLQPLFEELVAECHKQESMADSILSKVTR

SEQ ID NO: 35577 - protein, 1114 aa, Homo sapiens
  DOMAIN (574)..(603): kw REPLICATION REPB REPA INITIATION domain identified by eMATRIX, accession number DM00653A, p-value=7.207e-27, raw score of 20.40
  DOMAIN (805)..(919): ParA family ATPase domain identified by PFam, accession name ParA, E-value=1.6e-27, PFam score of 104.9
  misc_feature (1)...(1114): Xaa = X or * as defined in Table 2
MERRNRRTGRTEKARIWEVTDRTVRTWIGEAVAAAAADGVTFSVPVTPHTFRHSYAMHMLYAGIPLKVLQSLMGHKSISSTEVYTKVFALDVAARHRAIRDAETAGRLPHPDMEIRGRVEQRVGYTIEQINHMRDVFGTRLRRAEDVFPPVIGVAAHKGGVYKTSVSVHLAQDLALKGLRVLLVEGNDPQGTASMYHGWVPDLHIHAEDTLLPFYLGEKDDVTYAIKPTCWPGLDIIPSCLALHRIETELMGKFDEGFEPDVRILLTKYSNSNGSQSPWMEEQIRDAWGSMVLKNVVRETDEVGKAAPMVDSLIARVGVMARGNAITLPVCGRDVKFTLEVLRGDSVEKTSRVWSGNERDQELLTEDALDDLIPSFLLTGQQTPAFGQRVSGVIEIADWEVAVVKLLHFTEVIIXTFRRTPPCHTSHGSVMAETAVINHKKRKNSPRIVQSNDLTEAAYSLSRDQKRMLYLFVDQIRKSDGTLQEHDGICEIHVAKYAEIFGLTSAEASKDIRQALKSFAGKEVVFYRPEEDAGDEKGYESFPWFIKRAHSPSRGLYSVHINPYLIPFFIGLQNRFTQFRLSETKEITNPYAMRLYESLCQYPAPMVDSLIARVGVMARGNAITLPVCGRDVKFTLEVLRGDSVEKTSRTPAFGRRVSGVIEIADGSRRRKAAALTESDYRVLVGELDDEQMAALSRLGNDYRPTSAYERGQRYASRLQNEFAGNISALADAENISRKIITRCINTAKLPKSVVALFSHPGELSAPVRAIKWSLSLGTSAAHSKNSCIKPTCWPGLDIIPSCLALHRIETELMGKFDEGKLPTDPHLMLRLAIETVAHDYDVIVIDSSPNLGIGTINVVCAADVLIVPTPAELFDYTSALQFFDMLRDLLKNVDLKGFEPDVRILLTKYSNSNGSQSPWMEEQIRDAWGSMVLKNVVRETDEVGKETPTSAYERGQRYASRLQNEFAGNISALADAENISRKIITRCINTAKLPKSVVALFSHPGELSALSGDALQKAFTDKEELLKQQASNLHEQKKAGVIFEAEEVITLLTSVLKTSSASRTSLSSRHQFAPGATVLYKGDKMVLNLDRSRVPTECIEKIEAILKELEKPAP

SEQ ID NO: 35578 - protein, 653 aa, Homo sapiens
  DOMAIN (293)..(336): 1 kw MIND INHIBITOR DIVISION CONTROL domain identified by eMATRIX, accession number DM01756B, p-value=4.822e-15, raw score of 22.91
  DOMAIN (258)..(363): ParA family ATPase domain identified by PFam, accession name ParA, E-value=7.4e-26, PFam score of 99.3
MAETAVINHKKRKNSPRIVQSNDLTEAAYSLSRDQKRMLYLFVDQIRKSDGTLQEHDGICEIHVAKYAEIFGLTSAEASKDIRQALKSFAGKEVVFYRPEKDAGDEKGYESFPWVIKHHSRESSPSWSRSLPDHTREVFSTLSPRSTSRVNFTSRPHTGKVMALPRAITPTRAINESTIGAAGVDNEDLALKGLRVLLVEGNDPQGTASMYHGWVPDLHIHAEYSLLPFYLGEKDDVTYAIKPTCWPGLDIIPSCLALHRIETELMGKFDEGKLPTDPHLMLRLAIETVAHDYDVIVIDSAPNLGIGTINVVCAADVLIVPTPAELFDYTSALQFFDMLRDLLKNVDLKGFEPDRYVSRLQNQFAGNISALADAENISRKIITRCINTAKLPKSVVALFSHPGELSARSCDALQKAFTDKEELLKQQASNLHEQKKAGVIFEAEEVITLLTSVLKTSSASRTSLSSRHQFAPGATVLYKGDKMVLNLDSAYERGQRYASRLQNEFAGNISALADAENISRKIITRCINTAKLPKSVVALFSHPGELSARSGDALQKAFTDKEELLKQQASNLHEQKKAGVIFEAEEVITLLTSVLKTSSASRTSLSSRHQFAPGATVLYKGDKMVLNLDRSRVPTECIEKIEAILKELEKPAP

SEQ ID NO: 35579 - protein, 784 aa, Homo sapiens
  DOMAIN (534)..(563): kw REPLICATION REPB REPA INITIATION domain identified by eMATRIX, accession number DM00653A, p-value=7.207e-27, raw score of 20.40
  DOMAIN (518)..(560): Initiator RepB protein domain identified by PFam, accession name RepB_protein, E-value=0.0091, PFam score of 12.3
LKPDGLEATIQRSALPSTSLPSSKECVPSRFGALHSTPFKLLPCPTRYPLTISPQPKQEKVEREYFGTYFWPNKALQNFQRYTGIQHVHRIAMAERMWCDRNRERHTVSSSGGNRLPNPGSDVWDSWPCQNADGTVAEYTGYHVVFALAGSPKDADDTSIYMFYQKVGDNSIDSWKNAGRVFKDSDKFDANDPILKDQTQEWSGSATFTSDGKIRLFYTDYSGKHYGKQSLTTAQVNVSKSDDTLKINGVEDHKTIFDGDGKTYQNVQQFIDEGNYTSGDNHTLRDPHYVEDKGHKYLVFEANTGTENGYQGEESLFNKAYYGGGTNFFRKESQKLQQSAKKRDGNSYDHDYEFELGTPKPFIVEVTASQENKIDLCDNLKTCHTSHGSVMAETAVINHKKRKNSPRIVQSNDLTEAAYSLSRDQKRMLYLFVDQIRKSDGTLQEHDGICEIHVAKYAEIFGLTSAEASKDIRQALKSFAGKEVVFYRPEEDAGDEKGYESFPWFIKRAHSPSRGLYSVHINPYLIPFFIGLQNRFTQFRLSETKEITNPYAMRLYESLCQYRKPDGSGIVSLKIDWIIERYQLPQSYQRPGGEGQSAVARLTGEKKNHPGAQYANRLSPRVGRFINAAGTTGFPTGKRAVSATQLIRRRSRRGRGRGRGRGRKRRRRIGKGRGRGTRRRRKRGGRGRRRREDREQEEEEGKEEEEEGGIGRRRKEEEEEEEEGEEKKRKKKEKNKKKEVQEEEEEGRRRRRRRRRRREEGEEEEKNPCEKKQSDFHSCLGICG

SEQ ID NO: 35580 - protein, 458 aa, Homo sapiens
  DOMAIN (84)..(127): 1 kw MIND INHIBITOR DIVISION CONTROL domain identified by eMATRIX, accession number DM01756B, p-value=4.822e-15, raw score of 22.91
  DOMAIN (49)..(156): ParA family ATPase domain identified by PFam, accession name ParA, E-value=5e-21, PFam score of 83.3
MYHGWVPDLHIHAEDTLLPFYLGEKDDVTYAIKPTCWPGLDIIPSCLALHRIETELMGKFDEGKLPTDPHLMLRLAIETVAHDYDVIVIDSAPNLGIGTINVVCAADVLIVPTPAELFDYTSALQFFDMLRDLLKNVILKGSSLMDFANFGTTIKQDFRLLGQTSVDRLLQLSQGQAVKGNQLLPVSLVKRKTTLAPNTQTASPRALADSLMQLARQVSRLESGHIYSFLESALSNCFPLPYLPIFKLFSKLTEAACLQCDNLKTCHTSHGSVMAETAVINHKKRKNSPRIVQSNDLTEAAYSLSRDQKRMLYLFVDQIRKSDGTLQEHDGICEIHVAKYAEIFGLTSAEASKDIRQALKSFAGKEVVFYRPEEDAGDEKGYDLFGGSSRVKLGCLHSRVACFDRALIGAFTIPELDTKVLHVPTRLVRYRVSTQRFSKAPPEQLDTECRLVHSQTLS

SEQ ID NO: 35581 - protein, 434 aa, Homo sapiens
  DOMAIN (405)..(434): kw REPLICATION REPB REPA INITIATION domain identified by eMATRIX, accession number DM00653A, p-value=7.000e-18, raw score of 20.40
MKLMETLNQCINAGHEMTKAIAIAQFNDDSPEARKITRRWRIGEAADLVGVSSQAIRDAEKAGRLPHPDMEIRGRVEQRVGYTIEQINHMRDVFGTRLRRAEDVFPPVNVSKSDDTLKINGVEDHKTIFDGDGKTYQNVQQFIDEGNYTSGDNHTLRDPHYVEDKGHKYLVFEANTGTENGYQGEESLFNKAYYGGGTNFFRKESQKLQQSAKKRDAELANGALGIIELNNDYTLKKVMKPLITSNTCDNLKTCHTSHGSVMAETAVINHKKRKNSPRIVQSNDLTEAAYSLSRDQKRMLYLFVDQIRKSDGTLQEHDGICEIHVAKYAEIFGLTSAEASKDIRQALKSFAGKEVVFYRPEEDAGDEKGYESFPWFIKRAHSPSRRLYSVHINPYLIPLLYRVPNRVTQFRLSETKEITHPYAMPLYESLCQYS

SEQ ID NO: 35582 - protein, 483 aa, Homo sapiens
  DOMAIN (172)..(201): kw REPLICATION REPB REPA INITIATION domain identified by eMATRIX, accession number DM00653A, p-value=7.207e-27, raw score of 20.40
  DOMAIN (244)..(361): ParA family ATPase domain identified by PFam, accession name ParA, E-value=6.4e-20, PFam score of 79.6
MSRWLHYPDWVTIIAQQVLMNVVSVMQADCRMNLLEIFLRWLMRKIFHSNDLTEAAYSLSRDQKRMLYLGGDQIRKSDGTLQEHDGICEIHVAKYAEIFGLTSAEASKDIRQALKSFAGKEVVFYRPEEDAGDEKGYESFPWFIKRAHSPSRGLYSVHINPYLIPFMYRLQNRFTQFRLSETKEITNPYAMRLYESLCQYRKPDGSGIVSLEIDWIIRPLPAASKYQRMPDFRRRFLEGLELKCLFVDSRGSPLMGKFDEGKLPTDPHLMLRLNIETVAHDYDVIVIDSAPNLGIGTINVVCAADVLIVPTPAELFDYTWRLQFFDMLRDLLKNVDLKGFEPDVRILLTKYSNSNGSQSPWMEEQIRDAWGSMVLKNVVRETDEVGKERSNLGVRLYACCGLLLCPAYPQHFAHGYVDKIPGYPGRAGTLTGLHPMQHSADMEAITNGMMNLNRQRHQHLVALRIIFAHGENGGEEVVHIGHV

SEQ ID NO: 35583 - protein, 441 aa, Homo sapiens
  DOMAIN (334)..(363): kw REPLICATION REPB REPA INITIATION domain identified by eMATRIX, accession number DM00653A, p-value=9.289e-22, raw score of 20.40
  DOMAIN (39)..(184): "Phage" integrase family domain identified by PFam, accession name Phage_integrase, E-value=1.8e-10, PFam score of 48.3
MGKGFMTKTPKAMATKAKIDKWDLIKLKNFCTAKETTIRVNRKPTEWERIFAIYSSDKGLISRIYKELKQIDKKKTNNPIKKGVFIRDKLMERRNRRTGRTEKARIWEVTDRTVRTWIGEAVAAAAADGVTFSVPVTPHTFRHSYAMHMLYAGIPLKVLQSLMGHKSISSTEVYTKCDNLKTCHTSHGSVMAETAVINHKKRKNSPRIVQSNDLTEAAYSLSRDQKRMLYLFVDQIRKSDGTLQEHDGICEIHVAKYAEIFGLTSAEASKDIRQALKSFAGKEVVFYRPEEDAGDEKGYESFPWFIKRAHSPSRGLYSVHINPYLIPFFIGLQILFTQFRLSETKEITNPYAMRLYESLCQYRKPDGSGIVSLKIDWIIERYQLPQSYQRMPDFRRRFLQVCVNEINSRTPMRLSYIEKKKGRQTTHIVFSFRDITSMTTG

SEQ ID NO: 35584 - protein, 519 aa, Homo sapiens
  DOMAIN (388)..(417): kw REPLICATION REPB REPA INITIATION domain identified by eMATRIX, accession number DM00653A, p-value=7.207e-27, raw score of 20.40
  DOMAIN (372)..(414): Initiator RepB protein domain identified by PFam, accession name RepB_protein, E-value=0.0091, PFam score of 12.3
MIVYLENPIVSAQNLLKLISNFSKVSGYKINVQKSQAFLYTNNRQTESQIMGELPFTIASKRIKYLGIQLTRDVKDLFKENYKPLLKEIKEDTNKWKNIPCSWVGRINIVKMAILPKVPREQPQRHPQRSLSKGTKIWPRDNDVQGPGALRLPPTCCSKLALSSRCRALGSQASPPPPQQPLLGARKKWEPGLSGTEYEIYNALIVILGTDTLDAVGIGLVMPILAGLLRKIAHSDRIPRNLGVVNPPAVINHKKRKNSPRIVQSNDLTEAAYSLSRDQKRMLYLFVDQIRKSDGTLQEHDGICEIHVAKYAEIFGLTSAEASKDIRQALKSFAGKEVVFYRPEEDAGDEKGYESFPWFIKRAHSPSRGLYSVHINPYLIPFFIGLQNRFTQFRLSETKEITNPYAMRLYESLCQYRKPDGSGIVSLKIDWIIERYQLPQSYQLRYQPFGVDTIIPNSQKKVKALKRLPDLTNITELGNHGSGITPGLCDLEPKPGTLVCTIREVYAKIASFTLQLIFN

SEQ ID NO: 35585 - protein, 753 aa, Homo sapiens
  DOMAIN (582)..(611): kw REPLICATION REPB REPA INITIATION domain identified by eMATRIX, accession number DM00653A, p-value=7.207e-27, raw score of 20.40
  DOMAIN (237)..(351): ParA family ATPase domain identified by PFam, accession name ParA, E-value=1.3e-08, PFam score of 42.0
MKLMETLNQCINAGHEMTKAIAIAQFNDDSPEARKITRRWRIGEAADLVGVSSQAIRDAEKAGRLPHPDMEIRGRVEQRVGYTIEQINHMRDVFGTRLRRAEDVFPPVIGVAAHKGGVYKTSVSVHLAQDLALKGYVFCSWKCINAGHEMTKAIAIAQFNDDSPEARKITRRWRIGEAADLVGVSSQAIRDAEKAGRLPHPDMEIRGRVEQRVGYTIEQINHMRDVFGTRLRRAEDVFPPVIGVAAHKGGVYKTSVSVHLAQDLALKGLRVLLVEEPPSAPNLGIGTINVVCAADVLIVPTPAELFDYTSALQFFDMLRDLLKNVDLKGFEPDVRILLTKYSNSNGSQSPWMEEQIRDAWGSMVLKNVVRETDEVGKAAPMVDSLIARVGVMARGNAITLPVCGRDVKFTLEVLRGDSVEKTSRCDNLKTCHTSHGSVMAETAVINHKKRKNSPRIVQSNDLTEAAYSLSRDQKRMLYLFVDQIRKSDGTLQEHDGICEIHVAKYAEIFGLTSAEASKDIRQALKSFAGKEVVFYRPEEDAGDEKGYESFPWFIKRAHSPSRGLYSVHINPYLIPFFIGLQNRFTQFRLSETKEITNPYAMRLYESLCQYHPLTIEKVMKPLITSNTVTDEIERANVFKMNGKWYLFTDSRGSKMTIDGINSNDIYMLGYVSNSLTGPYKPLNKTGLVLQMGLDPNDVTFTYSHFAVPQAKGNNVVITSYMTNRGFFEDKKATFAPSFLMNIKGNKTSDKLPH

SEQ ID NO: 35586 - protein, 806 aa, Homo sapiens
MAETAVINHKKRKNSPRIVQSNDLTEAAYSLSRDQKRMLYLFVDQIRKSDGTLQEHDGICEIHVAKYAEIFGLTSAEASKDIRQALKSFAGKEVVFYRPEEDAGDEKGYESFPWFIKRAHSPSRGLYSVHINPYLIPFFIGLQNRFTQFRLNFVQKSRLVDLALKGLRVLLVEGNDPQGTASMYHGWVPDLHIHAEDTLLPFYLGEKDDVTYAIKPTCWPGLDIIPSCLALHRIETELMGKFDEAVINHKKRKNSPRIVQSNDLTEAAYSLSRDQKRMLYLFVDQIRKSDGTLQEHDGICEIHVAKYAEIFGLTSAEAIAEYNGYHVVFALAGSPKDADDTSIYMFYQKVGDNSIDSWKNAGRVFKDSDKFDANDPILKDQTQEWSGSATFTSDGKIRLFYTDYSGKHYGKQSLTTAQVNVSKSDDTLKINGVEDHKTIFDGDGKTYQNVQQFIDEGNYTSGDNHTLRDPHYVEDKGHKYLVFEANTGTENGYQGEESLFNKAYYGGGTNFFRKESQKLQQSAKKRDAELANGALDLTTAQVNVSKSDDTLKINGVEDHKTIFDGDGKTYQNVQQFIDEGNYTSGDNHTLRDPHYVEDKGHKYLVFEANTGTENGYQGEESLFNKAYYGGGTNFFRKESQKLQQSAKKRDAELANGALGIIELNNDYTLKKVMKPLITSNTVTDEIERANVFKMNGKWYLFTDSRGSKMTIDGINSNDIYMLGYVSNSLTGPYKPLNKTGLVLQMGLDPNDVTFTYSHFAVPQAKGNNVVITSACGAESTFYVEDPPGWSQTPGLKRSSCLGLPKC

SEQ ID NO: 35587 - protein, 405 aa, Homo sapiens
  DOMAIN (346)..(375): kw REPLICATION REPB REPA INITIATION domain identified by eMATRIX, accession number DM00653A, p-value=1.857e-20, raw score of 20.40
  DOMAIN (330)..(372): Initiator RepB protein domain identified by PFam, accession name RepB_protein, E-value=0.011, PFam score of 12.0
MKLMETLNQCINAGHEMTKAIAIAQFNDDSPEARKITRRWRIGEAADLVGVSSQAIRDAEKAGRLPHPDMEIRGRVEQRVGYTIEQINHMRDVFGTRLRRAEDVFPPVIGVAAHKERNQNISRYISNRLARRECHDSPEEGTGNTRSKERLQGRLPSRGLTESQEHLLDTRKQFWFEDFKDGLGPILKCDNLKTCHTSHGSVMAETAVINHKKRKNSPRIVQSNDLTEAAYSLSRDQKRMLYLFVDQIRKSDGTLQEHDGICEIHVAKYAEIFGLTSAEASKDIRQALKSFAGKEVVFYRPEEDAGDEKGYESFPWFIKRAHSPSRGLYSVHINPYLIPFFIGLQNRFTQFRLSETKEITNPYAMRLYESLSASNYQRMPDFRRRFLQVCVMEINKQTSMRLSYI

SEQ ID NO: 35588 - protein, 676 aa, Homo sapiens
MDYRSKFLELQPISAGARDTRLTLKSFKVFPISLNGNPIHSIAQAKTLEATLDSFVATLSDIQFISKSSGPTSKKRGTAVLQPQGTKYCQQSEGARERISLLQQEMQPCRCLHFSHTEDLYQTSELQNCQIPPISGFESLDGWERRVAEDNQVSVFTNGEAIGEVTVYPAKWLREMVLKSENQGGPRNGHMNGDECSKVVGPLEDGSQARMRKPDLQQLDSHCDNLKTCHTSHGSVMAETAVINHKKRKNSPRIVQSNDLTEAAYSLSRDQKRMLYLFVDQIRKSDGTLQEHDGICEIHVAKYAEIFGLTSAEASMDIRQALKSFAGKEVVFYRPEEDAGDEKSYESFPWFIKPCFSFNSQAPLLQGCCGLLGIHSRAYSPGSLPPLEVLPVYAAEQQRSVACSFLWDVYLMRSTDLMTAGMLLYKVSGDPWSTLEDPLLDTRNGPPLTASKKRGTAVLQPQGTKYCQQSEGARERISLLQQEMQPCRCLHFSHTEDLYQTSELQNCQIPKQQQNEKYQVPQFDQSANQNIESAKGLDVRDSWALQNADGTVGDNSIDRWLNAGRVFKDSDKFGANDPILKDQTQEWSGSANLYHLTEKSVYSTLTIPVNQYGLMSLSKSTECEDHGTIFDRHGETYPNVQEFIDEGYHTSGDYRTLSSLHACRSTLEDPNIHLSL

SEQ ID NO: 35589 - protein, 550 aa, Homo sapiens
  DOMAIN (301)..(330): kw REPLICATION REPB REPA INITIATION domain identified by eMATRIX, accession number DM00653A, p-value=7.207e-27, raw score of 20.40
  DOMAIN (438)..(547): ParA family ATPase domain identified by PFam, accession name ParA, E-value=2.1e-21, PFam score of 84.6
MVDSLIARVGVMARGNAITLPVCGRDVKFTLEVLRGDSVEKTSRVWSGNERDQELLTEDALDDLIPSFLLTGQQTPAFGRRVSGVIEIADGSRRRKAAALTESDYRVLVGELDDEQMAALSRLGNDYRPTSAYERGQRYANRLQNEFAGNIFALAGAQNISPVINHKKRKNSPRIVQSNDLTEAAYSLSRDQKRMLYLFVDQIRKSDGTLQEHDGICEIHVAKYAEIFGLTSAEASKDIRQALKSFAGKEVVFYRPEEDAGDEKGYESFPWFIKRAHSPSRGLYSVHINPYLIPFFIGLQNRFTQFRLSETKEITNPYAMRLYESLCQYRKPDGSGIVSLKIDWIIERYQLPQSYQRMPDFRRRFLQDLALKGLRVLLVEGNDPQGTASMYHGWVPDLHIHAEDTLLPFYLGEKDDVTYAIKPTCWPGLDIIPSCLALHRIETELMGKFDEGKLPTDPHLMLRLAIETVAHDYDVIVIDSAPNLGIGTINVVCAADVLIVPTPAELFDYTSALQFFDMLRDLLKNVDLKGFEPDICQWEEELKEPAEADL

SEQ ID NO: 35590 - protein, 482 aa, Homo sapiens
  DOMAIN (375)..(404): kw REPLICATION REPB REPA INITIATION domain identified by eMATRIX, accession number DM00653A, p-value=7.207e-27, raw score of 20.40
  DOMAIN (194)..(471): Initiator RepB protein domain identified by PFam, accession name RepB_protein, E-value=4.6e-11, PFam score of 41.6
MMWSVLLQPVVLAAVERQGEALEMGSAAYQGRCPQDKESYNMLSVESENHLPGKVTTDSNLNPQPQQGETAVINHKKRKNSPRIVQSNDLTEAAYSLSRDQKRMLYLFVDQIRKSDGTPQEQTVFCEIHVAKYAEIFGLTSAEASKDIRQALKSFAGKEVVFYRPEEDAGDEKGYESFPWFIKRAHSPSRGLYSVHINPYLIPFFIGLQNRFTQFRLSETQEITNPYAMRLYESLCQYRKPDGSGIVSLKIDWIIERYQLPHSYQRMPDFRRRFLQIRKSDGTLQEHDGICEIHVAKYAEIFGLTSAEASKDIRQALKSFAGKEVVFYRPEEDAGDEKGYESFPWFIKRAHSPSRGLYSVHINPYLIPFFIGLQNRFTQFRLSETKEITNPYAMRLYESLCQYRKPDGSGIVSLKIDWIIERYQLPQSYQRMPDFRRRFLQVCVNEINSRTPMRLSYIEKKKGRQTTHIVFSFRDITSMTTG

SEQ ID NO: 35591 - protein, 596 aa, Homo sapiens
  DOMAIN (394)..(423): kw REPLICATION REPB REPA INITIATION domain identified by eMATRIX, accession number DM00653A, p-value=3.854e-21, raw score of 20.40
  DOMAIN (378)..(420): Initiator RepB protein domain identified by PFam, accession name RepB_protein, E-value=0.016, PFam score of 11.4
MEPSDEAADIVHTEGESLIWDRSARYGEEEGNISANSTRRARWYTKLVFFRDHRPFPVPLSSLFSDGENVGCVDVIIQRAYPIQLLNMYRELSDIKTHMKKASAVIAADPLYSDGAWSEPTFTSSEAAIQSMLECMKNNELGKALRQIRECRTPEELHNFSLNSESHSDIRKNKMHILSYEDTHIVTHKILKESVPVGTGNQIVTLQAQPERDEKIKEPTLLGFHTASGKKVKISKCDNLKTCHTSHVSVMAETAVIYHKKCKNSPRIVQSNDLTEAAYSLSRDQKRMLYLFVDQIRKSDGTLQEHDGICEIHVAKYAEIFGLTSAKASKDIRQALKSFAGKKVVFYRPEEDAGDEKGYESFPWFIKRAHSPSRGLYSVHINPYLIPFFIGLQNRFTQFRLSETKEITNPYAMRLYECLAYYGGGTNFFCKESQKLQQSAKKRDAELANGALGIIELNNDYTLKKVMKPLITSNTVTDEIERANVFKMNGKWYLFTDSRASKMTIDGINSNDIYMLGYVSNSLTGPYKPMNKTGLVLQMGLDPNDVTFTYSHFAVPQAKGNNVVITSYMTNRGFFEDKKATFAPRGIYRVHKRLQA

SEQ ID NO: 35592 - protein, 624 aa, Homo sapiens
  DOMAIN (468)..(497): kw REPLICATION REPB REPA INITIATION domain identified by eMATRIX, accession number DM00653A, p-value=7.207e-27, raw score of 20.40
  DOMAIN (452)..(494): Initiator RepB protein domain identified by PFam, accession name RepB_protein, E-value=0.0091, PFam score of 12.3
LNTPGYHVVFALGESPKDADDTSIYMFYQKVGDNSIDSWKNAGRVFKDSDKFDANDPILKDQTQEWSGSATFTSDGKIRLFYTDYSGKHYGKQSLTTAQVNVSKSDDTLKINGVEDHKTIFDGDGKTYQNVQQFIDEGNYTSGDNHTLRDPHYVEDKGHKYLVFEANTGTENGYQGEESLFNKAYYGGGTNFFRKESQKLQQSAKKRDAELANGALGIIELNNDYTLKKVMKPLITSNTVCVNEINSRTPMRLSYIEKKKGRQTTHITPAFGRRVSGVIEIADGSRRRKAAALTESDYRVLVGELDDERGCDNLKTCHTSHGSVMAETAVINHKKRKNSPRIVQSNDLTEAAYSLSRDQKRMLYLFVDQIRKSDGTLQEHDGICEIHVAKYAEIFGLTSAEASKDIRQALKSFAGKEVVFYRPEEDAGDEKGYESFPWFIKRAHSPSRGLYSVHINPYLIPFFIGLQNRFTQFRLSETKEITNPYAMRLYESLCQYQCDSRQKARENVGISTETERAATVFKNYSSGSSIEKMYYIQWVLIGPKGHVFQPITIVGKADHVQTGANCDKLQGTKSKQASYDHWLTVDGDNVPCRRHDNTRGEPPTPRNTPPRRKHRLWGEDAPRY

SEQ ID NO: 35593 - protein, 714 aa, Homo sapiens
  DOMAIN (684)..(713): kw REPLICATION REPB REPA INITIATION domain identified by eMATRIX, accession number DM00653A, p-value=6.906e-25, raw score of 20.40
  DOMAIN (6)..(389): Chloramphenicol acetyltransferase domain identified by PFam, accession name CAT, E-value=1e-184, PFam score of 627.0
MEKKITGYTTVDISQWHRKEHFEAFQSVAQCTYNQTVQLDITAFLKTVKKNKHKFYPAFIHILARLMNAHPEFRMAMKDGFIENMFFVSANPWVSFTSFDLNVANMDNFFAPVFTMGKYYTQGDKVLMPLAIQFFDMLRDLLKNVDLKGFEPDVRILLTKYSNSNGSQSPWMEEQIRDAWGSMVLKNVVRETDEVGKDTGVRSKISGVIKMPMGVAVVNCCTYGSDYRVWLASWMMSQWLHYPEWYRKENKHKFYPAFIHILARLMNAHPEFRMAMKDGELVIWDSVHPCYTVFHEQTETFSSLWSEYHDDFRQFLHIYSQDVACYGENLAYFPKGFIENMFFVSANPWVSFTSFDLNVANMDNFFAPVFTMGKYYTQGDKVLMPLAIQFFDMLRDLLKNVDLKGFEPDVRILLTKYSNSNGSQSPWMEEQIRDAWGSMVLKNVVRETDEVGKGQIRMGTELEFFRLSETKEITNPYAMRLYESLCQYRKPDGSGIVSLKIDWIIERYQLPQSYQRMPDFRRRFLQCDNLKTCHTSHGSVMAETAVINHMKRKNSPRIVQSNDLTEAAYSLSRDQKRMLYLFVDQIRKSDGTLQEHDGICEIHVAKYAEIFGLTSAEASMDIQHALKSFSGKEVVFYRPEEDAGDEKGYESFPWFIKRAHSPSRGLYSVHINPYLIPFFIGLQNRFTQFLLSETKEITNPYAMRLYECLCQYPV

SEQ ID NO: 35594 - protein, 389 aa, Homo sapiens
  DOMAIN (287)..(316): kw REPLICATION REPB REPA INITIATION domain identified by eMATRIX, accession number DM00653A, p-value=7.207e-27, raw score of 20.40
  DOMAIN (271)..(313): Initiator RepB protein domain identified by PFam, accession name RepB_protein, E-value=0.0091, PFam score of 12.3
MNMNIKKIVKQATVLTFTTALLAGGATQAFAKENNQKAYKETYGVSHITRHDMLQIPKQQQNEKYQVPQFDQSTIKNIESAKGLDVWDSWPLQNADGTVAEYNGYNVVFALAGSPEDADDTSIYMFYQKCDNLKTCHTSHGSVMAETAVINHKKRKNSPRIVQSNDLTEAAYSLSRDQKRMLYLFVDQIRKSDGTLQEHDGICEIHVAKYAEIFGLTSAEASKDIRQALKSFAGKEVVFYRPEEDAGDEKGYESFPWFIKRAHSPSRGFYSVHINPYLIPFFIGLQNRFTQFRLSETKEITNPYAMRLYESLCQYRKPDGSGIVSLKIDWIIKRSQLPQSAFYQPFMGLRRESFYFRWERRTLGPLKSFSVKRGTEAGKFRLAALLVRL

SEQ ID NO: 35595 - protein, 465 aa, Homo sapiens
  DOMAIN (374)..(403): kw REPLICATION REPB REPA INITIATION domain identified by eMATRIX, accession number DM00653A, p-value=3.392e-09, raw score of 20.40
MPASGNENDLNMPSGTIEIFVRCYVEVERIMDFADFGTTIKQDFRLLGQTSVDRLLQLSQGQAVKGNQLLPVSLVKRKTTLAPNTQTASPRALADSLMQLARQVSRLESGHQAPCMKSNNALIVILGTVTLDAVGIGLVMPVLPGLLRDIVHSDSIASHYGVLLALYALMQFLCAPVLGALSDRFGRRPVLLASLLGATIDYAIMATTPVLWIYPLCDNLKTCHTSHGSVMAETAVINHKKRKNSPRIVQSNDLTEAAYSLSRDQKRMLYLFVDQIRKSDGTLQEHDGICEIHVAKYAEIFGLTSAEASKDIRQALKSFAGKEVVFYRPEEDAGDEKGYESFPWFIKRAHSPSRGLYSVHINPYLIPFFIGLQNRFTQFRLSETKEITNPDFADFGTTIKQDFRLLGQTSVDRLLQLSQGQANPDFFPRGGRSLKGPALKPESQTFIQLSTLLATRLVLPTAAKL

SEQ ID NO: 35596 - protein, 458 aa, Homo sapiens
  DOMAIN (326)..(355): kw REPLICATION REPB REPA INITIATION domain identified by eMATRIX, accession number DM00653A, p-value=7.207e-27, raw score of 20.40
  DOMAIN (310)..(352): Initiator RepB protein domain identified by PFam, accession name RepB_protein, E-value=0.0091, PFam score of 12.3
  misc_feature (1)...(458): Xaa = X or * as defined in Table 2
MNMNIKKIVKQATVLTFTTALLAGGATQAFAKENNQKAYKETYGVSHITRHDMLQIPKQQQNEKYQVPQFDQSTIKNIESAKGLDVWDSWPLQNADGTVAEYNGYHVVFALAGSPKDADDTSIYMFYQKIRRKNGPVSATFTSDGKIRLFYTDYSGKHYGKQSLTTAQCDNLKTCHTSHGSVMAETAVINHKKRKNSPRIVQSNDLTEAAYSLSRDQKRMLYLFVDQIRKSDGTLQEHDGICEIHVAKYAEIFGLTSAEASKDIRQALKSFAGKEVVFYRPEEDAGDEKGYESFPWFIKRAHSPSRGLYSVHINPYLIPFFIGLQNRFTQFRLSETKEITNPYAMRLYESLCQYRKPDGSGIVSLKIDWIIERYQLPKVPSPEARKITRRWRIVKQRIXLGFLLRLSEMPRKQGDYRTRIWKFEDGLSNVLVIQLNKLIICVMCLVRDCDVLKTYFHR

SEQ ID NO: 35597 - protein, 555 aa, Homo sapiens
  DOMAIN (335)..(370): Troponin domain identified by eMATRIX, accession number PF00992A, p-value=3.368e-09, raw score of 16.67
  DOMAIN (353)..(444): ParB-like nuclease domain identified by PFam, accession name ParBc, E-value=3e-10, PFam score of 47.5
MAETAVINHKKRKNSPRIVQSNDLTEAAYSLSRDQKRMLYLFVDQIRKSDGTLQEHDGICEIHVAKYAEIFGLTSAEASKDIRQALKSFAGKEVVFYRPEEDAGDEKAMNLFPWLSNIITRCINTAKLPKSVVALFSHPGELSARSGDALQKAFTDKEELLKQQASNLHEQKKAGMASSSKILSYSASDTTARALGSVLEQKCLNEIFPPRIVLKIKKAAIFIAAQQPQFLVTSRALHFWGEEEKGREAPRGAAELLFVAKESALKEEAAGRRKEERRREERRRGPGPPSRERRSIEEREEEEEEEEEEGEETNSGGGGSERSGRRASRRSGRRRNRRGSRGLRRAKRTAREEEEEAEEEEKGDPNTERDQELLTEDALDDLIPSFLLTGQQTPAFGRRVSGVIEIADGSRRRKAAALTESDYRVLVGELDDEQMAALSRLGNDYRPTSAYERGQRYASRLQNEFAGNISALADAENISRKIITRCINTAKLPKSVVALFSHPGELSARSGDALQKAFTDKEELLKQQASNLHEQKKAGVISEAEEVITLFTFCA

SEQ ID NO: 35598 - protein, 225 aa, Homo sapiens
  DOMAIN (158)..(187): kw REPLICATION REPB REPA INITIATION domain identified by eMATRIX, accession number DM00653A, p-value=1.000e-13, raw score of 20.40
  misc_feature (1)...(225): Xaa = X or * as defined in Table 2
CDNLKTCHTSHGSVMAETAVINHKKRKNSPRIVQSNDLTEAAYSLSRDQKRMLYLFVDQIRKSDGTLQEHDGICEIHVAKYAEIFGLTSAEASKDIRQALKSFAGKEVVFYRPEEDAGDEKGYESFPWFIKRAHSPSRGLYSVHINPYLIPFFIGLQNRFTQFRLSETKEITNPYAMRIPLHXLFRXTLRQTKPDNSAGKCVKIXXHTQNQRSGRSQNDFXRRGI

SEQ ID NO: 35599 - protein, 439 aa, Homo sapiens
  DOMAIN (144)..(173): kw REPLICATION REPB REPA INITIATION domain identified by eMATRIX, accession number DM00653A, p-value=7.750e-25, raw score of 20.40
  DOMAIN (299)..(413): ParA family ATPase domain identified by PFam, accession name ParA, E-value=2.7e-28, PFam score of 107.5
  misc_feature (1)...(439): Xaa = X or * as defined in Table 2
MAETAVINHKKRKNSPRIVQSNDLTEAAYSLSRDQKRMLYLFVDQIRKSDGTLQEHDGICEIHVAKYAEIFGLTSAEASKDIRQALKSFAGKEVVFYRPEEDAGDEKGYESFPWFIKRAHSPSRGLYSVHINPYLIPFFIGLHNRFTQFRLSETQEITNPHAMRLYESLCQYRKPDGSCIVSLKIDWIIEAYQLPQITNLCLTSAPFPAGLGYEINNELQAPLYIKKXDLALKGLRVLLVEGNDPQGTASMYHGWVPDLHIHAEDTLLPFYLGEKDDVTYAIKPTCWPGLDIIPSCLALHRIETELMGKFDEGKLPTDPHLMLRLAIETVAHDYDVIVIDSAPNLGIGTINVVCAADVLIVPTPAELFDYTSALQFFDMLRDLLKNVDLKGFEPDVRILLTKYSNSNGSQSPWMEEQIRDAWGSMVLKMLFVKRMKLVK

SEQ ID NO: 35600 - protein, 329 aa, Homo sapiens
MEFYMKAFNKLFSLVVASVLVFSRAGCGDKEESKKFSANLNGTEIAITYVYKGDKVLKRALALTTYTFASYHFHLNPVSQFPFTLSPLGCDADMILKINPLRRMTPFGALKIKNCDNLKTCHTSHGSVMAETAVINHKKRKNSPRIVQSNDLTEAAYSLSRDQKRMLYLFVDQIRKSDGTLQEHDGICEIHVAKYAEIFGLTSAEASKDIRQALKSFAGKEVVFYRPEEDAGDEKGYESFPWFIKRAHSPSRGLYSVHINPYLIPFFIGLQNRFTQFRLSEGYPNPWKIPPFNISPRAMGKNNFEPFQSSCPMDPKTSRSKWDIPAFLK

SEQ ID NO: 35601 - protein, 190 aa, Homo sapiens
MAETAVINHKKRKNSPRIVQSNDLTEAAYSLSRDQKRMLYLFVDQIRKSDGTLQEHDGICEIHVAKYAEIFGLTSAEASKDIRQALKSFAGKEVVFYRPEEDAGDEKGYESFPWFIKRAHSPSRGLYSVHINPYLIPFFIGLQNRFTQFRLSKQKRVSSRLNWESDKFDAHRSDPERSEARMVRFCNLYI

SEQ ID NO: 35602 - protein, 1387 aa, Homo sapiens
  DOMAIN (872)..(901): kw REPLICATION REPB REPA INITIATION domain identified by eMATRIX, accession number DM00653A, p-value=7.207e-27, raw score of 20.40
  DOMAIN (1169)..(1275): ParA family ATPase domain identified by PFam, accession name ParA, E-value=1.5e-24, PFam score of 95.0
MTEYKIHQRWFAKLKRKAAAKLREIEQSWKHEKAVPGEVDTLRKLSPDRFQRKRRLSGAQAPGPSVPTREPEGGTLAAWQEGETETAQHSGLGLINSFASGEVTTNGEAAPENGEDGEHGLLTYICDAMELGPQRALKEESGAKKKKKDGEWDFPDFGTTIKQDFRLLGQTSVDRLLQLSQGQAVKGNQLLPVSLVKRKTTLAPNTQTASPRALADSLMQLARQVSRLESGHPCQHPAMGDMKTPDFDDLLAAFDIPDPTSLDAKEAIQTPRTPHAPKHSRPQRGSVDQAEGETCRGPQSPGPVEAKQEASPFQCPKEERPGGVPCMDQGGCPLAGLSQEVPTMPSLPGTGLTASPKAGPCSTPTSQHGSTATFLPSEDQVLMSSAPTLHLGLGTPTQSHPPETMATSSEGACAQAPDVEGRTPGPRSCDPGLIDSLKNYLLLLLKLSSTETSGAGGESQVGAATGGLVPSATLTPTVEVAGRRHEHEHQKNCKTSHSSDFYDCILAGGATQAFAKENNQKAYKETYGVSHITRHDMLQIPKQQQNEKYQVPQFDQSTIKNIESAKGLDVWDSWPLQNADGTVAEYNGYHVVFALAGSPKDADDTSIYMFYQKVGDNSIDSWKNAGRVFKDSDKFDANDPILKDQTQEWSGSATFTSDGKIRLFYTDYSGKHYGKQSLTTAQVNVSKSDDTLKINGVEDHKTIFDGDGKTYQNVQQFIDEGNYTGDPLEAETAVINHKKRKNSPRIVQSNDLTEAAYSLSRDQKRMLYLFVDQIRKSDGTLQEHDGICEIHVAKYAEIFGLTSAEASKDIRQALKSFAGKEVVFYRPEEDAGDEKGYESFPWFIKRAHSPSRGLYSVHINPYLIPFFIGLQNRFTQFRLSETKEITNPYAMRLYESLCQYRKPDGSGIVSLKIDWIIERYQLPQSYQRTPDFRRRFLQVCVNEINSRTPMRLSYIEKKKGRQTTHIDVQIETDGKLNQCINAGHEMTKAIAIAQFNDDSPEARKITRRWRIGEAADLVGVSSQAIRDAEKAGRLPHPDMEIRGRVEQRVGYTIEQINHMRDVFGTRLRRAEDVFPPVIGVAAHKGGVYKTSVSVHLAQDLALKGLRVLLVEGNDPQGTASMYHGWVPDLHIHAEDTLLPFYLGEKDDVTYAIKPTCWPGLDIIPSCLALHRIETELMGKFDEGKLPTDPHLMLRLAIETVAHDYDVIVIDSAPNLGIGTINVVCAADVLIVPTPAELFDYTSALQFFDMLRDLLKNVDLKGFEPDVFIRDKLMERRNRRTGRTEKARIWEVTDRTVRTWIGEAVAAAAADGVTFSVPVTPHTFRHSYAMHMLYAGIPLKVLQSLMGHKSISSTEVYTKVFALDVAARHRVQFAMPESDAVAMLKQLS

SEQ ID NO: 35603 - protein, 409 aa, Homo sapiens
  DOMAIN (144)..(173): kw REPLICATION REPB REPA INITIATION domain identified by eMATRIX, accession number DM00653A, p-value=8.200e-26, raw score of 20.40
  DOMAIN (128)..(182): Initiator RepB protein domain identified by PFam, accession name RepB_protein, E-value=0.0042, PFam score of 13.5
MAETAVINHKKRKNSPRIVQSNDLTEAAYSLSRDQKRMLYLFVDQIRKSDGTLQEHDGICEIHVAKYAEIFGLTSAEASKDIRQALKSFAGKEVVFYRPEEDAGDEKGYESFPWFIKRAHSPSRGLYSVHINPYLIPFFIGLQNRFTQFRLSETKDITNPYAMRLYESLCQYLPQFDQSTIKNIESAKGLDVWDSWPLQNADGTVAEYNGYHVVFALAGSPKDADDTSIYMFYQKVGDNSIDSWKNAGRVFKDSDKFDANDPILKDQTQEWSGSATFTSDGKIRLFYTDYSGKHYGKQSLTTAQVNVSKSDDTLKINGVEDHKTIFDGDGKTYQNVQQFIDEGNYTSGDNHTLRDPHYVEDTGHKYLVFEANTGTDNGYQGEESLFNKAYYGRRHELLPYRKPEASAER

SEQ ID NO: 35604 - protein, 1629 aa, Homo sapiens
  DOMAIN (393)..(422): kw REPLICATION REPB REPA INITIATION domain identified by eMATRIX, accession number DM00653A, p-value=7.207e-27, raw score of 20.40
  DOMAIN (633)..(1350): ParA family ATPase domain identified by PFam, accession name ParA, E-value=2e-60, PFam score of 214.2
AGACVRTCTCTLREVRDPERRERLELRPRHGFCRFRNHHQTGFSPAGANQRGPLAATLSGPGGEGQSAVARLTGEKKNHPGAQYANRLSPRVGRFINAAGTTGFPTGKRAVSATQLIDAAEPRRFRIASRVISAAFGRVSTYGAECMCISPLKRTGFCRFRNHHQTGFSPAGANQRGPLAATLSGPGGEGQSAVARLTGEKKNHPGAQYANRLSPRVGRFINAAGTTGFPTGKRACDNLKTCHTSHGSVMAETAVINHKKRKNSPRIVQSNDLTEAAYSLSRDQKRMLYLFVDQIRKSDGTLQEHDGICEIHVAKYAEIFGLTSAEASKDIRQALKSFAGKEVVFYRPEEDAGDEKGYESFPWFIKRAHSPSRGLYSVHINPYLIPFFIGLQNRFTQFRLSETKEITNPYAMRLYESLCQYRKPDGSGIVSLKIDWIIERYQLPQSYQRMPDFRRRFLQVCVNEINSRTPMRLSYIEKKKGRQTTHIAIRDAEKAGRLPHPDMEIRGRVEQRVGYTIEQINHMRDVFGTRLRRAEDVFPPVIGVAAHKGGVYKTSVSVHLAQDLALKGLRVLLVEGNDPQGTASMYHGWVPDLHIHAEDTLLPFYLGEKDDVTYAIKPTCWPGLDIIPSCLALHRIETELMGKFDEGKLPTDPHLMLRLAIETVAHDYDVIVIDSAPNLGIGTINVVCAADVLIVPTPAELFDYTSALQFFDMLRDLLKNVDLKGFEPDVRILLTKYSNSNGSQSPWMEEQIRDAWGSMVLKNVVRETDEVGKAAPMVDSLIARVGVMARGNAITLPVCGRDVKFTLEVLRGDSVEKTSRVWSARRIPENVKVGAGGLCDNLKTCHTSHGSVMAETAVINHKKRKNSPRIVQSNDLTEAAYSLSRDQKRMLYLFVDQIRKSDGTLQEHDGICEIHVAKYAEIFGLTSAEASKDIRQALKSFAGKEVVFYRPEEDAGDEKGYESFPWFIKRAHSPSRGLYSVHINPYLIPFFIGLQNRFTQFRLSETKEITNPYAMRLYESLCQYRKPDGSGIVSLKIDWIIERYQLPQSYQRMPDFRRRFLQVCVNEINSRTPMRLSYIEKKKGRQTTHIAIRDAEKAGRLPHPDMEIRGRVEQRVGYTIEQINHMRDVFGTRLRRAEDVFPPVIGVAAHKGGVYKTSVSVHLAQDLALKGLRVLLVEGNDPQGTASMYHGWVPDLHIHAEDTLLPFYLGEKDDVTYAIKPTCWPGLDIIPSCLALHRIETELMGKFDEGKLPTDPHLMLRLAIETVAHDYDVIVIDSAPNLGIGTINVVCAADVLIVPTPAELFDYTSALQFFDMLRDLLKNVDLKGFEPDVRILLTKYSNSNGSQSPWMEEQIRDAWGSMVLKNVVRETDEVGKAAPMVDSLIARVGVMARGNAITLPVCGRDVKFTLEVLRGDSVEKTSRVWSARRIPENVKVGAGGLCDNLKTCHTSHGSVMAETAVINHKKRKNSPRIVQSNDLTEAAYSLSRDQKRMLYLFVDQIRKSDGTLQEHDGICEIHVAKYAEIFGLTSAEASKDIRQALKSFAGKEVVFYRPEEDAGDEKGYESFPWFIKRAHSPSRGLYSVHINPYLIPFLYRVTEPVYAVSGLVKQKKSPIPYALAFIPIPVSVS

SEQ ID NO: 35605 - protein, 573 aa, Homo sapiens
  DOMAIN (15)..(48): Chloramphenicol acetyltransferase proteins domain identified by eMATRIX, accession number BL00100E, p-value=2.929e-33, raw score of 15.41
  DOMAIN (1)..(47): Chloramphenicol acetyltransferase domain identified by PFam, accession name CAT, E-value=1e-34, PFam score of 128.7
MDNFFAPVFTMGKYYTQGDKVLMPLAIQVHHAVCDGFHVGRMLNELQQYCDEWQGGAVTVDSDTLASDAARLTCRHGLCNQCDNLKTCHTSHGSVMAETAVINHKKRKNSPRIVQSNDLTEAAYSLSRDQKRMLYLFVDQIRKSDGTLQEHDGICEIHVAKYAEIFGLTSAEASKDIRQALKSFAGKEVVFYRPEEDAGDEKGYESFPWFIKRAHSPSRGLYSVHINPYLIPFFIGLQNRFTQFRLSETKEITNPYAMRLYESLCQYRKPDGSGIVSLKIDWIIERYQLPQSYQRMPDFRRRFLQVCVNEINSRTPMRGGSHTPTGFSTQGIINYFSFFAVAAARGGEAQNARKTQSLRGNNNRAYERQKSEKPRTKIVGILYSRLDSASRPFSSVCLFSVLTTKCPDPRRTPCAWHTGHQLGPATTHTAGKGAPTRPPLVQTARNKPNGQPRSTPHPHRVQKGGAHTNRTRPRKRGPTRRTPRRNRDATRATTQPTPPPGAAARSRTPPHTPPRQRNRRNAGATDATTSDGSPGEPGRARAHTNAPPRAATPRPGPKRPRERRKRKETRNVA

SEQ ID NO: 35606 - protein, 550 aa, Homo sapiens
  DOMAIN (172)..(217): kw TRANSCRIPTASE REVERSE II ORF2 domain identified by eMATRIX, accession number DM01354N, p-value=8.740e-40, raw score of 13.17
  DOMAIN (67)..(154): ParB-like nuclease domain identified by PFam, accession name ParBc, E-value=1.7e-10, PFam score of 48.3
MKRAPVIPKHTLNTQPVEDTSLSTPAAPMVDSLIARVGVMARGNAITLPVCGRDVKFTLEVLRGDSVEKTSRVWSGNERDQELLTEDALDDLIPSFLLTGQQTPAFGRRVSGVIEIADGSRRRKAAALTESDYRVLVGELDDEQMAALSRLGNDYRPTSAYERGIQTTIREYYKHLYANKLENLEEKDKFLDTYTIPILNQEEVESLNRPIIGSEIEAIITNQKKSRTGRIHSRIQTEKPGLTVQEMENSPKGILEIIWGYPSHHKCIIQGRGGQNGGTTAQYNLTLLALLPKFCCHTPWLPKCDSAKPDSATQLVLLSQGSVRAEPPVINHKKRKNSPRIVQSNALTEAANSLSRDQKRMLYLFVDQIRKSDGTLQEHDGICEIHVAKYAEIFGLTSAEASKDIRQALKSFAGKEVVFYRPEEDAGDEKGYESFPWFIKRAHSPSRGLYSVHINPYLIPFFIGLQNRFTQFRLSETKEITNPYAMRLYESLCQYRKPDGSGIVSLKIDWIIERYQLPQSYQRMPDFRRRFLQSHGSVMAETDGYQSQET

SEQ ID NO: 35607 - protein, 265 aa, Homo sapiens
  DOMAIN (158)..(187): kw REPLICATION REPB REPA INITIATION domain identified by eMATRIX, accession number DM00653A, p-value=7.207e-27, raw score of 20.40
  DOMAIN (142)..(247): Initiator RepB protein domain identified by PFam, accession name RepB_protein, E-value=7.4e-06, PFam score of 23.2
CDNLKTCHTSHGSVMAETAVINHKKRKNSPRIVQSNDLTEAAYSLSRDQKRMLYLFVDQIRKSDGTLQEHDGICEIHVAKYAEIFGLTSAEASKDIRQALKSFAGKEVVFYRPEEDAGDEKGYESFPWFIKRAHSPSRGLYSVHINPYLIPFFIGLQNRFTQFRLSETKEITNPYAMRLYESLCQYRKPDGSGIVSLKIDWIIERYQLPQSYQRMPDFRRRFLQVCVNEINSRTPMRLSYIEKKKGRQTTHIKTLSCLSCWGKGR

SEQ ID NO: 35608 - protein, 77 aa, Homo sapiens
  DOMAIN (11)..(43): ABC transporters family proteins domain identified by eMATRIX, accession number BL00211B, p-value=4.429e-20, raw score of 13.37
  misc_feature (1)...(77): Xaa = X or * as defined in Table 2
NHLAVRRLTELSGGQRQRAFLAMVLAQNTPVVLLDEPTTYLDINHQVDLMRLMGELRTQGKTVVDXVRDLNQVSRYC

SEQ ID NO: 35609 - protein, 101 aa, Homo sapiens
  DOMAIN (22)..(98): RecF protein domain identified by PFam, accession name RecF, E-value=1.3e-38, PFam score of 141.7
  misc_feature (1)...(101): Xaa = X or * as defined in Table 2
CLRILCPYPYIPLTEKTLAXPALYTLELTADMAETCKQFLPEFSLTFSFQRGWEKETEYAEVLERNFERDRQLTYTAHGPHKADLRIQESGVPYNEILVTL

SEQ ID NO: 35610 - protein, 91 aa, Homo sapiens
  misc_feature (1)...(91): Xaa = X or * as defined in Table 2
TNSSVGPGDRLLXQTAAPHRGKLKVFFGACAGVGKTWAMLAEAQRLRAQGLDIVVGVVETHGRKDTAAMLEGLAVLPLKRQAYRGRHISEF

SEQ ID NO: 35611 - protein, 378 aa, Homo sapiens
  DOMAIN (230)..(260): RNA polymerases beta chain proteins domain identified by eMATRIX, accession number BL01166D, p-value=4.214e-34, raw score of 17.37
  DOMAIN (64)..(302): RNA polymerase beta subunit domain identified by PFam, accession name RNA_pol_B, E-value=1.3e-132, PFam score of 453.9
HILPAGHPTLRHSLFPHQQGRSSVQSALGAASGNGLKLVGRFEWGPSRRARSGYPDATGYDQPKPISAAVKEFFGSSQLSQFMDQNNPLSEITHKRRISALGPGGLTRERAGFEVRDVHPTHYGRVCPIETPEGPNIGLINSLSVYAQTNEYGFLETPYRKVTDGVVTDEIHYLSAIEEGNYVIAQANSNLDEEGHFVEDLVTCRSKGESSLFSRDQVDYMDVSTQQVVSVGASLIPFLEHDDANRALMGANMQRQAVPTLRADKPLVGTGMERAVAVDSGVSGGVVQYVDASRIGIKVTKTRCIRVKQVSTSTTLPLFLMESNPLFWMAVLVSAGILGQWPIGRLADKFGRLLVLRVQVFVVILGSIAMGSLGFLFG

SEQ ID NO: 35612 - protein, 253 aa, Homo sapiens
MPSFAWLQVLRHKCPGYLFDFLTEYLFKAHSFLSRTHHTIKATFLRQCRQTFCIICQCLTRWGHHTRPTRGMNILHPHALFSCSSDSVRCSVGDIVAFQLSGRVASLHVPAVVSSARLAMELQAEPIIRSNFDVLTRCTKAFFVVGNALDENPLIRVGVLNKKEMQTYRDLGAVGVICGRFYDKEGMPVVADVDQRILGISLAQLRQIERKIFLAGGERGYDATLGALLGGYVTDLIVDEGTAEFLLACELPH

SEQ ID NO: 35613 - protein, 193 aa, Homo sapiens
  DOMAIN (25)..(41): Orotidine 5'-phosphate decarboxylase proteins domain identified by eMATRIX, accession number BL00156, p-value=4.750e-16, raw score of 10.51
  DOMAIN (1)..(187): Orotidine 5'-phosphate decarboxylases domain identified by PFam, accession name OMPdecase, E-value=4.9e-54, PFam score of 189.8
  misc_feature (1)...(193): Xaa = X or * as defined in Table 2
DPRDXRLKVAKXMVTLFGPQFVRELQQRGFDIFLDLKFHDIPNTAAHAVAAAADLGVWMVNVHASGGARMMTAAREALVPFRPDAPLLIAVPVXRSIKASDLVDLGMTLSPADYAERLAALTQKCGLDGVVCSAQEAVRFKQVFGQEFKLVTPGIRPQGSEAGDQRRIMTPEQALSAGVEYMENGRPGTQSVK

SEQ ID NO: 35614 - protein, 165 aa, Homo sapiens
  DOMAIN (124)..(136): Pentapeptide repeat proteins (8 copies) domain identified by eMATRIX, accession number PF00805D, p-value=3.520e-09, raw score of 7.78
  DOMAIN (34)..(153): Pentapeptide repeats (8 copies) domain identified by PFam, accession name Pentapeptide, E-value=2e-20, PFam score of 81.3
  misc_feature (1)...(165): Xaa = X or * as defined in Table 2
GIVRIPHRLADIKCWRAVLYNYTHYSYQANLCCANLEXADLSGSVLDCANLQGVKMLCSNAEGASLKLCNFEDPSGLKANLEGANLKGVDMEGSQMTGINLRVATLKNAKLKNCNLRGATLAGTDLENCDLSGCDLQEANLRGSNVKGAIFEEMLTPLHMSQSVR

SEQ ID NO: 35615 - protein, 166 aa, Homo sapiens
  misc_feature (1)...(166): Xaa = X or * as defined in Table 2
YRLSQSSSKSLVSRSWLNMRFISSVMFMEPTSSSENRFTSPSCSEMSSSEATLRSFFLGTTSPCRSMVGLQLVKSSQSSSVSSFSSHVRLSQSSSKSKVSRLAGTXEGSEKRSFREEKVPCLRLGLPESTLYAHCSVXSRTHVFSGTSHHSSKVAVGMSIVQMRKL

SEQ ID NO: 35616 - protein, 146 aa, Homo sapiens
  misc_feature (1)...(146): Xaa = X or * as defined in Table 2
HVIWHMPRKTSKCRQLLCSGASRNADTAARQSTCSSHRPPGKIPSLGPRRVPGCSSVPSSRGEQSTGSPAAPRCGDVTHTEASQEEQPXLRGTHGPASTPEQGTAKAKVRDRRAVVHPGKTGIPSAAGXKGRGRPGEPPGAAVQVE

SEQ ID NO: 35617 - protein, 345 aa, Homo sapiens
  misc_feature (1)...(345): Xaa = X or * as defined in Table 2
YVDQVTHITESPLPSVSYSFAFGSLISAVDPVATIAIFNALHVEEDTEKGHVRLTPASPSTFFFFFSTEEKYAPGSCCRKAAVLXLLHISHQLSLDSPSLTVVIYVLKHIDLRKTPSCRHCEIXVGDHTAVLSVLFSPSLGIMAILFSGIVMSHYTPREASPXSCCLFTVSSHTVCCHPGLRGAIPYALSLHLDLEPMEKRQLIGTTTIVIVLFTILLLGGSTMPLIRLMGLPGGAPRWCQLVAVGPPFLPAQGNTVESEHLSELTEEEYEAHYIRRQDQLSLFNXNXSCLWPSPCLPPPPXTPHTKHPVASPPFHGPAPDALTAWLCLSTQDLHHGRIQMKTLT

SEQ ID NO: 35618 - protein, 64 aa, Homo sapiens
  misc_feature (1)...(64): Xaa = X or * as defined in Table 2
VCGRQQSLEAGLXGAATPFAVFPRPWSAVRVKEYGYTRLHILNGTHIHIQQVSDDQAFAQCHPP

SEQ ID NO: 35619 - protein, 57 aa, Homo sapiens
HLERTGPNLPPGARLATRPTTRLPAASPRGRDTPLPIPISFYSETEAKGEAPYIEPE

SEQ ID NO: 35620 - protein, 155 aa, Homo sapiens
  DOMAIN (99)..(120): BETA-3 ADRENERGIC RECEPTOR SIGNATURE domain identified by eMATRIX, accession number PR00563F, p-value=3.364e-09, raw score of 7.47
  misc_feature (1)...(155): Xaa = X or * as defined in Table 2
RPPEKKERGRRVRGRRGGGGKRRRRKRKKRKGSKGREDAAAAAAAAQSPRTRAPAPDXERRPQPAPSARAPPRPLLPAPRRSRPAQVPPDSASPWAAAAGLALPPPQCPGGGARPLRLLPQPPAPGGTARWEPRRPRPAAAPGLLQSPGPLPRQS

SEQ ID NO: 35621 - protein, 100 aa, Homo sapiens
  misc_feature (1)...(100): Xaa = X or * as defined in Table 2
LALPHLPSNLLLKGWLKLKAXSRPSRTPSFGXLSQWKHALKRLKPVITCLLQHGFLKPINSPYNSLILPVLKPDKPYKLVQDLRLINQIVLPIHPMVSQA

SEQ ID NO: 35622 - protein, 317 aa, Homo sapiens
  DOMAIN (104)..(115): RNase H domain identified by eMATRIX, accession number PF00075B, p-value=1.346e-09, raw score of 12.56
  DOMAIN (37)..(208): Reverse transcriptase domain identified by PFam, accession name rvt, E-value=1.5e-06, PFam score of 23.4
MHLTIPLKPNHPYPTQCQYPIPRHALKRLKPVITRLLQHGLLRPINSPYNSPILPVQKPDKAYRLVQNLPLINQIVLPIHPVVPNPYTLLSSIPPSTTHFSVLDLKHAFFTIPLYPLSQPLFAFTWTDPDTHQAQQITWAVLPQAFTDSPHFKSPKQLLRLLVFSGNFISLIVFNLQERQNGLVVFERHTSPSSASNLKRTGQYFYLLPFSELRACPRDATGYSPFELVYGCAFLLSPNLVPDTSPLDRSSKTSPDISHQQAAALLHTYIKNLSPYINSTPPIFGPLTTQTTIPVATPLCISQQRPTGIPLGNLSPS

SEQ ID NO: 35623 - protein, 359 aa, Homo sapiens
  DOMAIN (315)..(327): RNase H domain identified by eMATRIX, accession number PF00075C, p-value=7.848e-10, raw score of 11.58
  DOMAIN (213)..(346): Reverse transcriptase domain identified by PFam, accession name rvt, E-value=5.5e-06, PFam score of 15.3
MEVYTQKAYWRVPLGSTVGDQGGHGRFIHPFAIKIEQGSTNRCPSGSPATKYVLLCLHGEKVDLLPADQQSIFSPGRSTQGHLISITGVLMNRHSTYMDKEKVKMVTALWTDEELSKLTWTRMKFDAMTQLGDLPWEINPLSSCSLLREKDPPTTSGPQTDQPKEHLTNFKSTTNHAPLTIPLKPNHSYPAECQYPVPQHALKGLKSIITRLLQHGLLKPINCPYNSPILPVLKPDKAYRLLQDLRLINQIVLSIHPVLPKPNTLLSSIPPSTTHYSVLDLKHAFFTIPLHLSSQPLFAFTWTDPDTHQAQQITWAVLPQGFTDSPHYFNQAQISSSSVTYLGIILMKTHVLSLLIVSG

SEQ ID NO: 35624 - protein, 445 aa, Homo sapiens
  DOMAIN (401)..(413): RNase H domain identified by eMATRIX, accession number PF00075C, p-value=7.848e-10, raw score of 11.58
  DOMAIN (299)..(432): Reverse transcriptase domain identified by PFam, accession name rvt, E-value=0.00019, PFam score of -6.5
  misc_feature (1)...(445): Xaa = X or * as defined in Table 2
XFDETGNYHSNGGSTGCLRRLNVEINCHTHKRKNILKVKCEIDSTPQEREGSELAARKDETALAVTGKTPVMEVLHDYSYGDWEEALLSGVHKRGRRRESRKQNRIINLETGAWQPSRTTRENVRRSGGTKEEQARHLPVRRFPGANPAFVTPDQLKVEQRQATSLASRHHYSKFVGHVNLSGRAIIVTLSYQSPDVMAVSATTTVWKTQSYRILVREILLLFVRDPRFHFSGVSFCGKASTNVTEGQKQLKTDTAQSPWKPPRPSRMPELRVTLTVEGQYPIPQLALKRLKPVITRLLQHGLLEPISSPYNSPILPVLKPDKPYKLVQDLRLVNQIVLPIHPMVPNPYTLLSSIPPSTTHYSVLDLKHSFVTIPLHPSSQPLFTFTWTDPDTHQAQQITWAVLPQGFTDSPHYFSQAQISSSSVTYLGIILIKTHVLSLLIVFD

SEQ ID NO: 35625 - protein, 68 aa, Homo sapiens
LSQWKHALKRLKPVITCLLQHGFLKPINSPYNSLILPVLKPDKPYKLVQDLRLINQIVLPIHPMVSQA

SEQ ID NO: 35626 - protein, 52 aa, Homo sapiens
  misc_feature (1)...(52): Xaa = X or * as defined in Table 2
MESPPAEEHADGDRQAINQWHNVKFGQNSQRRARQPAQLQRKTISLLVPPSX

SEQ ID NO: 35627 - protein, 79 aa, Homo sapiens
  DOMAIN (46)..(67): UBIQUITIN SIGNATURE domain identified by eMATRIX, accession number PR00348A, p-value=5.500e-22, raw score of 7.86
  DOMAIN (36)..(70): Ubiquitin family domain identified by PFam, accession name ubiquitin, E-value=2.6e-17, PFam score of 58.0
  misc_feature (1)...(79): Xaa = X or * as defined in Table 2
MTSNKSIAPDSRNHRKKRHTKQAFRYTICSGTTIKMQIFTKTLTEKTITLEVETSDTIENVKAKIQDKEGNLPAHLHPX

SEQ ID NO: 35628 - protein, 714 aa, Homo sapiens
  DOMAIN (553)..(598): kw TRANSCRIPTASE REVERSE II ORF2 domain identified by eMATRIX, accession number DM01354N, p-value=1.720e-40, raw score of 13.17
  DOMAIN (427)..(461): Integrase core domain identified by PFam, accession name rve, E-value=6e-07, PFam score of 28.0
DAKGRLEESRAGELAAYVQENLEAAQLAGELARQEMHGELVLLREKSRALEASVAQLAGQLKELSGHLPALSSRLDLQEQMLGLRLSEGRGLTGRSQASRPTQRLSPGPGRPRAPETPVWGRTAAEQPRPSICSPEAENREPSGDRWARELRLLGSWKVTVRPETGQRGRAVLRRRESWRPRQPLFSPRLLQPPDPRPVHAGLLLPGLLDLRAHGVCRGLHPVPAHRGCLGPALWDLPVLPHGGGGEWGRRGGCGALQLSQVLRHRGPEQKSQGRTKVSHLTWFTGRGRCPRVVHGPWALSCCGGSVYCGSAAHVWSLDQAKGSEYPVMRGAHTADRSLLGSDAAEDNQESGSWHALKRLKPVITRLLQHGLLKPINSPYNSPISPVLEPEKPYRLVQDLSLINQIVLPIHPMELFRPPPFPTHQARGFAPAQDWQIDFTHMPRVRKLKYLLVWVDAFTGWGMQAETSPLLTRSPDDMVTTKPPLVIARQRGSGVDFQRTPEDLQQKGLTVRRKTNKHKGIASTSTKGGPHENPIRRSPTSKTKEIQTSIREYYKHLYTNKLENLEEMDKFLDTYSLPRLNQEEVESLNRSITSSESEAAINRLPTKKSPGPDGFAAKFYQRYKEELWHKSKKKWTISNIGEEEMEQPERCHTLDWNIQQYDHNRKSFDSSLKSENTLTIGPSLSLLCHSYLPKKNKSIRPYKESVTMCGRDYL

SEQ ID NO: 35629 - protein, 285 aa, Homo sapiens
  DOMAIN (277)..(284): RNase H domain identified by eMATRIX, accession number PF00075I, p-value=5.263e-10, raw score of 16.21
MHEIWCRDSDRGTSLGRSIPCPPALCSMKKIHLQPRVLRPTSPRNISPILNRQLKTDAAQSPRKPTGSSQTLWVTLTVEACFKRIKVCYHSPVIAWPFKAYKLSLQFPHCTCPKTRQDLQEGGVIHCKDHQKVSDPIAVGKAYADKVARQAASFPTSVPHGQFFSFISVTPIYSPAETSTYQSLPTQGKCFLDQGKYLLPASQAHSILSSFHNLVHVGYKPLAHLLETLISFPSWKSILKEITSQCSICYSTTARGLFRLPSFLTHQARGFAPAQDWQIDFTHMP

SEQ ID NO: 35630 - protein, 70 aa, Homo sapiens
NATALITIVKPVITLLLQHGLLKPINSPYHSPILPVLKPDKPYKLVQNLRLINQIVSPVHPVYLFRYLTQ

SEQ ID NO: 35631 - protein, 311 aa, Homo sapiens
  DOMAIN (232)..(243): RNase H domain identified by eMATRIX, accession number PF00075B, p-value=1.346e-09, raw score of 12.56
  DOMAIN (165)..(298): Reverse transcriptase domain identified by PFam, accession name rvt, E-value=9.3e-05, PFam score of -2.0
MCHFLEKAFPGDSTEYCHYVLLLVYGKHKNRQSLSQSLTKNTTDWIICKEESFISYSSGSWGVEGHMVLVSGEGLWAASSRCGKVEGQVVPRQAELGPNSSSASAPPPYNLFIASPPHTWSGLQFRSVTSPPPPAQQFTLKKVAGAKGIVKHALKRLKPVITRLLQHGLLKPINSPYNSPILPVLKPGKPYKLVQDLRLINQIVLPIHPVVPNPYTLLSSIPASTTHYSVLDLKHAFFTIPLHPSSQPFFAFTWTDPDTHQAQQITWAVLPQVFTDSPHYFSQAQISSSSVTYLSVILIKTHVLSLLIMFS

SEQ ID NO: 35632 - protein, 318 aa, Homo sapiens
  DOMAIN (284)..(295): RNase H domain identified by eMATRIX, accession number PF00075B, p-value=1.346e-09, raw score of 12.56
MAKAVLSKKNKTGSTTLPDFKIYYKDIVTEEPGIETLRHTSSTKFSKGLPSRESFSEKQNKTTTHLHPGEINSFIAHTKPAWRSLHTDAHEIWCRDSDQVNSPGRSIPCPPALCSMRKIHLRPLVLRPASPRNISPILNPLHLIAALLPNPKPPFRPPLVSPDLNPQVKDISTPSWATDHVHLTVSLKPYHPYPAQCQYPIPQHALKGLKPVITRLLQHGLLKPINSPYNSHILPVLKPDKPYKLVQDLCLINPIVLPIHPMVPNPYTLLSSIPPSTIHYSVLDLKHAFFTIPLHPSSQPLFAFTWTDPDIHQAQQIT

SEQ ID NO: 35633 - protein, 532 aa, Homo sapiens
  DOMAIN (385)..(523): Reverse transcriptase domain identified by PFam, accession name rvt, E-value=0.00036, PFam score of -10.3
MEAEKFHQMPSVSRRTRKASGVIQSKSENLRTRGANSHALKRLKPVITRLLQHGLLKPINSPYNSPILPVLKPDKPYKRFLAFYGWSPRSLIVDSCSKLEQHSTLSRVILVIYKGFCRFRNHHQTGFSPAGANQRGPLAATLSGPGGEGQSAVACLTGEKKNHPGAQYANRLSPRVGRFINAAGTTGFPTGKRAVSATQLMDFADFGTTITQDFRLLGQTSVDRLLQLSQGQAVKGNQLLPVSLVKRKTTLAPNTQTASPRALADSLMQLARQVSRLESGQSSQLSSLRLTLPDRLRSPLDHHGRRASGNSHSGSPKPPSCLPLISPHLNPQVWDISTPSLATDHMPITIPLKSNTLTPLNLKCQYPIPQHALKRLKPVITRVLQHGVLKPTNSPYNSPILPVLKPDKPYKLVQDLRLINHIVLLPIHPMVPNPYTLLSSIPPSTIHYSVLDLKHAFFTIPFHPSSQPLLAFTWTDPDIHQAQQITWAVLPQRFPRTGPHYFNQAQISSSSVTYLGIILIKTYVLSLPIVSD

SEQ ID NO: 35634 - protein, 292 aa, Homo sapiens
  DOMAIN (241)..(281): kw TRANSCRIPTASE REVERSE II ORF2 domain identified by eMATRIX, accession number DM01354Y, p-value=9.571e-24, raw score of 10.69
  misc_feature (1)...(292): Xaa = X or * as defined in Table 2
MEDRVGPSEERSQQKLSITPARLAGGDSLNPAGRTGDLLVETSPLLAAVFPAHDNSLCNKPYWLVQDLRLINQIVLPIHPMMLLGEISVTKALAGSLIKALAVFHTAESPGYALLDSYYLLQKGSVCISILQEEEAFSWPGKGECRDKSWASLGLIPAFPQGGQWKQALGLLDHSCLCFGELGTRLAAPASFSTFPITNRERERKTDKLIPKFMWKCKGPRITKTILEKNEVGEFTLLDFKTYHKFAVIKTMWYWHKDRYIDQQNDIESPEINSYVYGQLIFDKDSARLHPX

SEQ ID NO: 35635 - protein, 132 aa, Homo sapiens
APRQVSAVTGRQLRKRKPNLLSAVFCTDRATRGQLRSTLLRHTRTRCSFWSRQSSRPSPASAGGDGRVGSPGMAGRCCGAGISGFSGRAGPSRAWKSFPELTGGSRPRVPGLRRLTRGSRTRPLRRGRGGRG

SEQ ID NO: 35636 - protein, 284 aa, Homo sapiens
  misc_feature (1)...(284): Xaa = X or * as defined in Table 2
PHPAVASRRGRAGPGGLSAPERTPSSELSPLSKGDLRKTHRTFSPQXGDLRKTHRTFSTRXGDLRKTHRTFCTRXGDLRKTHRTFSTRXGDLRKTHRTFSTRXGDLRKTHRTFSTRXGDLRKTHRTFSTRXGDLRKTHRTFCTRXGDLQKTHRTFSTRXGDLRKTHRTFSTRXGDLRKTHRTFSTRXGDLRKTHRTFCTRXGDLRKTHRTFSTRXGDLRKTHRTFCTRXGDLRKTHRNFSTRXGDLRKTHRTFSTRXGDLRKTHRTFCTRXGDLQKTHRTFSTR

SEQ ID NO: 35637 - protein, 156 aa, Homo sapiens
  misc_feature (1)...(156): Xaa = X or * as defined in Table 2
SHWPWLCSSTSCSSQRSIVSSGMARGPFLRKRDLLFPPPPPGSHGLELLEIIFHQGISQVHHLLHLQVWLXNLNVPDSSLPAENEATGPGFVPPPLAPVRGPLFPVDARGPFLRKRDLLFPPPPPGAMFGASRDYFPPGDFPGPPPAPFASMAFLN

SEQ ID NO: 35638 - protein, 776 aa, Homo sapiens
  DOMAIN (358)..(412): Kinesin light chain repeat proteins domain identified by eMATRIX, accession number BL01160B, p-value=9.847e-09, raw score of 19.54
TGRGYCGDHESSFGAMEEPGATPQPYLGLLLEELRRVVAALPEGMRPDSNLYGFPWELVICAAVVGFFAVLFFLWRSFRSVRSRLYVGREKKLALMLSGLIEEKSKLLEKFSLVQKEYEGYEVESSLKDASFEKEATEAQSLEATCEKLNRSNSELEDEILCLEKELKEEKSKHSEQDELMADISKRIQSLEDESKSLKSQVAEAKMTFQIFQMNEERLKIAIKDALNENSQLQESQKQLLQEAEVWKEQVSELNKQKVTFEDSKVHAEQVLNDKESHIKTLTERLLKMKDWAAMLGEDITDDDNLELEMNSESENGAYLDNPPKGALKKLIHAAKLNASLKTLEGERNQIYIQLSEVDKTKEELTEHIKNLQTQQASLQSENTHFENENQKLQQKLKVMTELYQENEMKLHRKLTVEENYRLEKEEKLSKVDEKISHATEELETYRKRAKDLEEELERTIHSYQGQIISHEKKAHDNWLAARNAERNLNDLRKENAHNRQKLTETELKFELLEKDPYALDVPNTAFGRGSRGPGNPLDHQITNERGESSCDRLTDPHRAPSDTGSLSPPWDQDRRMMFPPPGQSYPDSALPPQRQDRFCSNSGRLSGPAELRSFNMPSLDKMDGSMPSEMESSRNDTKDDLGNLNVPDSSFPAKKEATGPGFVPPPLAPVRGPLFPVDARGPFLRRGPPFPPPPPGAMFGASRDYFPPRDFPGPPPAPFAMRNVYPPRGFPPYLPPRPGFFPPPPHSEGRSEFPSGLIPPSNEPATEHPEPQQET

SEQ ID NO: 35639 - protein, 881 aa, Homo sapiens
  misc_feature (1)...(881): Xaa = X or * as defined in Table 2
GLRVPLSPSSPRSRLRSGPLRLPGADSGSGPKAVCSPPFIVAPTGRGYCGDHESSFGAMEEPGATPQPYLGLLLEELRRVVAALPEGMRPDSNLYGFPWELVICAAVVGFFAVLFFLWRSFRSVRSRLYVGREKKLALMLSGLIEEKSKLLEKFSLVQKEYEGYEVESSLKDASFEKEATEAQSLEATCEKLNRSNSELEDEILCLEKELKEEKSKHSEQDELMADISKRIQSLEDESKSLKSQVAEAKMTFQIFPMNEERLKIAIKDALNENSQLQESQKQLLQEAEVWKEQVSELNKQKVTFEDSKVHAEQVLNDKESHIKTLTERLLKMKDWAAMLGEDITDDDNLELEMNSESENGAYLDNPPKGALKKLIHAAKLNASLKTLEGERNQIYIQLSEVDKTKEELTEHIKNLQTEQASLQSENTHFENENQKLQQKLKVMTELYQENEMKLHRKLTVEENYRLEKEEKLSKVDEKISHATEELETYRKRAKDLEEELERTIHSYQGQIISHEKKAHDNWLAARNAERNLNDLRKENAHNRQKLTETELKFELLEKDPYALDVPNTAFGREHSPYGPSPLGWPSSETRAFLSPPTLLEGPLTLSPLLPGGGGRGSRGPGNPLDHQITNERGESSCDRLTDPHRALSDTGFLSPPWDQDRRMMFPPPGQSYPDSALPPQRQDRFCSNSGRLSGPAELRSFNMPSLDKMDGSMPSEMESSRNDTKDDLGNLNVPDSSLPAENEATGPGFVPPPLAPVRGPLFPVDARGPFLRRGPPFPPPPPGAMFGASRDYFSTRGISQGPPPAPFAMRKCLIPPRGFSPSLTFPPRAGGFFPPPPHFXRXEVNFPXVLIPTSNEPATEHPEPQQENLTIFLALFKSNFD

SEQ ID NO: 35640 - protein, 76 aa, Homo sapiens
  misc_feature (1)...(76): Xaa = X or * as defined in Table 2
FQRMSGLXGYSPPLGGQPALXECQGAADSAGGRGLDSERSLGRPAASGPNTALGWQAQPWSXQAGPELPRAEFLQA

SEQ ID NO: 35641 - protein, 94 aa, Homo sapiens
  misc_feature (1)...(94): Xaa = X or * as defined in Table 2
TLRNRHRELRTCLSGPGLGLPTQVSVVAGGCCVCPSSSQSPVPRPPALSAAPWHSHRAGCPPSGGLXPQRPLILWNQPLSNTLLEKELAPPPAH

SEQ ID NO: 35642 - protein, 155 aa, Homo sapiens
  misc_feature (1)...(155): Xaa = X or * as defined in Table 2
ALARSPAGXPQSPDGDLCFRHRKGERRPAAPAGQCPAGRQRHVPAAGRDGKPGRAPGADRXAGPILHLYHLPAPCGGGTPGDSNPRRAPAQRSEXCTPPPPQXRNNRKPSTRAGLLLPSXHVQLSGGLTLCPGDRVSXWPQGVLAAPGPGPCTHL

SEQ ID NO: 35643 - protein, 75 aa, Homo sapiens
DVNDMYLLLEETEKQAVRRALIEERGRFCTFITFLQPVVNGELTMLGEITHLQGIIDDLVVLTAEPHKLPPASEQ

SEQ ID NO: 35644 - protein, 64 aa, Homo sapiens
  misc_feature (1)...(64): Xaa = X or * as defined in Table 2
NGRTSRCFSPGKHXEYCSGTFHPLQVVGKIYSNLDKILXASRARWGLCSRKPGYWSCTQPPTSS

SEQ ID NO: 35645 - protein, 112 aa, Homo sapiens
LAPITASPPVTGSTSTPVTTSTGHPSAIEGLETPFRSPLTPGPPGKSSSLITHSRPIVTAQTALPSLKILFVCGVGKYANGAVKSCHFTSNKYMGKMLMVDFALKTLSHPEK

SEQ ID NO: 35646 - protein, 318 aa, Homo sapiens
  misc_feature (1)...(318): Xaa = X or * as defined in Table 2
LGVEVEPVTGGDAVIGASHDAFLQVNIESIVPEHSTRCKLLGKFIRIWIKYFRHLVHGGGSAPVSLVTGPVHGDSLLGPVAPEPPRVVEPARQVRAHAVVVAGPLRRGRGLGRHRLRARSGXGMPQSVRGACGAQGHGPAGEDQRLLPRERGPAGQVQQPGVVPGLQDPEGCLRVQDQXPGLREQSPHRARDAXSILSKFEXIFPTTCSGWNVPEQYSQCLPGEKHRDWPRXLHHLLXPAQLPPPVTTSTGHPSAIEGLETPLRSPLTPGPPGKSIIPHHPQSPDCDGTDCAAFPENIIRLRSRKICKRGREVLPFHI

SEQ ID NO: 35647 - protein, 237 aa, Homo sapiens
  DOMAIN (99)..(106): RNase H domain identified by eMATRIX, accession number PF00075I, p-value=3.700e-09, raw score of 16.21
  DOMAIN (92)..(232): Integrase core domain identified by PFam, accession name rve, E-value=4.2e-14, PFam score of 52.8
  misc_feature (1)...(237): Xaa = X or * as defined in Table 2
HSLHFPKFPSFLFLTLITLGLLMAVPPGLITTHQQRQAMLXYKPLARLLEPLISFPSWKSILKEITSQCSICYSTTPQRLFRPPPFPTHQTRGFAPPRHWQIDITHMPQVRKLKYLLVLVDTGSKKATVVISSLLSDIIPRFGLPTSIQSDNGPAFISQITQAISLALGIQRTHGLLKTHLTNLSHQLKKDWTILLPLSLLRIQACPRNATGLHSDGVGPKLLPGSPFQLHHTWDSP

SEQ ID NO: 35648 - protein, 586 aa, Homo sapiens
  DOMAIN (306)..(314): RNase H domain identified by eMATRIX, accession number PF00075E, p-value=7.545e-10, raw score of 8.53
  DOMAIN (302)..(449): RNase H domain identified by PFam, accession name rnaseH, E- value=2.8e-28, PFam score of 107.4
MQVATRPGKGEINRWGSLPGRSLSMEDSPDCALGTVQSRIVSECSQQRALSLRTARGQRRRREKQQMNSQVGKEGALTSSPLALKINPLQFPSKRHPLLTIRIGWGPRFHSQESPLGQVQNSELQPDEQYFPTTHREVNPREKNLGQMKRSRLADLIKHSASLYTQLPNTPSALCCPQLRFPEEQMLLIRTEVSLFPLEVAMSQDKCTCFPDSLQEGMAKATQSEVVGWRFWENSLKGADTTLLQLYSLFVESPTITIVPGPDFNPASHIIPDTTPDPHDCISLIHLTFTPFPHISFFPVSHPDHTWFTDGSSTRPNCHSPAKAGYAIVSSTSVIDATALPPSTTSQQAEPAALTQALTLAKRLGINIYTDSKYAFHILHYHAVILAERIFLTTQGSSIINASLIKTLLEAALLPKEAGVIHCKRHQKASDPIALGNACADKVARQAASFPTSVSHSNSDADKVARQAASSPTSVPDGQFFSFTSATPTYSPAETSTYQSLLTQGKWFLDLGKYLLPASQAPSILSSFHNLFHVGYKPLACLLEPLISFPSWKSILKEITSQFPICYSTTPHGLFRPPPFPTHQAQ

SEQ ID NO: 35649 - protein, 655 aa, Homo sapiens
  DOMAIN (464)..(482): RNase H domain identified by eMATRIX, accession number PF00075J, p-value=1.225e-16, raw score of 15.78
  DOMAIN (212)..(359): RNase H domain identified by PFam, accession name rnaseH, E- value=1.3e-36, PFam score of 135.0
MVGYFRLWIPGFAILTKPLYKLTKGNLADPIDPKSFPHSSFCSLKTALETAPTLALPDSSQPASLHTAEVQGCAVGILTQGPGSRPVAFLSKQLDLTVLGWPSCLRAAAAAALILLEALKITNYAQLTLYSSHNFQNLFSSSHLTHILSAPGLLQLYLHFVESPTITIVPGPDFNPASHIIPDTTPDPHDCISLIHLTFTPFPHISFFPVSHPDHTWFIDGSSTRPNRHSPAKAGYAIVSSTSIIEATALPPSTTSQQAELVALTQALTLAKGLCVNIYTDSKYAFHILHHHAVIWAERGFLTTQGSSIINASLIKTLLKAALLPKEAGVIHCKGHQKASDPIALGNAYVDKVARQAASSPTSVPHGQFFSFTSVTPTYSPTETSTYQSLPTQGKWFLDQGKYLLPASQAHSILSSFHNLFYVDIIPRFGLPTSIQSDNGPAFTSQITQVVSQALGIQWNLHTPYRPQSSGKVERTNGLLKAHLTKFSLQLTKDWTALLPLALLKIRACPRDATGYSPFELLYGRTFLLGPNLIPDTSPLGDYLPVLQQARQEIRQAANLLLPTPDPQPYEDNLAGRSVLVKNLTPQTLQPRWTGPYLVIYSTPTAVCLQNPPHWVHHSRIKLCPSDSQPNPSSSSWKSQVLSPTSLKLTHISEE

SEQ ID NO: 35650 - protein, 611 aa, Homo sapiens
TTMLLTQGLFGGLFTRTCMKFGAVTRIGGTSLGRSIPCPPALCSMRKIHLRPQVLRPTSPRNISPISNPVSGLFLLSSPTSLTIPQPLSPFNLGATLQSLPSLNFNSFHFLVETKETCFIRVPKTPAPVTDWEGSLPLVFNHCRDTSVIIHPRFKGVRPRRDACLGPSPLAASPAFLGKGQAELGPNSSSASAPPPYNLFIASPPHTWSGLQFRSVTSPPPPAQQFTLKKVAGAKGIVKRLKTDTARSPWKTPRPSRTPSFRKAERTKGLLKIHLTKLSHQLKKDWTILLPLSLLRIQACPRNATRLATGQLGYPFISQSYVLVNGFQTVEDLCEAADLRVSVADLRVSVTALKVARLELFVPPGGLVVSLASAVKLQTFAVLQLIKAKRWDWGTLEQGAALIGEARDAQEPTEGVGGSGMAGCRSRDLPRGKAAKARREIERSAGLTIKKERCIRNGYSKEKMKLIVVSHGLHVNDLQHKLTLFTKETYTYLARDSEKQKQGYLAGLEGAHANRVNQQISDNLAIVFGQKIQGHLSTTGQLLMAGQEGKLGQLLFLGISGWTIQLNDVYCLQTQSTIVHIRSEAGNSNPREWLPLLQGISSKDETQPFMP

SEQ ID NO: 35651 - protein, 540 aa, Homo sapiens
  DOMAIN (344)..(401): Integrase core domain identified by PFam, accession name rve, E-value=2.4e-05, PFam score of 22.5
  misc_feature (1)...(540): Xaa = X or * as defined in Table 2
QSDLSASQHGLFPLATEVRSSGAASCPDSDSICPAPTIAPGRATPPQANCWASEGTLRYQALPGNRAPVSQVSQAGGANLCVQQPKKHLTNFKSGKRPLFTLFSNLQGPRSRPVAFLSKQLDLTVLGWPSCLRAAAAAALIVLEALKITNYAQLTLYSSHNFQNLFSSSHLTHILFCSPGSFSCTHSLLSLPQLPIVPGPDFSPASHIILDTTPDPHDCISLIHLTFTPFPHISFFPAPHPDHAXFINGSSTRPNRHTPAKAGYAIVQVTSPPLKTSHFLSIVEIYPQGNNFSVFHLLFYYSSGIIQAPLLSLHIKLRDLPPPRTGKSALLNMPRVRKLKYLLVLVDTGSKKATVVISSLLSDIIPRFGLPTSIQSDNGPAFISQITQAISLALGIQRTHGLLKTHLTNLSHQLKKDWTILLPLSLLRIQACPRNATGLHSDGEARSSFQAHHFNFITHGTVPDVFVPILQLLNEDFEDPCLGYLPSPEISICLEPTSWSKDRSCSSGEEGSAGQTVTGDLHKAQTPELDQPASLNCPDL

SEQ ID NO: 35652 - protein, 140 aa, Homo sapiens
  DOMAIN (5)..(49): XPA protein domain identified by eMATRIX, accession number BL00752B, p-value=8.701e-09, raw score of 19.17
  misc_feature (1)...(140): Xaa = X or * as defined in Table 2
RTRGGEKEXEEKQRSRRXRIKXEEEEKXRRSRGAGDKGXNERRRRNRGEPVEKEEDDRRRKRQWRRGEEEKRRRGRNCGGGGGEEKEDGRRRRLPCFLLLPSLLVSLLWLVSFLPCVFGFFGAPAVVFARFRGLRAFCRF

SEQ ID NO: 35653 - protein, 155 aa, Homo sapiens
  DOMAIN (103)..(141): Adrenodoxin family iron-sulfur binding region proteins. domain identified by eMATRIX, accession number BL00814B, p-value= 5.041e-19, raw score of 23.55
SEDKITVHFINRDGETLTTKGKVGDSLLDVVVENNLDIDGFVMSTTRLLEPETVEHHSFLFLPNLTSSPSAPPASCAPKIRLQHVLLAPSLQSARGAGQPLGAWSCANLLLLWSLTARSRLGCQICLTKSMDNMTVRVPETVADARQSIDVGKTS

SEQ ID NO: 35654 - protein, 169 aa, Homo sapiens
GLEGSGPLRTAPLGGAPIGTLCGGSNPTFPFCTKPSISRLFSTTTSSRESPTFPLVVNVSPSRFIKWTVILSSEQVRHVRQSVPKPSFKSRQITSTQGLSTLEQLAKGLLRARADTLSDRLASALPPGPRFLSRPLDPARDPAWCSHRPAGPPRTAEAARSSRAPPAAA

SEQ ID NO: 35655 - protein, 61 aa, Homo sapiens; identical to SEQ ID NO: 35451
  misc_feature (1)...(61): Xaa = X or * as defined in Table 2

SEQ ID NO: 35656 - protein, 112 aa, Homo sapiens
NMIWRGRSTYRPRPRRSVPPPELIGPMLEPGDEEPQQEEPPTESRDPAPGQERKEDQGSAKTQVPDLEADLQELSQSKTGGECGNGPDDQGKILPKSEQFKMPEGGDRQPQV

SEQ ID NO: 35657 - protein, 92 aa, Homo sapiens
  misc_feature (1)...(92): Xaa = X or * as defined in Table 2
HNTLPKTKPWFQEPGDEEPQQEEPPTESRDPAPRLPRSPXSADPPWRSQRPQGLTRPPPEPLRPHGSPPAHLSLFCQRSCPGPQERPHPSTM

SEQ ID NO: 35658 - protein, 60 aa, Homo sapiens
NMIWRGRSTYRPRPRRSVPPPELIGPMLEPGDEEPQQEEPPTESRDPAPGSGERRRSGCS

SEQ ID NO: 35659 - protein, 14 aa, Homo sapiens
  misc_feature (1)...(14): Xaa = X or * as defined in Table 2
XPLACDVRPVVYEK

SEQ ID NO: 35660 - protein, 116 aa, Homo sapiens
  misc_feature (1)...(116): Xaa = X or * as defined in Table 2
PPSQRVXGWHEMRQGGRQHAQPVLSQQGLTAGHCHHQHCRRPLACDVRPVVYEKVSRDHGLVSGQHNPAPESQGQSTSPPRHTGRKQARAGGEKKVTSDPANTAQHNPNTGSRGRP

SEQ ID NO: 35661 - protein, 90 aa, Homo sapiens
QEGRAKLLQGRGRANPQLGACPLHRLPQPAPAAAAPPPQAALVGGRLEGHSGQQAALLSWTVLRAPLWGSDLRAPSSGPVGPVCWSGRPS

SEQ ID NO: 35662 - protein, 92 aa, Homo sapiens
  DOMAIN (43)..(70): C1q domain proteins domain identified by eMATRIX, accession number BL01113A, p-value=7.404e-09, raw score of 17.99
  misc_feature (1)...(92): Xaa = X or * as defined in Table 2
WPSRSALAAGGRTAPTPRSRAGPPARXRAGRESARGTSXGIRPRSQPARRPCPPAPVGRGLPPGPARPPPRAAPREPPRCRAAAHTSRPAGS

SEQ ID NO: 35663 - protein, 517 aa, Homo sapiens
  DOMAIN (319)..(330): RNase H domain identified by eMATRIX, accession number PF00075B, p-value=1.000e-13, raw score of 12.56
  DOMAIN (256)..(437): Reverse transcriptase domain identified by PFam, accession name rvt, E-value=6.4e-30, PFam score of 112.8
MAALSERFHAKEPAGSDSYPWTSRVLQRNDGDSLFTDAQIRGRIMEAALLGKARVQVFENASVRAIKSDLPQSSLWSRRKTSVSASVSVSATILISRVRGPLRKQAKKSPKAHKKPLAIGYVPYKLRGRGIWPNPEGLRRNRKKPMNYSVMSTITQGKEENPSAFLKWLQEALRKYTPLSTGSIKGQLILKDKFITQSAADIRRKLQKQALGPDLNLEVLLNLATSVFHNRDQEEQAQREKRDQRKAAAFVMTIRETNIGGSERTENGAGVQKSNGQWRLVQDLRLINEAVIPLYPIVPNPYTLLSQIQEEAEWFTVLDLKDAFFCIPLHSDSQFLFAFEDSTDHTSQFTWMVLPQGFRDSPHLFGQALAQDLDHFSSRGTLVLQYVDDLLLATNLDASCQQATLDLLNFLANQGYKASKLKAQLCLQQVKYLGLILARGTKTLSKEQIQPVLAYPHPKTLKLLQGFLGITGFCQLWITRYSEIARPLYILIKETQRANTHLIEWEPEAETAFKTLK

SEQ ID NO: 35664 - protein, 89 aa, Homo sapiens
  misc_feature (1)...(89): Xaa = X or * as defined in Table 2
XTESADLHGVKLQTFTVSVTAHKVSVDPKSEQQQDLLQRVKEQNLHSVEGDPSGLPLLARDTPTAVGNLADDRSSYFLLDRGEEGALQL

SEQ ID NO: 35665 - protein, 238 aa, Homo sapiens
  DOMAIN (30)..(41): RNase H domain identified by eMATRIX, accession number PF00075B, p-value=7.923e-09, raw score of 12.56
  DOMAIN (61)..(167): RNase H domain identified by PFam, accession name rnaseH, E- value=2.2e-12, PFam score of 54.6
MNSVIESMGALQPGLPSAIIPKNWPLIVIDLKDGLFTIPLAEQDCEWFAFTIPVVNNLQPAKRFHCFTDGSNNGKASYSGSKNKVFQMSYTSAQKAELVAVIELIENAQLRFHTDEQLMTLFTQLQTAVRSRMHPFYITHIRAHTPLPGPLTEGNQMADRLVANAISSARHFQQHLLNTATHLGTDQEAVTDGGKNLRKAGQAVTSNLMVAIIAVITTAMSIPSTRADTENNYTYWAY

SEQ ID NO: 35666 - protein, 99 aa, Homo sapiens
  DOMAIN (4)..(15): RNase H domain identified by eMATRIX, accession number PF00075B, p-value=1.000e-13, raw score of 12.56
MVLDLKDAFFCIPLHSDSQFLFAFEDPTDHTSQITWMVLPQGFRDSPYLFGQALAQDLGHFSSRGTLVLQYADDLLFATSSEASCQQATLDLLNFLANQ

SEQ ID NO: 35667 - protein, 204 aa, Homo sapiens
  DOMAIN (134)..(145): RNase H domain identified by eMATRIX, accession number PF00075F, p-value=8.159e-09, raw score of 12.87
  DOMAIN (82)..(193): RNase H domain identified by PFam, accession name rnaseH, E- value=1.8e-06, PFam score of 19.8
GKAHLVDYIKACDSIRGNLHKATLLAQAMAGLRVDKGNTPFPGACFNCGKHGHTKKNVEKKSATEQYCERFAFTIPAVSNLQPAKCFHCFTDGYSNGKASYSGSKGKVFQTPYTSAQKVELVAVIEVLTAFDMPINVISDSSYMVHSTQLIENAQLQFHTDEQLIIKTKKGEKQGLRDSPYTIESSIINFQFFKPAQRPDVISS

SEQ ID NO: 35668 - protein, 153 aa, Homo sapiens
  DOMAIN (69)..(80): RNase H domain identified by eMATRIX, accession number PF00075F, p-value=8.159e-09, raw score of 12.87
  DOMAIN (19)..(144): RNase H domain identified by PFam, accession name rnaseH, E- value=9.8e-08, PFam score of 33.0
VAEFGTIDLNSCRNNLQPAKHFHCFTDGSSNGKASYSGSKGKVFQTPYISAQKVELVAVIEVLTAFDMPINVISDSSYMVHSTQLIENAQLRFHTDEQLIIKTKKGGNRDYGTAQTQLNLALLTFHFSSLPKGQMLPAAEQHLQKPAAKTQAE

SEQ ID NO: 35669 - protein, 367 aa, Homo sapiens
  DOMAIN (169)..(180): RNase H domain identified by eMATRIX, accession number PF00075B, p-value=1.000e-13, raw score of 12.56
  DOMAIN (106)..(287): Reverse transcriptase domain identified by PFam, accession name rvt, E-value=6.4e-30, PFam score of 112.8
MSTITQGKEENPSAFLKWLQEALRKYTPLSTGSIKGQLILKDKFITQSAADIRRKLQKQALGPDLNLEVLLNLATSVFHNRDQEEQAQREKRDQRKAAAFVMTIRETNIGGSERTENGAGVQKSNGQWRLVQDLRLINEAVIPLYPIVPNPYTLLSQIQEEAEWFTVLDLKDAFFCIPLHSDSQFLFAFEDSTDHTSQFTWMVLPQGFRDSPHLFGQALAQDLDHFSSRGTLVLQYVDDLLLATNLDASCQQATLDLLNFLANQGYKASKLKAQLCLQQVKYLGLILARGTKTLSKEQIQPVLAYPHPKTLKLLQGFLGITGFCQLWITRYSEIARPLYILIKETQRANTHLIEWEPEAETAFKTLK

SEQ ID NO: 35670 - protein, 212 aa, Homo sapiens
  DOMAIN (95)..(106): RNase H domain identified by eMATRIX, accession number PF00075B, p-value=1.000e-13, raw score of 12.56
  DOMAIN (25)..(201): Reverse transcriptase domain identified by PFam, accession name rvt, E-value=8e-08, PFam score of 39.4
  misc_feature (1)...(212): Xaa = X or * as defined in Table 2
IKRLPLMKRMWLXLQPESLEIAGILVQXMIEXQPKKGTNSIPVSKPSPVVQKPNGQWRQVQDLRLISDAVIPLYPAVSNPYTLLSQILEEAEWFTVLDLKDAFFCIPLRSDSQFLLAFEDPTDHTSQLTWTVFTQGFMDTPHLFGQSLAQDLGHFSSPGTLVLQYVDDLLLAKQQATLDLLNFLANQGYKLSKLKAQLCELLVFSSCARMHS

SEQ ID NO: 35671 - protein, 345 aa, Homo sapiens
  DOMAIN (111)..(217): gag gene protein p24 domain identified by PFam, accession name gag_p24, E-value=1.7e-17, PFam score of 70.0
  misc_feature (1)...(345): Xaa = X or * as defined in Table 2
MGQVWALVRSTLELFHTDDEEEGEYDEVTEEVTEQVYLPAKAKVAQEEEVHPYPSAPPHYYFEEKEWPDPPDLSFLEDTGRKVVAPVTEQHLERLLSVLFRQEFSRLDERDDAVEQLRGVCIRAWEKITSGGEQYPSFSAVKQGPKELYADFIAWNLLRQESLKKVISDSAAQDIVLQLLAFGNVNLDCQAALRPIRGKAHLVDYIKACDGIGAKQDSERFAFTIPVVNNLQPAKHFHYFTDGSSNGKASYSGSKGQNQQPIWILSRHLKPYHEPDAKEEIPGGCPRTPWLQPCRDXCXGGPXPVTSNTRXTQPPTWGQIKKLSQMVEENLRKAGQLVTMTVYWN

SEQ ID NO: 35672 - protein, 67 aa, Homo sapiens
  DOMAIN (11)..(28): Zinc finger, CCHC class domain identified by PFam, accession name zf-CCHC, E-value=0.00014, PFam score of 28.6
  misc_feature (1)...(67): Xaa = X or * as defined in Table 2
KGGWSQRHSQGACYTCRKSGHWAKECPQPGIPPKPRPICVGPHXKSDCSTHLAANPRAPGTLAQGSL

SEQ ID NO: 35673 - protein, 1142 aa, Homo sapiens
  DOMAIN (247)..(259): PEPSIN (A1) ASPARTIC PROTEASE FAMILY SIGNATURE domain identified by eMATRIX, accession number PR00792C, p-value=1.931e- 09, raw score of 9.10
  DOMAIN (22)..(114): Gag P30 core shell protein domain identified by PFam, accession name Gag_p30, E-value=1.1e-17, PFam score of 65.5
MTAEERDKFPTSQQAVPSMDAHWDLDSDHGDWSRKHLLTCVLEGLRRIRKKPMNYSMMSTITQGKEENPSAFLEQLQEALRKYTPLSPNSLVGQLILKDKFITQSTTDIRRKLQNRDQEEQAQKEKRDQRKAIALVMALRQTLVVQRGQKMEQANHLVGLVTSVVCKDTLKKIVQRETSRPIVHVHYTEAITGSHTTQRAKLLWARSPQPDDPMTGLRMTAASTRSCHHPLTEPWVCLIIEGQEIDFLLDTGTTFSVLIPCLGRLSSRSVTIQGILGQPVTRYFSHLLSCNWETLLFSHAFLVMPESPTPLLGRDILAKAGAIISMKTGNKLPICCPLLEGINPEVWALEGQFGRAKNAHPLQIRLKDPISFPYQRQYPLRPEAHKGLQDIVKHLKAQDSVRKCSSPCNTPILGVQKLNSQWRLVQDLRLINEAVIPLYPVVRNPYTLLSQVPEEAEWFTVLDLKDAFFCIPLHSDSQFLFAFEDPTDHTSQLMWMVLPQRFRDSPHLFGQAQAQDLGHFSSPGTLVLQYSEIAKTLYTLIKEMERANTHLVEWEPEAETAFETLKQALVQAPALSLPTGQNFALYVIERAGIALGVLTQTHRTTPQPVAYLSKEIDVVAKGWPHCLRTVVAVAVLVSEAIKIIQGKDFTVWTTHDVNGILGAKGGLWPSDNCLLRYQALLLEEPVLQIHMCIAINPATFLPEDGEPIKHDCQQIIVQTYATQDDLLEVPLANPDFNLYNSGSSFVENGIQRAGYAIVSDVTVLGSKPLSPGTSTQLAELVALTRALELGKGKRINVYTDSKYAYLILHAHAAIWKEREFLTSGGTPIKYHKEIMELLHTVQKPKEVAVLHCQSHQKGSARRIFCLTRIPGTRVCKNPHVSLSGISEWPLRDHTPLCFRPKALLAWVHEEICSMGCKDPGWNSLKVSEEDRKMQESLETSRDLLNGFDQNVDNDMDSKVQAEGASDGDEELIGKWRKGLSMLWKILSIENMMNVWKDGTIKDAIIVIEKAVKAIKPETINSCQRNLCPDVVHDFTRFTTEPIKDIKEIGDLAIKLGIFESSNSTQFLNQFVPDDRLSPHNKLLKFYKPEFYSSYPLVSCLDHYVDQVGARISMSFCVTTVTEASGSGSWTCGVSQLKLSYAD

SEQ ID NO: 35674 - protein, 592 aa, Homo sapiens
  DOMAIN (495)..(507): RNase H domain identified by eMATRIX, accession number PF00075C, p-value=3.077e-09, raw score of 11.58
  DOMAIN (319)..(438): Gag P30 core shell protein domain identified by PFam, accession name Gag_p30, E-value=1.1e-16, PFam score of 62.0
MIADSAAQVIVLQLLAFDNANADCQAALQPVRGKAHLVDYIKACDGIRGNLHKATLLAQEMAGLRVDKGNTPFPGACFNYGKHGHTKKECRKKSVSQAARWGKRKTADPEICPKCKKGKYWANQCHSKFDKDGTLISGNAMRAEQDCEWFTFTIPAVNNLQPAKHFHRFTDVSSNGKASYSGSKGGQARVQLFENASVRATNSDLPQSSLWCRRKTSVSVAVLVSATIPISRVQGPSQVLGQGEKQTNQNGSRANLRSHWRDVMLLLDQTLAFTEKNVALAAAQEFGDTWYLSQVNDRLTAKERDKFPTGQQAIPSMDPHWDLDSDHGDWSHKHLLTCVLEGLRIIRKKPMNYSMMSTMTQGKEENPSAFLDWLREALRKYTSLSPDSLEGQLILKDKLITQSAAEIRRKLQKRALGPEQNLEALLNLATSVFYNRGQEEQAQKEKQSLEGTLPQSTMVLWARSSQPDDPTTELMVPRFLFAFEDLTDHTSQLTWTILPQGFRDSPHLFGQALAQDLGHFSSPGTLVLQYVDDLLLATSSEASCQQATLDFLSFLANQGYEASRSKAQLCLQQDRGYQATDDLTNGTPNELN

SEQ ID NO: 35675 - protein, 311 aa, Homo sapiens
  DOMAIN (111)..(184): gag gene protein p24 domain identified by PFam, accession name gag_p24, E-value=3.3e-10, PFam score of 42.8
MGQVWALVRSTLELFHTDDEEEGEYDEVTEEVTEQVYLPAKAKVAQEEEVHPYPSAPPHYYFEEKEWPDPPDLSFLEDTGRKVVAPVTEQHLERLLSVLFRQEFSRLDERGPKELYADFIAWNLLRQESLKKVISDSAAQDIVLQLLAFGNVNLDCQAALRPIRGKAHLVDYIKACDGIGAKQDSERFAFTIPVVNNLQPAKHFHYFTDGSSNGKASYSGSKGQNQQPIWILSRHLKPYHEPDAKEEIPGGSRGPPGCSHVKTDAEEDPNCHEQHPLNTATHLGTDQEAVTDGGRKPEESGTTGHNDCLLE

SEQ ID NO: 35676 - protein, 581 aa, Homo sapiens
  DOMAIN (486)..(497): RNase H domain identified by eMATRIX, accession number PF00075B, p-value=1.000e-13, raw score of 12.56
  DOMAIN (63)..(271): gag gene protein p24 domain identified by PFam, accession name gag_p24, E-value=6.1e-51, PFam score of 182.7
  misc_feature (1)...(581): Xaa = X or * as defined in Table 2
MGKVWAVVRSTLELFHTDDEEEGEYNEVTEEITEQVYLPAKAKAVKEREQRGNITATFEPFPFKLLKEFKQAINQYGPGSHFVMGLLKNVAVSSQMIPTDWDALTQACLTPAQFLQFKTWWAHEASIQAACNAQAQPQINITTGQLLGVGGWAGLDAQVVMQDDAIEQLRGVCIRAWEKIPLCGEQYASFSAIKQGPKEPYVDFIAWLQESLKKVIADSAAQDIVLQLSAFDNANPDCQAALXPIRGNAHLVDYIKACDGIRGNMHKATLLVQAMAGLRVDKGNPLLPGACFNCGKHGHTKQERRKKSVSQAARWGKRKTADPEICPKCKKGKYWANQCHSKFDKDGTLISGNAMRAEQDCEWFTFTIPAVNNLQPAKHFHRFTDVSSNGKASYSGSKGGQARVQLFENASVRATNSDLPQSSLWCRRKTSVSVAVLVSATIPISRVQGPSQVLGQGEKQTNQNVVPNPYTLLSQIPEEAKWFTALDLKDAFFCIPLHSDSQFLFAFEDLTDHTSQLTWTILPQGFRDSPHLFGQALAQDLGHFSSPGTLVLQYVDDLLLATSSEASCQQATLDFLSFLAN

SEQ ID NO: 35677 - protein, 361 aa, Homo sapiens
  DOMAIN (144)..(155): RNase H domain identified by eMATRIX, accession number PF00075B, p-value=1.000e-13, raw score of 12.56
  DOMAIN (77)..(269): Reverse transcriptase domain identified by PFam, accession name rvt, E-value=1.2e-26, PFam score of 101.9
MFRKDEELTSSQRDLAVRNWAWSLARGERSANMHAVHTSLLVERTILTTTKERGSTLQYPLRPGAHKGLQDIVKRFKAQALIRKCSSPCNTPILGVQKPNGQWRLVQDLRLINEAVIPLYPVVPNPYNLLSQIPEEAEWFTVLDLKDAFFCIPLHSDSQFLFAFEDPTDHTSQLTWTVLPPGFRDSPPLFGQALAQDLGHFSSPGTLVLQYVDDLLLATSSEASCQQATLDLLNFLANQGCKRVGIALGVLTQTHGTTPQPVAYLSKETDVAAKGPLTAILLLLAFGPCIFNLLVKLVSSRIDAIKLQMVLQMEPQMSSTNNFYRGPLDQPAGPLTGLKSSPPEDTTTAGPLLRPYPAGSS

SEQ ID NO: 35678 - protein, 1035 aa, Homo sapiens
  DOMAIN (58)..(88): kw TRANSCRIPTASE REVERSE II ORF2 domain identified by eMATRIX, accession number DM01354R, p-value=6.786e-31, raw score of 8.50
  DOMAIN (527)..(745): Gag P30 core shell protein domain identified by PFam, accession name Gag_p30, E-value=2.8e-28, PFam score of 102.6
MEATGKFLRASDQSTASQVGKTKADHVSYNTKVESPRLPMRQLEVMQLFLCCILLVKDAEKAFNKIQHPFMLKPLHKLGIEGTYLKIKAIYDKLTDNITLNGKKLEAFPLKTSRRQGCPLSPLLFNIVLEVLAREIKQEKEIKESLKTDKAGLRCQNKLVQPKGHGSHVAQDGFECGPTQIVTIGTPWASVSQKSNAVSYQCEVWIPEQFFQRSCPQTSTSPTVAVTQLCGWCHPSEQTLKEKTSEIALVSEKHTNWLKELWLGRSGVNTKFLPDISQSFLKITWPLEDDKETASPTSKKEHSANIPSTAYALEEYVPRERSEASGSGPGTGRMPRGLLDKTVWPLTWDLTERGSRCMAGQSRYPTQQIRTLQLLAQALWQPRRSSSQTTKRKRGEARKRRRPSIMANDPAKRERWSRHGTQTLINPSSRRPDAPSVGPAKPAPTRNPRWPDTPTAVGNLADDRSSYFLLDRWDCLVAGKQAQGSHGFYIMKETSKEISKGPQKPPGYQLCPLQAVGGGEFGPTWIHVPFSLSDLKQIKADLGKFSDDPDRYKDVLQGLGQTFDLAWRDVMLLLDQILAFIEKNAALAAAREFGDTWYLSQVNDRMTAKERDKFLTGQQAIPTMDPHWDFDSDHGDWSHKHLLTCVLEGLKGIRKKPMNYSMMSTITQGQEEKPSAFLERLREALRKYTPLSPESLEGQLILKDKFITQSAADIRRQLQKQALGPEQNLQELLNLATLVFYNRDQEEQAQKEKRDQRKAAALVRALRQTNLGGSERTEYGAGQSPRRDILAKAGAIIYMNMGNKLPICCPLLEEGINPEVWALERQFGRAKNARPVQIRLKDPTTFPYQRQYPLRLEAHKALQDIVKHLKPQGLVRKCSSPCNTPVLGVQKPNGQWRLVQDLRLINEAVIPVYLVVANPYTLLSQIPEEAEWFMVLDLKDAFFCIPLHSGSQFLFAFEDPTDHMSQLMWMVLPQGFRDSPHLFGEALAQDLGHFSSPGTLVLQYMDDLLLATSWEASCQQATLDLLNFLANQGYK

SEQ ID NO: 35679 - protein, 1724 aa, Homo sapiens
  DOMAIN (316)..(361): kw TRANSCRIPTASE REVERSE II ORF2 domain identified by eMATRIX, accession number DM01354N, p-value=1.000e-40, raw score of 13.17
  DOMAIN (400)..(675): Reverse transcriptase domain identified by PFam, accession name rvt, E-value=2.4e-85, PFam score of 297.0
MVKGSIQQEELTILNIYAPNTGAPRFIKQVLSDLQRDLDSHTLIMGDFNTPLSTLDRSTRQKVNKDTQELNSALHQADLIDIYRTLHPKSTEYTFFSAPHHTYSKIDHILGSKALLSKCKRIEIITNYLSDHSAIKLELRIKNLTQSRSTTWKLNNLLLNDYWVHNEMKTEIKMFFETNENKDTTYQNLWDAFKAVCRGKFIALNAYKRKEERSKIDTLTSQLKELEKQEQRHSKPSRRQEITKMRAELKEIETQKTLQKINESSSWFFERINKIDRPLARLIKKKREKNQIDTIKNDKGDITTDPTEIQTTIREYYKHLYTNKLENLEEMDTFLDTYTLPRLNQEEVESLNRPITGSEIVAITNSLPTKKSPGPEGFTAEFYQRYKEELVPFLLKLFQSIEKEGILPNSFYEASIILIPKPGRDTTKKENFRPISLINIDAKILNKILANRIQQHIQKLIHHDQVGFIPGMQGWFNIRKSINVIQHINRAKDKNHMIISIDAEKAFDKIQQRFMLKTLNKLGIDGTYFKIIRAIYDKPTANIILNGQKLEAFPFKTGTRQGCPLSPLLFNIVLEVLARAIRQEKEIKGIQLGKEEVKLSLFADDMIVYLENPIVSAQNLLKLISNFSKVSGYKINVQKSQAFLYTNNRQTESQIMSELPFTIASKRIKYLGIQFTRDVKDLFKENYKPLLKEIKEDTNKWKNIPCSRVGRINIVKMAILPKVIYRFNAIPIKLPMTFFTELEKTTLKFIWNQNRARIAKSILSQKNKAGGITLPDFKLYYKATVTKTAWYWYQNRDIDQWNRTEPSEIMPHIYNCLIFDKPEKNKQWGKDSLFNKWCWENWLAICRKLKLDPFLTPYTKINSRWIKDLNVRPKTIKTLEENLGITIQDIGVGKDFMSKTPKAMATKAKIDKWDLIKLKSFCTAKETTIRVNRQPTTWEKIFATYSSDKGLISRIYNELKQIYKKKTNNPIKTWAKDMNRHFSKEDIYAAKKHMKKCSSSLAIREMQIKTTMRYHLTPVRMAIIKKSGNNRWNIGGLVPKLNYDLKRHLEKEEKPTKTEQAISKDKNAEKNNRLSLQGEIIIAIILITEPGLKGRGIPIFIIEDGGTSYVVALQILCKLVELTQKPVDQPFDYICGVSTALLLKSARPRTHWKEEAPDTSEHLKEQTPDTPSLRTVTLTARVCGFILEVSETKNSPEGTNSGHILTSQMGLSPIAKRRETSASAAALVSATIPICRVQGPLRVLGQEVFLLLLRLPTAPLPINDKPPLISPAQKETSKEISKGPQKPLGYRLCPLQAVGGGEFGLTRVHVPFSLYDLKQIKADLGKFSDDPDRYIDVLQGLGQTFYLTWRDVMLLLDQTLAFNEKNAALAAAREFGDIWDQGEQSKKEKQDQRKTVALVMALRQINLGGSERTENGAGQSAGFRDSPQLFGQALAQDLGHFSSPGTLVLQYVDDLLLATSLEASCQQATLDLLNFLANQGYKVSRSKAQLCLQQVKYLGLILARGTSAQLAELLALTLALELGNGKRINVYTDSKYAYLILHDHAAIWKERAFLTSGGTPIKYHKEIMELLHTVQKPKEVAVLHCQSHQQAQGSVALQSADGKGSQAFVIFFKSAGSLWPKICSEMPSRIHGLEMEAFRIHLVLYSTVAEVEPKKQDKILLTIPTHFYKHMSLSPRPPLAQAHRMELPESRTAVIVFALLDLATQWSYRALGWYWGLSAKSPVM

SEQ ID NO: 35680 - protein, 94 aa, Homo sapiens
SALNQRGRRGHAPGLGQVLCPLQLEGDITDCLGGGLWSSGDFFAYFLPRLSPEVQEKQKLVLGKPTLPTPKSWGLLESPFPESLTPVSLVRWPH

SEQ ID NO: 35681 - protein, 84 aa, Homo sapiens
  misc_feature (1)...(84): Xaa = X or * as defined in Table 2
KLSQVCIDLLXIREGERDMYPGWAKFPSPYSLKGTXPIAQGVLWSFGDFFYCIPSTLPTPKSWRLFESPFPESLTPVSLVWWPC

SEQ ID NO: 35682 - protein, 102 aa, Homo sapiens
  DOMAIN (17)..(102): Retroviral aspartyl protease domain identified by PFam, accession name rvp, E-value=5e-05, PFam score of 22.9
  misc_feature (1)...(102): Xaa = X or * as defined in Table 2
SNNRTEGAWGKCQLMSSPLTEPQVTLTIDSQEIDFLLDTGAAFSVLISCPEQLSSRSVTIXGILGQPVTRYFSHLLSCNWETLLFSHAFLVMPESPTPLLGR

SEQ ID NO: 35683 - protein, 72 aa, Homo sapiens
MNMGNELPICCPLLEEGINPEVWALEGTNSSSSLKPSHRMKLFFMHHRESKDGSWSPYSDSWGNPTTSGIPK

SEQ ID NO: 35684 - protein, 79 aa, Homo sapiens
  misc_feature (1)...(79): Xaa = X or * as defined in Table 2
KVCPRPCRTSMLPIRIIXKLPQVCLDLLXIIEGEGDMYPGXAKFPSPYCLKGTXPGTIAGSWARGVSAAASPSYSSPSY

SEQ ID NO: 35685 - protein, 199 aa, Homo sapiens
  DOMAIN (83)..(94): RNase H domain identified by eMATRIX, accession number PF00075B, p-value=1.000e-13, raw score of 12.56
  DOMAIN (12)..(188): Reverse transcriptase domain identified by PFam, accession name rvt, E-value=1.6e-07, PFam score of 37.3
  misc_feature (1)...(199): Xaa = X or * as defined in Table 2
LQPESLEIAGILVQXMIEXQPKKGTNSIPVSKPSPGVQKPNGQWRQVQDLRLISDAVIPLYPAVSNPYTLLSQILEEAEWFTVLDLKDAFFCIPLRSDSQFLLAFEDPTDHTSQLTWTVFTQGFMDTPHLFGQSLAQDLGHFSSPGTLVLQYVDDLLLAKQQATLDLLNFLANQGYKLSKLKAQLCELLVFSSCARMHS

SEQ ID NO: 35686 - protein, 303 aa, Homo sapiens
MGQEVWLTPVIPVLWEAKSKRKGSVSTAASVSATIPNSRVQGPLQILGQGRKNINNQNSGQLFLSEGNKQRNLQGTTKAPGLSVMSLQAVGGGEFGPTRIHVPFSRSDLKQIKVDMGKFSDDPDRYIDILQGVGQNFDLTWRDLMLLLDQTLAFNKKNAALAAAGEFGDTLYLSQVNHTMTDEEMDKFPAEVGKPIEHDCQQIVAQTYATREDLLEVPLANPDLNLYTDGSSFVVNGIQRAGYAIVSDVTALESPMTTIMLLLTCEPCIFNLLVNFVSSRIEAIKLQMALQMEPQISSTHNFY

SEQ ID NO: 35687 - protein, 94 aa, Homo sapiens
  misc_feature (1)...(94): Xaa = X or * as defined in Table 2
CFCCCVEGNKPRNLQRTTKTPRLSVMSPSSCRGRGIWPNPGTCRPSPSLIXSRSRQTWRITTPCQQGNKTGQRMNLTNXQEQASEGGXXQTPLS

SEQ ID NO: 35688 - protein, 544 aa, Homo sapiens
  DOMAIN (454)..(465): RNase H domain identified by eMATRIX, accession number PF00075B, p-value=1.000e-13, raw score of 12.56
  DOMAIN (44)..(262): Gag P30 core shell protein domain identified by PFam, accession name Gag_p30, E-value=2.8e-28, PFam score of 102.6
MVCPEFVPSDVRMCPEFLPSVGFVVSLTSGVKLQTFTLDTKVLHVPFSLSDLKQIKADLGKFSDDPDRYKDVLQGLGQTFDLAWRDVMLLLDQILAFIEKNAALAAAREFGDTWYLSQVNDRMTAKERDKFLTGQQAIPTMDPHWDFDSDHGDWSHKHLLTCVLEGLKGIRKKPMNYSMMSTITQGQEEKPSAFLERLREALRKYTPLSPESLEGQLILKDKFITQSAADIRRQLQKQALGPEQNLQELLNLATLVFYNRDQEEQAQKEKRDQRKAAALVRALRQTNLGGSERTEYGAGQSPRRDILAKAGAIIYMNMGNKLPICCPLLEEGINPEVWALERQFGRAKNARPVQIRLKDPTTFPYQRQYPLRLEAHKALQDIVKHLKPQGLVRKCSSPCNTPVLGVQKPNGQWRLVQDLRLINEAVIPVYLVVANPYTLLSQIPEEAEWFMVLDLKDAFFCIPLHSGSQFLFAFEDPTDHMSQLMWMVLPQGFRDSPHLFGEALAQDLGHFSSPGTLVLQYMDDLLLATSWEASCQQATLELSS

SEQ ID NO: 35689 - protein, 224 aa, Homo sapiens
METLAEVYLTKSIRDIASIKNHWDLHTEESSKDTPTAVGNLADDHSSYFLLDRWDCLVAGKQAQGSHGFYIMKETSKEISKGPQKPPGYQLCPLQAVGGGEFGPTWIHVPFSLSDLKQIKADLGKFSDDPDRSSQLQTRNANCCSRMPVPIVAAVTAPTQATCHLEQLSSECEPTGVSPKWWQMSPQVDYIPMEESSSKSELKEPGKWDMDNIVEYHQNDLVQQ

SEQ ID NO: 35690 - protein, 148 aa, Homo sapiens
  misc_feature (1)...(148): Xaa = X or * as defined in Table 2
SNNRTDNPTSVAYLSKETDVVAKGWPHCLWVVVAVAILVLEAIKIIQGKDFTVWTSHDVNGILGAKGNSWLSDKRLLRYQALLLEGPVLQIHTCVALNPAIFLPEDGEPIKHDYQQIVAQTYVTXEDLLEVPLANPDLNLYTNGSSFV

SEQ ID NO: 35691 - protein, 84 aa, Homo sapiens
  DOMAIN (13)..(43): PHOTOSYSTEM II PROTEIN PRECURSOR PHOTOSYNTHESIS domain identified by eMATRIX, accession number PD02346B, p-value=1.808e- 10, raw score of 20.57
  DOMAIN (51)..(84): Gag P30 core shell protein domain identified by PFam, accession name Gag_p30, E-value=0.0012, PFam score of 16.2
  misc_feature (1)...(84): Xaa = X or * as defined in Table 2
QLKKGTNSLLVSKPSPVWIPTGTLTQIMGTGVANICXPVFXKDXGELGKMNYAMMSTITQGKEENPAFLKWLWEALRKYTPLSP

SEQ ID NO: 35692 - protein, 731 aa, Homo sapiens
  DOMAIN (296)..(307): RNase H domain identified by eMATRIX, accession number PF00075B, p-value=1.000e-13, raw score of 12.56
  DOMAIN (229)..(418): Reverse transcriptase domain identified by PFam, accession name rvt, E-value=2.5e-30, PFam score of 114.2
MQLRGPDNKLVDPAAMSGTLKGMLPKQDSPISPIYPDPCPLGPNACQTNFLLPLFSKKEISKEISKGPQRPPGYRLCPLQAAGGGEFGPTRVHVPFSLSDLKQVKADMGKFSDDPDRHIDVLQGLGQTFDLAWRDVMLLLDQTLAFYEKNVALAAAREFGDTWYLSQVCLTIEGQEIDFLLDSGTAFSVLISCPGQLSSRSVTIRGILGQPVTRPEAHKGLQNTVKHLKAQGLVRKCSSPGNTPILGVQKPNRQCRLVQDLRLINEAVIPLYPVVPNPYTLLSQIPEEAEWFMVLDLKDAFFCIPLHSDSQFLFAFEDPTDHTSQLMWMVLPQGFRDSPHLFGQALARDLGHFSSLGTLVLQYVDDLLLATSSEALCQQATLDLLNFLANQGYKVSRSKAQLCLQQDGEPIEHDCQQIIVQTYATRDDLLDVPLTIPDLNLYTDGSSVVENGIQRTGYTIVSDVTILESPVAAILLLLAFGACIFNLLVKFVSSRIEAFELQMVLQMEPQMSSTNNFYRGPMDRPAGTSPGLESSPLKDTTTAGAVTLTTEVCSFTPEPARPRTHQKEETPNTSEHQKEQTPDTLPLRTVTLTASVHGFILEVNGSGKTGKATIVWQDATQNWQHKIQERFKTTQQAELEEVSALEGLLLNTGCESKMPTTTLGTTSPPYSGSARSRDDRHQPVPTLVRDGPFRRSTRKSSRWPRQTEAERVLRRLQDGDSKVKVAVGYDP

SEQ ID NO: 35693 - protein, 248 aa, Homo sapiens
  DOMAIN (86)..(207): Gag P30 core shell protein domain identified by PFam, accession name Gag_p30, E-value=2.7e-18, PFam score of 67.6
TWVSFQIYPDRYIDVPQGPGQTFNLTWRDVMLLLDHTLAFNEKNAALAAAREFGDTWYLSQVNDRMTAKEREKFPTGQQAIPSMDPCWDLDSDHGDWRCKHLLTCVLEGLRRIRKKPMNYSLMSTITQGKEENPSAFPEQLQEALRKYTPLSPDSLKGQLILKDKFITQSATAADIRRKLQKQALGPEENLEALLNLATSVFYNRDQEEQAQKGKARSEKGHSLSHGPQANKPWWFREDRKQSRPITR

SEQ ID NO: 35694 - protein, 124 aa, Homo sapiens
  misc_feature (1)...(124): Xaa = X or * as defined in Table 2
YGHCCYDHRICCFFPATEQKVCPCAAQGXPLXLRGDDPEMSVYIXQLPLYYSSDLLSAANEVQILAFFQGDVSFFPVATTTDTLSVTFNFPFNYQGVNDFDFDFKQFLHSSFDFCFGRVFSNFE

SEQ ID NO: 35695 - protein, 185 aa, Homo sapiens
  misc_feature (1)...(185): Xaa = X or * as defined in Table 2
RLQPPGAPVEDITRPVSAKPRDADRNSTGCYLVXLQHQRQTESGRQLSGLXGPGCNGVHASLYRTSAMFAERFGSYSRRSTTAGIPSLLRLKSTIRRSDRSRRKAQRKRCGQVMPQHRRSIRPLLQPITPSLNRNLHRSPHRSRNRWSRLNRRLKHHLRRSQNRSRSWKKKLHRRVKPMLCNWVR

SEQ ID NO: 35696 - protein, 173 aa, Homo sapiens
  misc_feature (1)...(173): Xaa = X or * as defined in Table 2
VNPALQVLVVAITPPPSLPSPSCIRVLTRVSNAIAAKPLCLAVCAVVEGGRIRALVAVAAWGAGVTGGPAGLIACGPVSPSVIRGQFRHAGISFFLYAIGGEMVPAVRRQNHTPAXHKRFAKAFQLAHPNAVNAEHFAGGDRHLFSHLNQGCVVKHHVRRDITFIGYRFTQFA

SEQ ID NO: 35697 - protein, 261 aa, Homo sapiens
AYGNPVEIAGGARQAGVNFTGVFRPRFSRRWRRISGETCKLWWRRWRSAWASINQTFASWSTLIFRAISNPIIRKPDAPGVMACPRKRCCFTIRLIWRGCAVVWKRSREGQLQDIERHKLNAMGAFAEAQTCRRLVLLNYFGRRASGAVRELRYLPRSAETVRRFNRCSDCPFHHWSCESAVWDGLCGGSDSCCGVSRARLFASPVNLPITGEIPERGFHPFCGRTTENGKNHPRNLFIWRSNCSVLPVKVMSLCSSTPCP

SEQ ID NO: 35698 - protein, 88 aa, Homo sapiens
  misc_feature (1)...(88): Xaa = X or * as defined in Table 2
MVERQSEHRLNRRTVSADRGDIAVPARLLTPFAKIVRNTRRRQVCASANAPHRLTLVACQRKEEETALSCRLVLRKLTETEPVIIFEX

SEQ ID NO: 35699 - protein, 64 aa, Homo sapiens
  DOMAIN (6)..(34): Granins proteins domain identified by eMATRIX, accession number BL00422C, p-value=6.318e-11, raw score of 16.18
  misc_feature (1)...(64): Xaa = X or * as defined in Table 2
SEEEEEDEEEEEEEEEEEEEEEEEXEEGESAIICAKVCISVFPRRKNELNMAITPNTIPKLNHW

SEQ ID NO: 35700 - protein, 121 aa, Homo sapiens
  DOMAIN (79)..(107): Granins proteins domain identified by eMATRIX, accession number BL00422C, p-value=8.457e-14, raw score of 16.18
  misc_feature (1)...(121): Xaa = X or * as defined in Table 2
VAPGDRHAFHGGGSGLSPELTLPQTQCCAQATVQGLEGTRSWSQSGTSSLSPWSHTSLACPQKEEGEEEEEEEEEEEEEEEEEEEEEEEEEEEEEEEEEEEEAKTQXKSGQKIXTDSPQKK

SEQ ID NO: 35701 - protein, 195 aa, Homo sapiens
  misc_feature (1)...(195): Xaa = X or * as defined in Table 2
SRPGITGSTISYGDPGHGAGPPGADLGPARSLKPERAAGAQLAAGEARQSGDPGLPGGPGHSLGTAPCXVDKGWGHPVSTVHHQRQPQPGGLRAPGTALLAGTQPSHPAAGPWEPQPQRGVRVLGGRRDSXVGGGXGQHNKALWGPRXPHTEQKPDRKLSRIPLRAAGGEKRGCGCDRAGCLVLGPPQLPAQGLM

SEQ ID NO: 35702 - protein, 148 aa, Homo sapiens
  misc_feature (1)...(148): Xaa = X or * as defined in Table 2
SLSHRAGGGGGVGGGAVCLFSPPRTKRESAPESPSRVLGHSPVPSXGAPSTRGSVSRILTSGGTHERSNGLTCHRNQAGTGPSALRSGRPXCLSRANPPGSKRSAGPVHEERTXPCRLSGSAGITQXDGNXKAGPRVPEAPERGCATC

SEQ ID NO: 35703 - protein, 114 aa, Homo sapiens
  DOMAIN (15)..(66): Ribosomal protein S3Ae proteins domain identified by eMATRIX, accession number BL01191B, p-value=1.000e-40, raw score of 13.33
  DOMAIN (1)..(106): Ribosomal S3Ae family domain identified by PFam, accession name Ribosomal_S3Ae, E-value=1.1e-06, PFam score of 7.9
  misc_feature (1)...(114): Xaa = X or * as defined in Table 2
QNDEVAFRKLKLIIEDVQGKSYLTNFHGMNLTHDKMCSMVKKWQTVIEAHVDVKTTNGYLLCLFCVGFTKKCNNQIWKTSLFXQQSNMEDFFVLTTGIISHLHEPFLVVTDYDQ

SEQ ID NO: 35704 - protein, 237 aa, Homo sapiens
  DOMAIN (178)..(230): Ribosomal protein S3Ae proteins domain identified by eMATRIX, accession number BL01191C, p-value=1.000e-40, raw score of 16.50
  DOMAIN (7)..(232): Ribosomal S3Ae family domain identified by PFam, accession name Ribosomal_S3Ae, E-value=1.1e-91, PFam score of 318.0
  misc_feature (1)...(237): Xaa = X or * as defined in Table 2
TSFLTTGGKKGSKKKVVDPFSKKDWLXYVKHRAMFNIRNIGKDVGSPRTQGTKIASDGLKGRVFEVSLADLQNDEVAFRKFKLITEDVQGKNCLTNFHGMDLTPXQKCCSMVKKMWQTMIXSSPLMVKTTDGLLASVCSCVGFTKKRNNQIRKTSYAQHQQVRQIRKKMMEIMTREVQTNDLKEVVNKLIPDSIGKDIEKACQSIYPLHDVFVRKVKMLKKPKFELGKLMELHGEGS

SEQ ID NO: 35705 - protein, 166 aa, Homo sapiens
  DOMAIN (55)..(86): Intermediate filaments proteins domain identified by eMATRIX, accession number BL00226C, p-value=9.654e-21, raw score of 13.23
  DOMAIN (32)..(166): Intermediate filament proteins domain identified by PFam, accession name filament, E-value=2e-54, PFam score of 194.2
SSARFVSSSSSGGYGGGYGGVLTASDGLLAGNEKLTMQNLNDRLASYLDKVRALEAAKILSDMRSQYEVMAEQNRKDAEAWFTSRTEELNREVAGHTEQLQMSRSEVTDLRRTLQGLEIELQSQLSMKAALEDTLAETEGDVRADSERQNQEYQRLMDIKSRLEQE

SEQ ID NO: 35706 - protein, 238 aa, Homo sapiens
  DOMAIN (72)..(120): Intermediate filaments proteins domain identified by eMATRIX, accession number BL00226B, p-value=1.300e-30, raw score of 23.86
  DOMAIN (33)..(210): Intermediate filament proteins domain identified by PFam, accession name filament, E-value=8.1e-88, PFam score of 305.2
  misc_feature (1)...(238): Xaa = X or * as defined in Table 2
AQLKVKFWYWPEAGAGGLRRFKHYYTPFKDCRDKILGATIKNSRIVLQIDNAGLAADDFRTKFETEQALRMSVXADITGLRRVLDELTLARTDLEMQIEGLKEELAYLKKNHEEEISTLRGQVGGQVSVEVDSAPGTDLAKILSDMRSQYEVMAEQNRKDAEAWFTSRTEELTREVAGHTEQLQMSRSEVTDLRRTLQGLEIELQSQLSRLWGFCCPLEGVFWVEGWEGRDPYPRLFS

SEQ ID NO: 35707 - protein, 276 aa, Homo sapiens
  DOMAIN (121)..(169): Intermediate filaments proteins domain identified by eMATRIX, accession number BL00226B, p-value=6.600e-21, raw score of 23.86
  DOMAIN (108)..(201): Intermediate filament proteins domain identified by PFam, accession name filament, E-value=4.7e-16, PFam score of 64.2
DTLQRTAEAPEPAASEDLGGRQIVVVIFLSLEQAALGFNTADQRLDMRQLGSKARLRFCQCVFQGSFLRIGRGGCDSAEPGSRRGHGTATGQAALGCKGISVNCTGKRRRLESERSLRQLVEADKCGTQKLLDDATLPMADLEAQQESLKEEQLSLKSNHEQEVKILRSQLGEKLRIELDIEPTIDLNRVLGEMRAQYEAILPSFPQWAIQASFLQVEPSRGDRLVSMSKAEGSVHNLEERKAESYFGAILKPKFQKQQQQQQQQQQQHMGSFALL

SEQ ID NO: 35708 - protein, 308 aa, Homo sapiens
  DOMAIN (1)..(37): Intermediate filament proteins domain identified by PFam, accession name filament, E-value=7.9e-08, PFam score of 33.3
MAEQNRKDAEAWFTSRTEELNREVAGHTEQLQMSRSEKTGLGETLAETERALEPTGAYPALIHGIEPTGRLRTDMTADKDSNAYGLNSGWNRNGHSPQGHALKATFTGGKGLSDLTALLVDSKDPPPSACENAMFPPSAPTRHHLGRREQLLPDTKPASDLILDFPIPPSNTVTDEIERANVFKMNGKWYLFTDSRGSKMTIDGINSNDIYMLGYVSNSLTGPYKPLNKTGLVLQMGLDPNDVTFTYSHFAVPQAKGNNVVITSYMTNRGFFEDKKATFAPSFLMNIKGNKTSVVKNSILEQGQLTVN

SEQ ID NO: 35709 - protein, 433 aa, Homo sapiens
  DOMAIN (89)..(104): Intermediate filaments proteins domain identified by eMATRIX, accession number BL00226A, p-value=1.857e-15, raw score of 12.77
  DOMAIN (89)..(284): Intermediate filament proteins domain identified by PFam, accession name filament, E-value=1e-62, PFam score of 221.8
  misc_feature (1)...(433): Xaa = X or * as defined in Table 2
GVAPSVLRLAMTSYSYRQSSATSSFGGLGGGSVRFGPGVAFRAPSIHGGSGGRGVSVSSARFVSSSSSGAYGGGYGGVLTASDGLLAGNEKLTMQNLNDRLASYLDKVRALEAANGELEVKIRDWYQKQGPGPSRDYSHYYTTIQELRDKILGATIENSRIVLQIDNARLAADDFRTKFETEQALRMSVEADINGFRRVLEXSXTLAQEPNLEDARIEGLKEELAYLKKNHEEEISTLKGPKCEAQVSVEVDSAPGTRSSPKILSDMRSQYEVMAEQNRKDAEAWFTSRTERIETREVAWPHRSSFQMSQAPRLLDLAAATPQGSXDLSCQSQLEPLKAALGKTPLAENRKARFGNPQLAPYPQALDSAVIXKPQLGDIVAKLDSSTGRIQEYQRLMDIKFARLEQEIAHPNRSLALEGQEDHYNNLFASKVL

SEQ ID NO: 35710 - protein, 85 aa, Homo sapiens
  DOMAIN (43)..(71): Granins proteins domain identified by eMATRIX, accession number BL00422C, p-value=8.054e-13, raw score of 16.18
GCLRGSLERCGTLCKISLHEISGPESRVQQPLSSREEEEEEEEEEEEEEEEEEEEEEEEEEEEEEERKKECSKAQCKHFPLSEVL

SEQ ID NO: 35711 - protein, 204 aa, Homo sapiens
  DOMAIN (106)..(151): RIBOSOMAL PROTEIN 40S ZINC-FINGER METAL domain identified by eMATRIX, accession number PD01457A, p-value=5.941e-12, raw score of 16.51
MEKNEKEQEEEEKKEKNSKKKEEEEEEEGGGEEEEEEGEGGEEEEEEEEEEEEEEEEEEEEEEEEEEEEEEEEEEEEEEEEEEEEEEEEEEEEEEEEEEEEEEEEKKKKKKKKKKKKKKKKKKKKKKKKKKRKKKKKEEEEKVVEEEDEFIWFLGNSLYFPSFSHFAWSQIPSREDEGERRLRVNSMIMDFTSNTNHVQLIVAR

SEQ ID NO: 35712 - protein, 108 aa, Homo sapiens
  DOMAIN (9)..(60): Neuromodulin (GAP-43) proteins domain identified by eMATRIX, accession number BL00412D, p-value=3.104e-14, raw score of 16.54
PHEEEEEEEEQEEEEEEEEEEEEEEEEEEEEEEEEEEEEEEEEEEEEEEEEEEEEEEEEEEEEEEEEEEEEESLSDKHHPTTSSMEAWFQVAVMTAPPESRHLPWVPF

SEQ ID NO: 35713 - protein, 144 aa, Homo sapiens
  DOMAIN (93)..(128): Matrix protein (MA) p15. domain identified by eMATRIX, accession number PF01140D, p-value=2.360e-09, raw score of 15.54
LEEEKEEEKEEEKEEEKEEEEEEKEDEEGEEGEGGEGEEGEEGEEEEEEEEEEEEEEEEEEEEEEEEEEEEEEEEEEEEEEEEEEEEEEEEEEEEEEEEEEEEEEEEEEEEEEEEEEEEEEEEMIVLKIIVAKQLFEYSSISGI

SEQ ID NO: 35714 - protein, 481 aa, Homo sapiens
  DOMAIN (72)..(100): Granins proteins domain identified by eMATRIX, accession number BL00422C, p-value=5.622e-13, raw score of 16.18
MHVAWSCPTAQSSQATVDSGKTLAETESPIGLSSKVGGKNIRAGEWDELKYDRFPGQKPKKKKRKRKEEEEEEEEEEEEEEEEEEEEEEEEEEEEKKKKKKRKKKNAAIPPKPNLSHPGSLGLSCCRVTLGDKGGSSWQTFSQTACLGPASPVSSKQGCCCCCCRSRSCDVWRPFLGGQAAAWATDVSAPCRLQPSAAATEPVSGLTPRPRIHRGSGSRADRENPVSDMGPPCRHAAARLTREMVRGALKSRPPTRRKPQGEGPRRVTEWGIAGWSRSRSLSRTLRRSRRRRSRRRRLDAAPRPRPARPCPHSAQPPPPLPVRLDWPRGQPDPPTSGGSEDPPSAPAAGNPAPPLSSQRSPRSDGPDGLDPARALDLQAADPNPAVDTGPLKSLLGAVLQPEEGWRAHLGDGAAPAQIPPHGPDWHTCGPSCRVRSPLNQEPYEPGACAALGRGRRPKTTAGSAERGSGHRKVLRLVCGGQ

SEQ ID NO: 35715 - protein, 60 aa, Homo sapiens; identical to SEQ ID NO: 34324
  DOMAIN (1)..(52): Neuromodulin (GAP-43) proteins domain identified by eMATRIX, accession number BL00412D, p-value=4.273e-14, raw score of 16.54

SEQ ID NO: 35716 - protein, 78 aa, Homo sapiens
  DOMAIN (36)..(71): Matrix protein (MA) p15. domain identified by eMATRIX, accession number PF01140D, p-value=3.093e-09, raw score of 15.54
  misc_feature (1)...(78): Xaa = X or * as defined in Table 2
CLWLFQEEEEEEEEEEEEDXEEEEEEEEEEEEEEEEEEEEEEEEEEEEEEEEEEEEEEEEEEEEEEEEKIFLGHRVGI

SEQ ID NO: 35717 - protein, 422 aa, Homo sapiens
  DOMAIN (18)..(52): Amyloidogenic glycoprotein extracellular domain proteins domain identified by eMATRIX, accession number BL00319C, p-value= 2.500e-10, raw score of 17.12
MKKKEEEEGGRTRKEEEEEEEKEEEEEEEEEEEEEEEEEEEEEPNSFIPYCSPFLDFWFCFITNIQKNSFCKENKDKKVTESSSQRDKKLEQDTTTDSIVSKPIGEEISISLETIDKYLNSVLQCKHKQRSSKGLDSMQQQPVLVASPHPGNLSLKHYSDGSDGPSGAAAAMMPAAVRKAQLGRHAPWSQQKPGIGKSPTHFPVGRMGALCSPGTAAADQLLLWTLASLFSWGLGAGGSPALSVPAMEGACSVSGPAAALQEPALGDTHPAAADMPGRVQWLEPMLAPSHSPLCLAHPWQKLHPRSLNHFLNSQWIKLTYLYGVTFWFLVFRLSSPGFLVALSFSALNWWVLGLTDFKNEAVDPRGRQLRPGKNSSLAPALLRDSTAAGPGAKSLTAQGGGAGQLAASRVGPMEPTATQNSR

SEQ ID NO: 35718 - protein, 68 aa, Homo sapiens
  DOMAIN (2)..(37): Troponin domain identified by eMATRIX, accession number PF00992A, p-value=3.418e-11, raw score of 16.67
  misc_feature (1)...(68): Xaa = X or * as defined in Table 2
XEEEEEEEEEEEEEEEEEEEEEEEEEEEEEEEEEEEERSVAHVEPRTGYLFNSQQTLNTYHVRGTDPX

SEQ ID NO: 35719 - protein, 207 aa, Homo sapiens
  DOMAIN (32)..(60): Dehydrins proteins domain identified by eMATRIX, accession number BL00315A, p-value=6.642e-09, raw score of 9.35
  misc_feature (1)...(207): Xaa = X or * as defined in Table 2
EEGEVEEEGEEEEEEEEGEGEEEEEEEGEGEGEGEGEGEEEEEEEEEEEEEEEEEEEEEEEEEEEEEEEEEEEEEEQEEEEEEEEEEEEEEEEEAAAAAAASRDSHTSLELTYWPPCPALRDTLVSNCSLSSLCTSGDSFHWXETTIPAMSSCSHQHSLHQLGIIPRQILMRMASLMRRICEDHPATAEQXXHVXGPPDGPHEPRPE

SEQ ID NO: 35720 - protein, 168 aa, Homo sapiens
  DOMAIN (6)..(50): PROTEASE IMMUNOGLOBULIN PRECURSO domain identified by eMATRIX, accession number PD01781B, p-value=2.320e-09, raw score of 27.55
KHIQKKEEEEEEEEAEEEEEEEEEEEEEEEEEEEEEEEEEEEEEEEEEEEEEEEEEEEEEEEEEKCSLKHTEAPCVKGIETIFWNKLIYIKLDLRQFPDEPDRHAQAFQHLNQLFPLMCRNAVQLLSHISTTAEKQAAVQTAKEFEDEQLTSYSQSKNKQKRKMKMDE

SEQ ID NO: 35721 - protein, 199 aa, Homo sapiens
  DOMAIN (92)..(120): Granins proteins domain identified by eMATRIX, accession number BL00422C, p-value=6.625e-12, raw score of 16.18
MTAKCVCGWGVGEREREKEREEEEEEEEEEEEEEEEEEEEEEEEEEEEEEEEEEEEEEEEEEEEEEEEEEEEEEEEEEEEEEEEEEEEEEEEEEEEEEEEEEEEEEEEEEEEEEEKFKESMKHQRKLLLLLHPPAQTNHWYPLGNLGSHDCPNQSLEASAVICALIFLRLTTPTILLHGHKSPLVLTEVRVEFDLSPLQ

SEQ ID NO: 35722 - protein, 164 aa, Homo sapiens; identical to SEQ ID NO: 33334
  DOMAIN (43)..(78): Matrix protein (MA) p15. domain identified by eMATRIX, accession number PF01140D, p-value=7.488e-09, raw score of 15.54

SEQ ID NO: 35723 - protein, 290 aa, Homo sapiens; identical to SEQ ID NO: 35416
  DOMAIN (13)..(48): Troponin domain identified by eMATRIX, accession number PF00992A, p-value=3.418e-11, raw score of 16.67

SEQ ID NO: 35724 - protein, 98 aa, Homo sapiens
  DOMAIN (17)..(68): Neuromodulin (GAP-43) proteins domain identified by eMATRIX, accession number BL00412D, p-value=4.156e-14, raw score of 16.54
RGRRGRRRRRGRRRGRKEEEEEEEEEEEEEEEEEEEEEEEEEEEEEEEEEEEEEEEEEEEEEEEEEEEEEEEEEEEDRISHIQLGTEYGSPSSNILFK

SEQ ID NO: 35725 - protein, 217 aa, Homo sapiens
  DOMAIN (70)..(123): Clathrin light chain proteins domain identified by eMATRIX, accession number BL00224B, p-value=5.582e-09, raw score of 16.94
MQVRDFILEVSETKNPPEGTSYGHIKRMILSIMISRQHKEEEEEEERRRRKEKKGEERRRKEKKGEEEEEEEEEEEEEEEEEEEEEEEEEEEEEEEEEEEEEEEEEEEEEEEEEEEEGLSIKYMTSTKTLSDINGFEKLLPVHPILAVLEDAFSSSGKHDNKGKEEKQNRKQGIQDDREQKDVPQMMTMQAVQGDRTVGKSPKEKNIIEHLELRLNL

SEQ ID NO: 35726 - protein, 808 aa, Homo sapiens
  DOMAIN (209)..(220): PROTEIN REPEAT MUSCLE CALCIUM-BI domain identified by eMATRIX, accession number PD00301A, p-value=2.800e-09, raw score of 10.24
  DOMAIN (470)..(673): FtsK/SpoIIIE family domain identified by PFam, accession name FtsK_SpoIIIE, E-value=0.097, PFam score of -41.0
MEYYASIKKDEFMSFAGTWKKLETIILSKLSQELSHVLTHRGSLCDDPVVRGASPLWEAVRSSVSLQLGTSLPNDSHCNRGTVPVLFNDLSMSVTLPSLKAITTEPCIAKECFVILTIFIECPLHARLLSACYKTRWLPQCIQEGDGDIFRAQWEKKRHQLGVHQKHKKKSIKIMRVSKRSRRRKKKKEEEENKKKRRRRRKDEDKKKEDEEEEEEEERRKKKKKKKKRRRRRRRRRRRRRRRRKKKKKKKKKKKKNKKKKKKKKKKKKKKKKKKKKKKNKKNKKNQTRVDEDKVKKKEKAETIVKNYFQMLQVGGRKESKEKKNERERKKKKRKKKKRKKKRKKKNNKKKKKKKETEETEETEETEEDEDKEGKRKDKRMDKMKEIDDTRDEQRYQGYCDAMMLHNLSPLRMNPRAISSIHLGMQLMRDALSANPDLDGVFCTNDDIAMDLSRQHALGYFLFITRILFAGRCLYSRQETGGYLMSEPLLNARTPDTELFLLPGMANRHGLITGATGTGKTLARLLNLNDVQSGVLNIIFRIADDQGLLLLDFKDLRAITQYIGDNAKSFQNQYDWMRTDANGKGVINILSAEKLYQMPKLYAASLLWMLSELYEQLPEAGDLEKPKLVFFFDEAHLLFNDAPQVLLDKIEQVIRLIRSKGVGVWFVSQNPSDIPDNVLGQLGNRVQHALRAFTPKGQKAVKAAAQTMRANPAFDTEKAIQELGTGEALISFLDAKGSPSVVERAMVIAPCSRMGPVTEDERNGLINHSPVYGKYEDEVDRESAYEMCKKAFRPVPSSKIILPRKGKR

SEQ ID NO: 35727 - protein, 165 aa, Homo sapiens
  DOMAIN (109)..(162): Clathrin light chain proteins domain identified by eMATRIX, accession number BL00224B, p-value=6.452e-10, raw score of 16.94
  misc_feature (1)...(165): Xaa = X or * as defined in Table 2
SPFTNSRLTIFISFSECGQIAEIYILSQPFMVRIMATEPPIINLQPGNFTLDIVSRDHTTALXPGRQEQNSVSKKKEEEEEEEEEEEEEEEEEEEEEEEEEEEEEEEEEEEEEEEEEEEEEEEEEEEEEEEEEEEEEEEEEEEEEEEEEEEEEEEEEEKKKKRRR

SEQ ID NO: 35728 - protein, 558 aa, Homo sapiens
  DOMAIN (182)..(203): PROFILIN SIGNATURE domain identified by eMATRIX, accession number PR00392C, p-value=6.523e-11, raw score of 18.98
  DOMAIN (158)..(254): Profilins domain identified by PFam, accession name profilin, E-value=2.4e-16, PFam score of 63.3
MPSPNHIFLRVSGIFAIEKVILGHPHLYSHSGLHRKVLKHKVHESRPGIMILQQIVAGGGILTEYHTLQVTITLFSQFSADGFGGCSQSFATRLHTPECNTRLREEDLLIASTSQPTIPKMQRDLLPTATKDCDSPDYQAGRVHFQLTSELREPFSTCLDAAIVGYKDLPSIQATIPGKTFINVKPAEVDVLVGKDWSSFFVNEVTLGGQKCSVIWDLLLQDGELTYLYTKSTDGAPTFNVTVTMTARMLVLAVEEHCPLFPEKGTLDVELWDRVGAKFRELVPTGNYVPVTVWGDWALAQLTGSNNYSDTTAQLGFDALTVEQVTKGHNELYPDFLAKLQDAVEKSVSDEHAQGILLRMLAFENANHECKMAMHSVQQQNLPDREVLPEYIKYEGIGSDTKLFCAHKAILWARAMKDGNQTGSTDSFLGACYNCGQLGHTRKNCTVKNLKAAKPAQKTQPNAPATVCPCCCKVSPHIDLPATQNYSCWAYVPFPPLIQPLTWMDAPAEIYTNDSVWMPGATDDRCPTQPGKEGTAFNVPTVINTLLCASDMHLVVSI

SEQ ID NO: 35729 - protein, 102 aa, Homo sapiens
LLILDEPTNDLDVETLELLEELIDSYQGTVLLVSHDRQFVDNTVTECWIFEGGGKIGRYVGGYHDARGQQEQYVALKQRSAMIHLKSFQVLRKLGLLCFLDV

SEQ ID NO: 35730 - protein, 143 aa, Homo sapiens
  DOMAIN (93)..(109): Ank repeat proteins domain identified by eMATRIX, accession number PF00023A, p-value=9.571e-11, raw score of 16.03
  DOMAIN (20)..(120): Ank repeat domain identified by PFam, accession name ank, E- value=1.6e-10, PFam score of 48.4
SRIMLMLVKALADQRAKNQDGMNALHFATHSNHVRIVEYLIQDLHLKDLNQPDEKGRKPFLLAADRGHVETIEKLTFLNLHTSEKDKGGNTALHLAAKHGHSPAVQVLLAQWQDINEMNELNISSLQIATRNGHASLVNFLLR

SEQ ID NO: 35731 - protein, 195 aa, Homo sapiens
  DOMAIN (135)..(151): Ank repeat proteins domain identified by eMATRIX, accession number PF00023A, p-value=9.571e-11, raw score of 16.03
  DOMAIN (17)..(162): Ank repeat domain identified by PFam, accession name ank, E- value=6.6e-13, PFam score of 56.3
MLMLVKAGADQRAKNQDGMSALHFATQSNHVRIVEYLIQDLHLKDLNQPDEKGRKPFLLAAERGHVEMIEKLTFLNLHTSEKDKIQWSTLWTAALTKMKTSRNSIAALTIEGACSPGTGVSTSSVSLLQGGNTALHLAAKHGHSPAVQVLLAQWQDINEMNERQGLALSPRLEYSGMGDAAFLKECPTVVSKIFF

SEQ ID NO: 35732 - protein, 236 aa, Homo sapiens
MAIPAMESCDDLLYYEPLAYYCSQGQPPRTVSSNIDSETNQFVKNSQAIEVFYGTLKGRTKTTGWKLPRTLASTNHTAKMVRLADLSVASLILHNSDHQELLELLFGPAGGIPLSASCSRCFHPPAPPQSSKEDSSNSQVSKLREKLQLISALTNKPESNRPPETADEGGWKQREQLALEWMPPAGPKKAPELLVVIVVEDKAATENQRAKAGEVFCSASTARWTLFKVLPMEATL

SEQ ID NO: 35733 - protein, 197 aa, Homo sapiens
  DOMAIN (111)..(138): Glycosyl hydrolases family 31 proteins domain identified by eMATRIX, accession number BL00129B, p-value=9.410e-13, raw score of 19.19
  DOMAIN (1)..(179): Glycosyl hydrolases family 31 domain identified by PFam, accession name Glyco_hydro_31, E-value=8e-79, PFam score of 270.7
TQAMPPLFSLGYHQCRWNYEDEQDVKAVDAGFDEHDIPYDAMWLDIEHTEGKRYFTWDKNRFPNPKRMQELLRSKKRKLVVISDPHIKIEPDYSVYVKAKDQGFFVKNQEGEDFEGVCWPGLSSYLDFTNPKGSTDILFLWNDMNEPSVFRGPEQTMQKNAIHHGNWEHRELHNIYGFYHVRHPKRIKLGLCDPPFG

SEQ ID NO: 35734 - protein, 124 aa, Homo sapiens
LRDMWIIDPFDFDEHFDKCLNYLPHYRTSAEFHRTAWMLHLCHLIQEAALYISTVIEKGGGQLSRIFMFEKVSTRELDPSALKGCMFLCVFGLPGDKKPDECAHALESSFSIFSFCWENLAKTN

SEQ ID NO: 35735 - protein, 211 aa, Homo sapiens
  DOMAIN (57)..(104): kw TRANSCRIPTASE REVERSE II ORF2 domain identified by eMATRIX, accession number DM01354V, p-value=1.000e-40, raw score of 12.97
MIVYLENPTVSAQNLLKLVSNFSKVSGYKINVQTSQAFLYTNNRQTESQIMSELPFTIATKRIKYLGIQLTRDVKDLFKENYKLLLNEIKEDTIKWKNIPCSWVGRINIVKMAILPKLALFKTLVREPIGLGDFRISLIMQEQRNQAKIRLRNQVGGARSPPSELRPNGGGDCSLEAKAEASSGDHPTDTEMDDEQKSNTARSQSHVETEA

SEQ ID NO: 35736 - protein, 210 aa, Homo sapiens
  DOMAIN (102)..(147): Integrase core domain identified by PFam, accession name rve, E-value=0.00025, PFam score of 19.0
CKLLGDSAALGYGLGSGLFHVSLSLDQQQISMLFSQMAEVQAAKPNHASTFKASLCIVCLHSIESQPQSLCRLPVRSSTSPQLKALSGKSAWCHNRLSGEPGYKYLLVFVDTFTGRVKGFPTCTEKAVEVCKPSLKEVISQFGLPKSPQSGNRLSFMVLGTGLRKSNYETKVMEYPTSGRNTEQLIDSLLAASQTTKWPINQENQRNQIR

SEQ ID NO: 35737 - protein, 45 aa, Homo sapiens
GSVGVMTMECAAVRARGAVRRCVSISSESLVRSGGWPGLLPAVLF

SEQ ID NO: 35738 - protein, 175 aa, Homo sapiens
MADQKQLQLETPTKEKEKGCSGLTCLAPPRWCCCPSPIGVLCPTGCQLQEALLQQERPIRNSVDELNNNVEAVSQTSSSSFQYMYLLKDLWQKRQKQVKGRYPCAFHSIFSYKIGTVRLPRECMVVRRLTFLVWDHDPTRVVGLIIGLGPRSHLYCRSDYQRETTIPSMPVKGKY

SEQ ID NO: 35739 - protein, 167 aa, Homo sapiens
  DOMAIN (4)..(43): PROTEIN ZINC FINGER ZINC-FINGER METAL-BINDING NU domain identified by eMATRIX, accession number PD01066, p-value=1.170e-26, raw score of 19.43
  DOMAIN (41)..(145): Zinc finger, C2H2 type domain identified by PFam, accession name zf-C2H2, E-value=7.4e-28, PFam score of 106.0
MVTFKDVAVVFTREELGLLDLAQRKLYQDVMLENFRNLLSVECGKSFGRSAHLQAHQKVHTGDKPYKCDECGKGFKWSLNLDMHQRSVHTGEKPYKCDVCGKVFSRSSQLQSHQRVHTGEKPYKCEICGKSFSWRSNLTVHHRIHVGDKSYKSNRGGATAGLVNLND

SEQ ID NO: 35740 - protein, 153 aa, Homo sapiens
  DOMAIN (83)..(97): 1 kw CHROMO BROMODOMAIN SHADOW GLOBAL domain identified by eMATRIX, accession number DM00547B, p-value=2.145e-13, raw score of 11.28
  DOMAIN (68)..(133): SNF2 and others N-terminal domain identified by PFam, accession name SNF2_N, E-value=3.1e-12, PFam score of 48.0
RPKPVAGVGDSAANTPGVTGWKWRGWIIMPRVHNIKKSLTPHISCVTNESDNLLDFLPDRLRAKLLPFQKDGIIFALKRNGRCMVADEMGLGKTIQAIGITYFYKEEWPLLIVVPSSLRYPWTEEIEKWIPELSPEEINVIQNKTDVRRMSTS

SEQ ID NO: 35741 - protein, 88 aa, Homo sapiens
  misc_feature (1)...(88): Xaa = X or * as defined in Table 2
MLCCLEISSTRYPKSSLSSSKFHKSLGQGQNAASLFAKTXRESPLLQFPASSSSPSETTSAWTLLFISLSAFLTKAFNKSLGGSKLSH

SEQ ID NO: 35742 - protein, 197 aa, Homo sapiens
  misc_feature (1)...(197): Xaa = X or * as defined in Table 2
NLGRGSQTSILDFCAPAGLIPCGSCQGLGLPHSEATARAVYWPLSAMAGVAGTQGTKSLDSSLFAKTXQESPLLRFPTSSSSPSETTSAFILLFISLSEFLSKPFNKSLGGSKLSHIFVSSSEPSKLSQPLHMPIQARISSFTSGHTDDSTVLFSVLLKLPLPVPSQAFSLKPGSIVMLLSSWSDNFNIPSISDSDA

SEQ ID NO: 35743 - protein, 371 aa, Homo sapiens
  DOMAIN (237)..(251): 1 kw CHROMO BROMODOMAIN SHADOW GLOBAL domain identified by eMATRIX, accession number DM00547B, p-value=2.145e-13, raw score of 11.28
  DOMAIN (240)..(287): SNF2 and others N-terminal domain identified by PFam, accession name SNF2_N, E-value=2.6e-11, PFam score of 44.7
MWESLEPPRDLLNGCDKIADSYMNNKIQAEVVSDGDEELVGNWSKGDSCYVLAKRLTALCPCPRDLWNFELERDELGYLAEEISKQKRIQEVTWVLLKAFRFKRETEHKSLENLQPDDAVEKKNLFLEEKFKLAAEICISSKEPNVNPKDHGENVSRPCQRPSQQPLPSQAWRPRRKKWFCGPGPRTWCLVSQPLQPWLKGATVELGLWLQRVEAPSLGSVHLLLSLQVHRNQELRCMVADEMGLGKTIQAIGITYFYKEEWPLLIVVPSSLRYPWTEEIEKWIPELSPEEINVIQNKTDVSWISDCCASNERGSVGGGPSEPVNRSLEPHLSNLLVLFCLVDHKAAITVPDLASLRDAGRKEEDKTTCAN

SEQ ID NO: 35744 - protein, 112 aa, Homo sapiens
LKKALDEANFRSVEVSRTNRELRQKLAELEKILESNKEKIKNQKTQIKLHLSAKANNAQNIERMKVVWETSSHFLDTLVTFRLPICPFRVDCTGLCSFGISGLDGKESSAGT

SEQ ID NO: 35745 - protein, 226 aa, Homo sapiens
VTFRLPICPFRVDCTGLCSFGISGLDGKESSAGTERDADVAKSQYDASVRNKQQELHLEAERKIRQELENRCQELEETVRHLKKCKEATENTLKEASVESEQITANLEEAHRWFKHRFDGLQLELTKNRLQRPSGEDRWQEKPKLWHLCFGKAGGCEEDRPGAGDREAAAQVPEIDHEHLMEAAAVRIPNTLEEVKRNPIIIKTPQYTIFVYLPTMLKIAFACTVL

SEQ ID NO: 35746 - protein, 76 aa, Homo sapiens
DPKLPVPAELSFPSSPLIPKEQSPVQSTRKGQIGSRNVTLAANEKSNIYTAVTPLKKSPQRQLAIIPREYMGLVRF

SEQ ID NO: 35747 - protein, 199 aa, Homo sapiens
MAVTTSTGVLANLSEKQRVLSASEEPDQSKLYDTQDVENMNDDDGWQHVNLGDQQRFGIKTSGLEAKVTACQMLVYYAKELREGFVNYTEQVVKLMVPLLKFYFQDNVRVAAAESMPFLLECARICGPEYLAQMWQFIRNPLIKAIGTEPDTDVLSEIMNSFAKFTEVMGDDCLNDEYLEELGGTLRAKLEGHFKNEEL

SEQ ID NO: 35748 - protein, 1105 aa, Homo sapiens
MPATASAGVPATVSEKQEFYQLLKNLINPSCMVRRQAEEIYENIPGLCKTTFLLDAVRNRRAGYEVRQMAAALLRRLLSSGFEEVYPNLPADVQRDVKIELILAVKLETHASMRKKLCDIFAVLARNLIDEDGTNHWPEGLKFLIDSIYSKNVVLWEVALHVFWHFPGIFGTQERHDLDIIKRLLDQCIQDQEHPAIRTLSARAAAAFVLANENNIALFKDFADLLPGILQAVNDSCYQDDDSVLESLVEIADTVPKYLGPYLEDTLQLSLKLCGDSRLSNLQRQLALEVIVTLSETATPMLKKHTNIIAQAVPHILAMMVDLQDDEDWVNADEMEEDDFDSNAVAAESALDRLACGLGGKVVLPMTKEHIMQMLQSPDWKYRHAGLMALSAIGEGCHQQMESILDETVNSVLLFLQDPHPRVRAAACTTLGQMATDFAPNFQKKFHETVIAALLRTMENQGNQRVQSHAASALIIFIEDCPKSLLVLYVDSMVKNLHSVLVIKLQELIRNGTKLALEQLVTTIASVADTIEEKFVPYYDIFMPSLKHIVELAVQKELKLLRGKTIECISHIGLAVGKEKFMQDASNVMQLLLKTQSDLNNMEDDDPQTSYMVSAWARMCKILGKDFQQYLPLVIEPLIKTASAKPDVALLDTQDVENMSDDDGWQFVNLGDQQSFGIKTSGLEAKATACQMLVYYAKELREGFVEYTEQVVKLMVPLLKFYFHDNVRVAAAESMPFLLECARIRGPEYLAQMWQFICDPLIKAIGTEPDTDVLSEIMNSFAKSIEVMGDGCLNDEHLEELGGILKAKLEGHFKNQELRQVKRQEENYDQQVEMSLQDEDECDVYILTKVSDILHSLFSTYKEKILPWFEQLLPLIVNLICSSRPWPDRQWGLCIFDDIIEHCSPTSFKYVEYFRWPMLLNMRDNNPEVRQAAAYGLGVMAQFGGDDYRSLCSEAVPLLVKVIKCANSKTKKNVIATENCISAIGKILKFKPNCVNVDEVLPHWLSWLPLHEDKEEAIQTLSFLCDLIESNHPVVIGPNNSNLPKIISIIAEGKINETINYEDPCAKRLANVVRQVQTSEDLWLECVSQLDDEQQEALQELLNFA

SEQ ID NO: 35749 - protein, 204 aa, Homo sapiens
  DOMAIN (73)..(87): LEUCINE-RICH REPEAT SIGNATURE domain identified by eMATRIX, accession number PR00019B, p-value=7.840e-09, raw score of 11.36
MDQPSGRSFMQVLCEKYSPENFPYRRGPGMGVHVPATPQGSPMKDRLNLPSVLVLNSCGITCAGDEKEIAAFCAHVSELDLSDNKLEDWHEMYLPIYGRYHELITKYGKLEPLAEVDLRPQSSAKVEVHFNDQVEEMSIRLDQTVAELKKQLKTLVQLPTSNMLLYYFDHEAPFGPEEMKYSSRALHSFGIRDGDKIYVESKTK

SEQ ID NO: 35750 - protein, 40 aa, Homo sapiens
MHKYNGNNYISLKRKSVNTTTAHLGTIRHRAIFPRHQSVS

SEQ ID NO: 35751 - protein, 221 aa, Homo sapiens
MAPPRCPRPPAPPPSPPRLSLSSQCRTEPSPHANAIWRDPVQLLGAASPALNLPVCGSRGKKSGEKRMKRIVSVLGEEVDDFFEQEKNFLINYDNRIKDSCVKADKMTRSHKSRPRTPAQDRPAARPPELRAEEARWLFPQRVGGAFSLLPARSILVVYSRPSLTPHPHSLLYEYLTKKKKEEEERLGVMFTSSSTDPFTSGEIIYNSLYNSLFGGTGGSN

SEQ ID NO: 35752 - protein, 136 aa, Homo sapiens
  DOMAIN (58)..(103): Ribosomal protein S24e proteins domain identified by eMATRIX, accession number BL00529B, p-value=1.000e-40, raw score of 20.08
  DOMAIN (26)..(108): Ribosomal protein S24e domain identified by PFam, accession name Ribosomal_S24e, E-value=2.2e-48, PFam score of 174.2
  misc_feature (1)...(136): Xaa = X or * as defined in Table 2
IAIMNDTVAIRTRKFMTNRLLERKQMVIDVLHPGKATVPKTEILEKLAQMYKTTPDVIFVFGFRTHCGGGKTTGFGMIYDSLDYAEKNEPKHRLARHGLYEKKKTSXKQRQERTNRMKKVRGTAKANVVAGXKPNE

SEQ ID NO: 35753 - protein, 64 aa, Homo sapiens
GKTTGFGMIYDCLDYAKKNEPKHRRARHGLYEKKKTSRKQRKERKNRMKKVRGTAKANVGAGKK

SEQ ID NO: 35754 - protein, 177 aa, Homo sapiens
  misc_feature (1)...(177): Xaa = X or * as defined in Table 2
TPGSTTTTKFPTASTSEDRSPIMNDTVTIPHXEKFMTQPTYFRGNQMVIDVLSPPGKGDQCPKHRKFGKKLAQNVPRPTPDVIFVFWIQNFIFGGGKTTGFGMIYGFPGIYAKEKMNPDHRLCKDMGLVLRKEKGPSRKANGKGTARNRIGRKVPGGTGKGPNVGCWAKRRNEVSSS

SEQ ID NO: 35755 - protein, 732 aa, Homo sapiens
  DOMAIN (623)..(637): C2H2-TYPE ZINC FINGER SIGNATURE domain identified by eMATRIX, accession number PR00048A, p-value=1.391e-10, raw score of 10.52
  DOMAIN (626)..(649): Zinc finger, C2H2 type domain identified by PFam, accession name zf-C2H2, E-value=0.013, PFam score of 22.1
  misc_feature (1)...(732): Xaa = X or * as defined in Table 2
ARGLSMGHXFPPHFQCALAXMPAPGRGPPPPLPPCPDAPPACAATMERPEAGLRVAPRSPVQPGCTSVLPVAKRFNARILWLKRPQRQLWSLWRAQATVSLGGFHVMLSLQVHRINARVKEAWQLPPRFQMMYQKAWVLRQKPAAAVEPSQRNSPRAMLGGNVGLEPPPRVSTRALPSGAVGRGLPPSRPKNDTATGSLHPELGKAADIQFHPVRAATGASPCKSIGTELPKALGAHVLLQCALDVGHGVEGELWSFKTRQPSDFSIFSPPFPPFYSTKPPLSSWPIPNEPLGTPPRRGRGGAEGLLTSQCSHILNGLCFTGGINSNECENVSRKKKMSEEFEANTMDSLVDMPFATVDIQDDCGIFFDVWKLRVNCQEILANRHPGRAMRKVVLTKTSWEGESLAVGKLPLKRLVSLDCQLRCLQCECGILIRQHVVWLERTTGHWHPRSSQSCRLNTTSTALEHCNAFIYNTVCSHKLKDHSHDNGKSSGFLNPVAAPHSCIVMGHLTLLITTSYYTPLTKPDTDPTLKKEGLISQDSSSLEVLLHTDPLGKRGTPDPRVDDDSLGKFPVTNSQARKRILEPDDFLDDLDDEYCEDAPKHRGKGCGSAHKELDASNLEDQDKPYACDICGKRYKNRPGLSYHYAHSHLAEEGEDKEDSQPPTPVSQRSEEQKSKKGPDGFALPNNYCNFCLGNSKINKKMGQPEEVVSCFDCGCSGHPSCLHFTPMMMGQ

SEQ ID NO: 35756 - protein, 193 aa, Homo sapiens
  DOMAIN (90)..(125): Prion protein domain identified by eMATRIX, accession number BL00291A, p-value=3.169e-10, raw score of 4.49
  misc_feature (1)...(193): Xaa = X or * as defined in Table 2
FSPLIHLILSGHSTCFREHRVGGKVTDQQDPKAEEFFLVQNKMKSLPCLLLSTQTRQPSDFSIFSPPFPPFYSTKPPLSSWPVLNELLGTPPRRGGGRAEGPPHFPVGGPGRGAPSPPRRGGWPGGGLTPQPPSRTGRLAGRGADPPTSLPDGAAGRAGGXPHHLPPGRGGWPGRGAPHFPVGVAGQRRLFIC

SEQ ID NO: 35757 - protein, 94 aa, Homo sapiens
KVSHVYFYPHRPRNHPISQFFPHPSRLSIPQNRHCHHGPSRNEPLGTPPRPGSWPGRGAPHFPETFNHGRRWKGSRHVFTWPEQEREWGSATHF

SEQ ID NO: 35758 - protein, 218 aa, Homo sapiens
  DOMAIN (144)..(195): KH domain identified by PFam, accession name KH-domain, E- value=1.2e-11, PFam score of 52.1
MMSNRRCKENRDLKVQRLFQQDRGNRGSGQMCSGDCQSGSTTLTPGEECNWQEEATTLSVSLPDELQDLSIALAVIAHRHRVEYTLTYHAYWATRSGTGVRRHCGNFRKISLMNDPQLPHYTLRHSYDARTDRRALSSNQVTLKMDVSHTEHSHVIGKGGNNIKKVMEETGCHIHFPDSNRNNQAEKSNQVSIAGQPAGVESARVRIRVTIYYFNIVN

SEQ ID NO: 35759 - protein, 142 aa, Homo sapiens
MRFKERSCLHNIEVQSEAGSSDGEAAASDLEALAKIIDEGYTAGGSKKDPLTPFKERRRKNKEDSGILDTSSATAGHQRTSTSINTILENMTSPNEIDKAPGTNSGETEICDFSDREFKMAVLRKVKEIQDNTEKEFRILSD

SEQ ID NO: 35760 - protein, 182 aa, Homo sapiens
MFAGVLSAGNDEFRVMLNMLACTTFSSKAELFEYRHGEASAYTPNCPRKYAQPVPPGVGLPLKSNCVHCGRITHPKKALRDRHLGCPEKIPRLTGPWATISVPTISKKATGNHSILTIPGPDTKLMQNSGKSTFKRTQIDHLMNVLVLWWSTERWTNYGIKALHRGARLMVDTGVFIKISLD

SEQ ID NO: 35761 - protein, 153 aa, Homo sapiens
MGKFVLVLKRGGSLAKDVPNHGFRVGMKLEAVDLMEPRLICVATVTRIIHRLLRIHFDGWEEEYDQWVDCGVRRSFSGDEELTPPPYRTLPAQTAPEAFPPPSTSREFSPSLKTVTTLQLKEELLDGEDYNFLQGASDQESNGSANFYIKQEP

SEQ ID NO: 35762 - protein, 115 aa, Homo sapiens; identical to SEQ ID NO: 34208
  DOMAIN (25)..(72): kw TRANSCRIPTASE REVERSE II ORF2 domain identified by eMATRIX, accession number DM01354V, p-value=1.000e-40, raw score of 12.97

SEQ ID NO: 35763 - protein, 416 aa, Homo sapiens
  DOMAIN (141)..(188): kw TRANSCRIPTASE REVERSE II ORF2 domain identified by eMATRIX, accession number DM01354V, p-value=1.000e-40, raw score of 12.97
  DOMAIN (1)..(154): Reverse transcriptase domain identified by PFam, accession name rvt, E-value=0.0044, PFam score of -25.8
MKPQTLAVSVTVLEDGVSRLCSFRCSDVSGVFSFQWVRGLADFTSEAADLCMLEVLARAIRQEKEIKGIQLGKEEVKLSLFADDMIVYLENPIVSAQNLLKLISNFSKVSGYKINVQKSQAFLYTNNRQTESQIMSELPFTIASKRIKYLGIQLTREVKDLFKENYKPLLKEIKEDTNKWKNIPCSWVGRINIVKMAILPKFIYRFNAIPIKLPMTFFTELEKTTLKFIWNQKRPRIAKSILSQKNKAGAITLPDFKLYYKATVTKTAWYWYQNRDIDQWNRIEPSEITLHTYNYLIFEKPEKNKQWGKDSLFNKWCWENWLAICRKLKLDPFLTPYTKINSRWIKDLNVRPKTIKTLEENLGITIQDIGMGKDFMSKTPKAMATKDKIDKWDLIKLKSFCTAKETTIRVNRQPTK

SEQ ID NO: 35764 - protein, 419 aa, Homo sapiens
  DOMAIN (144)..(191): kw TRANSCRIPTASE REVERSE II ORF2 domain identified by eMATRIX, accession number DM01354V, p-value=1.000e-40, raw score of 12.97
MGTVWLDQKCSGHPAGSGGVEVSRGSVMAANSSGGWWAETTESTELQRWRLPFPPGTWSQLRQIPACCHRLAGIPSQETDEVESHHSQQTNTGTENQTPHVLTHKWELKNENTWTQGGEHHSPGPVEGVSMPTESQIMSELPFTIASKRIKYLGIQLTRDVKDLFKENYKPLLNEIKEDTNKWKNIPCSWVGRINIVKMAILPKGIYRFNAIPIKLPMTFFTELEKTTLKFIWNQKRARIAKSILSQKNKAGGITLPNFKLYYKATVTKTAWYWYQNRDIDQWKRTEPSEIMPHIYNYLIFDKPEKDKQWGKDSLFNKWCWENWLAICRKLKLDPFLTPYTKINSRWIKDLNVRFKTIKTLEENLGITMRDIGMGKDFMSKTPKAMATKAKIDKWDLIKLKCFCTAKETTIRVNRQPTK

SEQ ID NO: 35765 - protein, 552 aa, Homo sapiens
  DOMAIN (189)..(234): kw TRANSCRIPTASE REVERSE II ORF2 domain identified by eMATRIX, accession number DM01354N, p-value=1.000e-40, raw score of 13.17
  DOMAIN (204)..(452): Reverse transcriptase domain identified by PFam, accession name rvt, E-value=3.6e-48, PFam score of 173.5
MGDFNTPLSTLDRSTRQKVNKDTQELNSALHQADLIDIYRSLHAKSTEYTFFSAPHHTYSKIDHILGSKALLSKCKRTEIITNYLSDHSAIKLELRIKNLTQNRSTTWKLNNLLLNDYWIHDEMKAEIKMFFETNENKDTTYQNLWDAFKATASKTNKEKEKNQIDTIKNDKGDITTDPTEIQTTIREYYKHLYANKLENLEEMDKFLDTYTLPRLNQEEVESLNRPITGAEIVAIINSLPTKKSPGPDGFTAEFYQRYKEELHINRAKDKNHMIISIDAEKAFDKIQQPFMLKTLNKLGIDGTYFKIIRAIYDKPTANIILNGQKLEAFPLKTGTRQGCPLSPLLFNIVLEVLARAIRQEKEIKGIQLGKEEVKLSLFADDMTVYLENPIVSAQNLLKLISNFSKVSGYKINVQKSQAFLYTNNRQTESQIMSELPFTIASKRIKYLGIQLTRDVKDLFKENYKPLLKEIKEDTNKWKNIPCSWVGRINIMKMAILPKVIYRFNAIPIKLPMTFFTELEKTTLKFIWNQKRARIAKAILSQKNEAGGITLP

SEQ ID NO: 35766 - protein, 237 aa, Homo sapiens
  DOMAIN (121)..(168): kw TRANSCRIPTASE REVERSE II ORF2 domain identified by eMATRIX, accession number DM01354V, p-value=1.000e-40, raw score of 12.97
  DOMAIN (2)..(137): Reverse transcriptase domain identified by PFam, accession name rvt, E-value=0.075, PFam score of -43.2
  misc_feature (1)...(237): Xaa = X or * as defined in Table 2
TEPKTKTTXLSQXMQKKPLTKFNNPSCXKLSINIVLEVLARAIRQEKEIKGIQLGKEEVKLSLFADDMIVYLENPIVSAQNLLKLLSNFSKVSGYKINVQKSQAFLYTNNRQTESQIMSELPFTIASKRIKYLGIQLTRDVKHLFKENYKPLLKEIKEDTNKWKNIPCSWVGRINIVKMAILPKVIYRFNAVPIKLPMTFFTELEKTTLKFIWNQKRACIAKSILSQKNKAGGITLP

SEQ ID NO: 35767 - protein, 339 aa, Homo sapiens
  DOMAIN (193)..(240): kw TRANSCRIPTASE REVERSE II ORF2 domain identified by eMATRIX, accession number DM01354V, p-value=1.000e-40, raw score of 12.97
  DOMAIN (39)..(206): Reverse transcriptase domain identified by PFam, accession name rvt, E-value=4.1e-06, PFam score of 17.2
MRRKMVQNKIGELDRKGEEEEEEEVGDGDDDDDAADVIAVDGVLDMNGAESLYHQPINAGTENPTLHVLTYKWELNDENTWTHGWGRHINGTKDKNHMIISIDAEKAFDKIQQRFMLKTLNKFGIDGTYLKIIRDDMIVYLENPIVSAQNLLKLISNFSKVSGYKINVQKSQAFLYTNNRQTESQIMSELPFTIASKRIKYLGIQLTRDVKDLFKENYKPLLNEIKEDTNKWKNIPCSWVGRINIVKIAILPKVIYRFNAIPIKLPMTFFTELEKTSLKFIWNQKRALITKSILSLKNKAGGIMLPDFKLYYKATVTKTAWYWYQNRDIDHGTEQSPQK

SEQ ID NO: 35768 - protein, 525 aa, Homo sapiens
  DOMAIN (95)..(142): kw TRANSCRIPTASE REVERSE II ORF2 domain identified by eMATRIX, accession number DM01354V, p-value=1.000e-40, raw score of 12.97
  misc_feature (1)...(525): Xaa = X or * as defined in Table 2
MDKFLDTYTLPRLNQEEVESLNRPITGAEIVAIINSLPTKKSPGPDGFTAEFYQRLISNFSKVSGYRINVQESQAFLYTINRQTESQIMSALPLTIASKRIKYLGIQLTRDVKDLFKENYKPLLNEIKEDTNKWKNIPCSWVGRINIVKMAILPKELEETTLKFIWNQKRARIAKSILSQKNKAGGITLPDFKLYYKATVTKTAWYWYQNRDRDQWNRTEPSEIMPHIYNYLIFDKPEKNKQWGKDSLFNKWCWENWLAICRKLKLDPFLTPYTRINSRWIKDLHVRRKTIKTLEENLGNTIQDIGMGKDFMSKTPKAMATKAKIDKWDLIKLKSFCTAKETTIRVNRQPTKWEKIFATYSSDKGLISRIYNELKQIYKKKTNNPIKKWAKDMNRHFSKEDIYAAKKHMKKCSSSLAIREMQIKTTMRYHLTPVRMAIIKKSGNNRCAPGTPERQNHSLSWKGSXSQEPSGLAQWIPLPWSPASXDPLAXNSCCQHSCLKSTWDAQACARKLRTLIKGYRNCQLE

SEQ ID NO: 35769 - protein, 328 aa, Homo sapiens
  DOMAIN (199)..(246): kw TRANSCRIPTASE REVERSE II ORF2 domain identified by eMATRIX, accession number DM01354V, p-value=1.000e-40, raw score of 12.97
  DOMAIN (74)..(106): FATC domain identified by PFam, accession name FATC, E-value= 1.3e-13, PFam score of 58.7
VLLYDPLFDWTMNPLKALYLQQRPEDETELHPTLNADDQECKRNLSDIDQSFNKVAERVLMRLQEKLKGVEEGTVLSVGGQVNLLIQQAIDPKNLSRLFPGWKAWCKASWTSGLHRHFKDEKDKNTENNCDKTSRGTIRQQHSRFMKIRGSADTAADTQLISNFSKVSGSKINVQNSEAFLYTNTRQTESQIMSELPFTIASKRIKYLGIQLTRDVKDLFKENYKPLLNEIKEDTNKWKNIPCSWIGRINIVKMAILPKRASTTEETLNNQMYKVTLALRASQHALGHPSACAISSSTEESLWHGWKPSARNHGPFLRKTNLAASTAE

SEQ ID NO: 35770 - protein, 521 aa, Homo sapiens
  DOMAIN (7)..(54): kw TRANSCRIPTASE REVERSE II ORF2 domain identified by eMATRIX, accession number DM01354V, p-value=1.000e-40, raw score of 12.97
MSELPFTIASKRIKYLGIQLTRDVKDLFKENYKPLLNEIKEDTNKWKNIPCSWVGRINIVKMAILPKMLLHKYSSYRNCESNILSPNKSIQCNAKENLLNEDNYCAKMVFILPFAFENRKIQDYSANVMIHLRPPHHTYSKIDHIVGSKALLSKCKRTEIITNCLSDHSAIKLELRIKKLTQNCSTTLKLNNLLLNDYWVHNKMKAEIKTFFETNESKDTTQQNVWDTFKAVCRGKFIALNAHKRKQERSKIATLTSQLKELEKQEQTHSKAGRQEITKIRAELKEIETRKTLQKINESRSWFFEKINKIHRLLARLIKKKREKNQIDAIKNDKGDITTDPTEIQTTIRGYYKHHYTNKLENLEEMHKFLDMYTLPRLNQEEVESLNRPIIGSEIEAIINGLTTKKKSRTRRILSRILPERIKYLGIQLTKDVKDLFKENYKPLLNEIKEDTNKWKNIPCSWTGIINIVKMAIVPKSLTMLPLVIGSLGAREPEVTESIEFSLSTHRICSNRELPAQNAKH

SEQ ID NO: 35771 - protein, 483 aa, Homo sapiens
  DOMAIN (154)..(197): kw TRANSCRIPTASE REVERSE II ORF2 domain identified by eMATRIX, accession number DM01354T, p-value=1.000e-40, raw score of 9.48
  DOMAIN (36)..(276): Reverse transcriptase domain identified by PFam, accession name rvt, E-value=7.3e-36, PFam score of 132.6
MELKDKARELREECRSLRSRCDQLEEKVSVMEDEINEMKLNQEEVESLNRPITGSEIVAVINSSPTKKSPGPDGFTAKFYQRYKEELHINRAKDKNHMIISIDVEKAFDKIQQPFMLKTLNKLGIDGTYLKIIRTIYDKLTANIILNGQKLEAFPLKTGTRQGCPLSSLPFNIVLEVLARAIRQEKEIKGIQLGKEEVKLSLFVDDMIVYLENPIVSAQNLLKLISNFSKVSGHKINVQNSQAFLYTNNRQTESQIMSELPFTIASKRIKYLGIQLTRDVKDLFKENYKPLLNEIKEDINNWKNIPCSWVGRINIVKMDILPKVIYRPNAIPIKLPRTFFTELEKTTLNFIWNQKRACIAKSILSQKNKAGGIMLPDFKLYYKATVTKTAWYWYQNRDIDQWNRTEPSEVTLHIYNYLIFDKPEKNKQWGKDSLFNKWCWENWLAICRKLKLDPFLTPYTKINSKWIKDLNVTPKTIKTLEET

SEQ ID NO: 35772 - protein, 534 aa, Homo sapiens
  DOMAIN (208)..(255): kw TRANSCRIPTASE REVERSE II ORF2 domain identified by eMATRIX, accession number DM01354V, p-value=1.000e-40, raw score of 12.97
  DOMAIN (28)..(209): "Phage" integrase family domain identified by PFam, accession name Phage_integrase, E-value=4e-12, PFam score of 53.7
MIHNREKKTVNGVKFPDNPVPYVEERDFLLTTYVYKRTSRLFSQKLRNNGELGRDKGKYSKVGEKIRNRSTEGPQGLWAAHIKCREVHEKDHLKVLFKKRPHRQRGDEVFIRDKLMERRNRRTGRTEKARIWEVTDRTVRTWIGEAVAAAAADGVTFSVPVTPHTFRHSYAMHMLYAGIPLKVLQSLMGHKSISSTEVYTKVFALDVAARHRRIKYLGIQLTRDVKDLFKQNYKPRLKEIKEDTNKWKNIPCSWVERIYIVKMAILPKELYEHMNSSLGGASLEGSQVYLVLEVLARAIRQEKEIKSIQLGKEEAKLSLFADKMIVYLENPIVSAQNLLKLISNFSKVSGYKINVQKSQAFLYTNNRQTESQIMSELPFTIASKRIKYLGIQLTRDVKDLFKQNYKPLLKEIKEDTNKWKNIPCSWVGRINIVKMAILPKVIYRFNAIPIKLPMPFFTELEKTTLKFIWNQKRARIAKSILSQKNKAGGITLPDFKLYYKATVTKTAWYWYQNRDIDQWDRTEPSEICRISTAI

SEQ ID NO: 35773 - protein, 522 aa, Homo sapiens; identical to SEQ ID NO: 31745
  DOMAIN (291)..(334): kw TRANSCRIPTASE REVERSE II ORF2 domain identified by eMATRIX, accession number DM01354T, p-value=1.000e-40, raw score of 9.48
  DOMAIN (112)..(413): Reverse transcriptase domain identified by PFam, accession name rvt, E-value=3.2e-27, PFam score of 103.9

SEQ ID NO: 35774 - protein, 229 aa, Homo sapiens
  DOMAIN (7)..(54): kw TRANSCRIPTASE REVERSE II ORF2 domain identified by eMATRIX, accession number DM01354V, p-value=1.000e-40, raw score of 12.97
MSELPFTIASKRIKYLGIQLTRDVKDLFKENYNPLLNEIKEDTNEWKNIPCSWVGRINIVKMAILPKATVTKIAWYWYQNRDIDQWNRTERSEIMPHIYNYLIFKKPEKNKQWGKDSLFDKWCSENWLAICRKLKLDPFLTPYTKINSRWIKDLNVRPKTIKTLEENLGITIQDIGIGKDFMSKTPKAMATKAKIDKWDLIKLKFCTAKETTIRVNRQSTKWEIISSLD

SEQ ID NO: 35775 - protein, 639 aa, Homo sapiens
  DOMAIN (56)..(111): kw TRANSCRIPTASE REVERSE II ORF2 domain identified by eMATRIX, accession number DM01354Q, p-value=1.000e-40, raw score of 9.23
  DOMAIN (1)..(284): Reverse transcriptase domain identified by PFam, accession name rvt, E-value=8.2e-52, PFam score of 185.6
MDKFLDTYTLPRLNQEEVESLNRPITGAEIVAIINSLPTKKSPGPDGFTAKFYQSKILANQIQQHIKKLTHQDQVDFIPGMQGWFNIRKSINVIQHINRSKDKNHMIISIDAEKAFDKIQQHFMLKTLNKLRIDGTYLKIIRAIYDKPTANIILNGQKLEAFPLKTGTRQGCSLSPLLFNIVLEVLARAIRQEKEIKGIQLGKEEVKLSLFADDMIVYLENPIVSAQNLLKLISNFSKVSGYKINVQKSQAFLYTNNRQTESQIMSELPFTIASKRIKYLGIQLTRDVKDLFKENYKPLLKEIKEDTNKWKNIPCSWVGRINIVKMAILPKIIYRFNAIPIKLPMTFFTELEKTTLKFIWNQKRARIAKAILSQKNKAGGITLPDFKLYYKATVTKTAWYWYQNRDIDQWNRTEPSEITLHIYNFLIFDKPEKNEQWGKDSLFNKWCWENWLAICRKLKLDPFLTPYTKINSRWIKDLNVRPKTIKTLEENLGITIQDIGMGKDFMSKTPKAMATKAKIDKWDLIKLKNFCTAKETTIRVNRQPTKWEKIFTTYSSDKGLISRIYNELQQIYKKKTNNPIKKWAKDMNRHFSKEDIYAAKKHMKKCSPSLAIREMQIKTTMRYHVTPVRMATIKKSGNN

SEQ ID NO: 35776 - protein, 472 aa, Homo sapiens
  DOMAIN (57)..(100): kw TRANSCRIPTASE REVERSE II ORF2 domain identified by eMATRIX, accession number DM01354T, p-value=1.000e-40, raw score of 9.48
  DOMAIN (1)..(179): Reverse transcriptase domain identified by PFam, accession name rvt, E-value=1.3e-14, PFam score of 62.0
MIILIDAEKAFDKIQQPFMLKTLSKLGTDGTYLKIIRAIYDKPTANIILNGQKLEAFPLKTGTRQGCPLSPLLFNIGLEDLARAIRQEKEIKGIQLGKEEVKLSLFADDMIVYLENPIVSAQNLLKLISNFSKVSGYKINVQKSQAFLYTNNRQTESQIMSELPFTIASKRIKYLGIQLTRDVKDLFKENYKPLLKEIKEDTNKWKNIPCSWVGRINIVKMAILPRDIDQWNRTEPSEIMPHTYNYLIFDKPEKNKQWGKDSLFHKWCWENWLAVCRKLKLDPFLTPYTKINSRWIKDLNIRPKTIKTLEENLGITIQDIGVGKDFMSKAPKAMATKAKIDKWDLIKLKSFCTAKETTIRVNRQPTTWEKIFATYSSDKGLISGIYNELKQIYKKKTNNPIKKWAKDMNRHFSKEDIHAAKKHMKKCSSSLAIREMDIKTTMRYHLTPVRMAIIKKSGNNRCWRGCGEIGTL

SEQ ID NO: 35777 - protein, 270 aa, Homo sapiens
  DOMAIN (224)..(270): kw TRANSCRIPTASE REVERSE II ORF2 domain identified by eMATRIX, accession number DM01354V, p-value=1.000e-40, raw score of 12.97
  DOMAIN (1)..(237): Reverse transcriptase domain identified by PFam, accession name rvt, E-value=1.6e-05, PFam score of 8.7
MGDFNTPLSTLDRSRKQKVNKDIQELNSALHQADLKDIYRTLHPKSTEYTFFSAPHHTYSKIDHIVGSKALFSKCKRTEIITNCLSDHSAIKLELRIKKLTQNRSTTWKLNNLLLNDYWVHNEMKAEIKMFFETMLEVLARAIRQEKEIKGFQLGKEEVKLSLFADDMIVYLENPINSAQNLLKLISNFSKVSAYKITVQKSQAFLYTNNRQTKSQLMSELPFTIASKRIKYLGIQLTKDMKDLFKENYKPLLNEIKEDTNKWKNIPCSW

SEQ ID NO: 35778 - protein, 426 aa, Homo sapiens
  DOMAIN (57)..(104): kw TRANSCRIPTASE REVERSE II ORF2 domain identified by eMATRIX, accession number DM01354V, p-value=1.000e-40, raw score of 12.97
MVDKLFDVLLDSVCQYFIEDFCIKVSGYKINVQKSQAFLYTNKRQTESQIMGELPFTIASKRIKYLGIQLTRDVKDLFKENYKPLLKEIKEDTNKWKNIPCSWVGRINIVKMAILPKVIYRFNAIPIKLPMTFFTELEKTTLKFIWNQKRARIAKSILSQKNKAGGITLPDFKLYYKATVIKTAWYWYQNRDIDQWNRTEPSEIMPHIYNYLIFDKPEKNKQWGKDSLFNKWCWENWLAICRKLKLDPFLTPYTKINSRWIKDLNVKPKTIKTLEENLGITIQDIGVGKDFMSKTPKAMATEDKIDKWDLIKLKSFCTAKETTIRVNRQPTTWEKIFATYSSDKGLISRIYNELKQIYNKKTNNPIKKWAKDMNRHFSKEDIYAAKKHMKKCSSSLAIREMQIKTTMRYHLTPVRMAIIKKSGNNS

SEQ ID NO: 35779 - protein, 523 aa, Homo sapiens
  DOMAIN (57)..(100): kw TRANSCRIPTASE REVERSE II ORF2 domain identified by eMATRIX, accession number DM01354T, p-value=1.000e-40, raw score of 9.48
  DOMAIN (1)..(179): Reverse transcriptase domain identified by PFam, accession name rvt, E-value=4e-14, PFam score of 60.4
MIISIDAEKTFDKIQQPFMLKTLNQLGIDGTYLKIIRAIYDKPTANITLNGQKLEAFPLKTGTRQGCPLSPLLFNIVLEVLARAIRQEKEIKGIQLGKEEVKLSLFADDMIVYLENPIVSAQNLLKLISNFSKVSGYKINVQKSQAFLYTNNRQTESQIMSELPFTTASKRIKYLGIQLTRDVKDLFKENYKLLLNEIKEDTNKWNNIPCSWVGRINIVKMAILPKVIYRFNAIPIKLPMTFFTELEKTTLKFIWNQKGARIAKSILSQKNKAGGITLPDFKLYYKATVTKTAWYWYQNRDIDQWNRTEPSEIMPHIYNYLIFDKPEKNKQWGKDSLLNKWCWENWLAIWRKLKLDPFLTPYTKINSRWIKDLNIRPKTIKTLEENLGITIQDIGMCKDFMSKTPKAMATKAKIHKWDLIKLKSFCTAKETTIRVNRQPTKWENIFPTYSSDKGLISRIYNELKHIYKKKTNNPIKKWAKDMNRHFSKEDIDAAKKTHEKMLTINGHQRNANQNHNELSSHTS

SEQ ID NO: 35780 - protein, 465 aa, Homo sapiens
  DOMAIN (194)..(240): kw TRANSCRIPTASE REVERSE II ORF2 domain identified by eMATRIX, accession number DM01354O, p-value=1.000e-40, raw score of 8.73
  DOMAIN (229)..(463): Reverse transcriptase domain identified by PFam, accession name rvt, E-value=1.2e-05, PFam score of 10.3
MFFEANENKDTTYQNLWDAFKAVCRGKFIALHAHKRKQERSKIDTLTPQLKELEKQEQTHSKASRRQEITKIRAELKEIETQRTLQKINESRSWFFEKSNKIDRPLAGLIKKKREKNQIDAIKNDKGDITTDPTEIQTTIRQYYKNLYANKLEKLEEMDKFLDTSTLPRLNQEEVESLNRPITGSEIKAIINSLPTKKSPGPDGFTAEFYQRYKEELVSFLLKLFQSVEEKGILPNSFYEASIILIPKPGRDTIKKENFRPISLMNLDAKILNKILANQIQQHIKKLIQHDQVGYIPGMQGWFNLCKSINVIQHIKRTNDKNHMIISKDAETAFDKIQQFFILKILNKLGIDERQTESQIVSELPFTTASKRIKYLGIQLTRDVKDLFKENYKPLLNEIKEDTNKWKNIPCSWEGRINIVKMAILPKIIYRFNAIPIKLPMTFFTQLEKTTLNFIWNQKRARIAK

SEQ ID NO: 35781 - protein, 548 aa, Homo sapiens
  DOMAIN (83)..(126): kw TRANSCRIPTASE REVERSE II ORF2 domain identified by eMATRIX, accession number DM01354T, p-value=1.000e-40, raw score of 9.48
  DOMAIN (2)..(205): Reverse transcriptase domain identified by PFam, accession name rvt, E-value=8.1e-36, PFam score of 132.4
NFRPISLMNIDAKILNKILGAKDKNHMIISIDAEKAFDKIQQPFMLKTLNKLGIDGTYFKIIRAIYDQPTANIILNGQKLEAFPLKTGTRQGCPLSPLLFNIVLEVLARAIRQEKEIKSIQLGKEEAKLSLFADKMIVYLENPIVSAQNLLKLISNFSKVSGYKINVQKSQAFLYTNNRQTESQIMSELPFTIASKRIKYLGIQLTRDVKDLFKQNYKPLLKEIKEDTNKWKNIPCSWVGRINIVKMAILPKVIYRFNAIPIKLPMPFFTELEKTTLKFIWNQKRARIAKSILSQKNKAGGITLPDFKLYYKATVTKTAWYWYQNRDIDQWNRTEPSEIMPHIYSYLIFDKPEKNKQWGKDSLFNKWCWENWLAICRKLKLDPFLTPYTKINSRWIKDLNVRPKTIKTLEENLGITIQDLGMGKDFMSKTPKAMATKDTIDKWDLIKLKSFCTAKETTIRMNRQPTKWEKIFTSYSSDKGLISRIYNELKQIYKKKTNNPIKKCQQASQLKALPTQSCSPSSNSYETFLVSPLHPFQFYISFPHYTEM

SEQ ID NO: 35782 - protein, 253 aa, Homo sapiens
  DOMAIN (7)..(54): kw TRANSCRIPTASE REVERSE II ORF2 domain identified by eMATRIX, accession number DM01354V, p-value=1.000e-40, raw score of 12.97
  DOMAIN (39)..(119): ParB-like nuclease domain identified by PFam, accession name ParBc, E-value=0.054, PFam score of 5.2
MSELPFTIASKRIKYLGIQLTRDVKDLFKENYKPLLNEIKEDTNKWKNIPCSWVGRINIVKMAILPKTPAFGRRVSGVIEIADGSRCRKAAALTESDYRVLVGELDDEQMAALSRLGSDYRPTSAYERGQRYASRLQNEFAGNISALADAENISRKIITRCINTAKLPKSVVALFSHPGELSARSGDALQKAFTDKEELLKQQASNLHEQKKAGVIFEAEEVITLLTSVLKTSSASRTSLSSRHQFAPGATVL

SEQ ID NO: 35783 - protein, 987 aa, Homo sapiens
  DOMAIN (126)..(171): kw TRANSCRIPTASE REVERSE II ORF2 domain identified by eMATRIX, accession number DM01354N, p-value=1.000e-40, raw score of 13.17
  DOMAIN (210)..(485): Reverse transcriptase domain identified by PFam, accession name rvt, E-value=2.2e-81, PFam score of 283.8
DAFKAVCRGKFIALNAHKRKQERSKIDTLTSQLKELEKQEQTHSKASRRQEITKIRAELKEIETQKTLQKINESRSWFFERINKIDRPLARLIKKKREKNQIDTIKNDKGDITTDPTEIQTTIREYYKHLYANKLENLEEMDTFLDTYTLPRLNQEEVESLNRPITGAEIVAIINSLSTKKSPGPDGFTAEFYQRYKEELVPFFLKLFQSIEKEGILPNSFYEASIILIPKPGRDTTKKENFRPISLMNIDAKILNKILANQIQQHIKKLIHHDQVGFIPGMQGWFNIRKSINVIQHINRAKDKNHMIVSIDAEKAFDKIQQPFMLKTINKIGIDGMYFKIIRAIYDKTTANIILNGQKLEAFPLKTGTRQGCPLSPLLFNIVLEFLARAIRQEKEIKGIQLGKEEVKLSLFADDMIVDLENPIVSAQNLLKLISNFSKLSGYKINVQKSQAFLYTNNRQTESQIMSELPFTIASKRIKYLGIQLTRDVKDLFKENYKPLLKEIKEDTKKWKNTPCSWVGRINIVKMAILPKVIYRFNAIPIKLPMTFFTELEKTTLKFIWNQKRARIAKSILSQKNKAGGITLPDFKLYYKATVTKTAWYWYQNRDIDQWNRTEPSEITPLTYNYLIFDKPEKNKQWGKDSLFNKWCWENWLAICRKLKVDPFLTPYTKINSRWIKDLNVRPKTIKTLEENLGITIQDIGVGKDFMSKTPKAMATKAKIDKWDLIKLKSFCTAKETTIRVNRQPTTWETIFTTYSSDKGLISRIYNELKQIYKKKTNNPIKKWAKDMNRHFSKEDIYAAKKHMKKCSSSLAIREMQIKTTMRYHLTPVRMAIIKKSGNNRCWRGCGEIGTLLHCWWDCKLVQPLWKSVWRFLRDLELEIPFDPAIPLLGIYPNDYKSCCYKDTCTRMFIAALFTIAKTWNQPKCPTMIDWIKKMWHIYTMEYYAAIKNDEFMSFVGTWMKLETIILSKLSQEQKTKHRIFSLIGGN

SEQ ID NO: 35784 - protein, 674 aa, Homo sapiens
  DOMAIN (109)..(154): kw TRANSCRIPTASE REVERSE II ORF2 domain identified by eMATRIX, accession number DM01354N, p-value=1.000e-40, raw score of 13.17
  DOMAIN (124)..(372): Reverse transcriptase domain identified by PFam, accession name rvt, E-value=1.2e-42, PFam score of 155.1
MGKRQSRKTGNSKKQSASPPPKEHSSSLAMEQSWTENDFDKLREEGFRRSNYSELREEIQTKGKEVKNCEKHLDECITRITNTEKCLKELMDLKAKARELQIQTTIRESYKHLYANKLENLEEMDKFLDTYTLPRLNQEEFESLNRPITGSEIVAIINSLPTKKSPGPDGFTAEFNQRYKEELHINRTKDKNHMIISIDAEKAFDKIQQRFMLKTLNKLGIDGTYLKIIRAIYDKPTANIILNGQKLEAFPLKTGTRQGCPLSPLLFNIVLEVLARAISQEKEIKGIQLGKEEVKLSLFADDMIVDLENPIVSAQNLLKLISNFSKVSGYKINVQKSQAFLYTNNRQTESQIMSELPLTIASKRIKYLGIQLTRDVKDLFKENYKPLLNEIKEDTNKWKNIPCSWVGRINILKMAILPKVTDRFNAIPIKLPMTFFTELEKTTLKFIWKQKRARMAKSILSQKNKAGGITLPDFKLYYKATVTKTAWYWYQNRDIDQWNRTEPSEITPHIYNYLIFDKPEKTKQWGKDSLFNKWCWENWLAICRKLKLDPFLTPYTKINSRWIKDLHVRPKTIKTLEENLGISIQDIGMGKDFMSKTPKAMTTKAKIDKWDLIQLKSFCTAKETTIRVNRQPTKWEKIFTTYSSDKGLISRIYNELKQIYKKKQTTPSKSGQRT

SEQ ID NO: 35785 - protein, 1221 aa, Homo sapiens
  DOMAIN (387)..(432): kw TRANSCRIPTASE REVERSE II ORF2 domain identified by eMATRIX, accession number DM01354N, p-value=1.000e-40, raw score of 13.17
  DOMAIN (473)..(746): Reverse transcriptase domain identified by PFam, accession name rvt, E-value=1.8e-87, PFam score of 304.0
EHSSSPATEQRWTENDFDELREEDFRRSNYSELWEDIQTKGKEVENFEKNLEECITRITNTEKCLKELMELKTKARELRKECRSLRSRCNQLEERVSAMEDGMNEMKQEGKFREKRIKRNKQSLQEIWDYVKRPNLRLIGVPESDGENGTKLENTLQDIIQENFPNLARQANIQIQEIQRTRQRYSSRRATPRHIIVRFTKVEMKEKMLRAAREKGRVTHKGKPIRLTADLSAETLQARREQKPSFFETNENKDTTYQNLWDAFKAVCRGKFIALNAHKRKQERSKIDTLTSQLKELEKQEQTHSKASRRQEITKIRAELKEIETQKTIQKINESRSWFFERINKIDRPLARLTKKKREKIQIDAIKNDKGDITTDPTEIQTTIREYYKHLYANKLENLEEMDKFLDTYTLPRLNQEEVESLNRPITGSEIVAIINSLPTKKSPGPDGFTAEFYQRYKEELVPFLLKLFQSTEKEGILPNSFYEASIILIPKPGRDTTEKENFRPISLMNIDAKILNKILPNRIQQHIKNLLHHDQVGFIPGMQGWFNICKLINVIQHINRTKDKNHMIISIDAEKAFDKIQQPFMLKTLNKLGIDGTYLKIIRAIYDKPTANIIWNGQKLEAFPLKTGTRQGCPLSPLLFNIVLEVLARAIRQEKEIKGIQLGKEEVKLSLFADDMIVYLENPIVSAQNLLKLISNFSKVSAYKINVQKSQAFLYTNNRQTESQIRSELPFTIASKRIKYLGIQLTRDVKDLFKENYKPLLNEIKEDTNKWKNIPCSWVGRINIVKMAILPKIIYRFNAIPIKLPMTFFTELEKTTFKFIWNQKRARIAKSILSQKNKAGGITLPDFKLYYKATVTKTAWYWYQNRDIDQWNRTEPSEITPPIYNYLIFDNPEKNKQWGKDSLFNKWCWENWLAICRKLKLDPFLTPYTKINSRWIKDLKVRPKTIKTLEESLGITIQDIGMCKDFMSKTPKAMATKAKIDKWDLIKLKSFCTAKETTIRLGVELHKHPCGHHHYDTTGSDLKPAQHWVSPKAYYNHSQAIANVHSRPCDFTISMWQSQSGLCPSLQDGKVSHALGRLAPLWPREGPEMPSKYQVLESGTPSILLMLYPSVAMLVPKVQDKVTFTFPSTFLKQMEFLHAASTAGEGRGGVASEIQDCFFYLFSASLSDMKLKPGTVDAHWTFGSYEAIIAKNSGKSMVSLPLASTSLIISRNSASDPVTS

SEQ ID NO: 35786 - protein, 754 aa, Homo sapiens; identical to SEQ ID NO: 32653
  DOMAIN (208)..(254): kw TRANSCRIPTASE REVERSE II ORF2 domain identified by eMATRIX, accession number DM01354O, p-value=1.000e-40, raw score of 8.73
  DOMAIN (241)..(418): Reverse transcriptase domain identified by PFam, accession name rvt, E-value=6.7e-11, PFam score of 49.6

SEQ ID NO: 35787 - protein, 747 aa, Homo sapiens
  DOMAIN (322)..(368): kw TRANSCRIPTASE REVERSE II ORF2 domain identified by eMATRIX, accession number DM01354O, p-value=1.000e-40, raw score of 8.73
  DOMAIN (355)..(630): Reverse transcriptase domain identified by PFam, accession name rvt, E-value=1.4e-76, PFam score of 267.8
MVVKVWKYYVLDNIDSATLKVLEVLARAIRQEKEIKGIQLGKEEVKLSLFADDMIVYLENPIVSAQNLLKLISNFSKVSGYKINVQKSQAFLYTNNRQTESQIMSELPFTIASKRIKYLGIQLTRDVKDLFKQNYKPLLNEIKEDTNKWKNIPCSWVGRINIVKMAILPKERSSSPATEQSWMENDFDELREEGFRRSNFSELKEKVRTHHKQDKNLEKRSWFFEKINKIDRPLARLIKKKREKSQINAIKNDKGDITADPTEIQTTITEYYKHLYANKLENLEAMDKFLDTYTLPRINQEEVESLNRPITGSETEAIINSLPTKKSPGPDGLTAEFYQRYKEELVPFLLKLFQSIEKERILPNSFYEGIILLIPKPGRDNTKKDNFKPISLMNMDAKILNKILANRIQQHIKKLIHHDQVGFIPGMQGWFNICKSINVIQHINRTKDKNHMIISTDAGKAFDKIQQPFMLKTLNKLGIDGMNLKIIRAIYDKPTANIILNRQKLEAFPLKTGTRQGCPLSPLLFNIVLEVLARAIRQEKEIKGIQLGKEEVKLSLFADDMIVYLENPIVSAQNLLKLISNFSKVSGYKISVQKSQAFLYTNNRQTESQIMSEIPFPIASKRIKYLGIQLTRDVKDLFKENCKPLLKEIKENTNKWKNIPCSWIERINIVKMAILPKVIYSFNAIPIKHPMTFFTELEKTTLKFIWNQKRARITKSILRQKNKAGGITLPEFKLYYKTTVTKIAWYG

SEQ ID NO: 35788 - protein, 826 aa, Homo sapiens; identical to SEQ ID NO: 34822
  DOMAIN (465)..(511): kw TRANSCRIPTASE REVERSE II ORF2 domain identified by eMATRIX, accession number DM01354O, p-value=1.000e-40, raw score of 8.73
  DOMAIN (498)..(773): Reverse transcriptase domain identified by PFam, accession name rvt, E-value=3e-80, PFam score of 280.0

SEQ ID NO: 35789 - protein, 689 aa, Homo sapiens
  DOMAIN (156)..(201): kw TRANSCRIPTASE REVERSE II ORF2 domain identified by eMATRIX, accession number DM01354N, p-value=1.000e-40, raw score of 13.17
  DOMAIN (221)..(496): Reverse transcriptase domain identified by PFam, accession name rvt, E-value=2.9e-78, PFam score of 273.4
MELKTKARELREECRSLRSRCDQLEERVSAMEDEMNEMKREGKFREKRIKRNEQSLQEIWDYVKRPNLHLIGVPETDGENGTKLENTLQDIIQENFPNLARQANVQIQEIQRTPQRYSSRRATPRHIIVRFTKVEMKEKMLRAAREKEIQTTIREYYKHLHANKLENLEEMDKFLDTYTLPRLNQEKVESLNRPITGAEIVAIINIYQPKRVQDQMDSQPNFTREGILPNSFYEASIILIPKLGRDTAKKENFRPISLMNIDAKILNKILAKRIQQHIKKLIHHDQVGFIPGMQGWFNIRKSINVIQHVNRTKDKNHMIISIDEEKAFDKIQQPFMLKTLNKLGIDGMYFIIIRAIYDKPTAHIILNGKKLEAFPLKTGMRQGCPLSPLLFNIVFKVLARAIRQEKEIKGIQLGKEEFKLSLFADDMIVYLENPIVSAQNLLKLISNFSKVSGYKINVQKSQTFLYTNNRQTESQIMSELPFTIASKRIKYLGIQLTRDVKDLFKENYKPLLKEIKEDTNKWKNIPCSWVGRINIVKMAILPKVIYRFNAIPIKVPMTFFTELEKTTLKFIWNQKRACIAKSILSQKNKAGGITLPDFKLYYKATVTKTAWYWYQNRDIDQWNRTEPSEITPHIYNYLIFDKPEKNKQWGKDSLFNKWCWENWLAICRKLKLDPFLTPYTKINSRWIKD

SEQ ID NO: 35790 - protein, 996 aa, Homo sapiens; identical to SEQ ID NO: 32532
  DOMAIN (302)..(343): kw TRANSCRIPTASE REVERSE II ORF2 domain identified by eMATRIX, accession number DM01354I, p-value=1.000e-40, raw score of 15.55
  DOMAIN (514)..(792): Reverse transcriptase domain identified by PFam, accession name rvt, E-value=5.9e-63, PFam score of 222.6

SEQ ID NO: 35791 - protein, 686 aa, Homo sapiens
  DOMAIN (92)..(137): kw TRANSCRIPTASE REVERSE II ORF2 domain identified by eMATRIX, accession number DM01354N, p-value=1.000e-40, raw score of 13.17
  DOMAIN (176)..(384): Reverse transcriptase domain identified by PFam, accession name rvt, E-value=6.1e-47, PFam score of 169.4
MQKNYLCRHSKASRRQEITKIRAELKEKETQKTLQKINEPRSWFFERINKIDRPLARLIKKKREKNQIDAIKNDKGDITTDPTEIQTIIREYYKHLYANKLENLEEMDKFLDTYTLPRLNQEEVESLNRPTTGSEIVAIINSLPTKKSPGPDGLTAEFYQRYKEELVPFLLKLFQSIEKEGILPNSFYEASIILIPKPGKDTTKKENFRPISLMNIDAKILNKILANRIQQHIKKLIHHDQVGFIPGIQGWFNIRKSINVIQHINRTKDKNHMIISIDAEKAFDKIQQPFMLKTLNKLGIDGTYLKIIRAIYDKPTANIIRNGQKLEAFPLKTGTRQGCPLSPLPFNIVLEVLARAIRQTESQIMSELPFTIASKRIKYLGIQLTRDVKDLFKENYKPRLNEIKEDTNKWKNIPCSWVGRINIVKMAILPKVIYRFNAIPIKLPMTFFTELEKTTLKFIWNQKRARITKSILSQKNKAGGITLPDFKLYYKATVTKTAWYWYQNRDIDQWNRTEPSEITPHIYNYLIFDKPEKNKQWGKDSLFNKWYWENWLAICRKLKLDPFLTPYTKINSRWIKDLNVRPKTIKTLEENLGITIQDIGMGKDFMSKTPKAMATKAKIDKWDLIKLKSFCTAKETTIRVNRQPTKWEKIFATYSSDKGLISRIYNELKQIYKKKQTTPSKSGRRT

SEQ ID NO: 35792 - protein, 713 aa, Homo sapiens
  DOMAIN (50)..(96): kw TRANSCRIPTASE REVERSE II ORF2 domain identified by eMATRIX, accession number DM01354O, p-value=1.000e-40, raw score of 8.73
  DOMAIN (83)..(358): Reverse transcriptase domain identified by PFam, accession name rvt, E-value=1.5e-87, PFam score of 304.3
MKAEIKMFFETNENKDTTNQNLWDAFKAEEVESLNRPITGAEIGAIINSLPTKKSPGPDGFTAEFYQRYKEELVPFLLKLFQSIEKEEILPNSFYEASIILIPKPGRDTTKKENFRPISLMNIDAKILNKILANRIQQHIKKLIHHDQVGFFPGMQGWFNIRKSINVIQHINRAKDKNHMIISIDAEKAFDKIQQPFMLKTLNKLGIDGTYFKIIRAIYDKPTANIILNGQKLEAFPLKTGTRQGCPLSPLLFNILLEVLARAIRQEKEIKGIQLGKEEVKLSLFADDMIVYLENPIVSAQNLLKLISNFSKVSGYKINVQKSQAFLYTSNRQTESQIMSELPFTIASKRIKYLGIQLTRDVKDLFKENYKPLLKEIKEDTNKWKNIPCSWVGRINIVKMAILPKVIYRFNAIPIKLPMTFFTELEKTTLKFIWNQKRAHITKSILSQKNKAGGITLPDFKLYYKATVTKTAWYCYQNRDIDQWNRTEPSEITPHTYNYLIFDKPEKNKQWGKDSLFNKWCWENWLAIWRKLKLDPFLTPYTKINSRWIKDLNVRPKTIKTLEENLGITIQDIGMGKDFMSRTPKAMATKAKIDKWDLIKLKSFCTAKETTIRVNRQPTTWEKIFATYSSDKGLISRIYNELKQIYKKKTNNPIKKWEKDMNRHFSKEDIYAAKKHMKKCSSSLAIREMQIKTTMRYHLTPVRMAIIKKSGNN

SEQ ID NO: 35793 - protein, 133 aa, Homo sapiens
  DOMAIN (7)..(54): kw TRANSCRIPTASE REVERSE II ORF2 domain identified by eMATRIX, accession number DM01354V, p-value=1.000e-40, raw score of 12.97
MSELPFTIASKRIKYLGIQLTRDVKDLFKENYKPLLNEIKEDTNKWKNIPCSWVGRINIVKMAILPKMLLHKYSSYRNCESNILSPNKSIQCNAKENLLNEDNYCAKMVFILPFAFENRKIQDYSANVMIHLR

SEQ ID NO: 35794 - protein, 835 aa, Homo sapiens
  DOMAIN (146)..(191): kw TRANSCRIPTASE REVERSE II ORF2 domain identified by eMATRIX, accession number DM01354N, p-value=1.000e-40, raw score of 13.17
  DOMAIN (232)..(505): Reverse transcriptase domain identified by PFam, accession name rvt, E-value=1.8e-87, PFam score of 304.0
QKPSFFETNENKDTTYQNLWDAFKAVCRGKFIALNAHKRKQERSKIDTLTSQLKELEKQEQTHSKASRRQEITKIRAELKEIETQKTIQKINESRSWFFERINKIDRPLARLTKKKREKIQIDAIKNDKGDITTDPTEIQTTIREYYKHLYANKLENLEEMDKFLDTYTLPRLNQEEVESLNRPITGSEIVAIINSLPTKKSPGPDGFTAEFYQRYKEELVPFLLKLFQSTEKEGILPNSFYEASIILIPKPGRDTTEKENFRPISLMNIDAKILNKILPNRIQQHIKNLLHHDQVGFIPGMQGWFNICKLINVIQHINRTKDKNHMIISIDAEKAFDKIQQPFMLKTLNKLGIDGTYLKIIRAIYDKPTANIIWNGQKLEAFPLKTGTRQGCPLSPLLFNIVLEVLARAIRQEKEIKGIQLGKEEVKLSLFADDMIVYLENPIVSAQNLLKLISNFSKVSAYKINVQKSQAFLYTNNRQTESQIRSELPFTIASKRIKYLGIQLTRDVKDLFKENYKPLLNEIKEDTNKWKNIPCSWVGRINIVKMAILPKIIYRFNAIPIKLPMTFFTELEKTTFKFIWNQKRARIAKSILSQKNKAGGITLPDFKLYYKATVTKTAWYWYQNRDIDQWNRTEPSEITPPIYNYLIFDNPEKNKQWGKDSLFNKWCWENWLAICRKLKLDPFLTPYTKINSRWIKDLKVRPKTIKTLEESLGITIQDIGMCKDFMSKTPKAMATKAKIDKWDLIKLKSFCTAKETTIRLGVELHKHPCGHHHYDTTGSDLKPAQHWVSPKAYYNHSQAIANVHSRPCDFTISMWQSQSGLCPSLQDGKVSHAL

SEQ ID NO: 35795 - protein, 256 aa, Homo sapiens
  DOMAIN (126)..(173): kw TRANSCRIPTASE REVERSE II ORF2 domain identified by eMATRIX, accession number DM01354V, p-value=1.000e-40, raw score of 12.97
  DOMAIN (1)..(139): Reverse transcriptase domain identified by PFam, accession name rvt, E-value=0.01, PFam score of -31.0
MNIDAKILNKTLANRIQQHIKKLIHHDQVGFIPGTQVLEVLARAIRQEKEIKGTQLGKEEVKLSLFADDMIVYLENPIVSAQNLLKLIGNFSKVSGYKINVQKSQAFLCTNNRQTESQIMSELPLTIASKRIKYLGIQLTRDVKHLFKENYKPLLNEIKEDTNKWKNIPCSWVGRINIVKMAILPKMLHSAENKQWLSPKQRGGSMENRIDVWNIVLKGLSTSSNTVLDSSPIVLVTDSPGHIYIDLCGTYNNREN

SEQ ID NO: 35796 - protein, 509 aa, Homo sapiens; identical to SEQ ID NO: 34820
  DOMAIN (237)..(284): kw TRANSCRIPTASE REVERSE II ORF2 domain identified by eMATRIX, accession number DM01354V, p-value=1.000e-40, raw score of 12.97
  DOMAIN (46)..(250): Reverse transcriptase domain identified by PFam, accession name rvt, E-value=3.8e-06, PFam score of 17.7

SEQ ID NO: 35797 - protein, 431 aa, Homo sapiens
  DOMAIN (198)..(245): kw TRANSCRIPTASE REVERSE II ORF2 domain identified by eMATRIX, accession number DM01354V, p-value=1.000e-40, raw score of 12.97
  DOMAIN (1)..(211): Reverse transcriptase domain identified by PFam, accession name rvt, E-value=3.7e-06, PFam score of 17.8
MHTAPFIFPVKRTVPDPGEYWDGSPVATGPESLGVFMKLHLPATLATWGSSPTADSGGTWVAQAHLGPATQLEGAQAVPLSKRPAGRRAVGPGPPGICWGAEATEESEVLEVLARAIRQEKEIKGIQLGKEEVKLSLFADDMIVYLENPIVSAENLLKLISNFSKVSGYKINVQKSQAFLYTNNRQTESQIMGELPFTIASKRIKYLGIQLTRDVKDLFKENYKPLLKEIKEDTNKWKNIPCSWVGRINIVKMAILPKVIYRFNAIPIKLPMTFFTELEKTTLKFIWNQKRARIAKSILSQKNKAGGITLPDFKLYYKATVTKTAWYWYQNRDIDQWNRTEPSEIMPHIYNYLIFGKPEKNKQWGKDSLFNKWCWENWLAICRKLKLDPFLTPYTKINSRWIKDLNVKPKTIKTLEENLGITFSKKIPSFN

SEQ ID NO: 35798 - protein, 346 aa, Homo sapiens
  DOMAIN (201)..(248): kw TRANSCRIPTASE REVERSE II ORF2 domain identified by eMATRIX, accession number DM01354V, p-value=1.000e-40, raw score of 12.97
APRSHSRRLIGGTVRNSTLQVKDNSAMGRRRTIDPFTTGLFDGVANDRHCILVTIHRARPTAISRSEGTTVFRRSVQRTNVTVNRSRVLTIKRVFLDDGTLENDLTTSDGLDSRIKTEGWLGLRVRVWRWDGTWGFKGVYDLTDNEREGDFFDGEAQNLLKVISNFSKVSGYKINVQKSQAFLYTNNRQTESQIMSELPFTIASKRIKYLGIQLTRDVKHLFKENYKPLLNEIKEDTNKWKNIPCSWVGRINIVKMAILPKVIYRFNAIPIKLPMTFPAAMEKTTLKFIWNQKRARIAKSILSQKNKAGGITLPDFKLYYKATVTKIAWYWYQNRDIDQWNRSEPS

SEQ ID NO: 35799 - protein, 524 aa, Homo sapiens
  DOMAIN (157)..(204): kw TRANSCRIPTASE REVERSE II ORF2 domain identified by eMATRIX, accession number DM01354V, p-value=1.000e-40, raw score of 12.97
  DOMAIN (186)..(381): Reverse transcriptase domain identified by PFam, accession name rvt, E-value=3.2e-07, PFam score of 32.8
MVAYLSVDSRGSPLLAKEDIGSYLHVLGCGCVAQAILSRGRFGGVITINVGFSMAVAMAIYVAGGVSVLEVLARAIMQEKEIKGIQLGKEEVKLSLFADDMIIYLENPIVSAQNLLELISNFSKVSGYKINVQKSQAFLYTNNRQTESQIMSELPFTIASKRIKYLGIQLTRDVKDLFKENYKPLLKEIKEDTNKWKNIPCSWVGRINIVKMAILAKKTDGSWRMTVDYRKLNLVVSPVAAAVPDVVVLLEQINTSPGTRYAVIDLANAFFSIPGHKAHRKQFAFSWQSQQYTFTVLPHGYINSLPWCHNLFLRDLDRFSLPQDITLVHDIDDIMLIGSSEQEVTSTLDLLMRYFCARGWEINPTKIQGTSMSVKFLRVWCSPTGYGSVLFLRDLNCKSEFPHSFSQSVATACVGSDCWKFSGSCHGWMRMRLCDCMQGNQEVVKGQILFYKIGTNSWRISSAHSEVESVESCHFWGRGSILRLSCPEVLTHISRTKSALTFAVMSFPASLAVTHTLSVFLQHF

SEQ ID NO: 35800 - protein, 430 aa, Homo sapiens
  DOMAIN (57)..(100): kw TRANSCRIPTASE REVERSE II ORF2 domain identified by eMATRIX, accession number DM01354T, p-value=1.000e-40, raw score of 9.48
  DOMAIN (1)..(179): Reverse transcriptase domain identified by PFam, accession name rvt, E-value=2.8e-13, PFam score of 57.5
MIISIDAEKAFDKIQQPFMLKTLNKLGIDGTYFKIIRAIYDKPTANIILNGQKLEAFPLKTGTRQGCPLSPLLFNIVLEVLARAIRQEKEIKGIQLGKEEVKLSLFADHMIVYLENPIVSAQNLLKLISNFSKVSGYKINVQKSQAFLYTNNRQTESQIMGELPFTIASKRIKYLGIQLTRDVKDLFKENYKPLLKEIKEDTNKWKNIPCSWVGRINIVKMAILPKDIAASALGVNWDEGDQDPVSLACCTWSGDLAGGAPIFLATHGGASVTQSWGKCLLGLLDHTVSSINCEYSKSWDVFINPSIPTVPDTYVQIQLQLHDLPESEDTRVSKGDVVLQSEPPFEQIHTKCADKQAFYLRPAARLLSDLLECQKEEPADSTTRLYVLTVGERAFLIPFLFVESVGEQAILPSCYFSPSPMHDTAKGLLA

SEQ ID NO: 35801 - protein, 174 aa, Homo sapiens
  DOMAIN (7)..(54): kw TRANSCRIPTASE REVERSE II ORF2 domain identified by eMATRIX, accession number DM01354V, p-value=1.000e-40, raw score of 12.97
  misc_feature (1)...(174): Xaa = X or * as defined in Table 2
MSELPFRIASKRIKYLGIQLTRDVKDLFKENYKPLLNEIKEDTNKWKNISCSWVGRINIVKMAILPKVKHRFSACLQSLGRSGTTGLEALAMXPIWPQEVEXVKFPALPSGASSTKGGCVPXQIQVEERLLSWKLXQAXTSWYQRQRRSDSSLRERKXPKSIQRNVRRLSYYTP

SEQ ID NO: 35802 - protein, 515 aa, Homo sapiens
  DOMAIN (117)..(164): kw TRANSCRIPTASE REVERSE II ORF2 domain identified by eMATRIX, accession number DM01354V, p-value=1.000e-40, raw score of 12.97
SNISLYSVVSLRPLPADYVPSIVMLPGTCQTQDVEVSEETVEPSDELIEYDSPEQLNEQLVTLSLLPESRWKNLLNLDVIKRALELRYNINVQKSQAFLYTNNRQTESQIMSELPFTMASKRIKYLGIQLTRDVKDLFKENYKPLLKEIKEDTNKWKNIPCSWVGRINIVKMAILPKVIYRFSAIPIKLPMTFFTELEKTTLKFIWNQKRARIVKSILSQKNKAGGTTLPDFKLYYKATVTKIAWYWYQNRDIDQWNRTEPSEIMPHIYNYLIFDKPEKNKQWGKDSLFNKWCWENWLAICRKLKLDPFLTPYTKINSRWIKDLNVRPKTIKTLEENLGITIQDIGMGKDFMSKTPKAMATKPKIDKWDLMKLKSFCTAKETTIRVNRQPTKWEKIFATYSSDKGLISRIYNELKQIYKKKTNNPIKKWAKDMNRHFSKEDIYAAKKHMKKCSPSLAIREMQIKTTMRYHLPPVRMAIIKKSGNNRCWRGCGEIGTLLHCWRDCKLVQPLRKTVW

SEQ ID NO: 35803 - protein, 792 aa, Homo sapiens
  DOMAIN (37)..(83): kw TRANSCRIPTASE REVERSE II ORF2 domain identified by eMATRIX, accession number DM01354O, p-value=1.000e-40, raw score of 8.73
  DOMAIN (70)..(345): Reverse transcriptase domain identified by PFam, accession name rvt, E-value=1.9e-85, PFam score of 297.3
MDKFLDTYTLPRLNQEEVESLNRPITGSEIVAIINSLPTKKSPGPDGFTAEFYQRYKEELVPFLLKLFQSIEKERILPSSFYEASIILIPKPGRDTTKKENFRPISLMNIDAKILNKIVAKQIQQHIKKLIHHDQVGFIPGMQGWFNILKSINVIQHINRAKDKNHMIISIDAEKAFDKIQQPFMLKTLNKLGIDGTYFKIIRAIYDKPTANIILNGQKLEAFPLKTGTRQGCPLSPLLFNIVLEVLARPIRQEKEIKGIQLGKEEVKLSLFADDMIVYLENPIVSAQNLLKLINNFSKVSGYKINVQKSQAFLYTNNRQIESQMMSELPFTIASQRIKYLGIQLTRDVKDLFKENYKPLLNEIKEDTNKWKNIPCSWVGRINIVKMAILPKVTYRFNAIPIKLPMPFFTELEKTTIKFIWNQKRARIAKSILSQKNKAGGITLPDFKLYYKATVTKTAWYWYQNRDIDQWNRTEPSEITPHIYDYLIFDKLEKNKQWGKDSLSNKWCWENWLAICRKLKLDPFLTPYIKINSRWIKDLNVRPKTIKTLEESLGITIQDIGMGKDFMSKTPKAMATKDKIDKWDLIKLKCFCTAKETTIRVNRQPTTWEKIFATYSSDKGLISRIYDELKQIYKKKTNNPIKKWAKDMNRHFSKEDIYAAKKHMKKCSSSLAIREMQIKTTMRYHLTPVRMAIIKKSGKNRRTATLSLLPAIRHEREAFHQREEEKEGGRILPLQNRVILCFCSLCPHLSPASKPKHRGLGRFKSQSTSMFSGVLSVRNSLHAPQVVSWLQR

SEQ ID NO: 35804 - protein, 608 aa, Homo sapiens
  DOMAIN (152)..(199): kw TRANSCRIPTASE REVERSE II ORF2 domain identified by eMATRIX, accession number DM01354V, p-value=1.000e-40, raw score of 12.97
  DOMAIN (1)..(165): Reverse transcriptase domain identified by PFam, accession name rvt, E-value=0.02, PFam score of -35.1
MPAISKLLLVSLMESYGEKGIRQSNSYVPSLERGHTCVGSGTSGQGSGSHYSSGTSVQGTAAHRPATELGSGAWVCMGGPCPGKEEVKLSLFADDMIVYLENPIVSAQNLLKLISNFSKVSGYKINVQKSQAFLYTNNRQTESQIMSELPFTIASKRIKYLGIQLTRDVKDLFKENYKPLLKEIKEDTNKWKNIPCSWVGRINIVKMATLPKAIYRFNAIPIKLPMPFFTELEKTTLKFIWNQKRAHIAKSILSQKNKAGGITLPDFKLYYKATVTKTAWYWYQNRDIDQWNRTEPSEIKPHIYNYLIFDKPEKNEQWGKDSLFNKWCWENWLAICRKLKLDPFLTPYTKIKSRWIKDLNVRPKTIKTLEENLGITIQDIGMGKGFMSKTPKAMATKDKIHKWDLIKLKSFCTAKETTIRVNRQRTTWEKIFATYLSDKGLISSIYNELKQIYKKKTNDPIKKWAKDMNRHFSKEDIYAAKKHMRKCSSSLAIREMQIKTTMRYHLTPVRMAIIKKSGNNRGLTEEERMAVPHHDCQLSISAKPCNRTGGGEKEEAAARSFPQRKRTGSVRGREAARWLGFHLATIPNISMSRETVVGFQGRWRNDAS

SEQ ID NO: 35805 - protein, 357 aa, Homo sapiens
  DOMAIN (148)..(193): kw TRANSCRIPTASE REVERSE II ORF2 domain identified by eMATRIX, accession number DM01354N, p-value=1.000e-40, raw score of 13.17
MKAEIKMFFETNENKDTTYQNLWDTFKAVCRGKFIALNAHKRKQERSKIDTLTSQLKELEKQEQTHLKASRRQEVTKIRAELKEIETQKTFQKINESRSWFFERINKIDRPLARLIKKREKNQIDAIKNDKGDITTDPTEIQTAIREYYKHLYANKLENLEEMDKFLDTYTLPRLNQEEVESLNRPITGSEIAAIINSLPTKKSPGPDGFTAEFYQRQTESQIMSELPFTIASKRIKYLGIHLTRDVKDLFKENYKPLLNEIKEDTNKWKNIPCSWVGRINIVKMAILPKASAHGSSRSAPTYLINRSTPVDLGSRLNFQPGSTGTQYVPSKANMQRLEYFFKYVATNARPFHWVPG

SEQ ID NO: 35806 - protein, 612 aa, Homo sapiens
  DOMAIN (161)..(208): kw TRANSCRIPTASE REVERSE II ORF2 domain identified by eMATRIX, accession number DM01354V, p-value=1.000e-40, raw score of 12.97
  DOMAIN (1)..(174): Reverse transcriptase domain identified by PFam, accession name rvt, E-value=5.1e-06, PFam score of 15.8
MDTFLDTYTLPRLNQEEVESLNRPITGAEIVAIINSLPTKKSPGPDGFTAEFYQRYKEELGCPLLPLLFNIVLEVLARAIRQEKEIKGIQLGKEEVKLSLFADDMIVYLENPIVSAQNLLKLISNFSKVSGYKINVQKSQAFLYTNNRQTESQIMSELPFTIASKRIKYLGIQLTRDVKDLFEENYKPLLNEIKEDTNKWKNIPCSWVGRINIVKMAILPKVIYRFNAIPIKLPMTFFTELEKTTLKFIWNQKRARITKSILSQKNKAGGITLPDFKLYYKATVTKTAWYWYQNRDIDQWNRTEPSEIMPHTYNYLIFDKPEKNKQWGKDSLFNKWCWENWLAICRKLKLDPFLTPYRKINSRWIKDLNVRPKTIKTLEENLGITIQDIGVGKDFMSKTPKAMATKAKIDKWDLIKLKSFCTAKESTIRVNRQPTTWEKIFTTYSSDKGLISRIYKELKQIYKKKTNNPIKKWVKDMNRHFSKEDIYAAKKHMKKCSSSLAIREMQIKTTMRYHLTPTQKEEGSTPQGQQEEGESSRTCTLNWRLGRRQKEIDMWVEVFTGVRRVTQGTVVREGCGEVVLRSGMPVFRLQWWQQGADCACPWAQGGIHWYQC

SEQ ID NO: 35807 - protein, 455 aa, Homo sapiens
  DOMAIN (194)..(241): kw TRANSCRIPTASE REVERSE II ORF2 domain identified by eMATRIX, accession number DM01354V, p-value=1.000e-40, raw score of 12.97
  DOMAIN (14)..(207): Reverse transcriptase domain identified by PFam, accession name rvt, E-value=3.6e-05, PFam score of 3.7
MALEASGNLQSWPMAKGKQGIFFTRRQEGQVPREAGRAPIKPSDLILDISPLSDEWVAKIFSHFVGCRFTLTVVSFAVQKLFSLITSHLSILAFVAIAFGVLDMKSLPVPMSFRQEKEIKGIQLGKEEVKLSLFADDMIVYLENPIVSAQNLLKLISNFSKVSGYKINVQKSQAFLYTNNRQTESQIMSELPFTIASKRIKYLGIHLTRDVKDLFKENYKPLLNEIKEDTNKWKNIPCSWVGRINIVKMAILPKVIYRFNAIPIKLPMTFFTELEKTTLKFIWNQKRARIAKSILSQKNKAGGITLPDFKLYYKAIVTKTAWYWYRNRDIDQWNKAEPSEIMPHIYNYLIFDNPEKNKQWGKDSLFNKCVEESLVNKSLQLKQGVPPKSFACEVNVLPSTPPALCLVIVHKDDFSKQMIEARVHKVETHSKEQWKRKSSRICSIFYGKRGVHGDH

SEQ ID NO: 35808 - protein, 628 aa, Homo sapiens
  DOMAIN (235)..(278): 1 kw MIND INHIBITOR DIVISION CONTROL domain identified by eMATRIX, accession number DM01756B, p-value=4.822e-15, raw score of 22.91
  DOMAIN (200)..(304): ParA family ATPase domain identified by PFam, accession name ParA, E-value=3.5e-23, PFam score of 90.5
MKLMETLNQCINAGHEMTKAIAIAQFNDDSPEARKITRRWRIGEAADLVGVSSQAIRDAEKAGRLPHPDMEIRGRVEQRVGYTIEQINHMRDVFGTRLRRAEDVFPPVIGVAAHKGGVYKTSVSVHLAQDLALKGLRVLLVEGNDPQGTASMYHGWVPDLHIHAEDTLLPFYLGEKDDVTYAIKPTCWPGLDIIPSCLALHRIETELMGKFDEGKLPTDPHLMLRLAIETVAHDYDVIVIDSAPNLGIGTINVVCAADVLIVPTPAELFDYTSALQFFDMLRDLLKNVDLKGFEPDLISNFSKVSGYKINVQKSQAFLYTNNRQTESQIMSELPFTIASKRIKYLGIQLTRDVKDLFKENYKPLLKEIKEDTNKWKNIPCSWVGRINIVKMAILPKFSAEVRKEQAPTLTGYMRIPENKPFHNQNFIKSSCFWSLLQPYFNRYLVLTISNPFFVRCGVLWDNGGRAKQKRDTIATASKPGLVIATTVNLKGQEERAVVGPGKYFSCKRRAVAFSQAELSLHKVDSQGGPRVLIGAFLQSADWCIYNPLARQKSSPSPHLTQEFQLASPLNPPSNHDTPTAVGNWAMTTLATSKIRVVSMQVQTVTKLKTVTNVVGFVMGLTSPGKSSY

SEQ ID NO: 35809 - protein, 351 aa, Homo sapiens
  DOMAIN (139)..(186): kw TRANSCRIPTASE REVERSE II ORF2 domain identified by eMATRIX, accession number DM01354V, p-value=1.000e-40, raw score of 12.97
  DOMAIN (3)..(152): Reverse transcriptase domain identified by PFam, accession name rvt, E-value=0.0011, PFam score of -17.5
MDRAEGHYPKSTRTGRESQIPHVLTYKWELKLSTCGHKKGNNRCLGLFEVLEVLARAIRQEKEIKGIQLGKEEVKLSLFADDMIVYLENPIVSAQNLLKLISNFSKVSGYKINVQKSQAFLYTNNRQTESQIMSELPFTIASKRIKYLGIQLKRDVKDLFKENYKPLLNEIKEDTKKWKNIPCSWVGRINIVKMAILPKIIYRFNAIPIKLPMTFFTELEKTTLKFIWNQKRARTTKSILSQKNKAGGIMLPHFKLYYKATVTKTAWATFKKELGLFIVLLTLGCCNKYQRLNGLNRNLFLTFLEARKSKIKVLADPMSGSSALLKKEPSGNIRPAQLLPLLFSADPCNYG

SEQ ID NO: 35810 - protein, 843 aa, Homo sapiens
  DOMAIN (740)..(758): C-type lectin domain proteins domain identified by eMATRIX, accession number BL00615A, p-value=6.760e-11, raw score of 16.68
  DOMAIN (143)..(409): Reverse transcriptase domain identified by PFam, accession name rvt, E-value=1e-47, PFam score of 172.0
MEKNFIERWNSSQRRGDVVGGGGPPPLQSGGFSPNVARSGHLWIQNGKCVLIGLNAREVIRFYINQGPFRNRYHIGDFNRKNLKNYFLVKDDQLLKEDSMIQKKQLRKGAVTSRAEEELIKELLKLKEMLPSPPARLEIQISEGRDKNSGPAEQRVQKNSRLPKCGDYRHEPLHLTFEVPQLLVSFEFFGRHCVPFVHMPVPKAEAACSIPDPATASHEAGAWRTKDKNHMIISIDAEKAFDKIQQHFMLKTLNKLGIDGMYLKIIRAIYDKPTADIILNGQKLEAFPLKMGTRQGCPLSPLLFNIVLEVLARAIRQEKEIKGIQLGKEEVKLSLFADDMIVYLENPIVSAQNLLKLISNFSKVSGYKINVQKSQAFLYTNNRQTESQIMSELPFTIASKRIKYLGIQLTRDVKDLFKENYKPLLNEIKEDTKKWKNIPCSWVGRINIVKMAILPKVIYRFNAIPIKLAMTFFTELEKTTLKFIWNQKRVHIAKSILSQKNKAGGITLPEFKLYYKATVTKTAWLAVVSMRLKQQSPLTACKGSGWVRCMVHWVSMGLETCGAHMGTSSKGCVMALGLIEGVAEALALEGVQQCEFWAAPSAGVSILEDCGGPWQLRLWVFVAVGMAARVLSGTDSHIEALILSVTVFGDGVFKEVIKVKSGYKELPTATQAQNDYGPQQKSSSSRPSCSCLVAIALGLLTAVLLSVLLYQWILCQGSNYSTCASCPSCPDRWMKYGNHCYYFSVEEKDWNSSLEFCLARDSHLLVITDNQEMSLLQVFLSEAFCWIGLRNNSGWRWEDGSPLNFSRNTNGTIIRKRKHLHKNQKSDEQSQYLVLTSYQQKRH

SEQ ID NO: 35811 - protein, 791 aa, Homo sapiens
  DOMAIN (598)..(645): kw TRANSCRIPTASE REVERSE II ORF2 domain identified by eMATRIX, accession number DM01354V, p-value=1.000e-40, raw score of 12.97
  DOMAIN (419)..(611): Reverse transcriptase domain identified by PFam, accession name rvt, E-value=6.3e-06, PFam score of 14.5
MSVKFPTGIIKPNSITSLNLVNDTKCPPKASIVSLNAPAFESDSNDNNVTTMPKVDGVSSIKLRFLLIPYQKVTRMALPLGENDESLSDTLVTLEVSEPLGEHSTITNQNWEITKAQSAFQPFPMVFPIPLVDPATFSEKPINVATDIPTTENEVINDKTNTRVFSPNMVLQPVIHKNEGINKTPNYDVNQAVIKFSAKEIATAGTKANAFLNSNKAVAEDEFYISEANIPVNLRDINAVGVDPFILKPDAASAEQKAPENSKETFYLASTMSTTKQTKIRVRGSFSLDNDYLERSITNSYDKVYQLPLKSTLLPTNFIEIYNSELASALIIGESNIMTDDFIISNDIIGLSDEETISPDNIIFIENMNNINLSSTWSTSPTGITTEPTSVNNTSTSTSNPVPRVTTNLATITSTLSNSKMSTSVAPTRATATTAKGLDGITRTPQTLSPVTVTPMTSNTNSEIAAVSTKPASTATVPASVLASEAPSVESTPQGSAASSASAPTNPGVLEVLARAIRQEKEIKGIQLGKEEVKLSLFADDMIVYVENPIVSAQNLLKLISNFSKVSGYKINVQKSQAFLYTNNRQTESQIMGELPFTIASKRIKYLGIQLTRDVKDLFKENYKPLLNEIKEDTNKWKNIPCSWVGRINIVKMAILPQVIYRFNAIPIKLPMPFFTELEKTTLKFIWNQKRALIAKSILSQKNKAGGITLPDFKLYYKATITLPWGTALSSKSQGASDHKKRGREANLKRQRLLTMKKERYPEEIPKVKLALHEDALKNTHNFKAPRTVGN

SEQ ID NO: 35812 - protein, 787 aa, Homo sapiens
  DOMAIN (209)..(234): 7 kw REVERSE TRANSCRIPTASE RNA POLYMERASE domain identified by eMATRIX, accession number DM00895E, p-value=3.333e-11, raw score of 15.72
  DOMAIN (182)..(455): Reverse transcriptase domain identified by PFam, accession name rvt, E-value=8e-88, PFam score of 305.2
MTIAHSFDYWIFVESFEYRKEQCLMLNSLLSNRIGIAIDLVKKKGGYFLHVRDCALKLIPVAQKQSLGIRKESSTFLSDSYPSDRIAFSSCDKLGMNPNVISKVPASLLVVDDIISVKSKRRGERKEVESLNRPITGSEIVAIINSLPTKKSPGPDGFTAEFYQRYKEELVPFLLKLFQSIEKQGILPNSFYEASIILIPKPGRDTTKKENFRPISLMNIDAKILNKILANRIQQHIKKLIHHDQVGFIPGMQGWFNIRKSINVIQHINRAKDKNHMIISIDAEKAFDKIQQPFMLKTLKKLGIDGTYFKIIRAIYDKPTANIILNGQKLEAFPLKTGTRQGCPLSPLLFNIVLEVLARAIRQEKEIKGIQLGKEEVKLSLFADDMIVYLENPIVSAQNLLKLISNFSKVSGYKINVQKSQAFLYTNNRQTESQIMSELPFTIASKRLKYLGIQLTRDVKDFFKENYKPLLKEIKEDTNKWKNIPCSWVGRINIVKMAILPKVIYRFNAIPIKLPMTFFTELEKTTLKFIWNQKRARIAKSILSQENKAGGITLPDFKLYYKATVTKTAWYWYQNRDIDQWNRTEPSEIMPHIYNYLIFDKPEKNKQWGKDSLLKVFKTTVLYILKKPKENVDKQLKEIRKLIHEQNKSAPEHGQPYSSGWKASPQRFGIQLCLDSRTAPVLLRPQVLGLPQAADQQLQISDLGQHPSSKAPVFAQFQAHSRFQTGLHRHKLQRNQDPSQPQWILVLGQPSQTQLQNQPCRHNLQADTHVLIIQACPQTQVLGLPIH

SEQ ID NO: 35813 - protein, 758 aa, Homo sapiens
  DOMAIN (106)..(149): kw TRANSCRIPTASE REVERSE II ORF2 domain identified by eMATRIX, accession number DM01354T, p-value=1.000e-40, raw score of 9.48
  DOMAIN (1)..(228): Reverse transcriptase domain identified by PFam, accession name rvt, E-value=2.9e-37, PFam score of 137.2
MDKFLDTHTLPRLNQEEVESLNRPITGSEIVAIINSLPTEKSPGPDGFTAKFYQRCRKAFDKIQQPFMLKTLNKLGIDGTYFKMIRAIYDKPTANIILNGQKLEAFPLKTGTRQGCPLSPLLFNIVLEVLARAIRQEKEIKGIQLGKEEVKLSLFADDMIVYLENPIVSAQNLLKLISNFSKVSGYKINVQKSQAFLYTNNRQTESQIMSELPFTIASKRIKYLGIQLTRDVKDLFKENYKPLLKEIKEDTNKWKNIPCSWVGRINIVKMAILPKVIYRFNAIPIKLPMTFFPELEKTTLKFIWNQKRALIAKSILSQKNKARSITLPDFELYYKATVTKTAWYWYQNRDIDQWNRTEPSEIMPHIYNYLIFDKPHKNKQWGKDSLFNKWCWEKWLTICRKLKLDPFLTPYTKINSRWIKDLHVRAKTIKTLEEKLGNTIQDIGMGKDFMSKPPKATAAKAKIDKWDLIKLKNFCTAKETTIRVNRQPTKWEKIFTTYSSDKGLISRIYNELQQIYKKKTNNPIKKWAKDMNRHFSKEDIYAAKKHMKKCSPSLAIREMQIKTTMRYHLTPVRMAIIKKSGNNRRHLAVSGDISGCHNLGRKVAGIEWVEGGDAAKHPARHRIIARNKELSQNANHAKLEKPCMRWWQELQGKQSEKGQRESQGQGGGGEELFREELTRKMTSEQKPAKGAAGSCCRYLQEEHHRTGNDKCEGPEGGTCWASSGKAGDQCGRGRVSKRRRSRNENLTGPRCVERQLVL

SEQ ID NO: 35814 - protein, 560 aa, Homo sapiens
  DOMAIN (197)..(244): kw TRANSCRIPTASE REVERSE II ORF2 domain identified by eMATRIX, accession number DM01354V, p-value=1.000e-40, raw score of 12.97
MASPGPAPTASPKIHSELLTATREAQRHHPVPRGQDLVTSESFSLSFCFSAAIFIFELLGSNSEGVTDLRLWLCQPAPRCGEWTYNPLEQCCDDGVILDLNQTRLCGSSCTFWPCFQHCCLESLGSQNQTVVRFKVPGMKPDCKSSPITRICAQAGVQISNFSKVSGYKINVQKSQAFLYTNNRQTESQIMSELPFTIASQRIKYLGIQLTRDVKDLFKENYKPLLKEIKEDTNKWKNIPCSWVGRINIVKMAILPKVIYRFNAIPIKLPMTFFTELEKTTLKFIWNQKRALIAKSILSQKNKAGGITLPDFKLYYKATVTKTAWYWYQNRDIDQWNRTEPSEITPHIYNYLIFDKPEKNKQWGKDSLFNKWCWENWLAICRKLKLDPFLTPYTKINSRWIKDLNVRPKTIKTLEENLGITIQDIGMSKDFMSKTPKAMATKDKIDKWDLIKLKSFCTAKETTIRVNRQPTKWEKIFATYSSDKGLISRIYNELKQIYKKKTNNPIKKWAKDMNRHFSKEDIYAAKKHMKKCSLSLAIREMQIKTTNQNHMRYHLTPGHG

SEQ ID NO: 35815 - protein, 624 aa, Homo sapiens
  DOMAIN (146)..(193): kw TRANSCRIPTASE REVERSE II ORF2 domain identified by eMATRIX, accession number DM01354V, p-value=1.000e-40, raw score of 12.97
MPLASFIICLPHICPAFDNVQIALKPSQSVAVRIADLVDDGCGELELGLVMTSTPKPTGPRSPYTWETKASNIKKDHGHKEEETPSQDDMIVYLENPIVSAQNLLKLISNFSKVSGYKINVQKSQAFLYTNNRQTESQIMGELPFTIASKRIKYLGIQLTRDVKDLFKENYKPLLKEIKEETNKWKNIPCSWVGRINIVKMAILPKVIYRFNAIPIKLPMTFFTELEKTTLKFIWNQKRARIAKSILSQKNKAGGITLPDFKLYYKATVTKRAWYWYQNRDIDQWNRTEPSEIMPHIYNYLIFDKPEKNKQWGKDSLFNKWCWENWLAICRKLKLDPFLTPYTKINSRWIKDLNVKPKTIKTLEENLGITIQDIGVGKDFMSKTPKAMATKDKIDKWDLIKLKSFCTAKETTIRVNRQPTTWEKIFATYSSDKGLISRIYNELKQIYKKKTNNPIKKWAKDMNRHFSKEDIYAAKKHMKKCSSSLAIREMQIKTTMRYHLTPVRMAIIKKSGNNRCWRGCGEIGTLLHCWWDCKLVQPLWKSVWRFLRDLELEIPFDPAIPLLGIYPNEYKSCCYKDTCTPIITTIIIIIDFINITDIIITIIFIISSSPSASLLPLSSFSSLT

SEQ ID NO: 35816 - protein, 433 aa, Homo sapiens
  DOMAIN (114)..(161): kw TRANSCRIPTASE REVERSE II ORF2 domain identified by eMATRIX, accession number DM01354V, p-value=1.000e-40, raw score of 12.97
  DOMAIN (346)..(433): ParB-like nuclease domain identified by PFam, accession name ParBc, E-value=2.7e-08, PFam score of 41.0
PPGQHLQRRCLLRVSGFSENAKKGMLEVLARAIRQEKKIKGIQSGKEEVKLSLFADDMIVYLENPIVSAQNLLKLISNFSKALGYKISVQKSQAFLYTNNRQTESQIMSELPFTIASKRIKYLGIQLTRDVKDLFKENYKPLLNEIKEDTNKWKNIPCSWIGRINIVKMAILPKVIYGFNAIPIKLPMTFFTELEKTTLKFIWNQKRARIAKSILSQKDKAGGITLPDFKLYYKATVTKTACNSNGSQSPWMEEQIRDAWGSMVLKNVVRETDEVGKGQIRMRTVFEQAIDQRSSTDTSLSTPAAPMVDSLIARVGVMARGNAITLPVCGRDVKFTLEVLRGDSVEKTSRVWSGNERDQELLTEDALDDLIPSFLLTGQQTPAFGRRVSGVIEIADGSRRRKAAALTESDYRVLGGELDDEQMAALSRLGNDY

SEQ ID NO: 35817 - protein, 615 aa, Homo sapiens
  DOMAIN (153)..(199): kw TRANSCRIPTASE REVERSE II ORF2 domain identified by eMATRIX, accession number DM01354O, p-value=1.000e-40, raw score of 8.73
  DOMAIN (186)..(456): Reverse transcriptase domain identified by PFam, accession name rvt, E-value=1.8e-69, PFam score of 244.2
EGMDPHPKFSLDVDTDNAMPTPRGMKRFIMMRVFEDSKAGLLNWSKNGLRERGKVPGLGFIVIGSSFNPITNRHLRLFELAKDYMNGTGRYRVVKHMIFPVGDAYKKKGLIPAHHQVIIAELATKNSKLNQEDIESLNRPITGSEIEAIINSLPTKKSPGPDGFTADFYQRYKQELVPFLLKLFQSIEKEGILPNSFDEASIILIPKPGRDTTKKENFRPISLMNIDAKILANQIQQQIKKFIHHDQVGFIPGMQGWFNIHKSINVIQHINRTKDKNHTIISTDAEKAFDKIQQPFMLKTLNKLGIDGTYLKIIRAIYDEPTANIILNGQKLEAFPLKTGTRQGCPLSPLLFNIVLEVLARAIKQDKEIQDIQLGKEVKLSLFADVMIVYLENSIVSVQNLLKLISNFSEVSGYKINVQKSQAFLYTNKRQRESQIMSELPFTIASKRIKYLGIQLTRDVKDLFKENYKPLLNEIKEDTNKWKNIPCSWIGRINIVKMAILPKIIYAAKKHMKKCSSSLAIREMQIKTTMRYHLTPVRMAIIKKSGNNRSTRGLLSCDSADLRTSLVKVCRDPCRRLGNGEMILSLHYLWSNNFVQRTSCLAFSPSAQDAADAAV

SEQ ID NO: 35818 - protein, 703 aa, Homo sapiens
  DOMAIN (149)..(194): kw TRANSCRIPTASE REVERSE II ORF2 domain identified by eMATRIX, accession number DM01354N, p-value=1.000e-40, raw score of 13.17
MKAEIKMFFETNENKDTTYQNLWDAFKVVCRGKFIALNAHKRKQERSKIDTLTSQLKELEKQEQTHSKASRRQEITKIRAELKEIETQRTLQKINESRSWFFERINKIDRLLARLIKKKREKNQIDTIKNDKGDITTDPTEIQTTIREYYKHLYTNKLENLEEMDKFLDTYTLPRLNQEEVEFLNRPITGSEIVAIINSLPTKKSPGPDGFTAEFYQRQTESQIMSEIPFTIASKRIKYLGIQLTREVKDLFKKNYKPLLNEIKEDTNKWKNIPCSWVGRINIVKMAILPKVIYRFNAIPIKLPMPFFTELEKTTLKFIWNQKRARIAKSNLSQKNKAGGITLPDFKLYYKATVTKTAWHWYQNRNIDQWNRTEPSEIMPHIYNYLIFDKPEKNKQWGKDSLFNKWCWENRLAICRKLKLDLFLTSYTKINSRWIKDLNVRPKTIKTPEENLGNTIQDIGMGKDFMSKTPEAMATKAKIDKWDLIKLKSFCTAKETTIRVNRQPTKWEKIFATYSSDKGLISRIYNELKQIYKKKTNNPIKKWVKDMNRYFSKEDIYAAKKHMKKCSPSLAIREMQIKTTMRYHLTPVRMAIIKKSGNNRMVTNRYSMYICRENKPENTTRIECSDTEEGTGVGAMEVADLDLALSRAYFCLKSFKRVEGAGDSFNELKSEWEEETECRELAKQIVNESKGRKDTVIEGEFMS

SEQ ID NO: 35819 - protein, 844 aa, Homo sapiens; identical to SEQ ID NO: 34827
  DOMAIN (328)..(371): kw TRANSCRIPTASE REVERSE II ORF2 domain identified by eMATRIX, accession number DM01354T, p-value=1.000e-40, raw score of 9.48
  DOMAIN (218)..(450): Reverse transcriptase domain identified by PFam, accession name rvt, E-value=4.6e-41, PFam score of 149.9
  misc_feature (1)...(844): Xaa = X or * as defined in Table 2

SEQ ID NO: 35820 - protein, 760 aa, Homo sapiens
  DOMAIN (158)..(201): kw TRANSCRIPTASE REVERSE II ORF2 domain identified by eMATRIX, accession number DM01354T, p-value=1.000e-40, raw score of 9.48
  DOMAIN (50)..(280): Reverse transcriptase domain identified by PFam, accession name rvt, E-value=2.8e-26, PFam score of 100.7
RSTRQKVNKDIQDLNSALHQADLIDIYRTLHPKSTEYTFFSAPHHTCSKIDHIVGSKALLSKCKRTEIIRNYLSDHSAIKLELRIKKLTQNHSTTWKLNNLLLNDYWMQKRPLKIQQCFMLKTLNKLGIDGTYLKIIRAIYDKPTANIILNGQKLEAFLLKTGTRQGCPLSPLLLNVVLEVLARAIRQEKEIKGIQLGKEEVKLSLFADDMIVYLENPIVSAQNLPKLISNFSKVSGYKINVQKSQTFLYTNNRQTESQIMSELPFTIASKRIKYLGIQLTRDVKDLFKENYKPLLKEIKEDTNKWKNIPCSWVGRINIVKMAILPKVIYRFNAIPIKLPMTFFTELEKTTLKFIWNQKRACIAKSILSQKNKAGGITLPDFKLYYKATVTKTAWYWYQNRDIDQWNRTEPSEITPHIYNCLIFDKPEKNKQWGKDSLFNKWCWENWLAICRKLKLDPFLTSYTKINSRWIKDLNVRPKTIKTLEENLGITIQDIGMGKDFMSKTPKAMATKAKIDKWDLIKLKSFCTAKETTIRVNRQPTKWEKIFATYSSDKGLISRIYNELKQIYKKRTNNPIKEWAKDMNRHFSKEDIYAAKKHMKKCSPSLAIREMQIKTTMRYHLTPVRMAIIKKAGNNRCWRGCGEIGTLLHCWWDCKLVQPLWKSVWRFLRDLELEIPFDPAIPLLGIYPKDCKSCCYKDTCTQCMLVKLSVVKGLILESQIQVPDSKQQKLTKASVSKNDDDDDDDDDDDDDGMLWRSSLN

SEQ ID NO: 35821 - protein, 415 aa, Homo sapiens
  DOMAIN (100)..(147): kw TRANSCRIPTASE REVERSE II ORF2 domain identified by eMATRIX, accession number DM01354V, p-value=1.000e-40, raw score of 12.97
MDKFLNTYTLPRLNQEEVESLNRPITGAEIVAIINSLPTKKSPGPDGFRAEFYQRYKEELLISNFGKVSGYKINVQKSQAFLYTNNRQTESQIMSELPFTIASKRIKYLGIQLTRDVKDLFKENYKPLLNEIKEDTNKWKNIPCSWVGRINIVKMAILPKVIYRFNAIPINLPMTFFTELEKTTLKFIWNQKRAHITKSILSQKNKAGGITLPDFKLYYKATVTKTGWYWYQNRDIDQWNGTEPSEIMPHIYNYLIFDKPEKNKQWGKDSLFNKWCWENWLAICRKLKLDPFLTPYTKINSRWIKDLNVRPKTIKTLEENLGNTIQDIGMGKDFMSKTPKAMATKAKIDKWDLIKLRSFCTAEEITIRDHEDARSCWLAFSEEGIPGGIVAMRHCHEEYEICSCHGKETLELQRF

SEQ ID NO: 35822 - protein, 380 aa, Homo sapiens
  DOMAIN (159)..(206): kw TRANSCRIPTASE REVERSE II ORF2 domain identified by eMATRIX, accession number DM01354V, p-value=1.000e-40, raw score of 12.97
  DOMAIN (1)..(172): Reverse transcriptase domain identified by PFam, accession name rvt, E-value=0.00011, PFam score of -3.0
MKETVAHAIAWMHLEEIMLSEGFYFVIISHENWPNSCEGKRELQEAIIFFKAGQQESEAGQNESFLHFAVLEVLARAIRQEKEIKGIQLGKEEVKLSLFADDMIVYLENSIVSAQNLLKLISNFSKVSGYKINVQKSQAFLYTNNRQTESQIMSELPFTIASKRIKYLGIQLTRDVKDLFKENYKPMLKEIKEDTNKWKNIPCSWLGRINIVKMAILPKVIYRFNAIPIKLPMPFFTELEKTTLKFIGNQKRAHIAKSILSQKNKAGGITLPDFKLYYKAAVTKTACAQALQSAGGKSCHASVLPFRALKAPRPWEGSMDSLYEPIPEQQANQENMSSRTDSPIPPFGESEQTPNNLFVPTQCEDDRNKDLYDDPLPLTE

SEQ ID NO: 35823 - protein, 267 aa, Homo sapiens
  DOMAIN (158)..(205): kw TRANSCRIPTASE REVERSE II ORF2 domain identified by eMATRIX, accession number DM01354V, p-value=1.000e-40, raw score of 12.97
  DOMAIN (1)..(171): Reverse transcriptase domain identified by PFam, accession name rvt, E-value=8.7e-05, PFam score of -1.6
RKVFFIALKRMPAMKKAMNLFLGLSNVRTVHPEGFTVYISTHISFPSLSGYKTRLRSFGLVKQKKSPILLEVLAREIRQEKEIKGIQLGKEEVKLSLFADDMIVYLENPIVSAQNLLKLISNFSKVSGYKINVQKSQAFLYTNNRQTESQIMSELPFTIASKRIKYLGIQLTRDVKDLFKQNYKPLLNEIKEDTNKWKNIPCSWVGRINIVKMAILPKERSSSPATEQSWMENDFDELREEGFRRSNFSELKEKVRTHHKQDKNLEK

SEQ ID NO: 35824 - protein, 1052 aa, Homo sapiens
  DOMAIN (427)..(472): kw TRANSCRIPTASE REVERSE II ORF2 domain identified by eMATRIX, accession number DM01354N, p-value=1.000e-40, raw score of 13.17
  DOMAIN (367)..(592): Reverse transcriptase domain identified by PFam, accession name rvt, E-value=2.8e-06, PFam score of 19.6
  misc_feature (1)...(1052): Xaa = X or * as defined in Table 2
MLEVLAWAVRQEKEIKGIQLGKEEVKLSLFADNMTVYLENPIVSAQNLLKLISNFSKVSGYKVSGQKSQALLYTNNRQTESQIMSELPFTIASKRIKYLGIHLTRDVKDLFKENYKPLLKEIKKDTNKWKNIPCSWVGRINIVKMAILPKDIIQENFPNLARQANIQIQEIRKTPQRYSSRRATPRHIIVRFTKVEMKEKMLRAAREKASHHTYSKIDPILGSKPLLSKCKRTEIITNYLSDHSAIKLEFRIKNLTQNCSTTWKPNNLLLNDYWVHNEMKAEIKMFFETNENKDTTYQNLWDTFKAVCRGKFIATNAHKRKQERSKVDTLTSQLKELEKQEQTHSKASRRQEITKIRAELKEIETQKTLQKINESRSWFFERINKLDRPLARLVKKKREKNQIDAIKNDKGDITTNPTEIQTTIRDYYKHLYANKLENLEEMDKFLDTYTLPRLNQEEVESLNRPITGSEIVAIINSLTTKKSPGPDGFTAEFYQRAIRQEKEIKGIQLGKEEVKLSLFADDMIVYLENPIVSAQNLLKLISNFSKVSGYKINVQTSQAFLYTNNRQTESQIMSELPFTIASKRIKYLGIQLTRDVKDLFKENYKPLLNEIKEDTKKLKNIPCSWVGRINIVKMAILPKVIYRFNAIPIKLPMTFFTELKKTTLNFIWNQKRAHIAKSVLSQKNKAGGITLPDFKLYYKATVTKTAWYWYQNRDTDQWNRTEPSEIMPRIYNYLIFDKPEKNKQWGKDSLFNKWCWKNWLAICRKLKLDPFLTPYTKINSRWIKDLNIRPKTIKTLEENLGITIQDIGMGKDFMSKTPKAMATKAKIDKWDLIKLKSFCTAKETTNRVNRQPTKWEKIFATYSSDKGLISRIYNELKQIYKKKTNNPIKKWAKDMNRHFSKEDIYAAKKHMKKCSSSLAIREMQIKTTMRYHLTLVRMAIIKKSGNNRCWRGRGEIGTLLHCWWDCKLVQSLWKSVWQFLRDLELEIPFDPAIPLLGKLSHKLGKCSIKAXQRLILVLLLVTTSKXRPQKPQLQLMLESLQRCSLNKCSLRS

SEQ ID NO: 35825 - protein, 644 aa, Homo sapiens
  DOMAIN (58)..(105): kw TRANSCRIPTASE REVERSE II ORF2 domain identified by eMATRIX, accession number DM01354V, p-value=1.000e-40, raw score of 12.97
  misc_feature (1)...(644): Xaa = X or * as defined in Table 2
MQKKPLTKFNNPSCXKLSINXLISNFSEVSGYKISVQKSQAFLYTNNRQESQIMSELPFTIASKRIKYLGIQLTRDVKDLFKENYKPLLKEIKEDTNKWKNIPCSWVGRINIVKMAILPKAIYRFNAIPIKLPMTFFTELEKTTLKFIWNQKRARIAKSILSQKNKAGGITLPDFKLYYKATVTKTAWYWYQNRDIDQWNRTEPSEITPHIYNYLIFDKPEKNKQWGKDSLFNKWCWENWLAICRKLKLDPFLTPYTKINSRWIKDLNVGPNTIKTLEENLGITIQDIGTGKDFMSKTPKAMATKAKIDKRDLIKLNSFCTAKETTIRVNRQPTKWEKIFTTYSSDKGLISRIYNELKQIYKKKTNNPIKKWAKDMNRHFSKEHIYAAKKHMKKCSPSLAIREMQIKTTMRYHLTPVRMAIIKKSENNSLLAAGGGNRRTANVVAHGFANLLTLDKKTLQEILVHYPDSERILMKKARVLLKQKAKTAEATPPRKDLALLFPPKEETPKLFKTLLGGTGKASLARLLKLKREQAAQKKENSEGGEEEGKENEDKQKENEDKQKENEDKGKENEDKDKGREPEEKPLDRPECTASPIAVEEEPHSVRRTVLPRGTSRQSLIISMAPSAEGGEEVLTIEVKEKAKQ

SEQ ID NO: 35826 - protein, 821 aa, Homo sapiens
  DOMAIN (272)..(317): kw TRANSCRIPTASE REVERSE II ORF2 domain identified by eMATRIX, accession number DM01354N, p-value=1.000e-40, raw score of 13.17
  DOMAIN (356)..(595): Reverse transcriptase domain identified by PFam, accession name rvt, E-value=3.8e-65, PFam score of 229.8
MGDFNTPLSTLDRSTRQKANKDTQELNSALHQVDLIDIYRTLHPKSTEYTFFSAPHHTYSTTDHILGSKALLSKCRRTEIITNYLSDHSAIKLELRIKNLTQNRSTTWKLNNLLLNDYGVHNEMKAEIKMFFETNENKDTTYQNLWDTFKAVCRGKFIALNAHKRKQERSKIDTLTSQLKELEKQEQTHSKASRRQEITKIRAELKEIETQKTLQKINESRSWFFERINKIDRLLARLIKKKREKNQIDAIKNDKGDITTDPTEIQTTIREYYKHLYANKLENLEEMDKFLHTYTLPRLNQEEVESLNRPITGSEIVAIINSLPTKKSPGPDGFTAEFDQRYKEELVPFLLKLFQSIEKEGILPNSFYEASIILIRKPGRDTTKKENFRPISLMNTDAKILNKILAKRIQQHIKKLIHHDQVGFIPGMQGWFNIHKSINVIQHINRAKDKNHMIISIDAEKAFDKIQQPFMLKTLSKLGIDGTYFKIIRAIYDKPTANIILNGQKLEAFPLKTGTRQGCPLSPLLFNIVLEVLARAIRQEKEIKGNFSKVSGYKINVQKSQAFLYTNNRQAESQIMSELPFTIASKRIKYLGIQLTRDVKDLFEENYKPLLNEIKEDTNKWKNIPCSWVGRINIVKMAILPKMAALSRLGNDYRPTSAYERGQRYASRLQNEFAGNISALADAENISRKIITRCINTAKLPKSVVALFSHPGELSARSGDALQKAFTDKEELLKQQASNLHEQKKAGVIFEAEEVITLLTSVLKTSSASRTSLSSRHQFAPGATVLYKGDKMVLNLDRSRVPTECIEKIEAILKELEKPAP

SEQ ID NO: 35827 - protein, 406 aa, Homo sapiens
  DOMAIN (182)..(229): kw TRANSCRIPTASE REVERSE II ORF2 domain identified by eMATRIX, accession number DM01354V, p-value=1.000e-40, raw score of 12.97
  DOMAIN (22)..(195): Reverse transcriptase domain identified by PFam, accession name rvt, E-value=4.6e-05, PFam score of 2.2
MDSMSGGGQYRKINGNPTSVKCPLLLLPAILTPEPVNRWRQSCKAFARHSPLAFRVTISTSTFFDGLLVTGLYTSTSVQASQSIGGSSAFGFVLEVLARAIRQEKEIKGIQLGKEEIKLSLFAGDMIVYLENPIVSAQNLLKLISNFSKVSGYKINVQKSQAFLYTNNRQTESQIMSELPFTIASKRIKYLGIQLTRDVKDLFKENYKPLLKEIKEDTNKWKNIPCSWVGRINIVKMAILPKVLKMVCPEFVLSDVRMCSEFLPSGGFVVLLASGVKVQTFVVSVTALKLACLELFVLPVRSCPFFLSGVVHSSRWAPGLAGLRSEPADLCGPAVLAGCSECGACRDCAHPELALACERTALVPARASPSTPPRKQREPAPALASPERGSHSAVSISPEKTPQPPF

SEQ ID NO: 35828 - protein, 1498 aa, Homo sapiens
  DOMAIN (272)..(317): kw TRANSCRIPTASE REVERSE II ORF2 domain identified by eMATRIX, accession number DM01354N, p-value=1.000e-40, raw score of 13.17
  DOMAIN (287)..(1055): Reverse transcriptase domain identified by PFam, accession name rvt, E-value=2.7e-81, PFam score of 283.5
MGDFNTPLSTLDRSTRQKVNKDTQELNSALHQVDLIDIYRILHPKSTEYTFFSAPHHTYSKIDHILGSKALLSKCERTEIITNYLSDHSAIKLELRIKNLTQHCSTSWKLNKLLLNDYWVHNEMKAEIKMFFETNENKDTTYQNLWDAFKAVCRGKFIALNAHKRKQERSKIDTLTSQLKELEKQEQTHSKASRSQQITKIRAELKEIETQKTLQKINESRSLFFERINKIDRLLARLIKKKREKNLIDAIKNDKGDITTDPTEIQTAIREYYKHLYANKLENLEEMDKFLDTYTLPRLNQEEVESLNRPITGSEIVAIINSLPTKKNPGPDGFTAEFYQRFKEELHIKRAKDRNHMIISIDAEKAFDKIQQPFMLKTLNKLGIDGTYFKIIRAIYDKPTANIILNGQKLEAFPLKTGTRQGCPLSPLLFNIVFEVLARAIRQEKEIKGIQLGKEEIKLSLFADDMIVYLENPIVSAQNLLKLISNFSKVSGYKINVQKSQAFLYTNNRQTESQIMSELPFTIASKRIKYLGIQLTRDVKDLFKENYKPLLKEIKEDTNKWKNIPCSWVGRINIVKMAILPKLPMPFFTELEKTTLKFIWNQKRACITKSILSQKNKAEGITLPDFKLYYKATVTKTAWYWYQNRDIDQWNRTEPSEIMPHIYSYLIFDKPEKNKQWGKDSLFNKWCWENWLAIFRKLKLDPFLTPYTKINSRWIKDLNVRPKTIKTLEENLGITIQDIGMGKDFMSKTPKAMATKAKIDKWDLIKLKSFCTAKETTIRVNRQPTKWEKIFATYSSDKGLISRIYNELKEIYKKKTNNPIKKWAKDMNRHFSKEDIYGAKKHMKKCSSSLAIREMQIKTTMRYHLTLVRMAIIKKSGNNSLASGLSIDKIQQPFMLKTLNKLGIDGTYFKIIRAIYDKPTANIILNGQKLEAFPLKTGTRQGCPLSPLLFNIVLEVLARAIRQEKEIKGIQLGKEEVKLSLFADDMIVYLENPIVSAQNLLKLISNFSKVSGYKINVQKSQAFLYTNNRQTESQIMSELPFTIASKRIKYLGIQLTRDVKDLFKENYKPLLKEIKEDTNKWKNIPCSWVGRINIVKMAILPKVIYRFNAIPIKLPMTFFTELEKTTLKFIWNQKRARIAKSILSQKNKAGGITLPDFKLYYKATVTKTAWYWYQNRDIDQWNRTEPSEITPLTYNYLIFDKPEKNKQWGKDSLFNKWCWENWLAICRKLKLDPFLTPYTKINSRWIKDLNVRPKTIKTLEENLRITIQDIGMGEDFMSKTPKAMATKAKIDKWDLIKLKSFCTAKETTIRVNRQPTKWEKIFATYSSDKGLISRIYNELKPIYKKKTNNPIKKWAKDMNRHFSKEDIYAAKKHMKKCSSSLAIREMQIKTTMRYHLTPVRMAIIKKSGNNRSKDIKDREDPLAYGVFAPVVRVESSLQEGSWWVSFWTERGRAMWENIQIELGFRKKQDPGCHLTWKCGYYFYDGRRGGSCLQMQLTL

SEQ ID NO: 35829 - protein, 941 aa, Homo sapiens
  DOMAIN (479)..(526): kw TRANSCRIPTASE REVERSE II ORF2 domain identified by eMATRIX, accession number DM01354V, p-value=1.000e-40, raw score of 12.97
  DOMAIN (277)..(492): Reverse transcriptase domain identified by PFam, accession name rvt, E-value=3.2e-05, PFam score of 4.6
MARTSYGQHFFPTLISMNIDSGRQNNGIPKLSTSYSLKPMNTLCYLVKRDLEGVLKLRILTWESSLDYPGGPSVITKVLIRQKEGQSQRTRYDNGSRGWSDAIAVKRPQAKECGWPLEAGKGKEWILRKECIPANTLMLAQCPPTLRVGGSVCSAWRMIQNSDGERRKRNRIQLQAVRLSKVIHDTFRNFPRFVHSRELSKGAEKSSSLKKGLEQVIIWTKCRQCGESRCTKKVEERKVLHNTFISTSTTITTLGQKHQFAVKKYARITTYLTSSRENQGKGLCPQLNKIAASFTKGPISTDPGIAEPCAGVADGVRPLETTISFFGSVNFEHFSMPQIPEQSQPDLYLPDRSLKIFHKEIQSTKEKTKKKMVESIREKKWKTRWFCTGLKNYLARAIRQEKEIKGIQLGKEEVKLSLFADDMIVYLENPIVSAQNLLKLISNFSKVSGYKINVRKSQAFLYTNNRQTESQIMSELPFTIASKRIKYLGIQLTRDVKDLFKENYKPLLNEIKEDTNKWKNIPCSWVGRINIMKMAILPKVIYRFNAIPIKLPMTFFTELEKTTLKFIWNLKRARIANSILSQKNKAGGITLPDFKLYYKATVSKTAWYWYQNRDIDQWNRTEPSEIMPYIYNHLIFDKPEKNKQWGKDSLFNKWCWENWLAIRRKLKLDPFLTPYTKINSRWIKDLHVRPKTIKTVEENLGITIQDIGMGKHFLSKTPKAMATKAKIDKWDLIKLKSFCTAEETTIRVNRQPTQWEKIFATYSSDKGLIPRIYNELKQIYKEKTNNPIKKWAKNMNRHFSKEDIYAANRHMKKCSSSLAIREMQIKTTMRYHLTPVRMAIIKKSGNNSLILVPLLKKEERALQSDTTTKPSRTSVQRSPIQDKPRFGIHLKSPVKIQRTSCQFKCGRPGLTNTGLRNNCFHTDRVVKLNIESQSPYTKPGI

SEQ ID NO: 35830 - protein, 1203 aa, Homo sapiens
  DOMAIN (675)..(693): CHLORIDE CHANNEL SIGNATURE domain identified by eMATRIX, accession number PR00762A, p-value=4.000e-22, raw score of 14.22
  DOMAIN (663)..(1029): Voltage gated chloride channels domain identified by PFam, accession name voltage_CLC, E-value=1.1e-169, PFam score of 576.2
  misc_feature (1)...(1203): Xaa = X or * as defined in Table 2
TSMQKSSIKYWQTESSSTSKSLSTMIKWASSLGCKAGSVYANQXMXSSIXTEPKTKTIXLSQXMQKKPLYKIQQPFMLKTLNKLAQNLLKLISNFSKVSGYKINVQKSQAFLYTNNRQTESQIMSELPFTIASKRIKYLGIQLTRDVKDLFKENYKPLLKEIKEDTNKWKNIPCSWVGRINIVKMAILPQVIYRFNAIPIKLPMTFFTELEKTTFKFIWNQKRARIAKSILSQKNKAGGITLPDFKLYYKATVTKTAWYWYQNRDIDQWNRTEPSEITPLTYNYLIFDKPDKNKQWGKDSLFNKWCWENWLAICRKLKLDPFLMPYTKINSRWIKDLNIRPKTIKTLEENLGITIQDIGMGKDFMSKTPKAMATKAKIDKWDLIKLKSFCTAKETTIRVNRQPTTWEKIFATYSSDKGLIARIYNELKQIYKKKTNNPIKKWAKDMNRHFSKEDIYAAKKHMKKCSSSLAIREMQIKTTMRYHLTPVRMAIMKKSGNNRCWRGCGEIGTLLHCWWDCKLVQPLWKSVWRFLRDLELEIPFDPAIPLLGIYPKDYKSCCYKDTCTPLKKHISFHLYQYDTDMIGNAGLVIQQPSILQSEDKSYNGGGIGSSNRIMDFLEEPIPGVGTYDDFNTIDWVREKSRDRDRHREGAFAYIVNYFMYVLWALLFAFLAVSLVKVFAPYACGSGIPEIKTILSGFIIRGYLGKWTLVIKTITLVLAVSSGLSLGKEGPLVHVACCCGNILCHCFNKYRKNEAKRREVLSAAAAAGVSVAFGAPIGGVLFSLEEVSYYFPLKTLWRSFFAALVAAFTLRSINPFGNSRLVLFYVEFHTPWHLFELVPFILLGIFGGLWGALFIRTNIAWCRKRKTTQLGKYPVIEVLVVTAITAILAFPNEYTRMSTSELISELFNDCGLLDSSKLCDYENRFNTSKGGELPDRPAGVGVYSAMWQLALTLILKIVITIFTFGMKIPSGLFIPSMAVGAIAGRLLGVGMEQLAYYHQEWTVFNSWCSQGADCITPGLYAMVGAAACLAKEEFAHKTLAMDVMKPRRNDPLLTVLTQDSMTVEDVETIISETTYSGFPVVVSRESQRLVGFVLRRDLIISIENARKKQDGVVSTSIIYFTEHSPPLPPYTPPTLKLRNILDLSPFTVTDLTPMEIVVDIFRKLGLRQCLVTHNGRLLGIITKKDVLKHIAQMANQDPDSILFN

SEQ ID NO: 35831 - protein, 572 aa, Homo sapiens
  DOMAIN (444)..(491): kw TRANSCRIPTASE REVERSE II ORF2 domain identified by eMATRIX, accession number DM01354V, p-value=1.000e-40, raw score of 12.97
  DOMAIN (252)..(457): Reverse transcriptase domain identified by PFam, accession name rvt, E-value=0.00022, PFam score of -7.4
QNGSSLMIWLSVCLLLVYKNACDFCTLILYPEEFAEVAYQLIMVDKLFDVLLDSFCQYFIEDFCINVHQGYWSKILFFGCVSARLWYQDDAGLIKCVGEELLFFYCLEPFQKEWYQLLSVPLVEFGCESVWSWAFFGWDMDEAGNHHSQQTNTPTENRTAHLLTHKWELNNENTWTHGGKHHTPGPVGGCSLIQVEIRWFIEMVCKREVYRYDHSWWWQLQQQQQDPQGRLQASGGWALRRVPGHSQNAQAEARWLYCEPREGRSPLAGTVKARVLNVLAPLPCSSSSRDTHFWASSGMSQISDTLSLKLQETLTFLNILLFQRKGEGKNSMSTTLSKEFLTLSFFDFNLFQNSMLEVLARAIRQEKEIKGIQLGKEEVKLSLFADDMIVYLENPLVSAQNLLKLISNFSKVSEYKINVQKSQAFLHTNNRQTESQIMSELPFTIASKRIKYLGIQLTRDVKDLFKENYKPLLNEIKEDTNKWKNIPCSWVGRINIVKMAILPKVIYRFNAILIKLPMTFFTELEKTTLKFIWNQKRAHVAKSILSQKNKAGGITLPDFKYKATVTKTAWYI

SEQ ID NO: 35832 - protein, 1281 aa, Homo sapiens
  DOMAIN (934)..(963): kw REPLICATION REPB REPA INITIATION domain identified by eMATRIX, accession number DM00653A, p-value=7.207e-27, raw score of 20.40
  DOMAIN (461)..(548): ParB-like nuclease domain identified by PFam, accession name ParBc, E-value=1.7e-10, PFam score of 48.3
  misc_feature (1)...(1281): Xaa = X or * as defined in Table 2
MESRVADAGTGETARAAGGSPAVGCTTRGPVVSAPLGAARWKLLRQVFIRDKLMERRNRRTGRTEKARIWEVTDRTVRTWIGEAVAAAAADGVTFSVPVTPHTFRHSYAMHMLYAGIPLKVLQSLMGHKSISSTEVYTKVFALDVAARHRSRGSPYPYDEYLAMERNNVLTHATTWMNLEKIFLASYFVFLYLTKDSRFLTINIMNKTTSEVWLIDGLSPWDPPVLIQKRIHGVLYYVEHRDDELYILTNVGEPTEFKRDVTANCPGSWRFEQRIGQNTQQRKNEATKERKQLSRLSARRRPRCNFLRSSRIRVHPTPAASTMPPKFHPNEIKVVYFTCTGVEVGATSALAPKIGPAGLSPKEVGDDIAKVTGIQDKLDYITALNIKTVWITSFYKSSLKDFRYGVEDFREVDPIFGTMEDFENLVAAIHDKXGSPGNAITLPVCGRDVKFTLEVLRGDSVEKTSRVWSGNERDQELLTEDALDDLIPSFLLTGQQTPAFGRRVSGVIEIADGSRRRKAAALTESDYRVLVGELDDEQMAALSRLGNDYRPTSAYERGQRYASRLQNEFAGNISALADAENISRKIITRCINTAKLPKSGVALFSHPGELSARSGDALQKAFTDKEELLKQQASNLHEQKKAGAPFLDVLNTMMDTTLPLTLEELEEWGNPSSDEKHKNYIKRYCPYQNIKPQDLQPVKQENEKPLPENMDAFEKVRTKLETQPQERYEIINVGTQNLLKLISNFSKVSRYKINVQKSQAFLYTNNRQTESQIMSELPFTIASKRIKYLGIQLTRDLKDLFKENYKPLLNEIKEDTNKWKNIPCSWVGRINIVKMAILPKWLQVAKRAGLGRGQSGRTALRERVLIEIASTHIALATRHSDWGCCRNGRYPARGPAVPAYPSLCLQHAWVTVDSDTLAWDAALLTCRHGLSNQNRFTQFRLSETKEITNPYAMRLYESLCQYRKPDGSGIVSLKIDWIIERYQLPQSYQRMPDFRRRFLQDGKLVPMTVFHKTDSEDLQKKPLLVHVYGAYGMDLKMNFRPERPVLVDDGWILAYWHGSVSQYILPGLTLRSHTGTENGYQGEESLFNKAYYGGGTNFFRKESQKLQQSAKKRDAELANGALGIIELNNDYTLKKVMKPLITSNTVTDEIERANVFKMNGKWYLFTDSRGSKMTIDGINSNDIYMLGYVSNSLTGPYKPLNKTGLVLQMGLDPNDVTFTYSHFAVPQAKGNNVVITSYMTNRGFFEDKKATFAPSFLMNIKGNKTSVVKNSILEQGQLTVN

SEQ ID NO: 35833 - protein, 1308 aa, Homo sapiens
  DOMAIN (262)..(287): 7 kw REVERSE TRANSCRIPTASE RNA POLYMERASE domain identified by eMATRIX, accession number DM00895E, p-value=3.586e-10, raw score of 15.72
  DOMAIN (233)..(911): Reverse transcriptase domain identified by PFam, accession name rvt, E-value=5.5e-66, PFam score of 232.6
MKAEIKMFFETNENKDTTYQNLWDAFKAVCRGKFIALNAHKRKQERSKIDNLTSQLKELEKQEQTHSKASRRQEITKIRAELKEIETQKTLQKINESRSWFFERINKIDRPLARLIKKKREKNQIDTIKNDKWDITTDPTEIQTTIREYYKHLYANKLENLEEMDKFLDTYTLPRLNQEEVESLNRPITGSEIVAIINSLPTKKSPGPDGFTAEFYQRYKEELVPFLLKLFQSIGKEGILPNSFYEASIILIPKPGRDTTKKANFRPISLMNIDAKILNKILAKRIQQHIKKLIHHDQHINKAKDKNHMIISIDAEKAFDKIQQPFMLKTLNKLGIDGTLVKQLQQKSSGYKINVQKSQAFLYTNKRQTESQIISEFPFTIASKRIKYLGIQLTRDVKDLFKENYKPLLKEIKEDTNKWKNIPCSWVGRINIVKNGHTAQELEKTTLKFIWNQKRAYITKSILSQKDKAGGITLPDFKLHYKATQGTPTDLQLRVLSVRRKTNTKDIHTKNPSVQHHHQRPKVDKTTKMGKKQNRKTGNSKKQSASPPPKERSSSPAMEQSWMENDFDELREEGFRRSNYSELREDIQTKGKEVENFEKNLEECITRITNTEKCLKELMELKTKARELHEECRSLRSRCDQLEERVSAMEDEMNEMKREGKFREKRIKRNEQSLQEIWDYVKRPNLRLIGVPESDGENGTKLENTLQDIIQENFPNLARQANHINRAKDKTHMIISIDAEKAFDKIQQLFMLKTLNKLGIDGTYFKIIRAIYDKPTANIILNGQKLEAFPLKTGTRQGCPLSPLLFNIVLEVLARAIRQEKEIKGIQLAKEEVKLSLFADDMIVYLENPIVSAQNLLKLISNFGKVSGYKINVQKSQAFLYTNTRQTESQIMSELPFTIASKRIKYLGIQLTRDVKDLFKENYKPLAQMATKDKIDKWDLIKLKSFCTAKETTIRVNRQPTKWEEIFATYSSDKGLISRIYNGLKQIYKKKTNNPIKKWAKDMNRHFSKEDIYAAKKHVKKCSSSLAIREMQIKTTMRYHLTPVRMAIIKKSGSNRCWRGCGEIGTLLHCWWDCKLVQPLWKSVWRFLRDLELEIPFDPAIPLLGIYPNDYKSCCYKDTCTLSLPEIRNCPTKSVPVPFSVDETQYHVEDTSPVSWQVKVLGKHIHQGSSYEDVWLPQRMQGKLTNRKDIHTKNPSVHHHHQRPKVDKTTKMGKKQNRKTGNSKKQSASPPPKERSSSPAMQQSWTENDFDELREEGFRRSNYSELREDIQTKGKEVENFEKNLEECITRITNTEKCLKELMELKTKA

SEQ ID NO: 35834 - protein, 679 aa, Homo sapiens
  DOMAIN (90)..(133): kw TRANSCRIPTASE REVERSE II ORF2 domain identified by eMATRIX, accession number DM01354T, p-value=1.000e-40, raw score of 9.48
  DOMAIN (7)..(212): Reverse transcriptase domain identified by PFam, accession name rvt, E-value=6.1e-27, PFam score of 102.9
SSGLHPWDARLVQYTQINKCNPAYKQSQRQKPHDYLNRCRKKAFDKIQQPFMLQTLNKLGIDGTYFKIIRAIYDKPTANIILNGQKLEAFPLKTGTRQGCPLSLLLFNIVLEVLARAIRQEKEIKGIQLGKEEVKLSLFADDMIVYLENPIISAQNLLKLISNFSKVSGYKINVQKSQTFLYNNNRQTESQIMSELPFTIALKRIKYLGIQLTRDVKDLFKENYKPLLKEIKEDTNKWKNIPCSWVGRINIVKMAILPKVIYRFNAIPIKLPMTFFTELEKTTLKFIWNQKRARIAKSILSQKNKAGGITLPDFKLYYKATVTKTAWYWYQNRDIDQWNRTEPSEIMPHIYNYLIFDKPEKNKQWGKDSLFNKWCWENWLAICRKLKLDPFLTRYTKINSRWIKDLNVRPKTIKTLEENLGITIQDIGVGKDFMSKTPKAMAAKAKIDKWDLIKLKSFCTAKETTIRVNRQPTTWEKIFATYSSDKGLISRIYNELQQIYKKKTNNPIKKWAKDMNRHFSKEDIYAAKKHMKKCSSSLAIREMQIKTTMRYHLTPVRMAIIKKSGNNRIRRHFQPRSAMFFCCCPGGEGSGLQWELLLAAWTVLPYPCPAATVGRFLKQAQTADHSFLGHVWRVPSSRSWTDKEILSLVVNRQNQEVVQLIGGLCGTHTISPTQHPATG

SEQ ID NO: 35835 - protein, 1446 aa, Homo sapiens
  DOMAIN (655)..(702): kw TRANSCRIPTASE REVERSE II ORF2 domain identified by eMATRIX, accession number DM01354V, p-value=1.000e-40, raw score of 12.97
  DOMAIN (481)..(1430): Reverse transcriptase domain identified by PFam, accession name rvt, E-value=8.9e-06, PFam score of 12.3
LQTILQGYSNSKQHGTGTKTAWYWYQNRDIDQWNRTEPSEITPHIYNYLIFDKPDKNKKWGKDSLFNKWCWENWLVICIKLKLDPFLTPYTKINSRWIKDLNVRPKTIKTIEENLGNTIQDIGMGKDFMSETLKARATKAKIDKWDLIKLKSFCTAKETTIRVNRQPTKWEKIFAIYSSDKGLIPRIYKELKQIYKKKTNSPIKKWVKDMNRHFSKEDIYAAKKHMKKCSSSLAIREMQIKTAMRYHLTPVRMAIIKKSGNNRIFDHLLSFLLLLSFSAVIPYDVFVFDSYKPLIPPTPPFELSTSVFQHIMVVKKTKLPVKQTQAGPSKGIPEDAIVIIGNDSFMHVTVPEDLSVGQDVEVEDSDIEVKWPQEKSSSAFSAHLPVVLPSPKPQTFRSSWLQQISIAFKPIILTFHLDLLLVLEETLTMETMLDKKQIQAIFLFEFKMGRKAVETTRNISNTLGPETANECTKFGKGEKSLEDKEHSCRPWEVDNDQLRAIIEVDPLTAMREVAEELNVNRSTVFQHLKQIARYGKLFRSPPTSWAQWQTLEHVLSLFIVTITFWVLEVLARAIRQEKEIKGIQLGKEEVKLSLFADDMIVYLENPIVSAQNLLKLISNFSKVSGYKINVQKSQAFLYTNNRQTESQIMSELPFTIASKRIKYLGIQLTRDVKDLFKETYKPLLNEIKEDTNKWKNIPCSWVGKINIVNMAILPKVTYRFNTIPIKLPMTFFTELEKTTFKFIWNQKRARIAKSILSQKNKAEGIMLPDFKLYYKATVTKTAWYWYQNRDIDQWNRTEPSEITPHIYNYLIFDKPEKNKQWGKDSLFNKWCWENWLAICRKLKLDPFLTPYTKINSRWIKDLNVRPKTIKTLEENLGNTIQNIGMGKDFMSKTPKAMATKDKIDKWDLIKLKSFCTAKETTIRVNRQPTKWEKIFATYSSDKGLISRIYNELKQIYKKKTNNPIKKWTKDMNRYFSKEDIYAAKKHMKKCSSSLAIREMQIKTTMRYHLTPVRMAIIKKSGNNRIFDHLLSFLLLLSFSAVIPYDVFVFDSYKPLIPPTPPFELSTSVFQHIMVVKKTKLPVKQTQAGPSKGIPEDAIVIIGNDSFMHVTVPEDLSVGQDVEVEDSDIEVKWPQEKSSSAFSAHLPVVLPSPKPQTFRSSWLQQISIAFKPIILTFHLDLLLVLEETLTMETMLDKKQIQAIFLFEFKMGRKAVETTRNISNTLGPETANECTKFGKGEKSLEDKEHSCRPWEVDNDQLRAIIEVDPLTAMREVAEELNVNRSTVFQHLKQIARYGKLFRSPPTSWAQWQTLEHVLSLFIVTITFWVLEVLARAIRQEKEIKGIQLGKEEVKLSLFADDMIVYLENPIVSAQNLLKLISNFSKVSGYKINVQKSQAFLYTNNRQTESQIMSELPFTIASKRIKYLGIQLTRDVKDLLQGDLQTTAQ

SEQ ID NO: 35836 - protein, 1859 aa, Homo sapiens
  DOMAIN (272)..(317): kw TRANSCRIPTASE REVERSE II ORF2 domain identified by eMATRIX, accession number DM01354N, p-value=1.000e-40, raw score of 13.17
  DOMAIN (1199)..(1451): Reverse transcriptase domain identified by PFam, accession name rvt, E-value=0.00038, PFam score of -10.7
MGDFNTPLSTLDRSTRQKVNKDTQELNSALHQADLIDIYQTLHPKSTEYTFFSAPHHTYSKIDHILGSKALLSKCKRTQIITNYLSDHSAIKLELRIKNLTQNHSTTWKLNNLLLNDYWVYNEMKAEIKMFFETNENEDTTYQNLWDAFKAVCRGKFIALNAHKRKQERSKIDTLTSQLKELEKQEQTHSKASRRQEITKIRAELKEIETQKTLQKINESRSWFFERINKIDRPLARLIKKKREKNQIDTIKNDKGDITTDPTEIQTTIREYYKHLYANKLENLEEMDKFLDTYTLPRLNQEEVESLNRPITGAENVAIINSLPTKKSPGPDGFTAEFYQRYKEELLISNFSKVSGYKINVRKSQAFLYTDNRQTESQIMSELPFTIASKRIKYLGIQLTRDVKDLFKENYKPLLKEIKEDTNKWKNIPWSWVGRINIVKMAILPKRKQPSALTAEGKAAGWGFLWPTSEPVTRKGLEENAQSRQESTRRLILVGRTGAGKSATGNSILGQRRFFSRLGATSVTRACTTGSRRWDKCHVEVVDTPDIFSSQVSKTDPGCEERGHCYLLSAPGPHALLLVTQLGRFTAQDQQAVRQVRDMFGEDVLKWMVIVFTRKEDLAGGSLHDYVSNTENRALRELVAECGGRVCAFDNRATGREQEAQVEQLLGMVEGLVLEHKGAHYSNEVYELAQVLRWAGPEERLRRVAERVAARGEWTEEIFEKEMVKTFLKVLKDTKLQIQETESSKQGSPLSSTMIGSLLRPSPEEDASTVRPSPEEDASTVLPAQPANWWAPSRARQLTRVSHEPRVKPCKGLFWSSLDQSAFLILVSRNFPEAEPLSHGAFSPSTWLLLNCVCSTSLSPVNSIPAHRRRAGLSLLPLHLPERGPAARASVTATLEDRAQQPFLERMGGFQRGKYGTMAEGRSEDNLSATPPALRIILVGKTGCGKSATGNSILGQPVFESKLRAQSVTRTCQVKTGTWNGRKVLVVDTPSIFESQADTQELYKNIGDCYLLSAPGPHVLLLVIQLGRFTAQDTVAIRKVKEVFGTGAMRHVVILFTHKEDLGGQALDDYVANTDNCSLKDLVRECERRYCAFNNWGSVEEQRQQQAELLAVIERLGREREGSFHSNDLFLDAQLLQRTGAGACQEDYRQYQAKVEWQVLPVVFLAGPSPASLEQLGIQEEVIAVEGALSLPPQPLDRSQELCLLLPLLLPGSPVVEGTVPSLTFLHQCSGRKSTQAPQKNNFSGFATMKNPYNPFQSNMRTLLCAKFHTMKHAGLGEGIPPDNSGNDGYANNGYSAREEENETLTENLRSKVTAIKSFSIEIGHEVKTQNKLLAVMDSQFDSTTGFLVLEVLARAIRQEKEIKGIQLGKEEVKLSLFADDMIVHLENPIVSAQNLFKLISNFSKVSGYKINVQKSQAFLYTNNRQTESQIMSELPFTIASKRIKNLGIQLTRDVKDLFKENYKPLLNEIKEDTNKWKNIPCSWIGRINIVKMAILAKVIYRFNGIPIKLQMTFFTELEKTTLKFIWNQKRARIAKAILSQKNEAGGITLPDFKLYYKATVTKTAWYWYQNRDIDPWNRTEPSEITQHIYNYLIFDKPEKNKQRGKDSLFNKWCWENWLAICRKLKLDPFLTPYTKINSRWIKDLNVRPKTIKTLEENLGITIQDIGMGKDFMSKTPKAMATKDKIDKWDLIKLKSFCIAKETTIRVNRQPTKWEKIFTAYSSDKGLISRIYNELQQIYKKKTNNCIKKWAKDMNRHFSKEDIYAAKKHMKKCSPSLAIREMQIKTTMRYHLTPVRMAIIKKSGNSRVYSFHLNIKVNCKTASGGVPKGIVNIGDDSSMHVIAPEDLLVGQAVEMEDRY

SEQ ID NO: 35837 - protein, 1475 aa, Homo sapiens
  DOMAIN (104)..(149): kw TRANSCRIPTASE REVERSE II ORF2 domain identified by eMATRIX, accession number DM01354N, p-value=1.000e-40, raw score of 13.17
  DOMAIN (188)..(1289): Reverse transcriptase domain identified by PFam, accession name rvt, E-value=1.8e-148, PFam score of 506.7
  misc_feature (1)...(1475): Xaa = X or * as defined in Table 2
TDTSQKKTFMQPKKHMKKCSPSLAIREMQIKTTMRYHLTPVRMAIIKKSGNNRSWYFEKINKIDRLLARLIKKKREKNQIDAIKNDKGDITTDPTEIQTTTREYYKHLYANKLENLEEMDKFLDTYNLPRLKQEEVESLNRPIRGSEIVAIINSLPTKKSPGPDGFTAEFYHRYKEELVPLLLKLFQSIEKEVILPNSFYEASIILIPKPDRDTAKKENFRPISLMNIDAKILNKILANRIQQHIKKLIHHDQVGFIPGMQGWFNIRKSVNVIQHINRTKDKNHMIISIDAEKSFDKIQQHFMLKTLNKLGIDGTYLTYLKIIRAIYDKPTANIILNGQKLEAFPLKTGTRQGCPLSPLLFNIVLEVLARAIRQEKEIKGIQLGKEEVKLSLFADDMIVYLENPIVSAPNLLKLISNVSKVXGYKINVQESQAFLYTINRQTESQIMSALPFTIASKRIKYLGIQLTRDVKELFKENYKPLLKEIKEDTNKWKNIPCSWVGRINIVKMAILPKVIYRFNAIPIKLPMTFFTELEKNYFKXSSLWNQKRARVAKSILSQKNKAGGGIMLPDLIKLQTILYKATVTKTVCYQHGTGTKTAWYWYQNRDIDQWNRIEPLEIIPYTYNHLIFEKPEKNKKWGKDSLFNKWCWENWLAICRRKLKLDPFLTPYTKINSRWIKDLNIIRPKTIKTLEEYLGITIQDIGMGKDFMSKTPKTKAMAPKAMATKAKIDKWDLIIKLKSFCTSAQQKETTIRVNRQPVGRKFRQPEWEKIFTTHSSDKGLISRIYNELKHIYKKKTNNPIKKWTKDMNRHFSKEDIYAAKKHMKKCSPSLAIREMQIKTTMRYHLTPVRMAIIKKSGNNRSWYFEKINKIDRLLARLIKKKREKNQIDAIKNDKGDITTDPTEIQTTTREYYKHLYANKLENLEEMDKFLDTYNLPRLKQEEVESLNRPIRGSEIVAIINSLPTKKSPGPDGFTAEFYHRYKEELVPLLLKLFQSIEKEVILPNSFYEASIILIPKPDRDTAKKENFRPISLMNIDAKILNKILANRIQQHIKKLIHHDQVGFIPGMQGWFNIRKSVNVIQHINRTKDKNHMIISIDAEKSFDKIQQHFMLKTLNKLGIDGTYLTYLKIIRAIYDKPTANIILNGQKLEAFPFKTGTRQGCPLSPLLFNIVLEALARAIRQEKEIKGIQLGKEDVKLSLFADDMIVYLENPIVSAQNLLKLISNFSEVSGYKINVQKSQAFLYTNNRQTESQIMSELPFTIASKRIKYLGIQLTRDVKDLFKENYKPLLNEIKEDTNKWKNIPCSWIGRINIVKMAILPKTCTYDDEYKKKDIKSVAFWRIWQDGQIGRAPVCSFQQTNIEDHQPQRSKADKPTKMRKNQRKYAENSKNQNASSLPNDRNSSPERAQNWLENKCDELSEVGFKRWVITNSSELKEHVLTQCKEAKNLDKRLQELLTKITSVEKNTNDLMELKNTA

SEQ ID NO: 35838 - protein, 793 aa, Homo sapiens
  DOMAIN (180)..(447): Glycosyl transferase family 8 domain identified by PFam, accession name Glyco_transf_8, E-value=3.4e-06, PFam score of -0.2
GSACRDPDPDPLRLVGGGAAAPPCSSVSPSAWRQSRPREYYEGGRGLHAPDRETALGLGIATSERMLGICRGRRKFLAASLSLLCIPAITWIYLFSGSFEDGKPVSLSPLESQAHSPRYTASSQRERESLEVRMREVEEENRALRRQLSLAQGRAPSHRRGNHSKTYSMEEGTGDSENLRAGIVAGNSSECGQQPVVEKCRRNPLHFHLIADSIAEQILATLFQTWMVPAVRVDFYNADELKSEVSWIPNKHYSGIYGLMKLVLTKTLPANLERVIVLDTDITFATDIAELWAVFHKFKGQQVLGLVENQSDWYLGNLWKNHRPWPALGRGYNTGVILLLLDKLRKMKWEQMWRLTAERELMGMLSTSLADQDIFNAVIKQNPFLVYQLPCFWNVQLSDHTRSEQCYRDVSDLKVIHWNSPKKLRVKNKHVEFFRNLYLTFLEYDGNLLRRELFGCPSEADVNSENLQKQLSELDEDDLCYEFRRERFTVHRTHLYFLHYEYEPAADSTDVTLVAQLSMDRLQMLEAICKHWEGPISLALYLSDAEAQQFLRYAQGSEVLMSRHNVGYHIVYKEGQFYPVNLLRNVAMKHISTPYMFLSDIDFLPMYGLYEYLRKSVIQLDLANTKKAMIVPAFETLRYRLSFPKSKAELLSMLDMGTLFTFRYHVWTKGHAPTNFAKWRTATTPYRVEWEADFEPYVVVRRDCPEYDRRFVGFGWNKVAHIMELDVQEYEFIVLPNAYMIHMPHAPSFDITKFRSNKQYRICLKTLKEEFQQDMSRRYGFAALKYLTAENNS

SEQ ID NO: 35839 - protein, 692 aa, Homo sapiens
  DOMAIN (79)..(346): Glycosyl transferase family 8 domain identified by PFam, accession name Glyco_transf_8, E-value=3.4e-06, PFam score of -0.2
GKPVSLSPLESQAHSPRYTASSQRERESLEVRMREVEEENRALRRQLSLAQGRAPSHRRGNHSKTYSMEEGTGDSENLRAGIVAGNSSECGQQPVVEKCRRNPLHFHLIADSIAEQILATLFQTWMVPAVRVDFYNADELKSEVSWIPNKHYSGIYGLMKLVLTKTLPANLERVIVLDTDITFATDIAELWAVFHKFKGQQVLGLVENQSDWYLGNLWKNHRPWPALGRGYNTGVILLLLDKLRKMKWEQMWRLTAERELMGMLSTSLADQDIFNAVIKQNPFLVYQLPCFWNVQLSDHTRSEQCYRDVSDLKVIHWNSPKKLRVKNKHVEFFRNLYLTFLEYDGNLLRRELFGCPSEADVNSENLQKQLSELDEDDLCYEFRRERFTVHRTHLYFLHYEYEPAADSTDVTLVAQLSMDRLQMLEAICKHWEGPISLALYLSDAEAQQFLRYAQGSEVLMSRHNVGYHIVYKEGQFYPVNLLRNVAMKHISTPYMFLSDIDFLPMYGLYEYLRKSVIQLDLANTKKAMIVPAFETLRYRLSFPKSKAELLSMLDMGTLFTFRYHVWTKGHAPTNFAKWRTATTPYRVEWEADFEPYVVVRRDCPEYDRRFVGFGWNKVAHIMELDVQEYEFIVLPNAYMIHMPHAPSFDITKFRSNKQYRICLKTLKEEFQQDMSRRYGFAALKYLTAENNS

SEQ ID NO: 35840 - protein, 785 aa, Homo sapiens
  DOMAIN (180)..(438): Glycosyl transferase family 8 domain identified by PFam, accession name Glyco_transf_8, E-value=2.9e-07, PFam score of 14.4
AREYYEGGRGLHAPDRETALGLGIATSERMLGICRGRRKFLAASLSLLCIPAITWIYLFSGSFEDGKPVSLSPLESQAHSPRYTASSQRERESLEVRMREVEEENRALRRQLSLAQGRAPSHRRGNHSKTYSMEEGTGDSENLRAGIVAGNSSECGQQPVVEKCETIHVAIVCAGYNASRDVVTLVKSVLFHRRNPLHFHLIADSIAEQILATLFQTWMVPAVRVDFYNADELKSEVSWIPNKHYSGIYGLMKLVLTKTLPANLERVIVLDTDITFATDIAELWAVFHKFKGQQVLGLVENQSDWYLGNLWKNHRPWPALGRGYNTGVILLLLDKLRKMKWEQMWRLTAERELMGMLSTSLADQDIFNAVIKQNPFLVYQLPCFWNVQLSDHTRSEQCYRDVSDLKVIHWNSPKKLRVKNKHVEFFRNLYLTFLEYDGNLLRRELFGCPSEADVNSENLQKQLSELDEDDLCYEFRRERFTVHRTHLYFLHYEYEPAADSTDVTLVAQLSMDRLQMLEAICKHWEGPISLALYLSDAEAQQFLRYAQGSEVLMSRHNVGYHIVYKEGQFYPVNLLRNVAMKHISTPYMFLSDIDFLPMYGLYEYLRKSVIQLDLANTKKAMIVPAFETLRYRLSFPKSKAELLSMLDMGTLFTFRYHVWTKGHAPTNFAKWRTATTPYRVEWEADFEPYVVVRRDCPEYDRRFVGFGWNKVAHIMELDVQEYEFIVLPNAYMIHMPHAPSFDITKFRSNKQYRICLKTLKEEFQQDMSRRYGFAALKYLTAENNS

SEQ ID NO: 35841 - protein, 41 aa, Homo sapiens
  misc_feature (1)...(41): Xaa = X or * as defined in Table 2
XRNPLHFHLIADSIAEQILATLFQTWMVPAVRVDFYNAVHP

SEQ ID NO: 35842 - protein, 110 aa, Homo sapiens
DHSKRSAIEDNKYIDQKLRKSVFSIRARNLLEKETAVTKILSKSPLPTSSPISIRCCLYLGRSHCHSSGVRMYRNFPQPCSGTLRKTTWRQRRKEPGTPCYCVSNQLAGV

SEQ ID NO: 35843 - protein, 444 aa, Homo sapiens
  DOMAIN (1)..(175): Ion transport protein domain identified by PFam, accession name ion_trans, E-value=0.02, PFam score of -108.4
MPQNVPAESGAQLLMVLRCLRPLRIFKLVPQMRKVVRELFSGFKEIFLVSILLLTLMLVFASFGVQLFAGKLAKCNDPNIIRRNISQCSLTLHGDEFRVSQSLAPGNTPTDPLEGVTLSQHKALCRKAQEDSDDVALGSDYWALQEHQITLLSRCACVGGGVCGTAYASISLGVIPTFRVKFLLRLLRGRLEVDLDKDKLLFKHMCYEMERLHNGGDVTFHDVLSMLSYRSVDIRKSLQLEELLAREQLEYTIEEEVAKQTIRMWLKKCLKRIRAKTAAVVQYHPQPEKESAAKAGARFLNPPSMETTQPKPLQYGIIYIIQHKQVCRFQMSYITGKDERGVMTSYIRFSIRNKITKSIWLLIKSSSWKPHCISLSHLKFLLAVTIPLILLVVNDFDGFEEYQSGLLYFLAPQNVLSSSCVLFNSALKPAISSECRLVLLENVI

SEQ ID NO: 35844 - protein, 370 aa, Homo sapiens
  DOMAIN (74)..(101): Stathmin family proteins domain identified by eMATRIX, accession number BL00563B, p-value=9.820e-10, raw score of 6.08
MEQRACTRQRMLSGSFEGQPAKERSILSVQHHIRQERRSLRHGSNSQRISRGKSLETLTQDHSNTVRYRNAQREDSEIKMIQEKKEQAEMKRKVQEEELRENHPYFDKPLFIVGREHRFRNFCRVVVRARFNADLLGLVTYLDWVMIIVTICSCISMMFESPFRRVMHAPTLQIAEYVFVIFMSIELNLKIMADGLFFTPTAVIRDFGGVMDIFIYLKQQQSCSIIHSLRESQQQELSRFLNPPSIETTQPSEDTNANSQDNSMQPETSSQQQLLSPTLSDRGGSRQDAADAGKPQRKFGQWRLPSAPKPISHSVSSVNLRFGGRTTMKSVVCKMNPMTDAASCGSEVKKWWTRQLTVESDESGDDLLDI

SEQ ID NO: 35845 - protein, 842 aa, Homo sapiens
  DOMAIN (288)..(315): Stathmin family proteins domain identified by eMATRIX, accession number BL00563B, p-value=9.820e-10, raw score of 6.08
  DOMAIN (352)..(577): Ion transport protein domain identified by PFam, accession name ion_trans, E-value=6.2e-08, PFam score of -24.5
GVIPTFRVKFLLRLLRGRLEVDLDKDKLLFKHMCYEMERLHNGGDVTFHDVLSMLSYRSVDIRKSLQLEELLAREQLEYTIEEEVAKQTIRMWLKKCLKRIRAAFMSMFQILTQEGWVDVMDQTLNAVGHMWAPVVAIYFILYHLFATLVLTYVLAKVGKSLIHVLLGATNNWKLAITNTDRLTNKQIKPVVPRPKDANGKPCDVNTEKKENVIKRSLACTRQRMLSGSFEGQPAKERSILSVQHHIRQERRSLRHGSNSQRISRGKSLETLTQDHSNTVRYRNAQREDSEIKMIQEKKEQAEMKRKVQEEELRENHPYFDKPLFIVGREHRFRNFCRVVVRARFNADLLGLVTYLDWVMIIVTICSCISMMFESPFRRVMHAPTLQIAEYVFVIFMSIELNLKIMADGLFFTPTAVIRDFGGVMDIFIYLVSLIFLCWMPQNVPAESGAQLLMVLRCLRPLRIFKLVPQMRKVVRELFSGFKEIFLVSILLLTLMLVFASFGVQLFAGKLAKCNDPNIIRRLRKSVFSIRARNLLEKETAVTKILRIIVFSLIQEVPRQGARGHYRRAHPLASAVVSTWEDHIVTLVESEWGATIRIPENVEATLELGNRQRLEQFGGLRRRQEDMGKFGTSYLLDSFDQNTDSDMDSEVQAELWDMVPCLPAASAPAMAKRCQYTAQADASKSASPTTWWLTHGFGPVGEQKSRTEVWEPLPRFHRMYRNNWMSRQKFAVGVEPSWRTSAGAVRKENVWLESTHRVPTGALPSGAVRRGPPSSRLQNGRSTDSLHCVPGKATDTQYQSRRGSVPCKATMVELPKAMGAHLLHQCALDIYKTESKEIILEL

SEQ ID NO: 35846 - protein, 184 aa, Homo sapiens
PMSPFPEDCGKLEVERGGDQVPLGNWSSETVGRGLFHPPCGPQKQRTSSFRESSMKRKESRPKTTLKHRLIQRDLDHFSLLQDITLVYYTDDIMLIASGEQEVANTLDSQAALMASWGVPYDHLKEEEKTRAWFTDGSAQYAGTTQKWAAATLQPLARTSLKDSGEGKSSQWAELQAVHLVVHL

SEQ ID NO: 35847 - protein, 570 aa, Homo sapiens
  DOMAIN (373)..(519): RNase H domain identified by PFam, accession name rnaseH, E- value=1.5e-05, PFam score of 10.1
  misc_feature (1)...(570): Xaa = X or * as defined in Table 2
MSQGTTPWGPTPAGTTPESEVHRPFPFPVPVPVPETSERSFPVRGVCGQAKSGLRRGAARLAPAAYLFTRQQTRELIHSACVSISVNTMHGLSVAINSRRCTYYRKYVIDFSKSEIIGIPISKNIDLTVGTTVTQLQNLNTVGIIGSRGGRGQVAALNCDRQGHLWLFTRVTVHWRMGNDRTFWGLLDTVSELMFIPGNPKHHCGPPVKVGAYGVTFLGVHWCGACQDTPCKMKDKLLHLAPPTTKKKAQYVVGLLGFWRPIYRVTQKAASFEWGPEQDKALPQVQAAVQPALLFGPYDSADPMVLEASVADRDAVWSLWQAPISHKMGHAQQHSIIKWKXYICDWARAGPKGTTAPMASWGVLYDQLTEEEKTRAWFTDGSARYAGTTQKWTAAALQPLSRTSLKGSGEGKSSQWAELQAVHLVVHFSWKDKWPDVRLYIDSWAVANGLAGWSGTWKKHDWKIGDKEIWGRGMWMDLSEWPKPVKIFGSHVSAHQWVISAEEDFNNQVDKMTCSVDITQPLSPATPVITQWAHKQSGHGGRDGGYTWAQQHGLPLTKTGLAMATAECPI

SEQ ID NO: 35848 - protein, 146 aa, Homo sapiens
  DOMAIN (75)..(88): TAILLESS COMPLEX POLYPEPTIDE 1 (CHAPERONE) SIGNATURE domain identified by eMATRIX, accession number PR00304E, p-value=7.158e- 11, raw score of 7.79
  DOMAIN (63)..(88): TCP-1/cpn60 chaperonin family domain identified by PFam, accession name cpn60_TCP1, E-value=0.0031, PFam score of 15.4
MGFYSDGYEAQFGVQPTFVFLVASTTIECGRYPVEIFMMGEEAKLAVMPQLMEETEQFMPNSIMIVRRAIENDLVVAGGGAIEIKLSKLIKTIYMQGSEQEKSYGKHFSTKDSVPDVLRLMGAIRGDQLSVAGLIKLDCEPEPSTY

SEQ ID NO: 35849 - protein, 204 aa, Homo sapiens
MGNYQAIVDAEWNILYDKLARIHHSGAKVVLSKLSNGDVVTQYFADRGRTTHAPLSSTVMPQLMEETEQFMPNSIMIVRRAIENDLVVAGGHQWSQHNFFHQYVDQVHKGVTHGQCHTGSHPTSPGVAITVSHAHTDRPQSRSPSRDQGRTPVIQDDSPPQGHRQAPPPSLTTENRYHQGVAMNKGADSFTPTRTREYHRKDDI

SEQ ID NO: 35850 - protein, 244 aa, Homo sapiens
  DOMAIN (216)..(239): TAILLESS COMPLEX POLYPEPTIDE 1 (CHAPERONE) SIGNATURE domain identified by eMATRIX, accession number PR00304D, p-value=9.757e- 17, raw score of 11.04
  DOMAIN (1)..(244): TCP-1/cpn60 chaperonin family domain identified by PFam, accession name cpn60_TCP1, E-value=1.1e-82, PFam score of 288.1
EKCAMTALSSKLISQQKAFFAKMVVDAVMMLDDLLQLKMIGIKKVQGGALEDSQLVAGVAFKKTFSYAGFEMQPKKYHNPKIALLNVELELKAEKDNAEIRVHTVEDYQAIVDAEWNILYDKLEKIHHSGAKVVLSKLPIGDVATQYFADRDMFCAGRVPEEDLKRTMMACGGSIQTSVNALSADVLGRCQVFEETQIGGERYNFFTGCPKAKTCTFILRGGAEQFMEETERSLHDAIMIVRRA

SEQ ID NO: 35851 - protein, 157 aa, Homo sapiens
NSTTIMSRHSLVSIEEEGLDMVNRETAHEREMQTAMQISQSWDESLSLSDSDFDKPEKLYSPKRIDFTPVSPAPSPTRGFGKMFVSSSGLPPSPVPSPRRFSSRRSQSPVKCIRPSVLGPLKRKGEMETESQPKRLFQGTTNMLSPDAAQLSDLSSW

SEQ ID NO: 35852 - protein, 198 aa, Homo sapiens
AVTAWKKAWIWWNRETAHEREMQTAMQISQSWDESLSLSDSDFDKPEKLYSPKRIDFTPVSPAPSPTRGFGKMFREQQWIATKSSSQSKTDFQAGEVRVQVKCIKTQVFLGPLKKKKVKWRPESQPQETLSKGTTNMLSPDAAQLSDLSSCSDILDGSSSSSGLSSDPLAKGSATAESPVACSNSCSSFILMDDLSPK

SEQ ID NO: 35853 - protein, 189 aa, Homo sapiens
  DOMAIN (39)..(80): kw TRANSCRIPTASE REVERSE II ORF2 domain identified by eMATRIX, accession number DM01354I, p-value=1.938e-33, raw score of 15.55
MPQQVQNHGNRNSLSDHSAIKLELRIKKLTQNHTITWKLNNLLLNDYWINNEIKVEINKFFDTNKNKDTTYQNLWDTGFPISKPDGLSQLEQDLQVFDLETKTREVLRDDFSEFRQITISKEAFTSEKNNECNKPEKSFSLDSTIDADQKVLRIQNTDDNDKNDMSFSQNSASGKHEHINLTQDFQSSI

SEQ ID NO: 35854 - protein, 712 aa, Homo sapiens
  DOMAIN (194)..(233): PROTEIN ZINC FINGER ZINC-FINGER METAL-BINDING NU domain identified by eMATRIX, accession number PD01066, p-value=1.600e-30, raw score of 19.43
  DOMAIN (433)..(707): Zinc finger, C2H2 type domain identified by PFam, accession name zf-C2H2, E-value=3.4e-39, PFam score of 143.6
MEGSGTGKRRGKAAKTSLRIMDARAQLLLRVPHPGPSLTSGALTHIRDPHPGLSPTSGTLMPGRRRGGPHSGPCTPSPEVPPRSAGLGAVYSGPGEAVVAPSASVAVMEEIPAQEAAGSPRVQFQSLETQSECLSPEPQFVQDTDMEQGLTGAPPVPQVPALPREGSPGDQAAALLTARYQSSQDVLFQEFVTFEDVAVHLTREEWGYLDPVQRDLYREVMLENYGNVVSLGFPISKPDGISQLEQDLQVFDLETKTREVLRDDCSDGETREENKLLIPKQKISEEVHSYKVRVGRLKHDITQVPETREVYKSEDRLERLQEILRKFLYLEREFRQITISKETFTSEKNNECHEPEKSFSLDSTIDADQRVLRIQNTDDNDKYDMSFNQNSASGKHEHLNLTEDFQSSECKESLMDLSHLNKWESIPNTEKSYKCDVCGKIFHQSSALTRHQRIHTREKPYKCKECEKSFSQSSSLSRHKRIHTREKPYKCEASDKSCEASDKSCSPSSGIIQHKKIHTRAKSYKCSSCERVFSRSVHLTQHQKIHKEMPCKCTVCGSDFCHTSYLLEHQRVHHEEKAYEYDEYGLAYIKQQGIHFREKPYTCSECGKDFRLNSHLIQHQRIHTGEKAHECNECGKAFSQTSCLIQHHKMHRKEKSYECNEYEGSFSHSSDLILQQEVLTRQKAFDCDVWEKNSSQRAHLVQHQSIHTKENS

SEQ ID NO: 35855 - protein, 80 aa, Homo sapiens
MAGTQEAELAVRQATNQIVMNCADIDIITASYAPEGDEGWAHEMCALYIPEVQFASVSTMEPIVLQSVPHDHCNKVSRVW

SEQ ID NO: 35856 - protein, 262 aa, Homo sapiens
  DOMAIN (115)..(170): kw TRANSCRIPTASE REVERSE II ORF2 domain identified by eMATRIX, accession number DM01354Q, p-value=1.000e-40, raw score of 9.23
  DOMAIN (72)..(260): Reverse transcriptase domain identified by PFam, accession name rvt, E-value=5.6e-06, PFam score of 15.2
PPDNVEIIDNNMRCVTLTCSSCSSKAQWAPETELAVTTSRPSLTLWPNAGALWNKSGILIFLSSRHWFFKVLGDKVAESEGPNIILKPKLGKDTPEKENFRPVSLMNIDAKILNKILANRIQQHIKKLIHHDLVSLIPRMQSLFNICKSINVFHHINRTNDKNHMIISIDAKKAFSKIQHLFMVKTLNELCIHGTYLNILRAIYDKRTANILNGKKLETFLLKICTKQEYPLSSLLFNIVLEVLARAISQEKETKRNQIGRS

SEQ ID NO: 35857 - protein, 534 aa, Homo sapiens
  DOMAIN (176)..(221): kw TRANSCRIPTASE REVERSE II ORF2 domain identified by eMATRIX, accession number DM01354N, p-value=1.000e-40, raw score of 13.17
MKKLTQNRSTTWKLNNLLLNDYWVHNKMKAEIKMLFETNKNKDTTYQNLWDTFKAVCRGKFIVLNAHKRKQERSKIDTLTSQLKELEKQEQTHSKASRRQEITKIRAELEEVETQKTLQKINESRSWFFEKINKIDRPLARLIKKKREKNQIDAIKNDKGDITTDPTEIQTTIREYYKHLYANKLENLEEMDKFLDTYTLPRLNQEEVESLNRPITDSEIEAIINSLPTKKSPGLDGFTAELYQSKVTESFTKRFGPGHQEHLSVVANILPSPFPTVNGGIENTLEKEVMQYDYYSSYFDIFLLAVFRFKVLILAYAVCRLRHWWAIAVSMPCMSGSSPPVLVAKSCSQQAWAGRRYSSNAVDNGSDQCLFTSKSDPFEGMAYHFFYTVTIFSDEASFFSLFSQGAFGYVLPIISFILAWIETWFLDFKVLPQEAEEENRLLIVQDASERAALIPGGLSDGQFYSPPESEAGQLSRGYREDQETQCLRNTLQLSSHAESRSSKQTAGDDGKIDHTLEEQEEVRVICRGVCELQQ

SEQ ID NO: 35858 - protein, 73 aa, Homo sapiens
LLSKQSPYVQPSGVRPAASVGRGRCRGGGSSAGAGAGAGAGRAARPRPPLASPLGRPRPPLAPPARKGPESCQ

SEQ ID NO: 35859 - protein, 134 aa, Homo sapiens
  DOMAIN (8)..(42): Amyloidogenic glycoprotein extracellular domain proteins domain identified by eMATRIX, accession number BL00319C, p-value= 2.881e-11, raw score of 17.12
DEDDDDDDEEDDDEDDDDDDFDDEEAEEKAPVKKSIRDTPAKNAQKSNQNGRDSKPSSTPRSKGQESFKKQEKTPKTPKGPSSVEDIKAKMQASIEKGGSLPKVEAKFINYVKDCFRMTDQEAIQDLWQWRKSL

SEQ ID NO: 35860 - protein, 277 aa, Homo sapiens
  DOMAIN (186)..(220): Amyloidogenic glycoprotein extracellular domain proteins domain identified by eMATRIX, accession number BL00319C, p-value= 2.881e-11, raw score of 17.12
WSFISIHLLSYLSACHHLMEDSMDMGMRPLRPQNYLFSCELKANKDYHFKVDNNENEHQLPLTTINLGAGAMDELDIVEAEAMNYEGSPIKVILATLKMSVQPTVSLGGFEITPPVVLRLKCGSGPVHISGQHLVAVEEDAESEDEEEEDVKLLSISGKRSAPGGGSKVPQKKVKLAADEDDDDDDEEDDDEDDDDDDFDDEEAEEKAPVKKSIRDTPAKNAQKSNQNGKDSKPSSTPRSKGQESFKKQQKTPKTPKGPSSVEDIKAKMQASIEKAH

SEQ ID NO: 35861 - protein, 52 aa, Homo sapiens
MVPSCSLGPTALDVSNGQSQFLQLRSHLSAFEIVSLASGLQSQRCCSGSTAS

SEQ ID NO: 35862 - protein, 500 aa, Homo sapiens
TGPSPRGKGMMKINLTWKDRFPGYLMNFASILFMIALTFSIVFGVIVYRITTAAALSLNKATRSNVRVTVTATAVIINLVVILILDEIYGAVAKWLTKIDLLIVEEAVSIRFAHQVQTAGVNNPKKFKFIGRATGNTTKVPEDLECSALTYVNDKRSSISGDGDNRVEVPKTEQTFEERLILKAFLLKFVNAYSPIFYVAFFKGRFVGRPGSYVYVFDGYRMEEASTATGVSCLAPQPSPILISSTAWLHSRPCFSELPFVLTGPFLIFSLQCAPGGCLMELCIQLSIIMLGKQLIQNNIFEIGVPKLKKLFRKLKDETEAGETDSAHSKHPEQWDLDYSLEPYTGLTPEYMEMSENPWSCLPLGAGSDKGSVGLKGEVIQFGFVTLFVASFPLAPVFALLNNVIEVRLDAKKFVTELRRPDAVRTKDIGIWFDILSGIGKFSVISNAFVIAITSDLYPPPGVPALLPPQWDSARLCQPHPLLFQRQPAERGDPARKLTV

SEQ ID NO: 35863 - protein, 180 aa, Homo sapiens
  DOMAIN (117)..(133): MEMBRANE ALANYL DIPEPTIDASE (M1) FAMILY SIGNATURE domain identified by eMATRIX, accession number PR00756B, p-value=2.364e- 13, raw score of 14.06
  DOMAIN (92)..(146): Peptidase family M1 domain identified by PFam, accession name Peptidase_M1, E-value=2e-11, PFam score of 33.5
MRDRSNTILGAEKLKRKHGESVSGPLTVNTGQHPHHHVTSAHNTPYSSEPLPPHNIKLNITNSIITIIISAHHSPPLQATLGVHSGSGYYGISNMANTMVAQVKSVTVAEGLIEDHFDVTVKMSTYLVAFIISDFESVSKITKSGVKEKAKAEHRDKLGERDDTIPPEYRHLLDDNGQVN

SEQ ID NO: 35864 - protein, 249 aa, Homo sapiens
  DOMAIN (25)..(52): INHIBITOR CALPAIN CALPASTATIN REPEAT THIOL PROT domain identified by eMATRIX, accession number PD01443E, p-value=1.273e- 34, raw score of 9.22
  DOMAIN (1)..(68): Calpain inhibitor repeat domain identified by PFam, accession name Calpain_inhib, E-value=0.00016, PFam score of 28.5
  misc_feature (1)...(249): Xaa = X or * as defined in Table 2
MDAALDDLIDTLGGPEETEEENTTYTGPEVSDPMSSTYIEELGKREVTIPPKYRELLAKPIGPDDAIDALSSDFTCGSPXLYPSQVFHLLDLLPFSPGYQPRLLQHHLAAVPFKVAGSGGADCILHMEVRDTASDTGAGAAALDSSVFSVGLDGFSLHSDRSKSSESSSMSSDSLRGLGFSSGSGNSGFPSLSVAGFNLYSDGIVSSSSPHFSSFSSLAFASSTSLIERRSSSGSACRVPSEADRASSA

SEQ ID NO: 35865 - protein, 310 aa, Homo sapiens
  DOMAIN (55)..(98): kw TRANSCRIPTASE REVERSE II ORF2 domain identified by eMATRIX, accession number DM01354T, p-value=2.941e-39, raw score of 9.48
MSIYAEKALDKIQQHFMIKIFNKIGIQGTYLNVIKAIYDKPTAKIILNEEKLKAFPLRAGTRQGCPLSPLFFNIILEVLARAIRQEKERKGIQVSKEEVKLSLFADDMIIYLENPELFHQHSQALEVLTDAAAGAAYDKVRKAKKQAAERTQKLDEKRNKVKLDLEARKRERQHQAEGEGEGEEEEEGEGGGGGGRGGGAGGEPEHQDTRARDQTPDKKVGTAVVEFATAKAAELAVQNEVGLVDNPLKISWLEGQPQSTVGPSRPALSKGSVLSVREYESVIVMHMRHAAELQWLISDMHQQDREGQPT

SEQ ID NO: 35866 - protein, 61 aa, Homo sapiens
MRRGGWRKRAENDGWETWGGYMAAKVQKLEEQFRSDAAMQKDGTSSTIFSGVAIYVNGYTG

SEQ ID NO: 35867 - protein, 185 aa, Homo sapiens
MAKDAGLIEANGDLKVFTDQNLSPGKGVVSLVAVHPSTVNPLGEQLLAKTSGQSNVNIAQQVVVGTPQRPAASNALGNQPSDSSPWSAGKRNRKGEDNGRGLRHFSMKVCEKVQRKGTTSYNQVADELVAKFSAADNHILPNESACDQKNIRRRVCDALNVLRAVSIISKEKKEIKWIGLPTNSA

SEQ ID NO: 35868 - protein, 112 aa, Homo sapiens
FPGSGNMAKDAGLIEANGELKVFIDQNLSPGKGVVSLVAVHPSTVNPLGKQLLPKTFGQSNVNIAQQVVIGTPQRPAASNTLVWVGSPHTPSTHFASQNQPSDSSPWSAGKR

SEQ ID NO: 35869 - protein, 149 aa, Homo sapiens
LVAEFSAADNHILPNESAYDQKNIRRRVYDALNVLMAMNIISKEKKEIKWIGLPTNSAQECQNLEVERQRRLERIKQKQSQLQELILQQIAFKNLVQRNRHAEQQASRPPPPNSVIHLPFIIVNTSKKTVIDCSISNDKFEYLFNFDNT

SEQ ID NO: 35870 - protein, 42 aa, Homo sapiens
ADNNFTQETAMTMITNSSSVPVGFPVLEFPYPGAEVACFLGH

SEQ ID NO: 35871 - protein, 136 aa, Homo sapiens
RKLHGSQSSITIAVFGKQNTYIRLEPFKINVLEQITKHIEKLQCGGVVKQLSRRGNNQHISSTYDINRADAQVRRAVNNYDIIVMSNSFNGQSEHQVWIGGQFTFIKFPINSVSIRCRARQEGIMSSPGQQVGFIA

SEQ ID NO: 35872 - protein, 468 aa, Homo sapiens
MEAITNGMMNLNRQRHQHLVALRIIFAHGENGGEEVVHIGHEIPLPGTTGTALEGLGLKVYELTQTLQHPRYGVPERFGTKIRKSDGTLQEHDGICEIHVAKYAEIFGLTYAEASTDIRQALKSFAGKEVVFYRPEEDAGDEKGYESFPWFIKPSDITPQPRTLHRSHGHYTAATDITPQPRKLHRSHGHYTAASDITPQPRRVHRNLGHYTAATDITPQPRTLHRSHGHYTAASDITPQRLTLHRSHGHYTAVTDITPEPRTLHRSLGHYTAATDITPQALTLHRRHGHYTAVTDITPWPRKLHRRLVSYSGATGFTPQAQTLHRRRGHYTGSPGLYNRNHCTLRRESLDITPKGRDITPKGWYINRRPRTYTGAMDFHRNLGLITESRDINGTPLGHYTAASDITPQPRTLHRSLGHYTAASDITPQPRTLHRSGYRARIRNHGHSCFLCEIVIRSQFHTTYEPEA

SEQ ID NO: 35873 - protein, 137 aa, Homo sapiens
  misc_feature (1)...(137): Xaa = X or * as defined in Table 2
MLPARMCCGIVSGXQFHTGNSYDHDYEFELGTRSXAXLKLLFSXTLPDXQLPAGSGEGPYHLEGQLSYCHRGGEKALAALLSSPTSKTRSPSEPDPEQDEQKLRFCKRHLYGQQPRSPVEIRLQHVAIAYQTHHAYD

SEQ ID NO: 35874 - protein, 49 aa, Homo sapiens
  misc_feature (1)...(49): Xaa = X or * as defined in Table 2
LVITTLLPLACGTAKXEXVNVTSFGSRPICSTSPVLFSGLXGPVKEFDT

SEQ ID NO: 35875 - protein, 186 aa, Homo sapiens
MATRISDGRPWGVGAFLALLASVVAPPLRGVAVIVSVGGREAPLLSEITHGGGVGRWMWRAIVPCNRAYRANWRGDTEELFCQIALTLIARRECTVGETPRGGGGVDTSLEPSTNKTTATWCLRSPVLVSITEITGVSDNLITTQEMFRHELQIGYRARIRNHGHSCFLCEIVIRSQFHTTYEPEA

SEQ ID NO: 35876 - protein, 164 aa, Homo sapiens
MAGEASGNLESWQKAEGKQRYRHWTQDGNVAVGEKMSREERGHYRDRQQSASFFRRHPHPGLPEAMAGLGQALLGEEGDPLDIRLEYQPLSLRDPRKMKNGVENALELFTGRMYVNTSIGGPNVPILGPPGVGYRARIRNHGHSCFLCEIVIRSQFHTTYEPEA

SEQ ID NO: 35877 - protein, 351 aa, Homo sapiens
ESPVPNSNSNPGPSLFLWKMVTRYNSTQHTSPEAKGICKWIFGPLCGLRSKRVYLRIKSRGSPGTELEFVIMVIAVSCVKLRDPGYRARIPNHGHSCFLGKMLSAHNSTHIPTGNLKWICKWIFGPLCGLRSKRVHLRIKSRGSPDPRSSVLESYMRDKHSEPSCSVLESYVSDKPSELLSSVLEFVLESYVSEKCSDPRSIVLESNMRDKHSESSNSVLEPSVRDKHSDPHSSVLESYVRDKHSEPSSSVLESFVRDKHSDPRSSVLESYVRDRHSEPSISVLESYVRNSHSDPCTSVLESSVGDNNSEACSSVLESFVKDTCSDDSRSVLESYVGDKHAEHSSSVLESY

SEQ ID NO: 35878 - protein, 211 aa, Homo sapiens
  DOMAIN (62)..(75): EF-hand calcium-binding domain proteins domain identified by eMATRIX, accession number BL00018, p-value=5.050e-10, raw score of 7.41
MFDSSVFLEDAERYGQRHPLQVTDPRGVPAVLEMRVLGGDVFLVPMEWACFVDWGLVWDLSDIDKDGHLDRDEFAVRLPQTGRIVLPTQRSVAPHCTVPHSTHDTDPGAASGTRTIRRSRAYDPVWRSDGNSGERLSALKPLTGTTCDVQLLACSSADQKMNKNTRKTIKLMMTGPGAAMETTSLRVHEKREYGRKEGGGATQRGPDTRDR

SEQ ID NO: 35879 - protein, 241 aa, Homo sapiens
MLGSECDYLCQLSFSSHSSTCCFKDAKKDLVSSRNQITHIYGISYNQCHRTMSFKLNVDSHCALKEAVEEEGHQLLELIASHKAEGLKDMLRMIASQWKELQRQIKRQHSWILRALDTIKAEILATDVSVEDEEGTGSPKAEEKPIQPCNVETHAASEKLRQFTAFESQTTPLTYLLETEDRMMSSVSLKETSMKKVAFQEVLEGRRRVPSSLKSSKTAEGKVVAMVHEKREKEYSDSWHT

SEQ ID NO: 35880 - protein, 128 aa, Homo sapiens
  DOMAIN (29)..(79): UDP-glycosyltransferases proteins domain identified by eMATRIX, accession number BL00375E, p-value=5.765e-29, raw score of 18.75
  DOMAIN (24)..(68): UDP-glucoronosyl and UDP-glucosyl transferas domain identified by PFam, accession name UDPGT, E-value=2.5e-23, PFam score of 86.3
MKAALDIKPLKQNTERKLHQMWLQEMEEFVQSSGENGVVVFSLGSMVSNTSEERANVIASALAKIPQKKQETKGLVDPDPASQLFEKPCWDPSKQQRNTESREEQTWALTCLGLERSKENLSNTRKEE

SEQ ID NO: 35881 - protein, 264 aa, Homo sapiens
  DOMAIN (20)..(70): UDP-glycosyltransferases proteins domain identified by eMATRIX, accession number BL00375E, p-value=3.471e-30, raw score of 18.75
  DOMAIN (15)..(65): UDP-glucoronosyl and UDP-glucosyl transferas domain identified by PFam, accession name UDPGT, E-value=8.2e-24, PFam score of 88.0
MLFGYCTLAVKSEVQEMEEFVQSSGENGVVVFSLGSMVSNTSEERANVIASALAKIPQKGFCRFRNHHQTGFSPAGANQRGPLAATLSGPGGEGQSAVARLTGEKKNHPGAQYANRLSPRVGRFINAAGTTVEEEEEEEEDEEAEEEGGGGGGEGGEGEGGEGEGEGEGEENRTEEKKRERKKRSRRRRRRKKEEEEEESSRRKPDVGDPLDSTAGHATQVDIVLPVLGLEAQRVDGEFLLLVPVCVVPCHMSVSSHRSAPIYK

SEQ ID NO: 35882 - protein, 533 aa, Homo sapiens
  DOMAIN (299)..(349): UDP-glycosyltransferases proteins domain identified by eMATRIX, accession number BL00375E, p-value=1.000e-40, raw score of 18.75
  DOMAIN (28)..(533): UDP-glucoronosyl and UDP-glucosyl transferas domain identified by PFam, accession name UDPGT, E-value=0, PFam score of 1132.4
HCTRMSVKWTSVILLIQLSFCFSSGNCGKVLVWAAEYSHWMNIKTILDELIQRGHEVTVLASSASILFDPNNSSALKIEIYPTSLTKTELENFIMQQIKRWSDLPKDTFWLYFSQVQEIMSIFGDITRKFCKDVVSNKKFMKKVQESRFDVIFADAIFPCSELLAELFNIPFVYSLSFSPGYTFEKHSGGFIFPPSYVPVVMSELTDQMTFMERVKNMIYVLYFDFWFEIFDMKKWDQFYSEVLGRPTTLSETMGKADVWLIRNSWNFQFPHPLLPNVDFVGGLHCKPAKPLPKEMEDFVQSSGENGVVVFSLGSMVSNMTEERANVIASALAQIPQKVLWRFDGDKPDTLGLNTRLYKWIPQNDLLGHPKTRAFITHGGANGIYEAIYHGIPMVGIPLFADQPDNIAHMKARGAAVRVDFNTMSSTDLLNALKRVINDPSYKENVMKLSRIQHDQPVKPLDRAVFWIEFVMRHKGAKHLRVAAHDLTWFQYHSLDVIGFLLVCVATVIFIVTKCCLFCFWKFARKAKKGKND

SEQ ID NO: 35883 - protein, 532 aa, Homo sapiens
  DOMAIN (353)..(398): UDP-glycosyltransferases proteins domain identified by eMATRIX, accession number BL00375F, p-value=1.000e-40, raw score of 16.99
  DOMAIN (26)..(530): UDP-glucoronosyl and UDP-glucosyl transferas domain identified by PFam, accession name UDPGT, E-value=0, PFam score of 1119.5
CTRMALKWTTVLLIQLSFYFSSGSCGKVLVWAAEYSLWMNMKTILKELVQRGHEVTVLASSASILFDPNDSSTLKLEVYPTSLTKTEFENIIMQLVKRLSEIQKDTFWLPFSQEQEILWAINDIIRNFCKDVVSNKKLMKKLQESRFDIVFADAYLPCGELLAELFNIPFVYSHSFSPGYSFERHSGGFIFPPSYVPVVMSKLSDQMTFMERVKNMLYVLYFDFWFQIFNMKKWDQFYSEVLGRPTTLSETMRKADIWLMRNSWNFKFPHPFLPNVDFVGGLHCKPAKPLPKEMEEFVQSSGENGVVVFSLGSMVSNMTEERANVIATALAKIPQKVLWEILMGIKPDALGLNTRLYKWIPQNDLLGHPKTRAFITHGGANGIYEAIYHGIPMVGIPFVFDQPDNIAHMKAKGAAVRVDFNTMSSTDLLNALKTVINDPSYKENIMKLSRIQHDQPVKPLDRAVFWIEFVMRHKGAKHLRVAAHNLTWFQYHSLDVIGFLLACVATVLFIITKCCLFCFWKFARKGKKGKRD

SEQ ID NO: 35884 - protein, 540 aa, Homo sapiens
  DOMAIN (307)..(357): UDP-glycosyltransferases proteins domain identified by eMATRIX, accession number BL00375E, p-value=1.000e-40, raw score of 18.75
  DOMAIN (36)..(539): UDP-glucoronosyl and UDP-glucosyl transferas domain identified by PFam, accession name UDPGT, E-value=0, PFam score of 1169.6
AATGKQALHCIRMSMKWTSALLLIQLSCYFSSGSCGKVLVWPTEFSHWMNIKTILDELVQRGHEVTVLASSASISFDPNSPSTLKFEVYPVSLTKTEFEDIIKQLVKRWAELPKDTFWSYFSQVQEIMWTFNDILRKFCKDIVSNKKLMKKLQESRFDVVLADAVFPFGELLAELLKIPFVYRPRFSPGYAIEKHSGGLLFPPSYVPVVMSELSDQMTFIERVKNMIYVLYFEFWFQIFDMKKWDQFYSEVLGRPTTLSETMAKADIWLIRNYWDFQFPHPLLPNVEFVGGLHCKPAKPLPKEMEEFVQSSGENGVVVFSLGSMVSNTSEERANVIASALAKIPQKVLWRFDGNKPDTLGLNTRLYKWIPQNDLLGHPKTRAFITHGGANGIYEAIYHGIPMVGVPLLADQPDNIAHMKAKGAAVSLDFHTMSSTDLLNALKTVINDPLYKENAMKLSRIHHDQPVKPLDRAVFWIEFVMRHKGAKHLRVAAHDLTWFQYHSLDVTGFLLACVATVIFIITKCLFCVWKFVRTGKKGKRD

SEQ ID NO: 35885 - protein, 75 aa, Homo sapiens
MVDKHKENIAAIMITYPSTNGVFEENISDRNEDACPVGTVSAAPWGSSSILTISWAYIKMMGGKGLKQAYGKCRY

SEQ ID NO: 35886 - protein, 1070 aa, Homo sapiens
  DOMAIN (202)..(257): GLYCINE DEHYDROGENASE DECARBOXYL domain identified by eMATRIX, accession number PD00545B, p-value=1.000e-40, raw score of 9.58
PASVHPSVRPTVQRKGLQAGRTSTRGTEARRGAKSAADPCGPGQGTVAAAMQSCARAWGLRLGRGVGGGRRLAGGSGPCWAPRSRDSSSGGGDSAAAGASRLLERLLPRHDDFARRHIGPGDKDQREMLQTLGLASIDELIEKTVPANIRLKRPLKMEDPVCENEILATLHAISSKNQIWRSYIGMGYYNCSVPQTILRNLLENSGWITQYTPYQPEVSQGRLESLLNYQTMVCDITGLDMANASLLDEGTAAAEALQLCYRHNKRRKFLVDPRCHPQTIAVVQTRAKYTGVLTELKLPCEMDFSGKDVSGVLFQYPDTEGKVEDFTELVERAHQSGSLACCATDLLALCILRPPGEFGVDIALGSSQRFGVPLGYGGPHAAFFAVRESLVRMMPGRMVGVTRDATGKEVYRLALQTREQHIRRDKATSNICTAQALLANMAAMFRIYHGSHGLEHIARRVHNATLILSEGLKRAGHQLQHDLFFDTLKIHCGCSVKEVLGRAAQRQINFRLFEDGTLGISLDETVNEKDLDDLLWIFGCESSAELVAESMGEECRGIPGSVFKRTSPFLTHQVFNSYHSETNIVRYMKKLENKDISLVHSMIPLGSCTMKLNSSSELAPITWKEFANIHPFVPLDQAQGYQQLFRELEKDLCELTGYDQVCFQPNSGAQGEYAGLATIRAYLNQKGEGHRTVCLIPKSAHGTNPASAHMAGMKIQPVEVDKYGNIDAVHLKAMVDKHKENLAAIMITYPSTNGVFEENISDVCDLIHQHGGQVYLDGANMNAQVGICRPGDFGSDVSHLNLHKTFCIPHGGGGPGMGPIGVKKHLAPFLPNHPVISLKRNEDACPVGTVSAAPWGSSSILPISWAYIKMMGGKGLKQATETAILNANYMAKRLETHYRILFRGARGYVGHEFILDTRPFKKSANIEAVDVAKRLQDYGFHAPTMSWPVAGTLMVEPTESEDKAELDRFCDAMISIRQEIADIEEGRIDPRVNPLKMSPHSLTCVTSSHWDRPYSREVAAFPLPFMKPENKFWPTIARIDDIYGDQHLVCTCPPMEVYESPFSEQKRASS

SEQ ID NO: 35887 - protein, 278 aa, Homo sapiens
  DOMAIN (93)..(108): Dehydrins proteins domain identified by eMATRIX, accession number BL00315B, p-value=3.192e-09, raw score of 5.59
LRRANSSLALPLTHAHTRLEMAAAAAAAGDSDSWDADAFSVEDPVRKVGGGGTAGGDRWGGEDEDEDVKDNWDDDDDEKKEEAEVKPEVKISEKKKIAEKIKEKERQQKKRQEEIKKRLEEPEEPKVLTPEEQLADKLRLKKLQEESDLELAKETFGVNNAVYGIDAMNPSSRDDFTEFGKLLKDKITQYEKSLYYASFLEVLVRDVCISLEIDDLKKITNSLTVLCSEKQKQEKQSKAKKKKKGVVPGGGLKATMKDDLADYGGYDGGYVQDYEDFM

SEQ ID NO: 35888 - protein, 85 aa, Homo sapiens
  DOMAIN (4)..(54): Ribosomal L22e protein family domain identified by PFam, accession name Ribosomal_L22e, E-value=6.8e-07, PFam score of 28.0
  misc_feature (1)...(85): Xaa = X or * as defined in Table 2
HPRCLSPKGILKYLTKKYLKKNNLRDWLRVVANSKESYELRYFQINQDEEEEEDEDXISFIWKILYEFLNKTWDPKKKKTKKKKK

SEQ ID NO: 35889 - protein, 258 aa, Homo sapiens
  DOMAIN (73)..(88): Dehydrins proteins domain identified by eMATRIX, accession number BL00315B, p-value=3.192e-09, raw score of 5.59
MAAAAAAAGDSDSWDADAFSVEDPVRKVGGGGTAGGDRWGGEDEDEDVKDNWDDDDDEKKEEAEVKPEVKISEKKKIAEKIKEKERQQKKRQEEIKKRLEEPEEPKVLTPEEQLADKLRLKKLQEESDLELAKETFGVNNAVYGIDAMNPSSRDDFTEFGKLLKDIITQYEESLYYARFLEVLVRDVCISLEIDDLKKITNSLTVLCSEKQKQEKQSKAKKKKKGVVPGGGLKATMKDDLADYGGYDGGYVQDYEDFM

SEQ ID NO: 35890 - protein, 299 aa, Homo sapiens
  DOMAIN (198)..(239): kw TRANSCRIPTASE REVERSE II ORF2 domain identified by eMATRIX, accession number DM01354I, p-value=2.145e-28, raw score of 15.55
  DOMAIN (52)..(85): TPR Domain domain identified by PFam, accession name TPR, E- value=0.0031, PFam score of 24.2
MSLMNTDANILNEILANESNSLTKRSTKDAWLFPPELTSLVRSREESEAQLEQARLQRGHLLLKQGKLDEAEDDFKKVSTYDRSSPYIYTAGYCNATIYVSPDIPTGAFFDSLICRNQRHRATCFWGKETLPPPSRSPSVSAPLLSCVIGTTGRGHKTSLNKFKKVEIISSIFSDNSGIKLEISSQRNCKHYTNTWKLNNLLLNDLGINNEIKMEIQRFFEMNGNSDTSYQNLWNTTKAVLRGKVIASNAYIRKSERAQIDNLKELEKQEQTKPKAIERKEITKIRAELNEIETNKKEQ

SEQ ID NO: 35891 - protein, 886 aa, Homo sapiens
  DOMAIN (95)..(106): PROTEIN REPEAT MUSCLE CALCIUM-BI domain identified by eMATRIX, accession number PD00301A, p-value=1.900e-09, raw score of 10.24
  DOMAIN (149)..(844): TPR Domain domain identified by PFam, accession name TPR, E- value=9.9e-14, PFam score of 59.1
MSGFSPELIDYLEGKISFEEFERRREERKTREKKSLQEKGKLSAEENPDDSEVPSSSGINSTKSQDKDVNEGETSDGVRKSVHKVFASMLGENEDDEEEEEEEEEEEEEEETPEQPTAGDVFVLEMVLNRETKKMMKEKRPRSKLPRALRGLMGEANIRFARGEREEAILMCMEIIRQAPLAYEPFSTLAMIYEDQGDMEKSLQFELIAAHLNPSDTEEWVRLAEMSLEQDNIKQAIFCYTKALKYEPTNVRYLWERSSLYEQMGDHKMAMDGYRRILNLLSPSDGERFMQLARDMAKSYYEANDVTSAINIIDEAFSKHQGLVSMEDVNIAAELYISNKQYDKALEIITDFSGIVLEKKTSEEGTSEENKAPENVTCTIPDGVPIDITVKLMVCLVHLNILEPLNPLLTTLVEQNPEDMGDLYLDVAEAFLDVGEYNSALPLLSALVCSERYNLAVVWLRHAECLKALGYMERAAESYGKVVDLAPLHLDARISLSTLQQQLGQPEKALEALEPMYDPDTLAQDANAAQQELKLLLHRSTLLFSQGKMYGYVDTLLTMLAMLLKVAMNRAQVCLISSSKSGERHLYLIKVSRDKISDSNDQESANCDAKAIFAVLTSVLTKDDWWNLLLKAIYSLCDLSRFQEAELLVDSSLEYYSFYDDRQKRKELEYFGLSAAILDKNFRKAYNYIRIMVMENVNKPQLWNIFNQVTMHSQDVRHHRFCLRLMLKNPENHALCVLNGHNAFVSGSFKHALGQYVQAFRTHPDEPLYSFCIGLTFIHMASQKYVLRRHALIVQGFSFLNRYLSLRGPCQESFYNLGRGLHQLGLIHLAIHYYQKALELPPLVVEGIELDQLDLRRDIAYNLSLIYQSSGNTGMAQTLLYTYCSI

SEQ ID NO: 35892 - protein, 147 aa, Homo sapiens
MVDQNKQKCGYRRIVNLVSPSDGERAMQLARDMAKSYYEANDVTSAINIIDEAFSKHQGLVSMEDVNIAAELYISNKQFDKALEAGMLMCVCVKVCMCSCVLEIVKNWQLFVVDGCTQSIGDSRREQGEFYSIQEDRASNLSMGLSL

SEQ ID NO: 35893 - protein, 141 aa, Homo sapiens
  DOMAIN (1)..(27): Ser/Thr protein phosphatase domain identified by PFam, accession name STphosphatase, E-value=1.8e-07, PFam score of 28.8
ECQTKYGNANAWRYCTKVFDMLTVAALPERALRPPEQLPRRSRSRMVRGARQPQQPRSRLAPRLTGTVEKPPRKRRSSKSPIAALNPSMWRCSGSYFPCQSSTLMGALLLLHTRPSTSCASWLCLRMASSRSLYSDNHAEN

SEQ ID NO: 35894 - protein, 313 aa, Homo sapiens
  DOMAIN (160)..(207): Serine/threonine specific protein phosphatases proteins domain identified by eMATRIX, accession number BL00125C, p-value= 1.000e-40, raw score of 19.97
  DOMAIN (13)..(309): Ser/Thr protein phosphatase domain identified by PFam, accession name STphosphatase, E-value=1.9e-154, PFam score of 526.5
  misc_feature (1)...(313): Xaa = X or * as defined in Table 2
PRLVLLKMAPLDLDKYVEIARLCKYLPENDLKRLCDYVCDLLLEESNVQPVSTPVTVCGDIHGQFYDLCELFRTGGQVPDTNYIFMGDFVDRGYYSLETFTYLLALKAKWPDRITLLRGNHESRQITQVYGFYDDCLTKYGNANAWRYCTKVFDMLTVAALIDEQILCVHGGLSPDIKTLDQIRTIERNQEIPHKGAFCDLVWSDPEDVDTWAISPRGAGWLFGAKVTNEFGSXSTNLKLICRAHQLVHEGYKFMFDEKLVTVWSAPNYCYRCGNIASIMVFKDVNTREPKLFRAVPDSERVIPPRTTTPYFL

SEQ ID NO: 35895 - protein, 178 aa, Homo sapiens
  DOMAIN (88)..(104): Phorbol esters / diacylglycerol binding domain proteins domain identified by eMATRIX, accession number BL00479B, p-value= 4.054e-09, raw score of 12.57
  DOMAIN (64)..(110): Phorbol esters/diacylglycerol binding dom domain identified by PFam, accession name DAG_PE-bind, E-value=0.00081, PFam score of 19.1
EHASWHGGRIMSIKWARFHEVPHITVRFIGPKHGEEKEKEKDKIKEKEKDSKDKEKDKKTVNGHTFSSIPVVGPISCSQCMKPFTNKDAYTCANCSAFVHKGCRESLASCAKVKMKQPKGSLQAHDTSSLPTVIMRNKPSQPKERPRSAVLLVDETATTPIFCNRRSPQSVSLFKVAS

SEQ ID NO: 35896 - protein, 1429 aa, Homo sapiens [sequence omitted]

SEQ ID NO: 35897 - protein, 169 aa, Homo sapiens
  DOMAIN (61)..(75): C2H2-TYPE ZINC FINGER SIGNATURE domain identified by eMATRIX, accession number PR00048A, p-value=6.040e-09, raw score of 10.52
MWELVLSVTQYQSFNLEAGYMKEKEKEKDKIKEKEKDSKDKEKDKKTVNGHTFSSIPVVGPISCSQCMKPFTNKDAYTCAMRRAQLMCLQRLAPQKVAAAVTLVVPQQRKCWLMRHTQYRDARLIVVRTSSRALYIEASSREQNRSSSECLCRVIALSHCLRSRERDLH

SEQ ID NO: 35898 - protein, 533 aa, Homo sapiens
  DOMAIN (224)..(380): Proteasome/cyclosome repeat domain identified by PFam, accession name PC_rep, E-value=0.00083, PFam score of 26.1
MVRESIHSCDGTELCKVEKVCQDLSPERIKQNALTKKMEFEHLQNSADSEPPSNRIFSCCAKPAWTACSNSLTAMRRWQSAADLLTGTTTADDTQLALDARSTLRDAGEVLVKTQRTLEPPVSKNKQEKKVRRAKEILHNGQNFCRRRYQGCRDLPEKGKPIVEERETGLGRAGSGNVLKVQQLLHVCSEHFDSKEKEEDKGKKEKKDKDKKETPADMGAHQGVAVLGIALIAAGSGNVLKVQQLLHVCSEHFDSKEKEEDKGKKEKKDKDKKETPADMGAHQGVAVLGIALIAAGSGNVLKVQQLLHVCSEHFDSKEKEEDKGKKEKKDKDKKETPADMGAHQGVAVLGIALIACVVRVLVVFARISRVLSESRALDRNHRCCPVTASTLFVYVRSVMPLPARGCTRASSILMSRSIDAAKTNHWGPWSISGMPCHYLVAGVEYLPPYRVLYTNIQSGFRGRVRLHVLASGVGSPIPTVVIGGLSHFSCLRRGGEVDIPSPDIKHLVHTLAQPEAVSLVILLFTELTHYIAY

SEQ ID NO: 35899 - protein, 280 aa, Homo sapiens
  DOMAIN (27)..(173): Proteasome/cyclosome repeat domain identified by PFam, accession name PC_rep, E-value=7.6e-24, PFam score of 92.7
ILLWDVDGGLTQIDKYLYSSEDYIKSGALLACGIVNSGVRNECDPALALLSDYVLHNSNTMRLGSIFGLGLAYAGSNREDVLTLLLPVMGDSKSSMEVAGVTALACGMIAVGSCNGDVTSTILQTIMEKSETELKDTYARWLPLGLGLNHLGKGEAIEAILAALEVVSEPFRSFANTLVDVCAYAGSGNVLKVQQLLHICSEHFDSKEKEEDKDKKEKKDKDKKEAPADMGAHQGVAVLGIALIAMGEEIGAEMALRTFGHLLRYGEPTLRRAVPLALAL

SEQ ID NO: 35900 - protein, 130 aa, Homo sapiens
AFGVTEPGCYGVIDVDTGKSTLFVPRLPASHATWMGKLHSVLTSQKPSVLLTLRGVNTDSGSVCREASFDGISKFEVNNTILHPEIVECRVFKTDMELEVLRYTNKISSEAHREVMKAVKVGMKEYELER

SEQ ID NO: 35901 - protein, 504 aa, Homo sapiens
  DOMAIN (413)..(428): Aminopeptidase P and proline dipeptidase proteins domain identified by eMATRIX, accession number BL00491C, p-value=5.500e- 17, raw score of 12.15
  DOMAIN (191)..(495): metallopeptidase family M24 domain identified by PFam, accession name Peptidase_M24, E-value=3.3e-75, PFam score of 263.3
  misc_feature (1)...(504): Xaa = X or * as defined in Table 2
RRCRANMAAATGPSFWLGNETLKVPLALFALNRQRLCERLRKNPAVQAGSIVVLQGGEETQRYCTDTGVLFRQESFFHWAFGVTEPGCYGVIDVDTGKSTLFVPRLPASHATWMGKIHSKEHFKEKYAVDDVQYVDEIASVLTSQKPSVLLTLRGVNTDSGSVCREASFDGISKFEVNNTILHPEIVECRVFKTDMELEVLRYTNKISSEAHREVMKAVKSGEWKEYGVGKASFEHYCYSRGGMRHTSYTCILRAVGXGTSAVLTFTGHAGAPNDRTIQNGDMCLFDMGGEYYSVASDITCSFPRNGKFTADQKAVYEAVLLSSRAVMGAMKPGDWWPDMHRLAYRIHLEELAHMGILSGSVDAMVQAHLGAVFMPHGLGHFLGIDVHDVGGYPEGVERIDEPGLRSLRTARHLQPGMVLTVEPGIYFIDHLLDEALADPARASFLNREVLQRFRGFGGVRIEEDVVVIDSGIELLTCVPRTVEEIEACMAGCDKAFTPFSGPK

SEQ ID NO: 35902 - protein, 32 aa, Homo sapiens; identical to SEQ ID NO: 34073

SEQ ID NO: 35903 - protein, 270 aa, Homo sapiens
MPINTTWGHSGLHTLKLAHILPEGSILALGVGEASSMGKLMPQKQLSAKGEWRGVDKYPHLLHPSVWVTPDGCQNSSARQTFSCPGRWIKDLNLRPETIKIPEDNTGKTLLDIGLGKDFMTKSPKANAIKTKINIWDLIKLKSFCMAKRTVSRVNRQPTEWEKIFTIYTSDKTLISRIYNELKQIESLTLSSKLEFSGVIPAHCNLHLPGSRDSCAQAGTEIGYGPERKISSKEHPCGARRMRYYHPQNTDMETSAQTQHHIGSHKLSKH

SEQ ID NO: 35904 - protein, 732 aa, Homo sapiens
  DOMAIN (89)..(129): kw TRANSCRIPTASE REVERSE II ORF2 domain identified by eMATRIX, accession number DM01354Y, p-value=9.333e-30, raw score of 10.69
  misc_feature (1)...(732): Xaa = X or * as defined in Table 2
MLKEIIDDTNKWKHIPCSWMGRISIVKMTILPKAIYKFNAVLIKIPPSFFTELEKTILKFLCNEKRASRAKARLNKKNKSGGITLLDFKRYYSAIVTKTVWYWYKNRHIHQRNRIENPEINPNTYSQLIFNKANKNIKWGNDTLFSKWCWDNWLATCRRMKLDPHLSPHTKINSRWIKDLILRPETTKILEDNIGKTLLDVGLGKDFMTKNPKANARKAKINIWDLIKLKSFFTAKGTVSRVNRQPTEWEKIFIIHTSDEGLLISRIYNELKQISKKKTNNPIKKWAKDMNRQFSKEDVQMANKYMKKCSTSLIANLICREMQIKTTMQYHLTPARMAIIKKSKISRCWHGCGDQGTLLHCWWECKLVQPLWKTVWRFLKELKVELPFDPAIPLLGTHPEEKKSLCKKDTCTCMLLAAQFTIAKSWNQPKCPSVNEWIKKLCPRWLLSKWASAXNKWKHIPCSWMGRISIVKMTILPKAIYKFNAVLIKIPPSFFTELEKTILKFLCNEKRASRAKARLNKKNKSGGITLLDFKRYYSAIVTKTVWYWYKNRHIHQRNRIENPEINPNTYSQLIFNKANKNIKWGNDTLFSKWCWDNWLATCRRMKLDPHLSPHTKINSRWIKDLILRPETTKILEDNIGKTLLDVGLGKDFMTKNPKANARKAKINIWDLIKLKSFFTAKGTVSRVNRQPTEWEKIFIIHTSDEGLLISRIYNELKQISKKKNKQSHQKVG

SEQ ID NO: 35905 - protein, 158 aa, Homo sapiens; identical to SEQ ID NO: 31131

SEQ ID NO: 35906 - protein, 143 aa, Homo sapiens
RTRGDRTDVHIRVFRPPNYSGTIALALLVSLVGGLLYLRRNNLEFIYNKTGWAMVSLCIVFAMTSGQMWNHIRGPPYAHKNPHNGQVSYIHGSSQAQFVAESHIILVLNAAITMGMVLLNEAATSKGDVGKRRIICLVGLGPV

SEQ ID NO: 35907 - protein, 193 aa, Homo sapiens
PPVSHSMTLGNSYLFAPNWTITPAWCNTLDPSEGFGWQASLSLPSHQQFEHTCPEWLPTYSWPCKVGPDYLSEICQPECKQHFQESLTESSKQNIYETCAIYVSSPGERILNQRFGPHGAFILVREYDDIRFSHSGPPSTCPNFPGPSYYTARESAYALKLRALEIIQISQSTKMQRNLGNPILPAIHQQPPQ

SEQ ID NO: 35908 - protein, 268 aa, Homo sapiens
MVNIIGREKLSLLEMEEPNGGLAAPNQRLDSVHRFLVNCDPMLGLIQSLLHKKLSVLIVKWRNSSPDELYLYYPVNKTGSLGVHDSGELVSVCSKLDHYTGLGNTLDPSEGFGWQASLSLPSHQQFEHTCPEWLPTYSWPCKVGPDYLSEILSSGKNQYQNLQDGITSLEENPRDGRDRPHLDSHFTTLHLLANTYTGSLGFGALGPRSTSQSYIHGSSQAQFVAESHIILVLSILLRYRRIEKGKLKLHVFKLTFFLAVNIKTFKRH

SEQ ID NO: 35909 - protein, 664 aa, Homo sapiens; identical to SEQ ID NO: 34631
  DOMAIN (243)..(452): Reverse transcriptase domain identified by PFam, accession name rvt, E-value=0.0078, PFam score of -29.3

SEQ ID NO: 35910 - protein, 353 aa, Homo sapiens
  misc_feature (1)...(353): Xaa = X or * as defined in Table 2
LLLDLXVDXSPSRPLEMRFRVXPMKRCTTLKKNYLSFLVYISRNLXNRVKAIMVGKAEWKTIELPLPRKTVNQKQYRIPGGIAEISTTIKELNNAGMVIPTTSPFNSPIWPVQKIDGSWRMTVDYCKLNQVVTPIAATVPYVVSSLEQINTSPGTWNRKRFCNRSRLLHKLLCHLGHMTQQIXCFLRCQWHIGMLFGPEICGCTSLSGQKLWKIFVSHAASFEWSPEQEKALQQVQAVVQAALPLGPYDPADPVLLEMSVADRDAVWILWQAPISESQWRPPGFWSKALPSSADNYSPFERQLLACYWTLVETERLTMGHQVTIPPELPIMNWVFSDLSSPKMCHPQQHSIIK

SEQ ID NO: 35911 - protein, 445 aa, Homo sapiens
  DOMAIN (6)..(36): kw TRANSCRIPTASE REVERSE II ORF2 domain identified by eMATRIX, accession number DM01354R, p-value=8.948e-17, raw score of 8.50
  DOMAIN (273)..(434): Reverse transcriptase domain identified by PFam, accession name rvt, E-value=4.9e-06, PFam score of 16.1
  misc_feature (1)...(445): Xaa = X or * as defined in Table 2
MIISIDAEKAFDKIQQPFMLKTLSKLEETASPSPVVATYTPQPMLPSAFPPLSEEINPVLPETTVMASPEAVTRQDNVDSPQKPPPTPMFASRPITRLKPRRAPSEEGIQRLKKIGMVEWISHFRPTPLSMEGPEHILLTNTLLNRYVKAAPASLKSPLTALLFMSDLTVGTTFSQLQNLNTMGIFGSSCDRSQVAALNHQRQVPECKIVIDILNIWRIPHIGSLTGRVREIMVGKAKWKPLEQPPPRKIVIQKQYHIPGAITEISATIEDLKETGVVILTTSPFKSSIWPLQKTDGSWRMTVNYHKLNQVETPIAAAVPDVVSLLEQINTSPGTWYAAIDLVNVFFSIPVYKAHQKQFAFSWQGQQYTFTFLPQGYINSPDITLVHYIDDIMLIGSSEQEVANTLDLLPARVASWGVPYDQLTGGREDXGLLHRWSCRICRHHP

SEQ ID NO: 35912 - protein, 231 aa, Homo sapiens
  DOMAIN (25)..(210): Reverse transcriptase domain identified by PFam, accession name rvt, E-value=0.015, PFam score of -33.2
KIVNQKQYHIRGGIAEISATIKDSKDTGVVIPTTSPFNSPIWPVWKTDGSWTITVDYHKLDQVVTPIAAAVPDVVSLLEQINTSPGTWYAAINLENAFFSIPVHKANQKQFAFSWQGQQYTIAVLPQVKFLGIHWFVACQDIPSKIKDKLLHLAPPTNKKEAQCLVGLFGFWRQHIPHLRVLLQPIYQVTLKAAIFEWGPEQEKALQQVQAAVQAALPLGPYDPTDPMVLE

SEQ ID NO: 35913 - protein, 337 aa, Homo sapiens
  DOMAIN (234)..(337): Integrase core domain identified by PFam, accession name rve, E-value=1e-21, PFam score of 79.1
  misc_feature (1)...(337): Xaa = X or * as defined in Table 2
MVSTPATLPSLPKPALMASWGVPYDQLTKEEKTRVWFTDGSARYAGTTQKWTAVALQPLSRTSLKDSSEGKSSQWAELQAVYLVVHFAWKEKWPDVGLYTDSWAVANGLAGWSETWEKQDWKIGDKEIWGRGMWMDLSEWSKAVKIFVSHVSAHQRVTSAEEEFNNQVDRPLPVFTQWAHEQSGHSGRDGGYSWAQQTGLPFTKADLAMATAECPICQQQRPTLSPLYSTIPQGDQPATWWQIDYIGPLPSWKGQKFVLTVIDTYSRYRFAYPAHNASAKTTIHGLIECLIHCYGIPHSIASDQSIHFTTKEVQXWAHAHGIHWSYHVSHHPEAAGL

SEQ ID NO: 35914 - protein, 90 aa, Homo sapiens
  misc_feature (1)...(90): Xaa = X or * as defined in Table 2
SASCTAAFHHQMEVVYTRSGSSRSXRPTIPVIAQWDYDHNGHGGRDGGYPWAQQHELPLTKADLATATAECPICQQQRPSLSPRCGTIPR

SEQ ID NO: 35915 - protein, 79 aa, Homo sapiens
MDYHKLNQVVTPIAAAVPDMVSLLELINTSPGSWYAAINLANDFFSIPVSIKWVVHSSIPSSNGSGIYVIRLEQVLKAQ

SEQ ID NO: 35916 - protein, 17 aa, Homo sapiens
MPQEMVPYRRLSIGLCC

SEQ ID NO: 35917 - protein, 245 aa, Homo sapiens
  DOMAIN (48)..(194): RNase H domain identified by PFam, accession name rnaseH, E- value=1.5e-05, PFam score of 10.1
  misc_feature (1)...(245): Xaa = X or * as defined in Table 2
HKMGHAQQHSIIKWKXYICDWARAGPKGTTAPMASWGVLYDQLTEEEKTRAWFTDGSARYAGTTQKWTAAALQPLSRTSLKGSGEGKSSQWAELQAVHLVVHFSWKDKWPDVRLYIDSWAVANGLAGWSGTWKKHDWKIGDKEIWGRGMWMDLSEWPKPVKIFGSHVSAHQWVISAEEDFNNQVDKMTCSVDITQPLSPATPVITQWAHKQSGHGGRDGGYTWAQQHGLPLTKTGLAMATAECPI

SEQ ID NO: 35918 - protein, 118 aa, Homo sapiens; identical to SEQ ID NO: 34629

SEQ ID NO: 35919 - protein, 196 aa, Homo sapiens
QEKVLQQVQAAAQAALPLGPYDPADLMFLEVSVAHRDALWSRDMWMYLSEWSKTVKIFVSHAASFEWSPEQEKALQQVQAVVQAALPLGPYDPADPVLLEMSVADRDAVWILWQAPISESQWRPPGFWSKALPSSADNYSPFERQLLACYWTLVETERLTMGHQVTIPPELPIMNWVFSDLSSPKMCHPQQHSIIK

SEQ ID NO: 35920 - protein, 79 aa, Homo sapiens
  misc_feature (1)...(79): Xaa = X or * as defined in Table 2
QLAEPPHWLPDXKGAGFEWGPEQKKALQXVQAAVQAALPLGPYDPADPMVLVVSVADKDAVWIFHLSGSDRWRRTYRCL

SEQ ID NO: 35921 - protein, 161 aa, Homo sapiens; identical to SEQ ID NO: 35565

SEQ ID NO: 35922 - protein, 636 aa, Homo sapiens; identical to SEQ ID NO: 35566
  DOMAIN (253)..(276): PHOSPHOLIPASE D SIGNATURE domain identified by eMATRIX, accession number PR00718F, p-value=9.909e-09, raw score of 11.34

SEQ ID NO: 35923 - protein, 476 aa, Homo sapiens
  misc_feature (1)...(476): Xaa = X or * as defined in Table 2
XKHLLREIIINKNLQCLASSLQVARVIPAEHESGQVLPSSEFHKDLAYLEQNPPPPNCSPFFTDIRIGSLPSDASVCGDNCVFESWIGDIILDMDNEFSDSIHNTFGHMWRTKEHNEAGWLLLSSVDKVMKENDELRDSISWLQKQILSLKSAKIALSESLISCRERAEIVEKQTQAVIMRMADPQGKVHAQPQQVSTVKGRTLIGKEWDPATWNGDVWEDPDEAGDTEFVNSDEPFLPEVTASPSPRDLWPFTRVTLHWGKGNDQTFWGLLDTGSELVMIPGDPKCHCGPPVKIGVYGGQKTHGSWGMTVDYQKFNQVVTPIVAAVPDVVSLLEHINTSPGICLHRWPHGEFPMIQLTEEEKTRAWFTDGSARYAGTTRKGREEYVRNTANPLGRLLVLPCPVIKVNGKLQQPNPGRTTNGPDPSGMKVWVTPPGKKPQPAEVLAEGKGKTEWVAEEGSQQYQLRLHDQLQKQRL

SEQ ID NO: 35924 - protein, 323 aa, Homo sapiens
  DOMAIN (70)..(258): Reverse transcriptase domain identified by PFam, accession name rvt, E-value=2.4e-06, PFam score of 20.4
  misc_feature (1)...(323): Xaa = X or * as defined in Table 2
XPECIISIDILRSWQNPHIGTLTGRVRAVMVRKAKWKPLELSLPRKIVNQKQYCVPGGIVEISATTKDLKDAKVVIPTISLFNYPIWLVQKNDGSWRMAVDYHKLTQGVTPIAAAVPNVISLLEQINTSSGTWYAAIYLVNVFFSIPVHKALKKQFAFSWQGQPYTFTILPWGHINSPTLCYNLIWRELDHFSLPQDITLVHYIDDIMLIGSRTSKAASFEWGLEQEKGLQQIQSAVQAALPLGPYDPADPMVLEVSVAADRDAVWSLWQAPIGESQQRPLGFWSKALPSYADNYSSFERQLLACYWALVETECLTLGHQVTI

SEQ ID NO: 35925 - protein, 129 aa, Homo sapiens
WRFLGPWRIVSCWFCGWEERREGSAFFVGIPARMSAARESHPHGVKRSASPDDDLGSSNWEAAYLGNEERKQKFLRLMGAGKGEEDQKINEELESQYQHSMDSKLSGRYRRHCGLGFSEVEDHDGEGDV

SEQ ID NO: 35926 - protein, 134 aa, Homo sapiens
  misc_feature (1)...(134): Xaa = X or * as defined in Table 2
PWRIVSCWFCGWEERREGSAFFVGIPARMSAARESHPHGVKRSASPDDDLGSSNWEAADLGNEERKQKFLRLMGAGKKEHTGRLVIGDHKSTSHFRTGEDHDGEGDVAGDDDDDDDDSPDPXSPDDSESDSESE

SEQ ID NO: 35927 - protein, 144 aa, Homo sapiens
  misc_feature (1)...(144): Xaa = X or * as defined in Table 2
LGPWRIVSCWFCGWEERREGSAFFVGIPARMSAARESHPHGVKRSASPDDDFFLFAIMNGKXKIVNSHRCSVKAKSRQQLGSSNWEAADLGNEERKQKFLRLMGAGKKEHTGRLVIGDHKSTSHFRTGEEDXKINEELESQYQH

SEQ ID NO: 35928 - protein, 62 aa, Homo sapiens
  misc_feature (1)...(62): Xaa = X or * as defined in Table 2
MRVKNSLAALDPCGDPDEKMPNPLAALPSRKXQQLTXPPRAPSSAHYRTQSPSGPSLPQSSP

SEQ ID NO: 35929 - protein, 103 aa, Homo sapiens
  DOMAIN (11)..(31): Phosphoglycerate mutase family phosphohistidine proteins domain identified by eMATRIX, accession number BL00175A, p-value= 8.977e-15, raw score of 15.42
  DOMAIN (12)..(51): Phosphoglycerate mutase family domain identified by PFam, accession name PGAM, E-value=1e-12, PFam score of 50.1
  misc_feature (1)...(103): Xaa = X or * as defined in Table 2
PQPAAMAAYIWVLIRHGESAWNLETSFSGWYDATLSLAGHKEAKRGGQALRGLFQVPLAPEAVGTVWCSWRTPCALKQLXPRPLKRRLRILADRHATQPRPQQ

SEQ ID NO: 35930 - protein, 270 aa, Homo sapiens
  DOMAIN (175)..(227): Phosphoglycerate mutase family phosphohistidine proteins domain identified by eMATRIX, accession number BL00175D, p-value= 1.000e-40, raw score of 27.67
  DOMAIN (19)..(248): Phosphoglycerate mutase family domain identified by PFam, accession name PGAM, E-value=2.1e-75, PFam score of 263.9
  misc_feature (1)...(270): Xaa = X or * as defined in Table 2
SQSVPHPQPAAMAAYKLVLGRHGESAWNLENRFSGWDDADLSPAGQRGGERFAAQALQDAGYEFDICFTSVQKRAIRTLWTVLDAFDQMWLASGEGLWGFNERHYWGSXPGLNXKQKLAAKIGXGPRLKIWRRSYDVPPPPMEPDHPFYSNISKDRRYADLTEDQLPSCESLKDTIARALPFWNEEIVPQIKEGKRVLIAAHGNSLRGIVKHLEGLSEEAIMELNLPTGIPIVYELDKNLKPIKPMQFLGDEETVRKAMEAVAAQGKAKK

SEQ ID NO: 35931 - protein, 149 aa, Homo sapiens
VNKAGGLIYQLDSYAPRAEAEKTFSYPLDLLLKLHDERVLVAFGQRDGIRVGHAVLAINGMDVNGRYTADGKEVLEYLGNPANYPVSIRFGRPRLTSNEKLMLASMFHSIKFVVLADPRQAGIDSLLRKIYEIYSDFALKNPFYSLEMP

SEQ ID NO: 35932 - protein, 221 aa, Homo sapiens
MAIFSVYVVNKAGGLIYQLDSYAPRAEAEKTFSYPLDLLLKLHDERVLVAFGQRDGIRVGHAVLAINGMDVNGRYTADGKEVLEYLGNPANYPVSIRFGRPRLTSNEKLMLASMFHSLFAIGSQLSPEQGSSGIEMLETDTFKLHCYQTLTGFSKPLNKVVILVQTNQTGLVSAAHLQASVHLDEGNSGPSAGHVTPVTHLKLVGDKLPSLSDELLLPGPP

SEQ ID NO: 35933 - protein, 678 aa, Homo sapiens
MKKTEDNNALVFTVNVKANKHQKKLYDTDVAKAWKNATLAEQAKLPATEKPVLLSKDIEAKMMALDREVQYLLNKAKFTKPRPRPKDKNGTRAEPPLNASASDQGEKVIPPAGQTEDAEPISEPEKVETVQAERPAALKVSEALGSCSRGVWYPPGVVLSPGLSDAAAGREALLMGIVKLPCNIQDVFGSFAQQQVGQADAQVLGSQLGPSWNVTSSDAYQLWVILRAIFMLYEGRRWDLVEHRPYQVPQEGPFSDAAKQSLGIVQHTHQIQDVLVLGSHFHAQGPLMEKHPRTSGLIFPQPMAQSMGPPLSTCSPAPFGPVASQGLPLPENAILGKQMQKVNIMFYDMGSGSTVCTIVTYQMVKTKEAGMQPQLQIRGVGFDRTLGGLEMELRLRERLAGLFNEQRKGQRAKDVRENPRAMAKLLLGHAVLAINGMDVNGRYTADGKEVLEYLGNPANYPVSIRFGRPRLTSNEKLMLASMFHSLFAIGSQLSPEQGSSGIEMLETDTFKLHCYQTLTDHRTTLDDQLNQRGARHGPLRQTDFILTRSLRDPGEGKDSSKRRISPKTRLPRPESQTVMPGGRQRNLEAADPEAGVAPGAAPSLLSGSFTSSLSKKTKRRHCSAPAGEEYQLENPFVLVTPATGCLISDPQQPQRFHPELVAAQSSAPNPNLEPPLGE

SEQ ID NO: 35934 - protein, 238 aa, Homo sapiens
  misc_feature (1)...(238): Xaa = X or * as defined in Table 2
IPVSERQGSDWRFFSVYVVNKAGGLIYQLDSYAPTGLRLEKTFSYPLDLAGSSXHDERVLVAFGQRGRHPEWGHAVLAINGMDVNGRYTADGKEVLEYLGXPLLNYPVSIRFGRPRLTSNEKLMLGLPCFHSLFAIGSQACLPGTREASRHLKILGRQDTFKLHCYQTLTGIKFVVLADPRQAGIDSLLRKIYEIYSDFALKNPFYSLEMPIRCELFDQNLKLALEVAEKAGTFGPGS

SEQ ID NO: 35935 - protein, 112 aa, Homo sapiens
MEVGKLSKGVWEEPALPDERKTFASARGPVRKADTPVHRAAAGTAWRKVQCLTKDDAVWCVKENGLDISSLGLIPAQTTCVILHPYPSEEQKKQLAQDTGLTILQVNNWKAH

SEQ ID NO: 35936 - protein, 130 aa, Homo sapiens
MPIDLVIDERDCSSKSDHEELSGSSTNLADHNPSSWRDHDDATSTHSAGTPGPSSGGHASQSGDNSSEQGDGLDNSVASPGTGDDDDPDKDKKRQKKRGILPIVFPIYHESMALPASHTSCTLPKSRIYS

SEQ ID NO: 35937 - protein, 65 aa, Homo sapiens
  DOMAIN (4)..(32): MYOSIN HEAVY CHAIN SIGNATURE domain identified by eMATRIX, accession number PR00193C, p-value=8.263e-19, raw score of 12.60
  DOMAIN (4)..(42): Myosin head (motor domain) domain identified by PFam, accession name myosin_head, E-value=4.6e-11, PFam score of 39.9
LHSPIMEAFVNVKTVYNNNSSRFGKFVQLNICQKGNIQGGRIVDCILFHLFLSIVIDSLSGNCSH

SEQ ID NO: 35938 - protein, 149 aa, Homo sapiens
  DOMAIN (39)..(67): MYOSIN HEAVY CHAIN SIGNATURE domain identified by eMATRIX, accession number PR00193C, p-value=3.489e-23, raw score of 12.60
  DOMAIN (1)..(146): Myosin head (motor domain) domain identified by PFam, accession name myosin_head, E-value=2.7e-55, PFam score of 192.9
TESTKLILKFLSVISQQSLELSLKEKTSCVERAILESSPIMEAFGNAKTVYNNNSSRFGKFVQLNICQKGNIQGGRIVDYLLEKNRVVRQNPGERNYHIFYALLAGLEHEEREEFYLSTPENYHYLNQSGCVEDKTISDQESFREVITA

SEQ ID NO: 35939 - protein, 257 aa, Homo sapiens
  DOMAIN (157)..(185): MYOSIN HEAVY CHAIN SIGNATURE domain identified by eMATRIX, accession number PR00193C, p-value=3.489e-23, raw score of 12.60
  DOMAIN (5)..(195): Myosin head (motor domain) domain identified by PFam, accession name myosin_head, E-value=2.6e-49, PFam score of 172.2
MRKPTYIGSILASVNPYQPIAGLYEPATMEQYSRRHLGELPPHIFAIANECYRCLWKRHDNQCILISLVNCVWDLATAGLNNGSSWSPEGPFGPSRAFPPELRFLQVALMSGESGAGKTESTKLILKFLSVISQQSLELSLKEKTSCVERAILESSPIMEAFGNAKTVYNNNSSRFGKFVQLNICQKGNIQGGRIVDCILFHLFLSIFTNVGPQVRNRIAACERAGMMEYRSASLSLLNASVAEGYVREACRYKVVR

SEQ ID NO: 35940 - protein, 240 aa, Homo sapiens
  DOMAIN (7)..(164): L1P family of ribosomal proteins domain identified by PFam, accession name Ribosomal_L1, E-value=0.012, PFam score of -91.3
  misc_feature (1)...(240): Xaa = X or * as defined in Table 2
EAMSSKVSRDTLYEAVREVLHGNQRKRRKFLETVELQISLKNYDPQKDKRFSGTVQVGTVLIPPSPQCPRACPSPAGSRXAGGGHVGTDVLGXFRPPAPGRRGWTDPHPGSXNMRGGVGRPRPSPPASLRSQAGCWXMXTLRVRLGWLLRSQTLHRALGTPGLGVTCWCCPPKRRLKSTPRPKFSVCVLGDQQHCDEAKAVDIPHMDIEALKKLNKNKKLVKKLAKKYDAFLASESLIKQ

SEQ ID NO: 35941 - protein, 224 aa, Homo sapiens
  DOMAIN (7)..(222): L1P family of ribosomal proteins domain identified by PFam, accession name Ribosomal_L1, E-value=3.5e-61, PFam score of 216.7
EAMSSKVSRDTLYDAVREVLHGNQRKRRKFLETVELQISLKNYDPQKDKRFSGTVRLKSTPRPKFSVCVLGDQQHCDEAKAVDIPHMDIEALKKLNKNKKTGSRSWPKKYDAFLASQSPLIQADSPKSLGPSLNKGRKSSPSLLTHNKNMVAKVDEVKSTIKFPNWRRCLCLAVAVGHVKMTDDELVYNIHLAVNFLVSLLKKNWQNVRALYIKSPMGKPQRLY

SEQ ID NO: 35942 - protein, 281 aa, Homo sapiens
  DOMAIN (120)..(142): AAA-protein family proteins domain identified by eMATRIX, accession number BL00674B, p-value=5.235e-25, raw score of 4.46
  DOMAIN (122)..(248): ATPases associated with various cellular act domain identified by PFam, accession name AAA, E-value=3e-38, PFam score of 140.5
MAIPGIPYERRLLIMADPRDKALQDYRKKLLEHKEIDGRLKELREQLKELTKQYEKSENDLKALQSVGQIVGEVLKQLTEEKFIVKATNGPRYVVGCRRQVIELPLTNPELFQRVGIIPPKGCLLYGPPGTGKTLLARAVASQLDCNFLKVVSSSIVDKYIGESARLIREMFNYARDHQPCIIFMDEIDAIDIDLPNEQARLDILKIHAGPITKHGEIDYEAIVKLSDGFNGADLRNVCTEAGMFAIRADHDFVVQEDFMKAVRKVADSKKLESKLDYKPV

SEQ ID NO: 35943 - protein, 398 aa, Homo sapiens
  DOMAIN (265)..(312): AAA-protein family proteins domain identified by eMATRIX, accession number BL00674D, p-value=9.000e-38, raw score of 23.41
  DOMAIN (188)..(381): ATPases associated with various cellular act domain identified by PFam, accession name AAA, E-value=2.4e-82, PFam score of 287.0
  misc_feature (1)...(398): Xaa = X or * as defined in Table 2
LLIMADPRDKALQDYRKKLLEHKEIDGRLKELREQLKELTKQYEKSENDLKALQSVGQIVGEVLKQLTEEKFIVKATNGPRYVVGCRRQLXQKVSLKPGTRVALDMTTLTIMEDILPREVDPLVYNMSHEDPGNVSYSEIGGLSEQIRGIXGEVIGLPLYKPQSYFQRVGIIPPKGCLLYGPPGTGKNTLLARAVASQLDCNFLKVVSSSIVDKYIGESARLIREMFNYARDHQPCIIFMDEIDAIGGRRFSEGTSADREIQRTLMELLNQMDGFDTLHRVKMTMATNRPDTLDPALLRPGRLDRKIHIDLPNEQARLDILKIHAGPITKHGEIDYEAIVKLSDGFNGADLRNVCTEAGMFAIRADHDFVSTGKTSLKAVRKVADSKKLESKLDYKPV

SEQ ID NO: 35944 - protein, 23 aa, Homo sapiens
LCENHRLGHPGDQSWLWLSNPEQ

SEQ ID NO: 35945 - protein, 380 aa, Homo sapiens
MDLFKWSKTVKAFVSPVNAHQWVTSAEEDINNQVHRMTRSVDTIRPLSAATRVIAQWAHEHSSHGGSNGGDAWAQQHGLPLTKADVTMANAEKQDKWTRKNIKEYKTDSFWRHTGYVMAQIDGLYVGAKKRAILEGTKKSLGAQILCVNYPSPNPCQKGERALCIAVNMLPWSQLIGIRLNGCRPGPTRLHRTGRQEPETSRSPTPSELHPSELAQDPRVFAACTPGTPVTRACRKSGGLLRQGIMPVPRAVPGLLTPRGSRWRFYSVVGCLLDSMPKEYRGDCWEPAAIIKQLEGLVAHAATILMNKNKVTETVEGSALLKAMRLTKILGGPISDMEKFLMTWTEDQTQKYIPLSNYSQSKSLQDNRSKQKVCNVERKY

SEQ ID NO: 35946 - protein, 176 aa, Homo sapiens
MNGPSCPKEPEQLRKLFMGGLSFETTDESLRSPSEQWRRLTDCVDATVELRINELEIFPVELDPKSTKGRSMQLARSWEHNRLRASAFIGGRQKGSLTQAQKRRLGKGGVDRDLKMEALKTGVMDAVTSQRMLAATGSWKRQEQILPLELLEGAQSCRHLDLNPVKLISEFLRAEL

SEQ ID NO: 35947 - protein, 361 aa, Homo sapiens
  DOMAIN (17)..(220): Transmembrane region cyclic Nucleotide G domain identified by PFam, accession name CNG_membrane, E-value=0.00075, PFam score of -80.7
MPASSSRFCSSNPMKNVQLFSELSFIPTRLTEQCQSEPWHQKVVILRVGLRFLRALRLLELPQILQILRAIKTSNSVKFSKLLSIILSTWFTAAGFIHLVENSGDPWLKGRNSQNISYFESIYLVMATTSTVGFGDVVAKTSLGRTFIMFFTLGSLILFANYIPEMVELFANKRKYTSSYEALKGKKFIVVCGNITVDSVTAFLRNFLRDKTPPSLELETIFKCYLAYTTFISGSAMKWEDLRRVAVYLPKIPSWNWDTGDNIICFAELKLGFIAQGCLVPGLCTFLTSLFVEQNKKVMPKQTWKKHFLNSMKNKILTQRLSDDFAGMSFPEVARLCFLKMHLLLIAIEYKSLFTDGFWYQ

SEQ ID NO: 35948 - protein, 157 aa, Homo sapiens
  DOMAIN (120)..(148): Granins proteins domain identified by eMATRIX, accession number BL00422C, p-value=9.471e-09, raw score of 16.18
MFGRTRWLTPVIPALWEAEAGESRETYYPTVWCWEGRGQTLLRPFITSKPPVQYRNELIKTADGGQISLDWFDNDNSTCYMDASTRPTILLLPGLTGTSKESYILHMIHLSEELGYSRGFNGRLQEEAEEEEEEEDVAVAEEEGVLGDNVSQDFKVI

SEQ ID NO: 35949 - protein, 774 aa, Homo sapiens
  DOMAIN (546)..(573): Protamine P1 proteins domain identified by eMATRIX, accession number BL00048, p-value=2.688e-09, raw score of 6.39
MNMNIKKIVKQATVLTFTTALLAGGATQAFAKENNQKAYKETYGVSHITRHDMLQIPKQQQNEKYQVPQFDQSTIKNIESAKGLDVWDSWPLQNADGTVAEYNGYHVVFALAGSPKDADDTSIYMFYQKVGDNSIDSWKNAGRVFKDSDKFDANDPILKDQTQEWSGSATFTSDGKIRLFYTDYSGKHYGKQSLTTAQVNVSKSDDTLKINGVEDHKTIFDGDGKTYQNVQQFIDEGNYTSGDNHTLRDPHYVEDKGHKYLVFEANTGTENGYQGEESLFNKAYYGGGTNFFRKESQKLQQSAKKRDAELANGALGIIELNNDYTLKKVMKPLITSNTVTDEIERANVFKMNGKWYLFTDSRGSKMTIDGINSNDIYMLGYVSNSLTGPYKPLNKTGLVLQMGLDPNDVTFTYSHFAVPQAKGNNVVITSYMTNRGFFEDKKATFAPSFLMNIKGNKTSVVKNSILEQGQLTWLQVAKRAGLGGGQSGRTVLRERVRIEIASTHIALAARHSDWRCCRNGRYPARGPAGAEAANVTGPDGVPVEGSRYAADRRRYRRGYYGRRRGPPRNYAGEEEEEGSGSSEGFDPPATDRQFSGARNQLRRPQYRPQYRQRRFPPYHVGQTFDRRSRVLPHPNRIQSYPWSLPYPLPHQQLLKPLNGQIKAGEIGEMKDGVPEGAQLQGPVHRNPTYRPRYRSRGPPRPRPAPAVGEAEDKENQQATSGPNQPSVRRGYRRPYNYRRRPRPPNAPSQDGKEAKAGEAPTENPAPPTQQSSAE

SEQ ID NO: 35950 - protein, 226 aa, Homo sapiens
MPRQKFAAGSGPSWRTSARAVWKGNVGLEPPHRVPTGALPSGAVRIGPPSSRPQNGRSTDSLLHVPGKVTDTQHQPMKAARNGTIPCKATGAELPKAMGAHFLHQHDLDYAGEEEEEGSGSSEGFDPPATDRQFSGARNQLRRPQYRPQYRQRRFPPYHVGQTFDRRSRVLPHPNRIQQSSPFRPSLPPLPPPPPTSAARNLAYGFLMLQKLRQGLQSVFSKQSFR

SEQ ID NO: 35951 - protein, 227 aa, Homo sapiens
  DOMAIN (93)..(108): 'Cold-shock' DNA-binding domain proteins domain identified by eMATRIX, accession number BL00352A, p-value=1.429e-17, raw score of 12.19
  DOMAIN (90)..(127): 'Cold-shock' DNA-binding domain identified by PFam, accession name CSD, E-value=2.7e-18, PFam score of 70.1
MSEAGEATTTTTTTLPQAPTEAAAAAPQDPAPKSPVGSGAPQAAAPAPAAHVAGNPGGDAAPAATGTAAAASLATAAGSEDAEKKVLATKVLGTVKWFNVRNGYGFINRNDTKEDVFVHQTAIKKNNPRKYLAQCSSLGPRNHLAPPAVSPSVAASGGVRVYHVGQTFDRRSRVLPHPNRIQAGTVAGDLLAHDLPQQFGEAEDKRKSASHQWSKPAVLFAVDNRGP

SEQ ID NO: 35952 - protein, 112 aa, Homo sapiens
  misc_feature (1)...(112): Xaa = X or * as defined in Table 2
FGLHKWGLGLEASSPCGPLTPSYLGFPRPHPGTLGLGRFWPFLALQSLSETPSHARMPRVTVARTSPETLEISPLRAATXNHRSSGHTCFRERMLRVSCRLSLDLSSSWVRG

SEQ ID NO: 35953 - protein, 261 aa, Homo sapiens
MAAVCPELLWFQVTTRRGEISNVSREARAAVIRGIRARDGVSDSDLRARKGQNLPRPMSQGGVDGTQGTSILSKQVQNKPKTGRSLLGGPGDLSPLTPSFGILPLETPSPGDGSYLQNYTNIPSEIEVPSTGAPSKKSVARIGQTGAKSVFSQSGNRREWGPLCVEVSIPFLLKPMKAGFSRVSPESGPWRRAHKMLTAGDGDILQKSVSKLFNNRKVQLCVNECIHRKDVSQNASVYLLSEDIRFSTAGLKGLQISTCRF

SEQ ID NO: 35954 - protein, 881 aa, Homo sapiens
  DOMAIN (698)..(719): PROTEIN REPEAT DOMAIN TPR NUCLEA domain identified by eMATRIX, accession number PD00126A, p-value=7.923e-10, raw score of 22.53
  DOMAIN (520)..(837): TPR Domain domain identified by PFam, accession name TPR, E- value=1.7e-46, PFam score of 167.9
  misc_feature (1)...(881): Xaa = X or * as defined in Table 2
ASRMTVLQEPVQAAIWQALNHYAYRDAVFLAERLYAEVHSEEALFLLATCYYRSGKAYKAYRLLKGHSCTTPQCKYLLAKCCVDLSKLAEGEQILSGGVFNKQKSHDDIVTEFGDSACFTLSLLGHGHVQTERAAKGTAFSPKRLCLHTFPWTPLEPLVEIGERPLPHQTFNFTSXRNFANCLHTSGTKQVTNHVFSHRQPETVLTETPQDTIELNRLNLESSNSKYSLNTDSSVSYIDSAVISPDTVPLGTGTSILSKPVQNKPKTGRSLLGGPAALSPLTPKFWGFLPIRKPPSPGDGSYLQNYTNTPPVIDVPSTGAPSKKTFRVLQSVARIGQTGTKSVFSQSGNSREVTPILAQTQSSGPQTSTTPQVLSPTITSPPNALPRRSSRLFTSDSSTTKENSKKLKMKFPPKIPNRKTKSKTNKGGITQPNINDSLEITKLDSSIISEGKISTITPQIQAFNLQKAAAEGLMSLLREMGKGYLALCSYNCKEAINILSHLPSHHYNTGWVLCQIGRAYFELSEYMQAERIFSEVRRIENYRVEGMEIYSTTLWHLQKDVALSVLSKDLTDMDKNSPESGTQRGRESPRMCGADSQIEKSQSSYFIQDLSRFDYVKFAVVTKIRAWCAAGNCFSLQREHDIAIKFFQRAIQVDPNYAYAYTLLGHEFVLTEELDKALACFRNAIRVNPRHYNAWYGLGMIYYKQEKFSLAEMHFQKALDINPQSSVLLCHIGVVQHALKKSEKALDTLNKAIVIDPKNPLCKFHRASVLFANEKYKSALQELEELKQIVPKESLVYFLIGKVYKKLGQTHLALMNFSWAMDLDPKGANNQIKEAIDKRYLPDDEEPITQEEQIMGTDESQESSMTDADDTQLHAAESDEF

SEQ ID NO: 35955 - protein, 139 aa, Homo sapiens
  misc_feature (1)...(139): Xaa = X or * as defined in Table 2
GEFSIFFWVWNXLLLWHQETFSIXNLFSSHXTSITYQATEEGFDFIIQMKLIHFGDSIFIYLKLLILNRKPXXEAAISIXVXTWRSRFSHFQLRXHQTQVTNHSWFTEARXLTDLVKSKSPTIPCSRFKANTLFXXSDP

SEQ ID NO: 35956 - protein, 484 aa, Homo sapiens
  DOMAIN (400)..(446): kw TRANSCRIPTASE REVERSE II ORF2 domain identified by eMATRIX, accession number DM01354O, p-value=2.161e-40, raw score of 8.73
  DOMAIN (128)..(221): Eukaryotic protein kinase domain identified by PFam, accession name pkinase, E-value=0.0031, PFam score of 15.6
KWFPELPLLHPEIGLLKYMNSGGLLTMSLERDLLDAEPMKELISKRPLVRSEVNGQIILLKGYSVDVDTEAKVIERAATYHRAWREAEGDSGLLPLIFLFLCKSDPMAYLMVPYYPRANLNAVQANMPLNSEETLKVMKGVAQGLHTLHKADIIHGSLHQNNVFALNREQGIVGDFDFTKSVSQRASVNMMVGDLSLMSPELKMGKPASPGSDLYAYGCLLLWIPENVEAALELRHGQRLEGSEEDRKMWESLELPRDLLNGFEQNADSDMASEVQVEDNGESISRACQKASQQPFPSQAQRPRRKKWFHGLGQRSPCCVQPSDMVPCVPPAPVMAKRGQEIQATVTECNKHLYANQLENLEEMEKFLDTYTLPRLNQQEVESLNRPTISSEIEAVINSLPTKKSPGPDRYTVEFHQRYKEELVPFFLKLFQTVEKEGILPNSFYEAGIILVPKRARDTTKKENFRPISLMNIDAKILNKILAN

SEQ ID NO: 35957 - protein, 520 aa, Homo sapiens
  DOMAIN (306)..(327): GAMMA-AMINOBUTYRIC ACID (GABA) RECEPTOR SIGNATURE domain identified by eMATRIX, accession number PR00253A, p-value=4.000e- 24, raw score of 9.15
  DOMAIN (95)..(503): Neurotransmitter-gated ion-channel domain identified by PFam, accession name neur_chan, E-value=5.2e-176, PFam score of 598.1
NSLFQFIHPSLLSAQTVELGLSKFVPKKMIITQTSHCYMTSLGILFLINILPGTTGQGESRRQEPGDFVKQDIGGLSPKHAPDIPDDSTDNITIFTRILDRLLDGYDNRLRPGLGDAVTEVKTDIYVTSFGPVSDTDMEYTIDVFFRQTWHDERLKFDGPMKILPLNNLLASKIWTPDTFFHNGKKSVAHNMTTPNKLLRLVDNGTLLYTMRLTIHAECPMHLEDFPMDVHACPLKFGSYAYTTAEVVYSWTLGKNKSVEVAQDGSRLNQYDLLGHVVGTEIIRSSTGEYVVMTTHFHLKRKIGYFVIQTYLPCIMTVILSQVSFWLNRESVPARTVFGVTTVLTMTTLSISARNSLPKVAYATAMDWFIAVCYAFVFSALIEFATVNYFTKRSWAWEGKKVPEALEMKKKTPAAPAKKTSTTFNIVGTTYPINLAKDTEFSTISKGAAPSASSTPTIIASPKATYVQDSPTETKTYNSVSKVDKISRIIFPVLFAIFNLVYWATYVNRESAIKGMIRKQ

SEQ ID NO: 35958 - protein, 148 aa, Homo sapiens
  DOMAIN (42)..(64): GAMMA-AMINOBUTYRIC ACID (GABA) RECEPTOR SIGNATURE domain identified by eMATRIX, accession number PR00253C, p-value=8.800e- 24, raw score of 13.85
  DOMAIN (15)..(83): Neurotransmitter-gated ion-channel domain identified by PFam, accession name neur_chan, E-value=2.2e-25, PFam score of 89.7
MSEGIRHTALEAEKGVTTVLTMTTLSISARNSLPKVAYATAMDWFIAVCYAFVFSALIEFATVNYFTKRSWAWEGKKVPEALEMKDKSETSASREALEALDPQRQGTGKSQIGINRGPEVPDMVGEKCLGQGVECGVYGRKNLTFICQ

SEQ ID NO: 35959 - protein, 114 aa, Homo sapiens
LNDNINLLGKVELLDYLDSIDCSLEDFQAMLSGRQFSIDPDLLVDSENKGLETTKNNVVQPVSEEGRKSKSKPDKQLIQYTAFPLLAFLDGNPASSVEQASTTASSEVLSSVDK

SEQ ID NO: 35960 - protein, 570 aa, Homo sapiens
  DOMAIN (58)..(103): HSF-type DNA-binding domain proteins domain identified by eMATRIX, accession number BL00434A, p-value=1.000e-40, raw score of 17.17
  DOMAIN (37)..(229): HSF-type DNA-binding domain identified by PFam, accession name HSF_DNA-bind, E-value=2e-121, PFam score of 415.5
  misc_feature (1)...(570): Xaa = X or * as defined in Table 2
RSREAAAVAAAAATTAFGCRIWNPCAALTMKQSSNVPAFLSKLWTLVEETHTNEFITWSQNGQSFLVLDEQRFAKEILPKYFKHNNMASFVRQLNMYGFRKVVHIDSGIVKQERDGPVEFQHPYFKQGQDDLLENIKRKVSSSKPEENKIRQEDLTKIISSAQKVQIKQETIESRLSELKSENESLWKEVSELRAKHAQQQQVIRKIVQFIVTLVQNNQLVSLKRKRPLLLNTNGAQKKNLFQHIVKEPTDNHHHKVPHSRTEGLKPRERISDDIIIYDVTDDNADEENIPVIPETNEDVISDPSNCSQYPDIVIVEDDNEDEYAPVIQSGEQNEPARESLSSGSDGSSPLMSSAVQLNGSSSLTSEDPVTMDGFPFGMDNIQSFWGRVELLDYLDSIDCSLEDFQAMLSGRQFSIDPDLLVDLFTSSVQMNPTDYINNTKSENKGLETTKNNVVQPVSEEGKENLKSKPDKQLIQYTAFPLLAFLDGNPASSVXTGRGTTASFRKFCPLXDKPIEVDELLDSSLDPEPTQSKLVRLEPLTEAEASEATLFYLCELAPAPLDSDMPLLDS

SEQ ID NO: 35961 - protein, 83 aa, Homo sapiens
ALIFKKQQAMAMAERRKNDVGNEVTYPSPKAKEAEEELSDALGISIAGGRGSPLGDIPVFIAMIQASGVAARTQKLKVNERTG

SEQ ID NO: 35962 - protein, 75 aa, Homo sapiens
  misc_feature (1)...(75): Xaa = X or * as defined in Table 2
QLRSPLKWKKAQRQPLAIAHVLLLRPRKKRQNGFFTVRYARLLSTLPRSWRRKQWYXAQNHVRSPEWKWHYQSLS

SEQ ID NO: 35963 - protein, 327 aa, Homo sapiens
LGPFSGFLAPELQKYQKQIKEPNEEQSLRSNNIAELSPGAINSCRSEYHAAFNSMMMERMTTDINALKRQYSRIKKKQQQQVHQVYIRAGKKMKMTNRAAKNAVIHIPGHTGGKISPVPYEDLKTKLNSPWRTHIRVHKKNMPRTKSHPGCGDTIGLIDEQNEASKTNGLGAAEAFPSGCTATAGREGSSPEGSTRRTIEGQSPEPVFGDADVDVSAVQAKLGALELNQRDAAAETELRVHPPCQRHCPEPPSAPEENKATSKAPQGSNSKTPIFSPFPSVKPLRKSATARNLGLYGPTERTPTVHFPQMSRSFSKPGGGNSGTKKR

SEQ ID NO: 35964 - protein, 1167 aa, Homo sapiens
  DOMAIN (1038)..(1088): ENV polyprotein (coat polyprotein) domain identified by eMATRIX, accession number PF00429, p-value=2.500e-19, raw score of 31.08
  DOMAIN (915)..(1162): ENV polyprotein (coat polyprotein) domain identified by PFam, accession name ENV_polyprotein, E-value=4.4e-48, PFam score of 165.2
MVGYFRLWIPGFAILTKPLYKLTKGNLADPIDPKSFPHSSFCSLKTALETAPTLALPDSSQPASLHTAEVQGCAVGILTQGPGSRPVAFLSKQLDLTVLGWPSCLRAAAAAALILLEALKITNYAQLTLYSSHNFQNLFSSSHLTHILSAPGLLQLYLHFVESPTITIVPGPDFNPASHIIPDTTPDPHDCISLIHLTFTPFPHISFFPVSHPDHTWFIDGSSTRPNRHSPAKAGYAIVSSTSIIEATALPPSTTSQQAELVALTQALTLAKGLCVNIYTDSKYAFHILHHHAVIWAERGFLTTQGSSIINASLIKTLLKAALLPKEAGVIHCKGHQKASDPIALGNAYVDKVARQAASSPTSVPHGQFFSFTSVTPTYSPTETSTYQSLPTQGKWFLDQGKYLLPASQAHSILSSFHNLFYVDIIPRFGLPTSIQSDNGPAFTSQITQVVSQALGIQWNLHTPYRPQSSGKVERTNGLLKAHLTKFSLQLTKDWTALLPLALLKIRACPRDATGYSPFELLYGRTFLLGPNLIPDTSPLGDYLPVLQQARQEIRQAANLLLPTPDPQPYEDNLAGRSVLVKNLTPQTLQPRWTGPYLVIYSTPTAVCLQNPPHWVHHSRIKLCPSDSQPNPSSSSWKSQVLSPTSLKLTHISEEHAYTAVPALQTDWATSPISLHLRTSFNSPHLYPPEELIYFLDRSSKTSPDISHQQAAALLRTYLKNLSPYINSTPPIFGPLTTQTTIPVAAPLCISWQRPTGIPLGNLSPSRCSFTLHLRSPTTNINETIGAFQLHITDKPSINTDKLKNISSNYCLGRHLPCISLHPWLSSPCSSDSPPRPSSCLLIPSPENNSERLLVDTRRFLIHHENRTFPSTQLPHQSPLQPLTAAALAGSLGVWVQDTPFSTPSHLFTLHLQFCLAQGLFFLCGSSTYMCLPANWTGTCTLVFLTPKIQFANGTEELPVPLMTPTQQKRVIPLIPLMVGLGLSASTVALGTGIAGISTSVMTFRSLSNDFSASITDISQTLSVLQAQVDSLAAVVLQNRRGLDLLTAEKGGLCIFLNEECCFYLNQSGLVYDNIKKLKDRAQKLANQASNYAEPPWALSNWMSWVLPIVSPLIPIFLLLLFGPCIFRLVSQFIQNRIQAITNHSIRQMFLLTSPQYHPLPQDLPSA

SEQ ID NO: 35965 - protein, 584 aa, Homo sapiens
  DOMAIN (455)..(505): ENV polyprotein (coat polyprotein) domain identified by eMATRIX, accession number PF00429, p-value=2.500e-19, raw score of 31.08
  DOMAIN (49)..(579): ENV polyprotein (coat polyprotein) domain identified by PFam, accession name ENV_polyprotein, E-value=4.2e-53, PFam score of 182.3
MIFAGKAPSNTSTLMKFYSLLLYSLLFSFPFLCHPLPLPSYLHHTINLTHSLLAASNPSLVNNCWLCISLSSSAYTAVPAVQTDWATSPISLHLRTSFNSPHLYPPEELIYFLDRSSKTSPDISHQQAAALLRTYLKNLSPYINSTPPIFGPLTTQTTIPVAAPLCISWQRPTGIPLGNLSPSRCSFTLHLRSPTTNINETIGAFQLHITDKPSINTDKLKNISSNYCLGRHLPCISLHPWLSSPCSSDSPPRPSSCLLIPSPENNSERLLVDTRRFLIHHENRTFPSTQLPHQSPLQPLTAAALAGSLGVWVQDTPFGTPSHLFTLHLQFCLAQGLFFLCGSSTYMCLPANWTGTCTLVFLTPKIQFANGTEELPVPLMTPTQQKRVIPLIPLMVGLGLSASTVALGTGIAGISTSVMTFRSLSNDFSASITDISQTLSVLQAQVDSLAAVVLQNRRGLDLLTAEKGGLCIFLNEECCFYLNQSGLVYDNIKKLKDRAQKLANQASNYAEPPWALSNWMSWVLPIVSPLIPIFLLLLFGPCIFRLVSQFIQNRIQAITNHSIRQMFLLTSPQYHPLPQDLPSA

SEQ ID NO: 35966 - protein, 292 aa, Homo sapiens
  DOMAIN (268)..(288): NATURAL RESISTANCE-ASSOCIATED MACROPHAGE PROTEIN SIGNATURE domain identified by eMATRIX, accession number PR00447G, p-value= 9.544e-09, raw score of 6.69
  DOMAIN (128)..(261): ENV polyprotein (coat polyprotein) domain identified by PFam, accession name ENV_polyprotein, E-value=3.8e-17, PFam score of 60.0
MDEEKREHLNALGRRALGEGPMYQCTRGSGAGNYLTTYVREPEQKALAILWTQGWGWGPVNNSERLLVDTQRFLIHHENRTSSSVQLPHQSPLQPLMAVALAGSLGVWVQDTPFSTPSHLFTLHLQFCLAQGVFFLCVSSTYMCLPANWTGTCTLVFLTPKIQFANRTEELPVPLMTPTRQKRVIPLIPLLVGLGLSASTIALGTGIGGISTSVTTFHSLSSVFSASITDISQTLSVLQAQVDSLAAVILQNHRGLDLLTAVWSADLEAQRSLLLIFLLVPLFTFRSPVSSY

SEQ ID NO: 35967 - protein, 165 aa, Homo sapiens
  DOMAIN (109)..(145): Homeobox domain identified by PFam, accession name homeobox, E-value=0.067, PFam score of 14.2
  misc_feature (1)...(165): Xaa = X or * as defined in Table 2
LHIPVRTLSCRFVGVCWRSTPGPVCLGISSGGCRTVDIAALQLWLRGLALPEQLLRVDPHPQACRRLPREPPGPGQTFGTREPPQAVSTKEASSSNLHAPERTVAGLTFTTEQVRALEGVFRHHQYLGPLERNWLAREMQLSRSRXKPGFKIAGXNTNGKCRTPS

SEQ ID NO: 35968 - protein, 770 aa, Homo sapiens
  DOMAIN (92)..(325): TBC domain identified by PFam, accession name TBC, E-value= 1.8e-26, PFam score of 101.4
PCQSPGRSRMRQDKLTGSLRRGGRCLKRQGGGVGTILSNVLKKRSCISRTAPRLLCTLEPGVDTKLKFTLEPSLGQNGFQQWYDALKAVARLSTGIPKEWRRKVWLTLADHYLHSIAIDWDKTMRFTFNERSNPDDDSMGIQIVKDLHRTGCSSYCGQEAEQDRVVLKRVLLAYARWNKTVGYCQGFNILAALILEVMEGNEGDALKIMIYLIDKVLPESYFVNNLRALSVDMAVFRDLLRMKLPELSQHLDTLQRTANKESGGGYEPPLTNVFTMQWFLTLFATCLPNQTVLKIWDSVFFEGSEIILRVSLAIWAKLGEQIECCETADEFYSTMGRLTQEMLENDLLQSHELMQTVYSMAPFPFPQLAELREKYTYNITPFPATVKPTSVSGRHSKARDSDEENDPDDEDAVVNAVGCLGPFSGFLAPELQKYQKQIKEPNEEQSLRSNNIAELSPGAINSCRSEYHAAFNSMMMERMTTDINALKRQYSRIKKKQQQQVHQVYIRADKGPVTSILPSQVNSSPVINHLLLGKKMKMTNRAAKNAVIHIPGHTGGKISPVPYEDLKTKLNSPWRTHIRVHKKNMPRTKSHPGCGDTVGLIDEQNEASKTNGLGAAEAFPSGCTATAGREGSSPEGSTRRTIEGQSPEPVFGDADVDVSAVQAKLGALELNQRDAAAETELRVHPPCQRHCPEPPSAPEENKATSKAPQGSNSKTPIFSPFPSVKPLRKSATARNLGLYGPTERTPTVHFPQMSRSFSKPGGGNSGTKKR

SEQ ID NO: 35969 - protein, 80 aa, Homo sapiens
QLRSPLKWKKAQRQPLAIAHVLLLRPRKKRQNGFFTVRYARLLSTLPRSWRRTTVNILRHFSQLLNVPITRPFSWILRPF

SEQ ID NO: 35970 - protein, 431 aa, Homo sapiens
MEEPLGFKQTLVVAQQNPLWTSGGGGHSPSGSGHRGVCITTLPVPEGSSQKETPHVSEKLKEKNESLPGNPENSSRSSERPPRRHSKARDSDEENDPDDEDAVVNAVGCLGKNSGFLAPELQKYQKQIKDGTAGTPAISTTTTVEIRKSSVMTTGDHLLSGKKAQRPAPGHSSCPSTETEEEKGKRLLYWVVWQVAVNSASQLEAHNSENPVSLSCRIRERPGLWHGYRPSRSPLPHSLSGSYSLWALRTDTVCDMSVMLAEMSLERLRKVVTEVEMPAIPVLRAIVEAESPKPTSKGISGITLFCRVGVMRGTEPNEEQSLRSNNIAELSPGAINSCQSEYHAAFNSMMMERMTTDINALKRQYSRIKKKQQQQVHQVYIRAGQGMSLILHPEHQALCLMQGSVGLPPAVCSVSQGNQLTVLLASTAGLG

SEQ ID NO: 35971 - protein, 419 aa, Homo sapiens
  DOMAIN (177)..(202): 7 kw REVERSE TRANSCRIPTASE RNA POLYMERASE domain identified by eMATRIX, accession number DM00895E, p-value=7.000e-11, raw score of 15.72
  DOMAIN (150)..(416): Reverse transcriptase domain identified by PFam, accession name rvt, E-value=4.4e-43, PFam score of 156.6
MDLNYTLEQMNLTDICRTFYLTTAEYTFYSSVHGTFFKTDHMTGHKTSLNKFKKIKIVSSTLSDHSGIKLEINSKRNPQNHANTWKLSNLLLNAHWVNNEIKRKVKNFFELNDNSDTIYQNFSDTAKAVLEEKFLGLNAYTKKPERAQIEKERILPKSFYEASITLIPKPRKDITKKENYKPISLMNIEAKILNKIIVNQIQQHIKKIIHHDKLSFIPGMQGWFNICKPVNVILHINIIKNKNHMIISIDTEKAFGKMQHPFMIKTFSKIGTEGTYLKVIEAIYDRPTANIILNGENLKALPLRTRPRQGCPLSPLLFNLVLAVLARAIRQEKEIKGIQVSKEEVKLSLFADDMIVYLENPKASPKKLPELVTEFSKVSGHKINAHDSVTLLYTISDQTENQIKSSTPLTIAANTKADS

SEQ ID NO: 35972 - protein, 1370 aa, Homo sapiens
  DOMAIN (1290)..(1302): Glycosyl hydrolases family 17 proteins domain identified by eMATRIX, accession number BL00587D, p-value=9.400e-09, raw score of 7.22
TMSLVLNDLLICCRQLEHDRATERKKEVEKFKRLIRDPETIKHLDRNSDSKQGKYLIWDAVFRFLQKYIQKETECLRIAKPNVSASTQASRQKKMQEISSLVKYFIKCANRRAPRLKCQELLNYIMDTVKDSSNGAIYGADCSNILLKDILSVRKYWCEISQQQWLELFSVYFRLYLKPSQDVHRVLVARIIHAVTKGCCSQTDGLNSKFLDFFSKAIQCARQEKSSSGLNHILAALTIFLKTLAVNFRIRVCELGDEILPTLLYIWTQHRLNDSLKEVIIELFQLQIYIHHPKGAKTQEKGAYESTKWRSILNNLYDLLVNEISHIGSRGKYSSGFRNIAVKENLIELMADICHQVFNEDTRSLEISQSYTTTQRESSDYSVPCKRKKIELGWEVIKDHLQKSQNDFDLVPWLQIATQLISKYPASLPNCELSPLLMILSQLLPQQRHGERTPYVLRCLTEVALCQDKRSNLESSQKSDLLKLWNKIGCITFRGISSEQIQAENFGLLGAIIQGSLVEVDREFWKLFTGSACRPSCPAVCCLTLALTTSIVPGTVKMGIEQNMCEVNRSFSLKESIMKWLLFYQLEGDLENSTEVPPILHSNFPHLVLEKILVSLTMKNCKAAMNFFQSVPECEHHQKDKEELSFSEVEELFLQTTFDKMDFLTIVRECGIEKHQSSIGFSVHQNLKESLDRCLLGLSEQLLNNYSSEITNSETLVRCSRLLVGVLGCYCYMGVIAEEEAYKSELFQKAKSLMKCAGESITLFKNKTNEEFRIGSLRNMMQLCTRCLSNCTKKSPNKIASGFFLRLLTSKLMNDIADICKSLASFIKKPFDRGEVESMEDDTNGNLMEVEDQSSMNLFNDYPDSSVSDANEPGESQSTIGAINPLAGEYLSKQDLLFLDMLKFLCLCVTTAQTNTVSFRAADIRRKLLMLIDSSTLEPTKSLHLHMYLMLLKELPGEEYPLPMEDVLELLKPLSNVCSLYRRDQDVCKTILNHVLHVVKNLGLSNMDSENTRDAQGQFLTVIGAFWHLTKERKYIFSVRMALVNCLKTWLEADPYSKWAILNVMGKDFPVNEVFTQFLADNHHQVRMLVAESINRLFQDTKGDSSRLLKALPLKLQQTAFENAYLKAQEGMREMSHSAENPETLDEIYNRKSVLLTLIAVVLSCSPICEKQALFALCKSVKENGLEPHLVKKVLEKVSETFGYRRLEDFMASHLDYLVLEWLNLQDTEYNLSSFPFILLNYTNIEDFYRSCYKVLIPHLVIRSHFDEVKSIANQIQEDWKSLLTDCFPKILVNILPYFAYEGTRDSGMAQQRETATKVYDMLKSENLLGKQIDHLFISNLPEIVVELLMTLHEPANSSASQSTDLCDFS

SEQ ID NO: 35973 - protein, 3057 aa, Homo sapiens
  DOMAIN (2853)..(2892): Phosphatidylinositol 3- and 4-kinases proteins domain identified by eMATRIX, accession number BL00915C, p-value=7.660e- 23, raw score of 22.43
  DOMAIN (1967)..(2567): FAT domain identified by PFam, accession name FAT, E-value= 2.5e-140, PFam score of 479.6
TMSLVLNDLLICCRQLEHDRATERKKEVEKFKRLIRDPETIKHLDRHSDSKQGKYLNWDAVFRFLQKYIQKETECLRIAKPNVSASTQASRQKKMQEISSLVKYFIKCANRRAPRLKCQELLNYIMDTVKDSSNGAIYGADCSNILLKDILSVRKYWCEISQQQWLELFSVYFRLYLKPSQDVHRVLVARIIHAVTKGCCSQTDGLNSKFLDFFSKAIQCARQEKSSSGLNHILAALTIFLKTLAVNFRIRVCELGDEILPTLLYIWTQHRLNDSLKEVIIELFQLQIYIHHPKGAKTQEKGAYESTKWRSILYNLYDLLVNEISHIGSRGKYSSGFRNIAVKENLIELMADICHQVFNEDTRSLEISQSYTTTQRESSDYSVPCKRKKIELGWEVIKDHLQKSQNDFDLVPWLQIATQLISKYPASLPNCELSPLLMILSQLLPQQRHGERTPYVLRCLTEVALCQDKRSNLESSQKSDLLKLWNKIWCITFRGISSEQIQAENFGLLGAIIQGSLVEVDREFWKLFTGSACRPSCPAVCCLTLALTTSIVPGTVKMGIEQNMCEVNRSFSLKESIMKWLLFYQLEGDLENSTEVPPILHSNFPHLVLEKILVSLTMKNCKAAMNFFQSVPECEHHQKDKEELSFSEVEELFLQTTFDKMDFLTIVRECGIEKHQSSIGFSVHQNLKESLDRCLLGLSEQLLNNYSSEITNSETLVRCSRLLVGVLGCYCYMGVIAEEEAYKSELFQKAKSLMQCAGESITLFKNKTNEEFRIGSLRNMMQLCTRCLSNCTKKSPNKIASGFFLRLLTSKLMNDIADICKSLASFIKKPFDRGEVESMEDDTNGNLMEVEDQSSMNLFNDYPDSSVSDANEPGESQSTIGAINPLAEEYLSKQDLLFLDMLKFLCLCVTTAQTNTVSFRAADIRRKLLMLIDSSTLEPTKSLHLHMYLMLLKELPGEEYPLPMEDVLELLKPLSNVCSLYRRDQDVCKTILNHVLHVVKNLGQSNMDSENTRDAQGQFLTVIGAFWHLTKERKYIFSVRMALVNCLKTLLEADPYSKWAILNVMGKDFPVNEVFTQFLADNHHQVRMLAAESINRLFQDTKGDSSRLLKALPLKLQQTAFENAYLKAQEGMREMSHSAENPETLDEIYNRKSVLLTLIAVVLSCSPICEKQALFALCKSVKENGLEPHLVKKVLEKVSETFGYRRLEDFMASHLDYLVLEWLNLQDTEYNLSSFPFILLNYTNIEDFYRSCYKVLIPHLVIRSHFDEVKSIANQIQEDWKSLLTDCFPKILVNILPYFAYEGTRDSGMAQQRETATKVYDMLKSENLLGKQIDHLFISNLPEIVVELLMTLHEPANSSASQSTDLCDFSGDLDPAPNPPHFPSHVIKATFAYISNCHKTKLKSILEILSKSPDSYQKILLAICEQAAETNNVYKKHRILKIYHLFVSLLLKDIKSGLGGAWAFVLRDVIYTLIHYINQRPSCIMDVSLRSFSLCCDLLSQVCQTAVTYCKDALENHLHVIVGTLIPLVYEQVEVQKQVLDLLKYLVIDNKDNENLYITIKLLDPFPDHVVFKDLRITQQKIKYSRGPFSLLEEINHFLSVSVYDALPLTRLEGLKDLRRQLELHKDQMVDIMRASQDNPQDGIMVKLVVNLLQLSKMAINHTGEKEVLEAVGSCLGEVGPIDFSTIAIQHSKDASYTKALKLFEDKELQWTFIMLTYLNNTLVEDCVKVRSAAVTCLKNILATKTGHSFWEIYKMTTDPMLAYLQPFRTSRKKFLEVPRFDKENPFEGLDDINLWIPLSENHDIWIKTLTCAFLDSGGTKCEILQLLKPMCEVKTDFCQTVLPYLIHDILLQDTNESWRNLLSTHVQGFFTSCLRHFSQTSRSTTPANLDSESEHFFRCCLDKKSQRTMLAVVDYMRRQKRPSSGTIFNDAFWLDLNYLEVAKVAQSCAAHFTALLYAEIYADKKSMDDQEKRSLAFEEGSQSTTISSLSEKSKEETGISLQDLLLEIYRSIGEPDSLYGCGGGKMLQPITRLRTYEHEAMWGKALVTYDLETAIPSSTRQAGIIQALQNLGLCHILSVYLKGLDYENKDWCPELEELHYQAAWRNMQWDHCTSVSKEVEGTSYHESLYNALQSLRDREFSTFYESLKYARVKEVEEMCKRSLESVYSLYPTLSRLQAIGELESIGELFSRSVTHRQLSEVYIKWQKHSQLLKDSDFSFQEPIMALRTVILEILMEKEMDNSQRECIKDILTKHLVELSILARTFKNTQLPERAIFQIKQYNSVSCGVSEWQLEEAQVFWAKKEQSLALSILKQMIKKLDASCAANNPSLKLTYTECLRVCGNWLAETCLENPAVIMQTYLEKAVEVAGNYDGESSDELRNGKMKAFLSLARFSDTQYQRIENYMKSSEFENKQALLKRAKEEVGLLREHKIQTNRYTVKVQRELELDELALRALKEDRKRFLCKAVENYINCLLSGEEHDMWVFRLCSLWLENSGVSEVNGMMKRDGMKIPTYKFLPLMYQLAARMGTKMMGGLGFHEVLNNLISRISMDHPHHTLFIILALANANRDEFLTKPEVARRSRITKNVPKQSSQLDEDRTEAANRIICTIRSRRPQMVRSVEALCDAYIILANLDATQWKTQRKGINIPADQPITKLKNLEDVVVPTMEIKVDHTGEYGNLVTIQSFKAEFRLAGGVNLPKIIDCVGSDGKERRQLVKGRDDLRQDAVMQQVFQMCNTLLQRNTETRKRKLTICTYKVVPLSQRSGVLEWCTGTVPIGEFLVNNEDGAHKRYRPNDFSAFQCQKKMMEVQKKSFEEKYEVFMDVCQNFQPVFRYFCMEKFLDPAIWFEKRLAYTRSVATSSIVGYILGLGDRHVQNILINEQSAELVHIDLGVAFEQGKILPTPETVPFRLTRDIVDGMGITGVEGVFRRCCEKTMEVMRNSQETLLTIVEVLLYDPLFDWTMNPLKALYLQQRPEDETELHPTLNADDQECKRNLSDIDQSFNKVAERVLMRLQEKLKGVEEGTVLSVGGQVNLLIQQAIDPKNLSRLFPGWKAWV

SEQ ID NO: 35974 - protein, 107 aa, Homo sapiens
MDFLTIVRECGIEKHQSSIGFSVHQNLKESLDRCLLGLSEQLLNNYSSECLTEYPDYGQPDVVVKEDEEYKRVDFSKVPKLKTVFQKGHPSPCFASALQSDLRPAVL

SEQ ID NO: 35975 - protein, 273 aa, Homo sapiens
  DOMAIN (145)..(192): kw TRANSCRIPTASE REVERSE II ORF2 domain identified by eMATRIX, accession number DM01354V, p-value=1.000e-40, raw score of 12.97
MASGVLQAAATVGTRECSGSQKLGDVRNCRAPKRMSQPWLRETLGLGSLKGSSSSLFLFATCSFSPAIQWVLSSCPASKKHEVCGQLKAHPGARLPRCDLCLRSSCYTWATAAIVCQRSDSCRYVALFLRALFCSIDLYLCFGTSIASKRIKYLGIQLTRDVKDLFKENYKPMLIEIKEDTKKWKNIPCSWVGRINIVKMAILSKVIYRFNAIPIKLPMTFFTELEKTTLKFMWNQKGACITKSILSQKNKAGGIMLPDFKLYYKVTVTKTAW

SEQ ID NO: 35976 - protein, 65 aa, Homo sapiens
ELEKTTLNFIWNQKRANIMKTILSKKNKAGRMMLPHFKLYGKATVTKTACRTHRWRALGRVPTVR

SEQ ID NO: 35977 - protein, 184 aa, Homo sapiens
FKLSPTRSLPQHVGIMGATIQDAIWYSKVERHPVTALEKMMESSFVGPQSFPEVPSPDRGSQSVKHHSVPWDQFLNPSLRVQLKRGGKYVPNRAHVLPSRPPFRCQEPHLEAPYPDGLKVLTGPAQITLSMGSDYTKVDEWLNKLTELSFPSSGYGLSKSPECNVLTKTDTSGYEKAFTMKSQG

SEQ ID NO: 35978 - protein, 137 aa, Homo sapiens
  DOMAIN (80)..(132): Ribosomal protein S3Ae proteins domain identified by eMATRIX, accession number BL01191C, p-value=1.000e-40, raw score of 16.50
  DOMAIN (1)..(122): Ribosomal S3Ae family domain identified by PFam, accession name Ribosomal_S3Ae, E-value=1.2e-30, PFam score of 115.2
TRPQAPYERRQKGSQEESTMIEAHVDVKTTDGYLLRLFCVGFTKKRNNQIRKTSYAQHQQVRQIRKKMMEIMTREVQTNDLKEVVNKLIPDSIGKDIEKACQSIYPLHDVFVRKVKMLKKPKFELGKLMELHGEGSS

SEQ ID NO: 35979 - protein, 155 aa, Homo sapiens
  DOMAIN (97)..(149): Ribosomal protein S3Ae proteins domain identified by eMATRIX, accession number BL01191C, p-value=1.000e-40, raw score of 16.50
  DOMAIN (29)..(141): Ribosomal S3Ae family domain identified by PFam, accession name Ribosomal_S3Ae, E-value=3.2e-19, PFam score of 77.3
  misc_feature (1)...(155): Xaa = X or * as defined in Table 2
AIASPRAAGIRHELTSTMAAGKNKRLTKGGKKGAKKKAVDNIINIGKTLVTRTQRTKIASDGLKGRVFEESLADLQNDTDGYLLRVIXVAFTTERTNQIREVFNKLIPDSIGKDIEKACQSIYPLHDDFARKVKMLKKPKFELRKLMELHGEGSS

SEQ ID NO: 35980 - protein, 138 aa, Homo sapiens
  DOMAIN (16)..(67): Ribosomal protein S3Ae proteins domain identified by eMATRIX, accession number BL01191A, p-value=1.000e-40, raw score of 15.57
  DOMAIN (15)..(138): Ribosomal S3Ae family domain identified by PFam, accession name Ribosomal_S3Ae, E-value=4.9e-38, PFam score of 139.8
PRVRADGKNFRLTKGGELGARNKVVDPFSKKDWYDVKAPAMFNIRNIGKTLVSRTQGTKIASDGLKGRVFEARLADLQNDEVAFIKCKLITDDVHGKNCLTIFHGMDLTRDKMCSLGKKWQTMIEAHVDVKTTDGYLL

SEQ ID NO: 35981 - protein, 39 aa, Homo sapiens
GKLMELHGEGSSSGKATGDETGAKVERADGYEPPVQESV

SEQ ID NO: 35982 - protein, 79 aa, Homo sapiens
MLKKPKFELGKLMELHGEGSSTGKATGDETVPATGGDASSSSSGAAATKNAGCSREGVAGSVRSKESATGGSPDHFPKL

SEQ ID NO: 35983 - protein, 310 aa, Homo sapiens
  DOMAIN (29)..(80): Ribosomal protein S3Ae proteins domain identified by eMATRIX, accession number BL01191A, p-value=9.603e-21, raw score of 15.57
  DOMAIN (29)..(274): Ribosomal S3Ae family domain identified by PFam, accession name Ribosomal_S3Ae, E-value=4.2e-08, PFam score of 28.7
  misc_feature (1)...(310): Xaa = X or * as defined in Table 2
FSPAAGIRHEGSLTSTMAVGKNKRLTKGGKKGSKKKVVDPFPRKDWYXRRKHPLMFHYKNIGKTLVTQDPKGPKIASDGLQGFVCLKVSLADLQNDEVASRKFRLITEVCFRGKNLPXLTSHGAWDLYPVTKMCSHGQKNWQTMIDSSRXMFKTNPMGYLALRLFLCVGFTXKNRNQFRLRKAPPYASATQQVPPKSRKKMMEIMTPRGARQNDLEKKWVNKLIPRQALGKDIRKGPAQSYFIPLHDVLRLEKLKLLEGSPKFXIGESSLGASMGGRAVVPGKSHLGTQTGAKVGTSLMGYEPPVPRILV

SEQ ID NO: 35984 - protein, 713 aa, Homo sapiens; identical to SEQ ID NO: 34589
  DOMAIN (57)..(100): kw TRANSCRIPTASE REVERSE II ORF2 domain identified by eMATRIX, accession number DM01354T, p-value=1.000e-40, raw score of 9.48
  DOMAIN (1)..(179): Reverse transcriptase domain identified by PFam, accession name rvt, E-value=2.8e-15, PFam score of 64.2

SEQ ID NO: 35985 - protein, 451 aa, Homo sapiens
  DOMAIN (43)..(98): kw TRANSCRIPTASE REVERSE II ORF2 domain identified by eMATRIX, accession number DM01354Q, p-value=1.000e-40, raw score of 9.23
  DOMAIN (7)..(202): Reverse transcriptase domain identified by PFam, accession name rvt, E-value=0.096, PFam score of -44.8
  misc_feature (1)...(451): Xaa = X or * as defined in Table 2
KKRESSLTHVMRPASFXYQSQAETQQKKRILDQYPXXTLMQKSSIKYLAKRIQQHIKKLIHHDQVGFIPGMQGWFNIRKSINVIQHINRAKDKNHMIISIDAEKAFDKIQQPFMLKTLNKLELEETTVKFIWNQKRAHIAKSILSQKNKAGGITLRDFKLYYKATVTKTAWYWYQNRDIDQWNRTEPSEITLHIYNYLIFDKPEKNKQWGTDSLFNKWCWENWLAICRKLKLDPFLTPYTKINSRWIKDLNVRPKTIKTLEENLGITIQDIGMGKDFMSKTPKAMATKAKIDKWDLIKLKSFCTAKETTIRVNRQPTKWEKIFTTYSSDKGLISRIYNELKQIYKKKTNNPIKKWAKDMNRHFSEEDIYAAKKHMKKCSSSLAIREMQIKTTMRYHLTPVRMAIIKKSGNNRHAPFSIHTHIMFGSLYLQIQKDLSILGFWYPRGILEPIY

SEQ ID NO: 35986 - protein, 636 aa, Homo sapiens
  DOMAIN (368)..(408): kw TRANSCRIPTASE REVERSE II ORF2 domain identified by eMATRIX, accession number DM01354Y, p-value=1.000e-40, raw score of 10.69
  DOMAIN (247)..(411): Reverse transcriptase domain identified by PFam, accession name rvt, E-value=0.0025, PFam score of -22.4
  misc_feature (1)...(636): Xaa = X or * as defined in Table 2
MTIIINIIIIIITIITIIIIVHIITINIVITTTILTTVIISSTIIIIITIFVFETGAIKLEIRIKKLTQNRSATWKLNNLLLNDYWVHNEMKAEIKMFFETNENKDTTCQNLWDTFKAINKIDRPLARLIKKKREKNQIDAIKNDKGDITTDTTGIQTTIREYYKHLYANKLENREEMDKFFDTYTLPRLNQEEVESLNRPITGSKIEEIINSLSIKKSPGPDGFTAEFYQRYKEELVPFLLKLFQSIEKEGIILNSCCEASIILIPKPGRDTTKKENFRPISLMNIDAKILNKTLANRIQQHITKLIHHVQVGFIPGMQGWFNIRKSINNWKKTTLKLIWNQKRACITKSILSQKNKAGGITLPDFKLYYKATVTKTAWYWYQNRDIDQWNRTEASEIIPHTYNYLSFDKPDKNKKWGNNSLFNKWCWENWLAICRKLKLDPFLTLYTKINSRWIKDLNFGTETIKTLEENLGNTIHDIGMGKDFMSKTPKAKATKAKIDKWDLIKLKSFCTAKETTIRVNRQPTEWEKIFAIYPSDKGLISRIYKELKQVYKKKTNNPIKKWAKDTNRHFSNEDIYAANRHMKKCSSSLAIREMQIKTTMRYHLAPVRMTIIKKSGSNRQWXASGHVRCWQSTS

SEQ ID NO: 35987 - protein, 820 aa, Homo sapiens
  DOMAIN (43)..(59): Lipoxygenases iron-binding region proteins domain identified by eMATRIX, accession number BL00711B, p-value=2.500e-14, raw score of 14.24
  DOMAIN (24)..(704): Lipoxygenase domain identified by PFam, accession name lipoxygenase, E-value=1e-12, PFam score of 45.3
MPHAGHARSPGHTLIKLAEWWMSRWMEWNPGFPLSIDAKCHKDLPRDIQFDSEKGVDFVLNYSKALNQEEVESLNRPITGSEIEAIINSLPTQKSSGPDGFTAEFYQRYKEELVPFLLKLFQSIEKEGILPNSFYEASIILIPKPGRYTHKKNNFRPISLMNIDAKILNKILANRIQQHIKKLIHQDQVGIIPGMQSWFNIHKSINVIQHINRTKDKNHMIISIDAEKAFDKIQQPFMLKTLNKLGIKYLRIQLTRDVKDLFKENYKSLLNEIKEDTNKWKNIPCSWIGRMNIIKMAILPKVIYRFNVIPIKLPMTFFSELEKSTLKFIWNQKRARIAKTILSQKNKAGGIMLPDFKLYYKATVTKTAWYWYQNRDIDQWNRTEPSEMTPHIYNHLIFDKPDKNKQWGKDSLFNKWCWENWLAIGRQLKLDPFLTPYTKINSRWIKDLNVRPKTIKTLEENLGNTIQDISMGKDFMSKTPKAMATKAKMDKWDLIKLKSFCTAKETTIRVNRQPTEWEKNFAIYSSDKGLISRIYKQLKQIYKKKTNNPIKKWAKDMNRHFSKEDVYAANRHMKKCSSSLAIREMQIKTIMIYHLTPVTMAIIKKSGNNRCWRGCGEMGTLLYCWWDCKLVQPLWKTLWQFLRDLELGIPFDPAIPLLGIYPKDYKSCCYKDTCTPKLARDDQIHILKQHRRKELETRQKQYRAWYEINPFHSVWPVTAGKSPRHQLPVWVHNPQTSPYLQLQTRDGEESNENNFGSTILASDFFAEIDKLSILQIHMEMEGTQNSQNNLDKKKTKMEDLHFSISKLLHSYSIQDNVISA

SEQ ID NO: 35988 - protein, 407 aa, Homo sapiens
  DOMAIN (17)..(64): kw TRANSCRIPTASE REVERSE II ORF2 domain identified by eMATRIX, accession number DM01354V, p-value=1.000e-40, raw score of 12.97
LIAYQPKKSRTRWIHNQILPERIKYLGIQLTRDVKDFLKEKYKPLLNEIKEDINKWKNIPCSWIGRINLVKMAILPQAICRKLKLDPFLTTYTKINSRWIKDLHVRPKTTKTLEENLGNTIQDIGMGKDFMSKTPKAMATEAKIDKWDLIKRKSFCAAKETTTRVNRQPTDWEKMFAIYSSDKGLISRIYEELKQIYKKKTNNPINKWAKDMNRHFSKEDIYAANRHMKKCSSSLAIREMQIKTTVSPFAAQWVSQRYGKWQEAHPSNNDGKGYRGKPRFQSLSDVHGPQDQKKIIKESALPPTPTFINILMNAKTIENGQFPYLLNALKQQQPHDAENLFTWGKENAAIVSPCIEVSAALSQWKVPAWPQRSGIPNRILRSPIPGLGSWVAFLDLVWVRGDPTALK

SEQ ID NO: 35989 - protein, 653 aa, Homo sapiens
  DOMAIN (268)..(313): kw TRANSCRIPTASE REVERSE II ORF2 domain identified by eMATRIX, accession number DM01354N, p-value=1.000e-40, raw score of 13.17
MTNAEKSLKDLMELKTKARELHDKCRSLSSRCDQLEERVSVMEDKMNEMKQEEKFREKRIKRNEQSRQEIWDYVKRPNLRLIGVPESDGENGTKLENTLQDIIQENFPNLARQTNIQIQEIQRTPQRYSSRRATPRHIIVRFTKVEMKEKMLREAREKDHSAIKLELRIKKLTQNRSTTRKLNNLLLNDYWVNNEMKAEIKMFFETNENKDTTYQNLWETFKAINKIDRPLARLIKKKTEKNQIDAIKNDKGDITTDPTEIQTTIREYYKHLYTNKLENLEEMDKFFNTYTLPRLNQEEIESLNRPITGSEIEAIINSLPTKISPGPDGFTAEFYHRYKEELRIKYLGIQLRRDVKDLFKENYKPLLNEIKEDTNKWKNIPCSWVGRINIVKMAIVPKVIYRFNAIPIKLPMTFFTELEKTTLKFIWNQKRARIAKSILSQKNKAGSIMLPDFKLYYKATVTKTAWYWYQNRDIDQWNRTEPSEIMSHIYNYLIFDKPEKNKQWGKDSLFNKWCWENWLAICRKLKLDRFLTPYTKINSRWIKDLNVKTKTIKTLEENLGNTIQDTGMGKDFMSKTPKAMATKAKIDKWDLIKLKNFCTAKETTIRVNRQPTEWEKIFATYSSDKGLISRIYNELKQIYKKKKTTPSKSGQRI

SEQ ID NO: 35990 - protein, 616 aa, Homo sapiens; identical to SEQ ID NO: 32375
  DOMAIN (115)..(158): kw TRANSCRIPTASE REVERSE II ORF2 domain identified by eMATRIX, accession number DM01354T, p-value=1.000e-40, raw score of 9.48
  DOMAIN (5)..(237): Reverse transcriptase domain identified by PFam, accession name rvt, E-value=1.6e-20, PFam score of 81.6

SEQ ID NO: 35991 - protein, 648 aa, Homo sapiens
  DOMAIN (10)..(65): kw TRANSCRIPTASE REVERSE II ORF2 domain identified by eMATRIX, accession number DM01354Q, p-value=1.000e-40, raw score of 9.23
  DOMAIN (1)..(238): Reverse transcriptase domain identified by PFam, accession name rvt, E-value=2.7e-52, PFam score of 187.1
  misc_feature (1)...(648): Xaa = X or * as defined in Table 2
MNIDAKILNKILANRIQQHIKKLIHHDQVGFIPGRQGWFNICKSINVIQHINRAKDKNHMIISIDAEKAFDKIQQLFMLKTLNKLGIDGTYFKIIRAIYDKPTANIILNGKKLEAFPLKTGTRQGCPLSPLLFNIVLEVLARAIRQEKEIKGIQLGKEEVKLSLFADDMIVYLENPIVSAQNLLKLISNFSKVSGYKINVQKSQAFLYTNNRQTESQIMSELPFTIASKRIKYLGIQLTRDVKDLFKENYKPLLKEIKEDANKWKNIPCSWVGRINIVKMAILPKVIYRFNAIPIKLPMTFFTELEKTTLKFIWNQKRAHITKAILSQKNKARGITLPDFKLYYKATVTKTAWYWYQNRDIDQWNRTQPSEITPHIYNYLIFDKPDKNKQWGKGSLFNKWCWENWLAICRKLKLDPFLTPYTKINSRWIKDLNVRPKTTKTLEENLGITIQDIGMGMDFMSKTPKAMATKDKIDKWDLIKLKSFCTAKETTIRVNRQPTKWEKIFTTYSSDKGLISRIYNELKQIYKKKTNNPIKKWAKDMNRHFSKEDIYAAKKHMKKCSPSLAIREMQIKTTMRYHLTPVRMAIIKKSGNNRCWRGCGEIGTLLHCWWINWMKKTWHIYTMEYYASIKKNEFMSFAGAXMKLETII

SEQ ID NO: 35992 - protein, 655 aa, Homo sapiens
  DOMAIN (45)..(100): kw TRANSCRIPTASE REVERSE II ORF2 domain identified by eMATRIX, accession number DM01354Q, p-value=1.000e-40, raw score of 9.23
  DOMAIN (1)..(273): Reverse transcriptase domain identified by PFam, accession name rvt, E-value=3.8e-81, PFam score of 283.0
KEGILPNSFYEASIILIPKLGRDTTKKENFRPISLVNIDAKILNKILANRIQQHIKKLIHHDQVGFIPGMQGWFNIRKSINVIQLINRTKDKNHMIISIDAEKAFDKIQQPFMLKTLNKLGIDGTYLKIIRAIYDKPTANIILNGQKLEAFPLKTGTRQGCPLSPLLFNIVLEVLARPIRQEKEIKGIQLGKEEVKMSLFADDMIVYLENPIVSAQNLLKLISNFSKVSGYKINVQKSQAFLYNNNRQTESQIMSEFPFTIASKRIKYLGIQLTRDVKDLFKENYKSLLKEIKEDTNKWKNIPCSWVGRISIVKMAILPEVIYRISAIPIKLPMTFFTELEKTTLKFIWNQKRARITTSILSQKNKAGGITLPDFKLYYKATVTKTAWYWYQNRDIDQWNRTEPSEIMPHIYNYLIFDNPEKNKQRGKDSLFNKWCWENWLAICRTLQLDPFLTPYTKINSRWIKGLNVRPKTIKTLEENLGITIQDIGMGKDFMSKTPKAMATKAKIDRWDLIKLKSFCTAKETTIRVNRQPTKWEKIFTTYSSDKGLISRIYKELKQIYKKKTNNPIKKWAKDINRHFSKEDIYAAKKHMKKCSSSLAIREMQIKTTMRYHPTPVRMAIIKKSGNNRCWRGCGEIATLLHCWDMDEIGNHHSQ

SEQ ID NO: 35993 - protein, 411 aa, Homo sapiens
  DOMAIN (43)..(98): kw TRANSCRIPTASE REVERSE II ORF2 domain identified by eMATRIX, accession number DM01354Q, p-value=1.000e-40, raw score of 9.23
  DOMAIN (7)..(202): Reverse transcriptase domain identified by PFam, accession name rvt, E-value=0.096, PFam score of -44.8
  misc_feature (1)...(411): Xaa = X or * as defined in Table 2
KKRESSLTHVMRPASFXYQSQAETQQKKRILDQYPXXTLMQKSSIKYLAKRIQQHIKKLIHHDQVGFIPGMQGWFNIRKSINVIQHINRAKDKNHMIISIDAEKAFDKIQQPFMLKTLNKLELEETTVKFIWNQKRAHIAKSILSQKNKAGGITLRDFKLYYKATVTKTAWYWYQNRDIDQWNRTEPSEITLHIYNYLIFDKPEKNKQWGTDSLFNKWCWENWLAICRKLKLDPFLTPYTKINSRWIKDLNVRPKTIKTLEENLGITIQDIGMGKDFMSKTPKAMATKAKIDKWDLIKLKSFCTAKETTIRVNRQPTKWEKIFTTYSSDKGLISRIYNELKQIYKKKTNNPIKKWAKDMNRHFSEEDIYAAKKHMKKCSSSLAIREMQIKTTMRYHLTPVRMAIIKKSGNN

SEQ ID NO: 35994 - protein, 1159 aa, Homo sapiens; identical to SEQ ID NO: 34600
  DOMAIN (283)..(328): kw TRANSCRIPTASE REVERSE II ORF2 domain identified by eMATRIX, accession number DM01354N, p-value=1.000e-40, raw score of 13.17
  DOMAIN (369)..(559): Reverse transcriptase domain identified by PFam, accession name rvt, E-value=9.5e-10, PFam score of 45.8

SEQ ID NO: 35995 - protein, 938 aa, Homo sapiens
  DOMAIN (272)..(317): kw TRANSCRIPTASE REVERSE II ORF2 domain identified by eMATRIX, accession number DM01354N, p-value=1.000e-40, raw score of 13.17
  DOMAIN (212)..(437): Reverse transcriptase domain identified by PFam, accession name rvt, E-value=1.1e-06, PFam score of 25.5
MGDFNTPQSTLDRSMRQKVNKDTQELNSALHHADLIHIYRILHPKSTEYTFFSAPHHTYSKIDHIVGSKALLSKCKRSEIITNCLSDHSAIKLQLRIRKLTQNRSTTWKLNNLLLNDYWVHNEMKAEIKMFFETNKNKDTTYRNLWDTVKSVCRGKFIALNAHKRKQERSKMDTLTSQLEELKKQEQTHSKASRRQEITKIRAELKEIETQKTLQKINESRSWFFERINKIDRPLARLIKKKREKNHIDAIKNDKGDITTDPTEIQTNIREYYKHLYANKLENLEEMDKFLDTYNLPRLNQEEVDSLNRPITGSEIVAIINSLPTKKSPGPDGFTAEFYQRAIRQEKEIKGIQLGKEEVNLSLFADDMIVYLENPVVSAQNLLKLIRNFSKVSGYKINVQKSQAFLYTNNRQTESQIMSELPFTIASKRIKYLGIQLTRDVKDLFKENYKPLLNEIKEDTNKWKNIPCSWVGRINIMKMAILPKVIYRFNAIPIKLPMTFFTELEKTTFKLIWNQKRAHIAKSILSQKNKAGGITLPDFKLYYKATVTKTAWYWYQNRDIDQWNRTEPSEITPHSYNYLIFDKPDKNKQWGKDSLFNKWCWENWLAICRKLKLDPFLTPYTKINSRWIKDLNVRPKTIKTLEENLGITIQDIGMEKDFMSKTPKAMATKAKIDKWDLIKLKSFCTAKETTIRVNRQPTEWEKIFTTYSSDKGLISRIYNELKQIYKKKSNNPIKKWAKDMNRHFSKEDIYAAKKHMKKCSPSLAIREMLIKTTMRYHLTRVRMAIIKKSGNNRYLSIGQDYARENPVPLRSNKVYWLLEQKSEDLGDWTATGLFGFVVVVVLSIKHPSFQRDSLPYPTDGRRRGAAIVSEKLSGSEAAAAWRIKRSTGPGVRGLALLPLLAHLGVAFDTVSAEERLSGRGRTRHHFKGSLQPPSTDHS

SEQ ID NO: 35996 - protein, 697 aa, Homo sapiens
  DOMAIN (195)..(240): kw TRANSCRIPTASE REVERSE II ORF2 domain identified by eMATRIX, accession number DM01354N, p-value=1.000e-40, raw score of 13.17
  DOMAIN (85)..(360): Reverse transcriptase domain identified by PFam, accession name rvt, E-value=5.2e-06, PFam score of 15.7
MEITTNCLSEHSAITLQLRIKKLTQNCTTTWKLNYLLLNDYWVNNEMKEEIKMFFETNENKDTTYQNLWDVFKAVCRGKFIALSAHKRKQERSKTDTLTSQLKELEKQEQTHSKASRRQEITKIRAELKEIETQKTLQEINDSRSSFSEKLNKIDRPLARLIKKKREKTQIDAIKNDKGEINTNPTEIQTTIREYYKYLYANKVENLEEMDTFLDTYTLPRLNQEEVESLNRPITGSEIEAIINSLPTKESPGPDGFTAEFYQRAIRKGKEIKGIQLGKEEVTLSLFADDMIVYLGNPIISAQNLMKLLSNFSKVSGYKINGQKSQACPYTNNRQTESQIMSELPFTIATKRIKYLGIQLTRDVKDLFKENYKPLLNKIKEDKKKWKNIQCSWIGRIIIMKMAILPMVICRFNAIPIKLPMTFFTELEKTTLTFIWNQKRACIAKKILSKENKAGGIMLPDFKLYYKATVTKTAWYWYQNRYIEQWNRTEASEITPHIYNHLIFDKSDKNKKWGNNSLFNKWCWENWLAICRKLKLGPFLTLYTKINSRWIKDLNVRPKTIKTLEENRGNTIQDIGMGKDFMTKTPEAMATKTKIDKWDLIKLKSFCMAKETTIRVHRQPTEWEKIFAIYPSDKGLISRIYKELKQIYKKKTNNPIKKWAKDMNRHFSKEDIYAANRHMKKCSSSLAIREMQIKTTM

SEQ ID NO: 35997 - protein, 908 aa, Homo sapiens
  DOMAIN (233)..(279): kw TRANSCRIPTASE REVERSE II ORF2 domain identified by eMATRIX, accession number DM01354O, p-value=1.000e-40, raw score of 8.73
  DOMAIN (267)..(541): Reverse transcriptase domain identified by PFam, accession name rvt, E-value=2.6e-73, PFam score of 257.0
MADMLTWESCLEESLQEESPLVTHCGPSCCISGQSPPSSARPSSVSSAISVLMLPQNRKLPPAWTSPGIFPTDLVVYSMSLPHALARYNCDVCKSMLPPRLYAPEEKARTSPLCGTWYSPSLPLCGAWCKKNEKKRERERERKRQREDILSGASSYKDTIHIQLRPPPYDVLQQIQTTIREYFKHLYANKLENLEEMDKLLDTYTLPRLNQEEVESLNRLITGSEIVAIINSLPTKKSPRPDGFTAEFYQRYKEELVPFLLKLFQSIEKGGLLPNSFYEASIILMPKLGRDTTKKENFRPISLMNIDAKILNKILANQIQQHIKKLIQHDQVGFIPGMQGWFNICKSINVIQHINRTKDKNHMTISIDAGKAFDKIQQLFMLKTLNKLGIDGTYLKIIRAIYDKPTANIILNGEKLEAFPLKTGTRQGCPLSPLLFNIVLEVLARAIRQEKEIKGIRLRKEEVKLSLFADDMIVYLENPIISAQNLLKLISNFSKISGYKINVQKSQAFLYTNNRQTESQIMSELLFTIASKRIKYLRIQLTKDVKDLFKKNYKPLLNEIKEDTKKWKNIPCSWVGRINIVKMAIRPKVIYRFNAIPIKLPMTFFTELEKTTFKFIWNQKRARIAKSILSQKNKAGGITLPDFKLYYKATVTKTAWYWYQNKDIDQWNRTEPSEIMPHIYNYLIFDKPDKNKQWGKDSLFNKWGWENWLAICRKLKLDPFLTPYTKINSRWIKDLNVRPKTIKTLEKNLGITIQDIGMGKDFMSKTPKAMATKAKIDKWDLIKLKSFCTAKETTIRVNRQPTKWEKIFATYSSDKGLISRIYNELKQIYKKKTNNPIKKWVKDMNRHFSKEDICAAKKHMKKCSSSLAIREMQIKTTMRYHLTPVRMAIIKKSGNNRDMDEIGNLHSQ

SEQ ID NO: 35998 - protein, 1560 aa, Homo sapiens
  DOMAIN (50)..(97): kw TRANSCRIPTASE REVERSE II ORF2 domain identified by eMATRIX, accession number DM01354V, p-value=1.000e-40, raw score of 12.97
  DOMAIN (448)..(1538): Zinc finger, C2H2 type domain identified by PFam, accession name zf-C2H2, E-value=1.9e-282, PFam score of 951.7
MDKFLDTYTLPRLNQEEVESLNRPITGSEIVAIINSLPTKKDPGPDGFTAEFYQRIKYLGIQLTRDVKDLFKENYKPLLKEIKEDTNKWKNIPCSWVGRINIMKMAILPKVIYRFNAIPIKLPMTFFTELEKTTLKFIWNQKRARITKSILSQKNKAGGITLPDFKLYYKATVTKTAWYWYQNRDIDQWNRAEPSEIMLPIYNYLIFDKPDKNKQWGKDSLFNKWCWENWLAICRKLKLDPFLTPYTKINSRWIKDLHVRPKTIKTLEENLGNTIQDIGMGKDFMSKTPKAMATKAKIDKWDLIKLKSFCTAKETTIRVNRQPTKWEKIFTTYSSDKGLISRIYNELKQIYKKKTTPSKNWSQNMDLRKYLQKDDIFEINLPKHVIKQISKTLGLEAFYFRNDSEYRSRFEGRQGHQEGYINQKIISYEEMPAYTHASPIHNTHKPYECKECGKYFSCGSNLIQHQSIHTGEKPYKCKECGKAFQLHIQLTRHQKFHTGEKTFECKECGKAFNLPTQLNRHKNIHTVKKLFECKECGKSFNRSSNLTQHQSIHAGVKPYQCKECGKAFNRGSNLIQHQKIHSNEKPFVCRECEMAFRYHYQLIEHCRIHTGEKPFECKECRKAFTLLTKLVRHQKIHMGEKPFECRECGKAFSLLNQLNRHKNIHTGEKPFECKECGKSFNRSSNLIQHQSIHADVKPYECKECGKGFNRGANLIQHQKIHSNEKPFVCRECEMAFRYHYQLIQHCQIHTGGKPFECKECGKAFSLLTQLARHKNIHTGEKPFECKDCGKAFNRGSNLVQHQSIHTGEKPYECKECGKAFRLHLQLSQHEKTHTGEKPFECKECGKFFRRGSNLNQHRSIHTGKKPFECKECGKAFRLHMHLIRHQKFHTGEKPFECKECGKAFSLHTQLNHHKNIHTGEKPFKCKECGKSFNRVSNLVQHQSIHAGVKPYECKECGKGFSRVSNLIQHQKTHSSAKPFVCKECRKTFRYHYQLTEHYRIHTGEKPFECKECGKAFGLLTQLAQHQIIHTGEKPFKCKECGKAFNRGSNLVQPQSIHTGEKPYECKECGKAFRLHLQLSLHQKLVQKIHTWVKTFECKECGKAFQYHYQFHGHYRFHIRENPYECQGCGKCFTSGRNLRVHQRIHTGEKPYQCEECRKVFTQLSQLILHKRIHTGEKPYECKECGKAFICGSQLSQHQKIHNGEKPYECKECGRAFIRGSLLMQHQRIHTGEKPYKCEECGKAFIRGSQLTQHQRIHTNEKPYECKECGKMFSHGSQLTQHQRIHTGEKPYQCKECGKAFNRGSLLTRHQRIHTGEKPYECKECGKTFSRGSELTQHERIHTGEKPYECKECGKSFIRGSQLTQHQRIHTGEKPYECKECRMAFTQSSHLSQHQRLHTGEKPYVCNECGKAFARGLLLIQHQRIHTGEKPYQCKECGKAFIRGSQLTQHQRIHTGEKPYECKECGKAFSHGSQLTLHQRIHTGEKPYECRECRKAFTQSSHLSRHQRIHTGEKPYQCKECGKAFTRGSQLTQHQRIHISEKSFEYKECGIDFSHGSQVYM

SEQ ID NO: 35999 - protein, 662 aa, Homo sapiens
  DOMAIN (37)..(83): kw TRANSCRIPTASE REVERSE II ORF2 domain identified by eMATRIX, accession number DM01354O, p-value=1.000e-40, raw score of 8.73
  DOMAIN (70)..(295): Reverse transcriptase domain identified by PFam, accession name rvt, E-value=4.6e-51, PFam score of 183.1
MDKFLNTYTLPRLNQEEVESLNRPITGSEIVAIINSLPTKKSPGPDGFTAEFYQRCKEELVPFLLKLFQSIEKEGILPNSFYEASIILIPKLGRDTTKKENFRPISLMNIDAKILNKILAKRIQQHIQKLIHHDQVGFIPGMQGWFNIRKSINVIQHINRAKDKNHMIISIDAEKAFDKIQQPFMLKTLNKLVLEVLARAIRQEKEIKGIQLGKEEVKLSLFADDMIVYLENPIVSAQNLLKLMSNFSKVSGYKINVQKSQAFLYTNNRQTESQIMSELPFTIASKRIKYLGIQLTRDMKDLFKENYKPLLKEIKEDTNKWKNIPCSWVGRINIVKMAILPMVIYRFNAIPIKLPMPFFTELEKTTLKFIWNQKRARIAKAILSQKNKAGGITLPDFKLYYKATVTKTAWYQYQNRDIDQWNRTEPSEIMPHIYNYLIFDKPEKNKQWGKDSLFNKWCWENCLAICRKLKLDPFLTPYTKINSRWIKDLNVRPETIKTLEENLGITIQDIGMGKDFMSKTPKAMATKAKIDKWDLIKLKSFCTAKETTIRVNRQPTKWEKIFSTYSSDKGLISRIYNELKQIYKKKTNNPMKKWAKDMNRHFSKEDIYAAKKHMKKCSSSLAITEMQIKTTMRYHLTPVRMAIIKKSGNNRDMDEIGNHHSQ

SEQ ID NO: 36000 - protein, 928 aa, Homo sapiens; identical to SEQ ID NO: 34191
  DOMAIN (8)..(53): kw TRANSCRIPTASE REVERSE II ORF2 domain identified by eMATRIX, accession number DM01354N, p-value=1.000e-40, raw score of 13.17
  DOMAIN (23)..(261): Reverse transcriptase domain identified by PFam, accession name rvt, E-value=6.7e-36, PFam score of 132.7

SEQ ID NO: 36001 - protein, 1190 aa, Homo sapiens
  DOMAIN (432)..(477): kw TRANSCRIPTASE REVERSE II ORF2 domain identified by eMATRIX, accession number DM01354N, p-value=1.000e-40, raw score of 13.17
  DOMAIN (501)..(774): Reverse transcriptase domain identified by PFam, accession name rvt, E-value=2.2e-80, PFam score of 280.5
MGKKQNRKTGNSKKQRASPPPKEHSSSPATEQSWMENDFDELREEGFRRSNYSELREDIQTKGKEVENFEKNLEECITRITDIEKCLKELMELKTKARELHEECRSLRSRCDQLEERVSAMEDEMNEMKNTHRLKIKGAPRFIKQVLSDLQRDLDSHTLIMGDFNTPLSTLDRSTRQKINKDTQELNSALHQADLIDIYRTLHSKSTEYTFFSAPHHTYSKIDHILGSKALLSKCKRTEIITNYLSDHSAIKLELRIKNLTQNRSTTWKLNNLLLNDYWVHNEMKAEIKMFFETNENKDTTYQNIWDAFKAVCRGKFIALNAHKRKQERSKIDTLTSQLKELEKQEQTHSKASRRQEITKIRAELKEIETQKTLQKINESRSWFFEGINKIDRPLARIIKKKREKNQIDAIKNDKGDITTDPTEIQTTIREYYKHLYANKLENLEEMDKFLDTYTLPRLNQEEVESLNTPITGSEIVAIINSLPTKRVQDQMDSQPNSTREKEGILSNSFYEASIILIPKPGRDTTKKENFRPISLMNIDAKILSKILAKRIQQHIKKLIHHDQVGFIPGMQGWVNIHKSINVIQHINRAKDKNHMIISTDAEKAFDIIQQPFMLKTLNKLGIDGMYFKIIRAIYDKPTANIILNGQKLEAFPLKTGTRQGCPLSPLLFNIVLEVLARAIRQEKEIKGIQLGKEEVKLSLFADDMTVYLENPIVSAQNLLKLISNFSKVSGYKINVQKSQGFLYTNNRQTESQIMSELPFTIASKRIKYLGIQLTRDVKDLFKENYKPLLKEIKEDTKKWKNIPCSWVGRINIVKMAILPKVIYSFNAIPIKLPMPFFTELEKTTLKFIWNQKRARITKSILSQKNKAGGITLPDFKLYYKATVTKTAWYWYQNRDIDQWNRTEPSEITPHIYNYLIFDKPEKNKQWGKDSLFNKWCWENWLAICRKLKLDPFLTPYTKINSRWIKDLNVRPKTIKTLEENLGNTIQDIGMGKDFMSKTPKAMATKAKIDKWDLIKLKSFCTAKETTIRVNRQPTKWEKIFATYSSDKGLISRIYNELKQIYKKKTNNPIKKWVKDMNRHFSKEDIYAAKKHMKKCSSSLAIREMQIKTTMRYHLTPVRVAIIKKSGNNRIDLAIQALLKFHMNFRIAFSYSVKNDIGSSMQDATALASGRKMNDATYIELSTLIGGERQ

SEQ ID NO: 36002 - protein, 830 aa, Homo sapiens
  DOMAIN (142)..(187): kw TRANSCRIPTASE REVERSE II ORF2 domain identified by eMATRIX, accession number DM01354N, p-value=1.000e-40, raw score of 13.17
  DOMAIN (157)..(408): Reverse transcriptase domain identified by PFam, accession name rvt, E-value=3.8e-35, PFam score of 130.2
MFFETNENKDTTYQNLWDTFKAVCRGKFIALNAHKRKQERSKIDTLTSQLKELEKQEQTHSKASRRQEITKIRAELKEIEKQKTLQKINESRSWFFEKINKIDRPLARLIKKKREKNQIDTIKNDKDITTDPTEIQTTIREYYKHLYANKLENLEEMDKFLDTYTLPRLNQEEVESLNRPITGSEIEAIINSLPTKKSAGPDGFTAEFYQRYKEELHINRTKDKNHMIISTDAEKAFDKIQQLFMLKTLNKLGIDGTYLKIKRAIYDKPTANIILNGQKLEAYPLNTGTRQGCPLSPLLFNIVWEVLARAIRQEKEIKGIQLGKEEVKLSLFADDVIVYLENPIISAQNLLKLISNFSKVSGYKIYKIDVQKSQAFLYTNNRQTESQIMSELPFTIASKRIKYPGIQLTRNVKDLFKENYKPLLNEIKEDTNKWKNIPCSWIGRINIVKMAILPKVIYRFNAIPIKLPMTSFTELEKTTLKFIWNQKGARIAKTILSKKNKVGGITLPDFKLYYKATVTKTAWYWYQNRDIDQWNRTEASEITPPIYNHLIFDKPDKNKKWGKDSLFNKWCWENWLAICRKLKLDPFLTSYTKINSRWIKDLNVRPKTIKTLEENLGNTIQDIGMGKDFMTKTPKAMATKAKIDKWDLIKLKSFCTAKETTIRVNRQPTKWEKNFAIYPSDKGLISRIYKELKQNLQEKNQKIPSKIRMAIIKKSGNNSQAPCMKSNNALIVILGTVTLDAVGIGLVMPVLPGLLRDIVHSDSIASHYGVLLALYALMQFLCAPVLGALSDRFGRRPVLLASLLGATIDYAIMATTPVLWIYPLVNSPSC

SEQ ID NO: 36003 - protein, 1746 aa, Homo sapiens
  DOMAIN (834)..(879): kw TRANSCRIPTASE REVERSE II ORF2 domain identified by eMATRIX, accession number DM01354N, p-value=1.000e-40, raw score of 13.17
  DOMAIN (1)..(1171): Reverse transcriptase domain identified by PFam, accession name rvt, E-value=4.5e-109, PFam score of 375.8
KKSGNNRIQGWFNISKSINVTHHTNRTKNKNHMIISIDAEKAFNKIQYPFMLKTLNKLGVDGTYLKTVTAIYDKPTVNIILNGQKLEAFPLQTSTRQGCSLSPLLFNTVLEVLARAIRQEKEIKGIQIGGEEVKLSLFADDMTVYLQNPIISAQNLLKLISNISKVSGYKINVQKSQAFLYTNNRQTERQIMSELPFTIASKRRKYLGIQLTRDVKDLLKENYKPLLKEIREDTNKWKNIPYSWIGRINIVKMAILPKRTPLLSLPSTLYEELWRLRSYFPLCPQLYNMEQNTTDWVIYKEQCIWLTALETGESKSTAPAFGKGYPMAEYIIWGRLTPHMAGYSSETKLPEERSGSNICCSPISAVLQPLLLIPRQTGSGVDLQQTPTDLQLRVLTVRRKTNKQKGHPHQNPICTSPSSKTKGSNSHITILTLNVNGLNAPIKRHRLANWIKSQDPSVCCIQETHLTCRDTHRIKIKGWREIYQANGKQKKAGVAILVSDKTDFKPTKIKRDKEGHYMMVKGSIQQEELTTLNIYAPNTGAPRFIKQVLRDLQRDLDSHTLIMGDFNTPLSTLDRSTRQKVNKDIQDLNSALHQVDLIDIYRTLHPKSTEYTFFSALHHIYSKIDHIVGSKALLSKYKTTEIITNCLSDHSAIKLELRIKKLTQNRSTTWKLNNLLLNDYWVHNKMKAEINTLFETNENKDTTYQNLWDTFKAVCRGKFIALNAHKRKQERSKIDTLTSQLKELEKQEQTHSKASRRQEITKIRAKLKEIETQKILQKINESRSWFFEKINKIDRPLARPIKKKREKNQIDAIKNDKGDITTDPTEIQTTIREYYKHLYANKLENLEEMDKFLNTYTLPRLNQEEVESLNKPITGSEIEAIINSLPIKKSPGPDGFIAKFHQRYKEELEASIILIPKPGRDTTKKENFRPIPLMNIDAKILNKILANRIQQHIKKLIHHDQVGFIPGMQGSFNICKSINVIQDINRTNDKNHMIISIDAEKAFDKIQQPFILKTLNKLGIDGTYLKIIRAIYDKPTANIILNGQKLEAFPLKTGTRQGCPLSPLLFNIVLEVLARAIRQEKEIKGIQLGQEEVKLSLFADDMIVYRENPIVSTQNLHKLISNFSKVSGYKINVQKSQAFLYTNNRQTESQIMSELPFTIASKRIKYLGIQLTRDVKDLFKENYKPLLKEIKEDTNKWKNIPCSWVGRINIVKMAILPKVIYRFNAIPIKLPMTFFTELEKTTLKFIWNQKRARIAKSILSQRNKAGGITLPDFKLYYKATVTKTAWYWYQNRDIDQWNRTEPSEIMPHIYNHLIFDKPDKNKKWGNDSLFNKWCWENWLAICRRKLKLDPFLTPYTKINSRWIKDLNVRPKTIKTLEENLGNTIQDIGMGKDFMSTTPKAMATKAKIDKWDLIKLKSFCTAKETTITVNRQPTEWEKIFTIYPSDKGLISRIYKELKQIYKKRTNNPINKWVKDMNRHFSKEDIYTAKRHMKKCSSSLAIREMQIKTTLRYHLIPVRMAIIKKSGNNRPSSNVFSVKLSEIQSLALIETRCLMNADEQGVPLIQEMLESWASICKVPKYPNAEAVRPEEQTPHLHPGEINSHVAHTKLVWWSLHTDTHEIWCRDSDRGTSLGRSIPCPPALCSVRKIHLRPQVLRPTSPRNISPISNPHTRTSKRLNRSGQAFLQNLLPQELATSARNLTTRPRNACSPGFLLSRVPSVRDPTGNWTVQLTWQPLSEPLELWPKAL

SEQ ID NO: 36004 - protein, 291 aa, Homo sapiens
MWTHASVCMSFQNIESSYIALEKSDSHQEKSGSSCHLGLFPDAVTASNNKLHGRYSIKKQINTHDSFPLHCFASDFPRVHDYYQIWQLYYLTKRATINTAANCFTLYTPHKMYLDVPCPQKAKPIREDNPSTKTEISKTEVQDNSLAFPICTAFLDLQKALEISRPEKHREGNQAGFPNSQNSKEGRITRANSSSKGKIPSSPRTLSSGTTLLDRSSSPAMEQSWTENDFDELTEAGFRRSVITNFSKLKEDVRTHRKEAKNHEKRLDKWLTRINSVEKTLNDLMELKTME

SEQ ID NO: 36005 - protein, 224 aa, Homo sapiens
MNNLRDKLHPIIISMNYSLPIRMPDRLQPGLWSLDAHQARALENHTEVQFQKECGPDNKCESNLQIRAAFMSEQQQKPGRLQYSRDVWKLLLSINVTNTRTNTLVQTIAVRLHICGQGTAEQKAAETSADLNVLDCSSSPATEQSWMENDFDELTEVGFRRSVITNFSKLKEHVLTHRKEAENLEKRLQEWLTRINSVEKTLNDLMEMKTMAQELRDICTSFNS

SEQ ID NO: 36006 - protein, 145 aa, Homo sapiens
MGKNGVAMKGQGNDMGKGREVKKYSWAFGGKATCCGVPTAVPQEPQDNSFSQTQEVFCEYPKRFSYPLPRNRNAEPWDLGLGHAMPQIADHTSSPAMEQSRTENDFDELTEVGFRKLVITNFSELKQDVQTHRKEAKNLEKILDE

SEQ ID NO: 36007 - protein, 336 aa, Homo sapiens
  DOMAIN (74)..(104): SODIUM CHANNEL SIGNATURE domain identified by eMATRIX, accession number PR00170A, p-value=7.851e-11, raw score of 13.20
  DOMAIN (91)..(299): Ion transport protein domain identified by PFam, accession name ion_trans, E-value=4e-08, PFam score of -21.5
  misc_feature (1)...(336): Xaa = X or * as defined in Table 2
MVRFGDELGGRYGGPGGGERARGGGAGGAGGPGPGGLQPGQRVLYKQSIAQRARTMALYNPIPVKQNCFTVNRSLFVFSEDNVVRKYAKRITEWPPFEYMILATIIANCIVLALEQHLPDGDKTPMSERLDDTEPYFIGIFCFEAGIKIIALGFVFHKGSYLRNGWNVMDFVVVLTGRKAGLGCCGSGVESGGWGDRSSSPAMEQSRMENDFDELTEVGFRKSVITNFSELKEDVRTHRKEAKNLEKRLDKMVNRINSVEKTLNDPMELKTMARELCDACTSFSSXFNQVEEKVSVIEDQMDEMKXEEKFREKRVKRNEQSLQEIWDYVKRPNLRL

SEQ ID NO: 36008 - protein, 513 aa, Homo sapiens
  DOMAIN (348)..(393): kw TRANSCRIPTASE REVERSE II ORF2 domain identified by eMATRIX, accession number DM01354N, p-value=1.000e-40, raw score of 13.17
MLVSFVSLGSLCLQPGSQTLLEKNRTVKPHVSFTLLPALSHVSEKNEAESMNSLIPPPPNLHTPAQAPFPLPTKEQDRSSSPATEQSWTENDFDELTEVGFRRSVITNSSKLKEDVRTHCKEAKNLEKRLHEWLTRINSVEKTLNDLKLKSMARELHDTCTSFNSRFDQVEERVSAIEDQTNEINNGENGTKLENTLQDIIQENFPNLARQANIQIQEIRRTPQRYSSRKATPRHIIVRFTKVEMKEKVLRAAREKGLERQEQTNSKASRRQDITKISAELKEIETQKTLQKINEFRSRFFKKINKIDKTLARLIKKKREKNQTDAIKNDKRDITTDPTEIQTTIREYYKHLYANKLENLEEMDKFLDTYTLPRLNQEEAESLNRTITGSEIEAIINSLPTKKSPGPDGFTAEFYQRYKEELIPFLLKLLQSIEKERILLNSLYEANIILIPKTGRDTTKKENFTPISLMNINAKILNKLLANRIQQHIKKLIHHDQVASSLGCKAGSTYANQ

SEQ ID NO: 36009 - protein, 251 aa, Homo sapiens
  DOMAIN (206)..(247): 2'-5'-oligoadenylate synthetases proteins domain identified by eMATRIX, accession number BL00832B, p-value=7.158e-09, raw score of 15.45
MDDPRLNVKPLTESLETYSGKSKGLEGDVITDSKLNDCRCPSGTKLPEEGLGSNICCSAIFAVLQPLLVIPRQTGSGVDHQQTPTDLRMTVRRKMNKQKGIASTSTKRTKKDIHTKTPSVCHQHQRPKDCSPSPATEQSWMENDLEELTEIGFRRSVITNFSELKEDVRIHHKKAKNLGKRLDEWLTRINSVEKTLNDLMELKTMARELHDSCTSFNSRSNQAEEKVSVIEDQFNEIKREEKFREKRVKRN

SEQ ID NO: 36010 - protein, 336 aa, Homo sapiens
  DOMAIN (74)..(104): SODIUM CHANNEL SIGNATURE domain identified by eMATRIX, accession number PR00170A, p-value=7.851e-11, raw score of 13.20
  DOMAIN (91)..(297): Ion transport protein domain identified by PFam, accession name ion_trans, E-value=1.5e-08, PFam score of -15.0
  misc_feature (1)...(336): Xaa = X or * as defined in Table 2
MVRFGDELGGRYGGPGGGERARGGGAGGAGGPGPGGLQPGQRVLYKQSIAQRARTMALYNPIPVKQNCFTVNRSLFVFSEDNVVRKYAKRITEWPPFEYMILATIIANCIVLALEQHLPDGDKTPMSERLDDTEPYFIGIFCFEAGIKIIALGFVFHKGSYLRNGWNVMDFVVVLTGRKAGLGCCGSGVESGGWGDRSSSPAMEQSRMENDFDELTEVGFRKSVITNFSELKEDVRTHRKEAKNLEKRLDEWLTRMNSVEKTLNDLMELKTMARELRDACTSFSSQFDQVQEMVSVIQDQISEMKREEKFREKRVKRNEQSLQXIWDYVERPNLRL

SEQ ID NO: 36011 - protein, 224 aa, Homo sapiens; identical to SEQ ID NO: 36005

SEQ ID NO: 36012 - protein, 269 aa, Homo sapiens
  DOMAIN (180)..(219): kw TRANSCRIPTASE REVERSE II ORF2 domain identified by eMATRIX, accession number DM01354X, p-value=2.726e-16, raw score of 13.86
MGRNQSRKAENSKNQSAFSPPRDCSSSPAMEQSQMENDFDKLTEVGFRRLVITDFSKLKEDVRTHRKEAKNLEKRLDKWLTRINSVEKTLNDLMELKTMARELHDTCTCFSSRFDLVEERVSVIEDQINEMNCFRENKIPRNPTYKGCEGPLQGELQTTAQQNKRGHKQMEEHSMLMNRKNQYHENGCTVQGLEKTTLKFIWNQKRARIAKPILSQKNKAGGITLPDFKLYYKAAVTKTAWYWYQNRYRPVEQNTALINNTTHLQPSDL

SEQ ID NO: 36013 - protein, 539 aa, Homo sapiens
MWTHASVCMSFQNIESSYIALEKSDSHQEKSGSSCHLGLFPDAVTASNNKLHGRYSIKKQINTHDSFPLHCFASDFPRVHDYYQIWQLYYLTKRATINTAANCFTLYTPHKMYLDVPCPQKAKPIREDNPSTKTEISKTEVQDNSLAFPICTAFLDLQKALEISRPEKHREGNQAGFPNSQNSKEGRITRANSSSKGKIPSSPRTLSSGTTLLDRSSSPAMEQSWTENDFDELTEAGFRRSVITNFSKLKEDVRTHRKEAKNHEKRLDKWLTRINSVEKTLNDLMELKTTPIRLSGRKAIVVEDQINEIKREDKIREKRVKRNEKSLQEIWDYVKKPNLHLIGVPESDGENGTKLENTLQDIIQENFSNLARQANIQIQEIWRPPQRYSSRRATPRHIIVRLTKVEMKEKMLKAAREKGQVTHKGKPIGLTADLSSETLQARREWGPIFNILKRKNFQSRISYPAKLSFVSEGQIKSFTDKQMLRDFVTTRPALQELLKEALNIEKNNQYQPPQKHAKLQRPFIHAVKKLHQLTGKITS

SEQ ID NO: 36014 - protein, 276 aa, Homo sapiens
  misc_feature (1)...(276): Xaa = X or * as defined in Table 2
LLEGSININKKDIYTKTQSVGRQHQRPKVDKTTKMGRNQNRKAENSKNQSASSPPKDCSSSPAMEQSWMENNFDELTEIGFRRSVITNFSELKEDVQTHCKEAKNLKKRLDECLTRINSVEKKTLNDLMELKTMAQELHDTCTSFNTQFDQVEERVSVIEDQINEIKXEEKFREKRVKINEXSCQEIWDXVKRPNIHLITVPESDGEKGTKLENTLQDIIQENFHNIARQANIQIQEIQRTAQRYSSRTATPRHIIVRFAKVEMKEKVLRAARKKG

SEQ ID NO: 36015 - protein, 205 aa, Homo sapiens
  DOMAIN (10)..(40): bZIP transcription factor domain identified by PFam, accession name bZIP, E-value=0.056, PFam score of 12.4
  misc_feature (1)...(205): Xaa = X or * as defined in Table 2
EAGWLLLSSVDEVMKENDELRDSISQLQKQILSLKSAKIALTESLISFRERAEIVEKQTQALIMXVADLQQGNDQTFQGLLDTGSELTLIPGDPKHHCGPPGPKVRAYGDQVINGVLAQVQLIVGPVGPWTHPVVISPVPECVIGIAILNSWQNPHIGSLTGRVRAIMVGISWQGQQYTFTVLPQRYINFPALCHKTAKRHTARR

SEQ ID NO: 36016 - protein, 366 aa, Homo sapiens
MQICITISEPLMTGVKRRGQCMLKRIDPILDLDQIFTERQLFSGQQQLVFRNPLHPLSTPEARSIPVSIGWKCHLGNERDPSQFSIRATFTYRQDECSLGLTITCALQPACRQPVVGPCDHDYMWRTKEHNEVGWLLLSSVDKVKKENDELRDSNSRLQKQILSLKSGYLQLFTRVTVHWGKGNDQTFRGVVDTGSELTLIPGNSKHHCGSPVKIGACGGQIRRNLAVEEPARIMTWVMKETTMFRAEKAADTAESLALTLEDGPLELHYGEFACYGEVPPRIYGILTRLVQHSPDKIIACSGEKSTRKEIVLGSQHTLEIAKQKLVDPYCGSAPYLQREEGSGNKNWDLSSPGYQLALPTGQGGS

SEQ ID NO: 36017 - protein, 187 aa, Homo sapiens
  misc_feature (1)...(187): Xaa = X or * as defined in Table 2
IIRRAVFRWFWGXRSWGLNMIRPQNTKDSNSNCLEKTDSPWCELFKELYKINAFDTPDSLLMRGNEFSDPIHHTFDHMWRTKEHNEAGWLLLSSVDKVMKENDELGDSISQLQKQILSLKSAKIALSESLISCRERAEIVEKXTXALIMLVADLQXKVHAQPHHAQPRQVSTVKVRALIVLQEVTDP

SEQ ID NO: 36018 - protein, 166 aa, Homo sapiens
  DOMAIN (14)..(99): DENN (AEX-3) domain identified by PFam, accession name DENN, E-value=2.1e-25, PFam score of 95.1
FVLVDVNNMWHRYASMLYERRLLIICSKLSTLTACIHGFAAMLYPMYWQHVYIPVLPPHLLDYCCAPMPYLIGIHLSLMEKVRNMALDDVVILNVDTNTLETPFDDLQSLPNDVISSLKNRLKKVSTTTGDGVARAFLKAQAAFFGSYRNALKIEPEEPITFCEEA

SEQ ID NO: 36019 - protein, 265 aa, Homo sapiens
  DOMAIN (70)..(218): DENN (AEX-3) domain identified by PFam, accession name DENN, E-value=3.1e-10, PFam score of 40.9
MGRASELRLDGNCECSLQLLLGPRSAPQWRNQDTLVDSFRLPLVFAVLFFTEFVKRQVGVVVRRNLTEYFVAVDVNNMLHLYASMLYERRILIICSKLSTFAVLETLYKYTDTRHQPPKSKRSVFLQSMDVQQMADTYFHKPLGIVQLPCSCDIAILWQRAQEAALVPLTRIESHAMPLLQPITGKELTACIHGSAAMLYPMYWQHVYIPVLPPHLLDYCCVMQLKTLSPNSSSQQKSVREHGTQTGKGTNCVPDIESFRRREAI

SEQ ID NO: 36020 - protein, 1143 aa, Homo sapiens
  DOMAIN (267)..(322): Domain present in ZO-1 and Unc5-like netrin receptors domain identified by eMATRIX, accession number PF00791B, p-value=6.305e- 12, raw score of 28.49
  DOMAIN (121)..(603): Ank repeat domain identified by PFam, accession name ank, E- value=1.6e-88, PFam score of 307.5
QRSLAPGARARGEQLHQVASGVGSMKCSLRKMWRPGEKKEPQGVVYEDVPDDTEDFKESLKVVFEGSAYGLQNFNKQKKLKTCDDMDTFFLHYAAAEGQIELMEKITRDSSLEVLHEMDDYGNTPLHCAVEKNQIESVKFLLSRGANPNLRNFNMMAPLHIAVQGMNNEVMKVLLEHRTIDVNLEGENGNTAVIIACTTNNSEALQILLNKGAKPCKSNKWGCFPIHQAAFSGSKECMEIILRFGEEHGYSRQLHINFMNNGKATPLHLAVQNGDLEMIKMCLDNGAQIDPVEKGRCTAIHFAATQGATEIVKLMISSYSGSVDIVNTTDGCHETMLHRASLFDHHELADYLISVGADINKIDSEGRSPLILATASASWNIVNLLLSKGAQVDIKDNFGRNFLHLTVQQPYGLKNLRPEFMQMQQIKELVMDEDNDGCTPLHYACRQGGPGSVNNLLGFNVSIHSKSKDKKSPLHFAASYGRINTCQRLLQDISDTRLLNEGDLHGMTPLHLAAKNGHDKVVQLLLKKGALFLSDHNGWTALHHASMGGYTQTMKVILDTNLKCTDRLDEDGNTALHFAAREGHAKAVALLLSHNADIVLNKQQASFLHLALHNKRKEVVLTIIRSKRWDECLKIFSHNSPGNKCPITEMIEYLPECMKVLLDFCMLHSTEDKSCRDYYIEYNFKYLQCPLEFTKKTPTQDVIYEPLTALNAMVQNNRIELLNHPVCKEYLLMKWLAYGFRAHMMNLGSYCLGLIPMTILVVNIKPGMAFNSTGIINETSDHSEILDTTNSYLIKTCMILVFLSSIFGYCKEAGQIFQQKRNYFMDISNVLEWIIYTTGIIFVLPLFVEIPAHLQWQCGAIAVYFYWMNFLLYLQRFENCGIFIVMLEVILKTLLRSTVVFIFLLLAFGLSFYILLNLQDPFSSPLLSIIQTFSMMLGDINYRESFLEPYLRNELAHPVLSFAQLVSFTIFVPIVLMNLLIGLAVGDIAEVQKHASLKRIAMQVELHTSLEKKLPLWFLRKVDQKSTIVYPNKPRSGGMLFHIFCFLFCTGEIRQEIPNADKSLEMEILKQKYRLKDLTFLLEKQHELIKLIIQKMEIISETEDDDSHCSFQDRFKKEQMEQRNSRWNTVLRAVKAKTHHLEP

SEQ ID NO: 36021 - protein, 691 aa, Homo sapiens
  DOMAIN (226)..(281): Domain present in ZO-1 and Unc5-like netrin receptors domain identified by eMATRIX, accession number PF00791B, p-value=1.909e- 11, raw score of 28.49
  DOMAIN (221)..(388): Ank repeat domain identified by PFam, accession name ank, E- value=1.3e-30, PFam score of 115.2
MAQYLLSLPLASCEVIPKSPKSPHLRVAQERGLPSSPRSRNPRSPDLSDSWRRPASLESSLDKREGSDLRFAHTGEFGALWGAGTCTRDLTASALLCFPFPSSAPEPLLLTLYRLPLEIRVCNPWHVAAKLDAYLIAQRKAKIFEWLIGQTECIQNLYAVALLCLLVQTEAVTGAQVDIKDNFGRNFLHLTVQQPYGLKNLRPEFMQMQQIKELVMDEDNDGCTPLHYACRQGGPGSVNNLLGFNVSIHSKSKDKKSPLHFAASYGRINTCQRLLQDISDTRLLNEGDLHGMTPLHLAAKNGHDKVVQLLLKKGALFLSDHNGWTALHHASMGGYTQTMKVILDTNLKCTDRLDEDGNTALHFAAREGHAKAVALLLSHNADIVLNKQQASFLHLALHNKRKEVVLTIIRSKRWDECLKIFSHNSPGNKCPITEMIEYLPECMKIEYNFKYLQCPLEFTKKTPTQDVIYEPLTALNAMVQNNRIELLNHPVCKEYLLMKWLAYGFRAHMMNLGSYCLGLIPMTILVVNIKPGMAFNSTGIINETSDHSEILDTTKRNYFMDISNVLEWIIYTTGIIFVLPLFVEIPAHLQWQCGAIAVYFYWMNFLLYLQRHQVEIRGSRLVLGNVCQESCDVIRLHIFQFWIPAPDLDYLAQRDGFRIRDDQKEAILEHGGVRRVSNEVVKEKLDYATIV

SEQ ID NO: 36022 - protein, 300 aa, Homo sapiens
MSLSSGASGGKGVDANPVETYDSGDEWDIGVGNLIIDLDADLEKDQQKLEMSGSKEVGIPAPNAVATLPDNIKFVTPVPGPQGKEGKSKSKRSKSGKDTSKPTPGTSLFTPSEGAASKKEVQGRSGDGANAGGLVAAIAPKGSEKAAKASRSVAGSKKEKENSSSKSKKERSEGVGTCSEKDPGVLQPVPLGGRGGQYDGSAGVDTGAVEPLGSIAIEPGAALNPLGTKPEPEEGENECRLLKKVKSEKMESPVSTPAVLPIHLLVPVVNNDISSPCEQIMVRTRSVGVNTCDVGSGHRA

SEQ ID NO: 36023 - protein, 164 aa, Homo sapiens
DHTLPLLLNYVATLAQKNIQSCTVSVNAVGPASLPNHKAMTHEEPCGAETKEQGFTESLQYPTSCQFDFCKLASKKCTFATAQGPSGPGMKGVKEETHKWLNTNSNVNSFKNRHISTKREMLKYSRNCEGAEDLQEVLSSILGILKAVNDSMHLIAITGYDDTV

SEQ ID NO: 36024 - protein, 105 aa, Homo sapiens
  DOMAIN (43)..(94): Integrase DNA binding domain identified by PFam, accession name integrase, E-value=1.2e-08, PFam score of 42.2
REYGTPQEQLNLALLTLNFLSLPKGQMLSAAEQHLQKPAAKTEAGRMIWQRDPITKIWEIGKIITWGRGYACVSPGQNHQSVWIPSRHLKSCHGPDAKEEIPGGS

SEQ ID NO: 36025 - protein, 204 aa, Homo sapiens
  DOMAIN (12)..(30): RNase H domain identified by eMATRIX, accession number PF00075J, p-value=5.500e-16, raw score of 15.78
  DOMAIN (84)..(135): Integrase DNA binding domain identified by PFam, accession name integrase, E-value=2.9e-13, PFam score of 57.5
  misc_feature (1)...(204): Xaa = X or * as defined in Table 2
PTRPIKHITDIPYNSEGQAIVERMNLSLKQQLQKHKKGGKSKDYGTPHMQLNLALLTLNFLSLPKGQILSVAEQHLQKPAAKTEAEQLVWWRDPITKSXEIGKIITWGKGYACVSPGLTQQPIWIPSRHLKPYHEPDAEEEIPGGSRGPPPPPVDSHVETDAEEEPHCHEQHLSNTATHLGTDQEAVTAGGRKPEESKTTSHNK

SEQ ID NO: 36026 - protein, 263 aa, Homo sapiens
  DOMAIN (139)..(158): Src homology 3 (SH3) domain proteins profile domain identified by eMATRIX, accession number BL50002A, p-value=5.154e- 10, raw score of 14.19
  DOMAIN (135)..(257): SH3 domain identified by PFam, accession name SH3, E-value= 4.6e-18, PFam score of 73.4
KTLAERVVDMAAIRMGKLTTMPAGLIYASVSVHAAKQEESKKQLVKPEQLPIYTAPPLQSKYVEEQPGHLQMGFASIRTATGCYIGWCKGVYVFVKNGDNGYSTIWEKMLMSYLKDPPRDFLPKMGVITVSGLVPRAKALCNYRGQNPGDLRFNKGDIILLRRQLDENWYQGEINGISGNFPASSVEVIKQLPQPPPLCRALYNFDLRGKDKSENQDCLTFLKDDIITVISRVDENWAEGKLGDKVGIFPILFVEVREYQVYI

SEQ ID NO: 36027 - protein, 106 aa, Homo sapiens
  misc_feature (1)...(106): Xaa = X or * as defined in Table 2
DGQQLIALHRLALRELQQAGHAGLPQQAKILFDGGSEIGKIRGLQRPRAKNRLSGRGPLREPSPKXFFGVQGRKTLNRTLKGAPHXNLAAKAGKPLSPCTSGRIRM

SEQ ID NO: 36028 - protein, 522 aa, Homo sapiens
  misc_feature (1)...(522): Xaa = X or * as defined in Table 2
MDDIPQEAGRYRHNQAYAYSIQGDGAEDDDERIVRFHTRVTVDSDTLASDAARLTCRHGLGNQGSDLVLYGTSTPKNLIWVRVHVVGHRPDRRFFAFDVWSPRSLIVDSCSKLEQHSTLSRAILLIYKGFCRFRNHHQTGFSPAGANQRGPLAATLSGPGGEGQSAVARLTGEKKNHPGAQYANRLSPRVGRFINAAGTTGFPTGKRAVSATQLMDFADFGTTIKQDFRLLGQTSVDRLLQLSQGQANVQQFIDEGNYTSGDNHTLRDPHYVEDKGHKYLVFEANTGTENGYQGEESLFNKAYYGGGTNFFRKESQKLQQSAKKRDAELANGALGIIELNNDYTLKKVMKPLITSNTVTDEIERANVFKMNGKWYLFTDSRGSKMTIDGINSNDIYMLGYVSNSLTGPYKPLNKTGLVLQMGLDPNDVTFTYSHFAVPQAKGNNVVITSYMTRGSSRXRQRPXIPCIRSQHGNRKRIPRSKNLYLTKRTTAAARTSSVKKARSFSRALKNAMLSXRTAPSVS

SEQ ID NO: 36029 - protein, 383 aa, Homo sapiens
  DOMAIN (13)..(56): 1 kw MIND INHIBITOR DIVISION CONTROL domain identified by eMATRIX, accession number DM01756B, p-value=4.822e-15, raw score of 22.91
  DOMAIN (1)..(92): ParA family ATPase domain identified by PFam, accession name ParA, E-value=3.5e-14, PFam score of 60.5
MLRLAIETVAHDYDVIVIDSAPNLGIGTINVVCAADVLIVPTPAELFDYTSALQFFDMLRDLLKNVDLKGFEPDVRILLTKYSNSNGSQSPWMEEQIRDAWGSMVLKNVVRETDEVGKGQIRMRTVFEQAIDQRSSTDTSLSTPAAPMVDSLIARVGVMARGNAITLPVCGRDVKFTLEVLRGDSVEKTSRVWSVDSCSKLEQHSTLSRAILLIYKGFCRFRNHHQTGFSPAGANQRGPLAATLSGPGGEGQSAVARLTGEKKNHPGAQYANRLSPRVGRFINAAGTTGFPTGKRAVSATQLMDFADSGTTIKQDFRLLGQTQRGPLAATLSGPGGEGQSAVARLTGEKKNHPGAQYANRLSPRVGRFINAAGTTGFPTGKRA

SEQ ID NO: 36030 - protein, 1297 aa, Homo sapiens
  misc_feature (1)...(1297): Xaa = X or * as defined in Table 2
XPAGEGQSAVARLTGEKKNHPGAQYANRLSPRVGRFINAAGTTGFPTGKRAWAIALIDGFSPFDVGVHVLSIVDSCSKLEQHSTLSRAILLIYKGFCRFRNHHQTGFSPAGANQRGPLAATLSGPGGEGQSAVARLTGEKKNHPGAQYANRLSPRVGRFINAAGTTGFPTGKRPVSATQLMDFADFGTTIKQDFRLLGQTSVDRLLQLSQGQAVKGNQLLPVSLVKRKTTLAPNTQTASPRALADSLMQLARQVSRLQSGQDFADFGTTIKQDFRLLGQTSVDRLLQLSQGQAVKGNQLLPVSLVKRKTTLAPNTQTASPRALADSLMQLARQVSRLDSGHNTNGFSMVLKPGEFKIKAPAEFMLGGLRAITIAVFGKQNTYIRLEPFKINVLEQITKHIEKLQCGGVVKQLSRRGNNQHISSTYDINRADTQVRRAVNNYDIIVMSNSFNGQSEHQVWIDRKAGECLLHEYEDLVPIRDTLRLFPGGRYLPRAKHVAPSEPDPEQDEQKLRFCKRHLYGQQPRSPVEIRLQHVAIAYQTGGSSRGFCRFRTHHQTGFSPAGANQRGPLAATLSGPGGEGQSAVARLTGEKKNHPGAQYANRLSPRVGRFINAAGTTGFPTGKRAVSATQLMDFADFGTTIKQDFRLLGQTSVDRLLQLSQGQAVKGNQLLPVSLVKRKTTLAPNTQTASPRALADSLMQLARQVSRLESGQRFFALDVGSPRSLIVDSCSKLEQHSTLSGAILLIYKGFCRFRNHHQTGFSPAGANQRGPLAATLSGPGGEGQSAVARLTGEKKNHPGAQYANRLSPRVGRFINAAGTTGFPTGKRAVSATQLMDFADFGTTIKQDFRLLGQTSVDRLLQLSQGQADLSPAAAKPSVARLLPTLSGASRDFADFGTTIKQDFRLLGQTSVDRLLQLSQGQAVKGNQLLPVSLVKRKTTLAPNTQTASPRALADSLMQLARQVSRLESGQDFADFGTTIKQDFRLLGQTSVDRLLQLSQGQAVKGNQLLPVSLVKRKTTLAPNTQTASPRALADSLMQLARQVSRLESGQDFADFGTTIKQDFRLLGQTSVDRLLQLSQGQAVKGNQLLPVSLVKRKTTLAPNTQTASPRALADSLMQLARQVSRLESGHASVYSCAGCSLHEGIFKRIFALLGQTSVDRTLQLSQGQAVKGNQLLTVSLVKRKTTLAPNTQTASRRALADSLMQLARQVSRLESGQDFADFGTTIKQDFRLLGQTSVDRLLQLSQGQAVKGNQLLPVSLVKRKTTLAPNTQTASPRALADSLMQLARQVSRLESGQ

SEQ ID NO: 36031 - protein, 293 aa, Homo sapiens
MDEGSTIALSRCSDLWAIALIDGFSPFDVGVHVLLIVDSCSKLEQHSTLSRAILLIYKGFCRFRNHHQTGFSPAGANQRGPLAATLSGPGGEGQSAVARLTGEKKNHPGAQYANRLSPRVGRFINAAGTTGFPTGKRAEERLKPSRKENNQKAYKETYGVSHITRHDMLQIPKQQQNEKYQVPQFDQSTIKNIESAKGLDVWDSWPLQNADGTVAEYNGYHVVFALAGSPKGDKAECTTSNPATFIAFKGLPKVSLLCKPPDTYWRTVSEQGLFHDHYISTNYKLTEDVIYGH

SEQ ID NO: 36032 - protein, 332 aa, Homo sapiens
  misc_feature (1)...(332): Xaa = X or * as defined in Table 2
SLQTRDLPISEPPSNRIFACWGKPAWTACCNSLRARRXRAISCCPSHXKRIPRRRIFIXPKRTTAAARTSSVKKARSFSRALKNAMLSXRTAPSVSXSXIMITHXKKXXSRXSLQTRDLPISEPPSNRFSPAGANQRGPLAATLSGPGGEGQSAVARLTGEKKNHPGAQYANRLSPRVGRFINAAGTTGIPDWKAGSERNAINGAIALIEGFRPLTLEPSSLIVNSCSKLEQHSTLSRAILLIYKGFCRFRNHHQTGFSPAGPNQRGPLAATLSGPGGEGQSAVARLTGEKKNHPGAQYANRLSPRVGRFINAAGTTGFPTGKRAVSATQLM

SEQ ID NO: 36033 - protein, 485 aa, Homo sapiens
  DOMAIN (13)..(55): Chloramphenicol acetyltransferase proteins domain identified by eMATRIX, accession number BL00100C, p-value=1.000e-39, raw score of 23.60
  DOMAIN (1)..(143): Chloramphenicol acetyltransferase domain identified by PFam, accession name CAT, E-value=1.2e-108, PFam score of 374.4
MNAHPKFRMAMKDGELVIWDSVHPCYTVFHEQTETFSSLWSEYHDDFRQFLHIYSQDVACYGENLAYFPKGFIENMFFVSANPWVSFTSFDLNVANMDNFFAPVFTMGKYYTQGDKVLMPLAIQVHHAVCDGFHVGRMLNELQQYCDEWQGGADFADFGTTIKQDFRLLGQTSVDRLLQLSQGQAVKGNQLLPVSLVKRKTTLAPNTQTASPRALADSLMQLARQVSRLESGQPKVFEYASLFQTEGGKSAVLTALIVGLGGRAVATNRGSSLKGFVKDGQKRFFAFDRWSPRSLIVDSCSKLEQHSTLSRAILLIYKGFCRFRNHHQTGFSPAGANQRGPLAATLSGPGGEGQSAVARLTGEKKNHPGAQYANRLSPRVGRFINAAGTTGFPTGKRPVSATQLMDFADFGTTIKQDFRLLGQTSVDRLLQLSQGQAVKGNQLLPVSLVKRKTTLAPNTQTASPRALADSLMQLARQVSRLESGQ

SEQ ID NO: 36034 - protein, 1190 aa, Homo sapiens
MPPDGEIPPSRDQQTPHTGELQLTSGRCSSGMKLPEEGTGSNVCCSAAPAVDTQVESRSKYGITSGIKILVPVTCQTLRPNRREKDPFQLAKALEKLQHLMAALKSPKEELTHIMWVELTNNRRDTICHPKATRKVVRERFTRPLNPSRVVNSTPRSEVPAGQPRGARKPLFVQTVRLLRSQRLARDTPPWRSLGLQAAALHRRRSRHREDQLHLWAAAAAKPGNILTGHQRTPMASPPQAAWVTRKRQRHLATPAVEGLLALGISKSVQTPDPSHPNSSLSDVPEQFFPTAILIGFPAGHGISRSAAAAVPSKRLSRSSFNRGLPLGFRFSALRHLDPKKLDLGNGSLDSCSKLKQHSTLSRAILLIYKGFCRFRNHHQTGFSPAGANQRGPLAATLSGPGGEGQSAVARLTGEKKNHPGAQYANRLSPRVGRFINAAGTTGFPTGKRAVSATQLMDFADFGTTIKQDFRLLGQTSVDRLLQLSQGQAVKGNQLLPVSLVKRKTTLAPNTQTASPRALADSLMQLARQVSRLESGHNYSKGQSKVSFKTRQVPSAYEPVKSKAGGCFRVAPNRAFKSRRDFADFGTTIKQDFRLLGQTSVDRLLQLSQGQAVKGNQLLPVSLVKRKTTLAPNTQTASPRALADSLMQLARQVSRLESGQDFADFGTTIKQDFRLLGQTSVDRLLQLSQGQAVKGNQLLPVSLVKRKTTLAPNTQTASPRALADSLMQLARQVSRLESGQIVRSATGQLIHNWTQRTQGFSPQPAGNPKRQVFSDASLEVAKVRYPLSTIGGPPSRGPGLPKWEGRGCKGSLVSPVFFCTCTFALGWKSSRRRQLNRQLEKRGPFFKDSDKFDANDPILKDQTQEWSGSATFTSDGKIRLFYTDYSGKHYGKQSLTTAQVNVSKSDDTLKINGVEDHKTIFDGDGKTYQNVQQFIDEGNYTSGDNHTLRDPHYVEDKGHKYLVFEANTGTENGYQGEESLFNKAYYGGGTNFFRKESQKLQQSAKKRDAELANGALGIIELNNDYTLKKVMKPLITSNTVTDEIERANVFKMNGKWDFADFGTTIKQDFRLLGQTSVDRLLQLSQGQAVKGNQLLPVSLVKRKTTLAPNTQTASPRALADSLMQLARQVSRLESGQDFADFGTTIKQDFRLLGQTSVDRLLQLSQGQANHLMTQFSEPVLIIEQRTTDEE

SEQ ID NO: 36035 - protein, 134 aa, Homo sapiens
  misc_feature (1)...(134): Xaa = X or * as defined in Table 2
GGMLCGTLSGPDGEGQSAVARLTGEKKHPRGDQXQKAPLLARWRNPLMQLAQPDFPTGKRAIDTHRSVSHAHIIITIHSSTLSSDISHTDAPNTSSNNYVIAITSPSDTAPTSRTPLHRIHHTTPIPIATLARP

SEQ ID NO: 36036 - protein, 521 aa, Homo sapiens
  DOMAIN (118)..(147): kw REPLICATION REPB REPA INITIATION domain identified by eMATRIX, accession number DM00653A, p-value=7.207e-27, raw score of 20.40
  DOMAIN (102)..(208): Initiator RepB protein domain identified by PFam, accession name RepB_protein, E-value=0.00032, PFam score of 17.4
MTPTFESRGYPPRIVQSNDLTEAAYSLSRDQKRMLYLFVDQIRKSDGTLQEHDGICEIHVAKYAEIFGLTSAEAKDAGDEKGYESFPWFIKRAHSPSRGLYSVHINPYLIPFFIGLQNRFTQFRLSETKEITNPYAMRLYESLCQYRKPDGSGIVSLKIDWIIERYQLPQSYQRMPDFRRRFLQVCVNEINSRTPMRLSYIEKKKAARRLISQLQHDTILRAQLPPSYILSQCPTAPASPPPWSPSDISPHPPEGLQRELQQAVHAGLPQQAKILCDGGSEIGKIPYKSKEYPEIGLSVVPVWNTSPLLKNVDSNVKGRETVYQGDGPLREPSPKSSFLGVECDNLKTCHTSHGSVMAETAVINHKKRKNSPRIVQSNDLTEAAYSLSRDQKRMAQSQGWVKRYIKAFCKGFFVAVPGAMTFLDRGTGWQTLTLVYRIPSILGNDYRPTSAYERGQRYASRLQNEFAGNISALADAENISRKIITRCINTAKLPKSVVALFSHPGELSARSGDALQKAFYR

SEQ ID NO: 36037 - protein, 761 aa, Homo sapiens
  misc_feature (1)...(761): Xaa = X or * as defined in Table 2
MESSNFGRFFALGRWSPRSLIVDSCSKLEQHSTLSRAILLIYKGFCRFRNHHQTGFSPAGANQRGPLAATLSGPGGEGQSAVARLTGEKKNHPGAQYANRLSPRVGRFINAAGTTGFPTGKRAVSATQLIHREAAQCHGQLRGSLERTTGCKLTLHLTLSPVNGFSPFDVGVHVLLIVDSCSKLEQHSTLSRAILLIYKGFCRFRNHHQTGFSPAGANQRGPLAATLSGPGGEGQSAVARLTGEKKNHPGAQYANRLSPRVGRFINAAGTTGFPTGKRAVSATQLMDFADFGTTIKQDFRLLGQTSVDRLLQLSQGQAVKGNQLLPVSLVKRKTTLAPNTQTASPRALADSLMQLARQVSRLESGQGGEDSPNRFFDGGRKKQIRTVRQFIDEGNNTPADTQTLRDPHYVEDKGHKYLVFEANTGTENGYQGEESLFNKAYYGGGTNFFXKESQKLQQSAKKRDAELANGALGIIELNNDYTLKKVMKPLITSNTVTDEIERANVFKMNGKWYLFTDSRGSKMTIDGINSNDIYMLGYVSNSLTGPYKPLNKTGLVLQMGLDPNDVTFTYSHFAVPQAKGNNVNAGSDWGEWMCAEDANTPDFPDFGTTITQDFRLLGQTSVDRLLQLSQGQAVKGNQLLPVSLVKRKTTLAPNTQTASPRALADSLMQLARQVSRLESGQDFADFGTTIKQDFRLLGQTSVDRLLQLSQGQAVKGNQLLPVSLVKRKTTLAPNTQTASPRALADSLMQLARQVSRLESGQ

SEQ ID NO: 36038 - protein, 261 aa, Homo sapiens
  DOMAIN (73)..(93): GASTRIN RECEPTOR SIGNATURE domain identified by eMATRIX, accession number PR00527I, p-value=1.265e-09, raw score of 5.36
ISYTVPEALSARSNPAACQHASCRPAACPVASVGSPRQPAPGGAGGHRHWPRRRWRLRQRPRPSAPGRPRRPRPRPRRHRRRPRPHPHHAPPPRPSCAETRSRRGGGRRPLPRPLPPGAAGAGHREVGDKAGAAGCGRRVVALAAPVSPPSSPSSPSPSLLSAAVGVAGCFSAELSDSRRLLAPGGEGPLARSPARCDPAAGSACPAGWSSRQRSRCELMCAAGISCWHTGHCTWCSLSFMPLVLMILAASFRPVAVSSHL

SEQ ID NO: 36039 - protein, 1290 aa, Homo sapiens
MERRTPLTLRVLGDGGQGPAALQEWLVDMIESHNFTRRWTVKGYTVQSLSNSRTTKKGDPLESHRGSATKVLKTHAHALQNFQRYTGIQHVHRIGMAERMWCDRNRERHTVSSSGGNRLPNPGPDRSGSRFSALRAPRPPKNLIWVMVHEVGHRPDRRFFALVRWSPRLLIVDSCSKLDQHSTLSRAILLIIKGFCRFRNHHQTGFSPAGPNQRGPLAATLSGPGGEGQSAVARLTGEKKNHPGAQYANRLSPRVGRFINAAGTTGFPTGKRAVSATQLMDFADFDTTIKQDFRLLGQTSVDRLLQLSQGQAVKGNQLLPVSLVKRKTTLAPNTQTASPRALADSLMQLARQVSRLESGQDVADFGPTIIQIFRLLGQTSVDRLLQLFQGQAVKGNQLLPVSLVKRKTTLALNTQTASLRALADSLMQLARQVSRLESGQNLADFETHHQTGFSLAGANQRGPLAATLSGPGGEGQSAVARLTGEKKNHPGAQYANRLSPRVGRFINAAGTTGFPTGKRAVSATQLMPIPDGRDFADFGTTIKQDFRLLGQTSVDRLLQLSQGQAVKGNQLLPVSLVKRKTTLAPNTQTASPRALADSLMQLARQVSRLESGQDFADFGTPIKQDFRLLGQTSVDRLMQLSQGQAVKGNQLLPVSLVKRKTTLAPNTQTASPRALADSLMQLARQVSRLESGHESEVTHLTLHLNSSWVTPDETIGKGPGGEGQSAVARLTGEKKNHPGAQYANRLSPRVGDFINAAGTTGFPTGKRAVSATQLMDFADFGTTIKQDFRLLGQTSVDRLLQLSQGQAPDTSAGKCSKSDDTLKINGVKDHKTIFAGDGKTYQNVQQFIDEGNYTSADNHTLRDPHYVEDKGHKYFVFEANTGTENGYQGEESLFNKAYYGGGTNIFRKESQKLQQSAKKRDAELANGALGIIELNNDYTLKKVMKPLITSNTVTDEIERANVFKMNGKWYLFTDSRGSKMTIDGINSNDIYMLGYVSNSLTGPYKPLNKTGLVLQMGLDPNDVTFTYSHFAVPQAKGNNVVITSYMTNRGDFADFGTTIKQDFRLLGQTSVDRLLQLSQGQAVKGNQLLPVSLVKRKTTLAPNTQTASPRALADSLMQLARQVSRLESGQDFADYGTTIKQDFRLLGQTSVDRLLQLSQGQAVKGNQLLPVSLVKRKTTLAPNTQTASPRALADSLMQLARQVSRLESGQEFADFGTTIKQDFRLLGQTSVDRLLQLSQGQAVKGNQLLPVSLVKRKTTLAPNTQTASPRALADSLMQLARQVSRLESGQ

SEQ ID NO: 36040 - protein, 142 aa, Homo sapiens
MKPLITSNTVTDEIERANVFKMNGKWYLFTDSRGSKMTIDGINSNDIYMLGYVSNSLTGPYKPLNKTGLVLQMGLDPNDVTFTYSHFAVPQAKGNNVVITSYMTNRGFFEDKKGTFAPSWTCAKILFDGGSEIGKIPYKSKE

SEQ ID NO: 36041 - protein, 120 aa, Homo sapiens
  misc_feature (1)...(120): Xaa = X or * as defined in Table 2
KRRDEIIPCVLSKQLLVTFITCRASCINESANARGEAVCVLGARVVSSFHQXDGQQLIALHRLALRELQQAVHAGLPQQAKILFDGGSEIGKIPYKSKEXPENRLSVVPVWEQESTLASV

SEQ ID NO: 36042 - protein, 154 aa, Homo sapiens
  misc_feature (1)...(154): Xaa = X or * as defined in Table 2
TVSRWAMLEHILLFSREPSNKEPETXAHSMXADDKRFAAYKKKTKGGTERWDKYGRRPANGIRTGENNAKTEHLRDRDQKRPRERERARXTTEITEQEGSGXGEPVEQMRKRRAQAWSRRKSTGSQTETRSVRVTRVGLKTASESRRIRTMEQN

SEQ ID NO: 36043 - protein, 383 aa, Homo sapiens
  DOMAIN (31)..(86): ELEMENT INSERTION TRANSPOSABLE SEQUENCE TRANSPOSASE FOR domain identified by eMATRIX, accession number PD02662D, p-value= 4.536e-10, raw score of 21.71
  misc_feature (1)...(383): Xaa = X or * as defined in Table 2
XRKNLRSTRTHCHHPSPKIYSASAKEPWVLATNLPVEIRTPKQLVNIYSKRMQIEETFRDLKSPAYGLCLRHSRTSSSKRFDIMLLIALMLQLTCWLAGVHAHKQRQSLLQPFPDICQGGTDVSLWLVTYCTCDNLKTCHTSHGSVMAETAVINHTKRKNSPRIVQSNDLSEAAYSLSRDQKRMLCLFVDQIRKSDGALQEHDGVCEIHVAKYAEIFGLTSAEARVDVRQALKSFAGKEVVFYRPEEDAGDEKGYESFPWFFKRAHSPSGGLVRVLIIPYLIPFCVVVPEPGYSFSAAKILCDGGSEIGKIPYKSKEYPEIGLSVVPVWNKSPLLKNVDSNVKGRKTVYHGDGALREPSHKSSFLGVECRKALNRNPKGAPDL

SEQ ID NO: 36044 - protein, 982 aa, Homo sapiens
  DOMAIN (247)..(260): REPEAT PROTEIN ANK NUCLEAR ANKYR domain identified by eMATRIX, accession number PD00078B, p-value=8.500e-11, raw score of 13.14
  DOMAIN (57)..(281): Ank repeat domain identified by PFam, accession name ank, E- value=3.7e-35, PFam score of 130.2
MAELEHLGGKRAESARMRRAEQLRRWRGSLTEQEPAERRGAGRQPLTRRGSPRVRFEDGAVFLAACSSGDTDEVRKLLARGADINTVNVDGLTALHQACIDENLDMVKFLVENRANVNQQDNEGWTPLHAAASCGYLNIAEYFINHGASVGIVNSEGEVPSDLAEEPAMKDLLLEQVKKQGIDLEQSRKEEEQQMLQDARQWLNSGKIEDVRQARSGATALHVAAAKGYSEVLRLLIQAGYELNVQDYDGWTPLHAAAHWGVKEACSILAEALCDMDIRNKLGQTPFDVADEGLVEHLELLQKKQNVLRSEKETRNKLIESDLNSKIQSGFFKNKEKMLYEEETPKSQEMEEENKESSSSSSEEEEGEDEASESETEKEADKKPEAFVNHSNSESKSSITEQIPAPAQNTFSASSARRFSSGLFNKPEEPKDESPSSWRLGLRKTGSHNMLSEVANSREPIRDRGSSIYRSSSSPRISALLDNKDKERENKSYISSLAPRKLNSTSDIEEKENRESAVNLVRSGSYTRQLWRDEAKGNEIPQTIAPSTYVSTYLKRTPHKSQADTTAEKTADNVSSSTPLCVITNRPLPSTANGVTATPVLSITGTDSSVEAREKRRSYLTPVRDEEAESLRKARSRQARQTRRSTQGVTLTDLQEAERTFSRSRAERQAQEQPREKPTDTEGLEGSPEKHEPSAVPATEAGEGQQPWGRSLDEEPICHRLRCPAQPDKPTTPASPSTSRPSLYTSSHLLWTNRFSVPDSESSETTTNTTTAKEMDKNENEEADLDEQSSKRLSIRERRRPKERRRGTGINFWTKDEDETDGSEEVKETWHERLSRLESGGSNPTTSDSYGDRASARARREAREARLATLTSRVEEDSNRDYKKLYESALTENQKLKTKLQEAQLELADIKSKLEKVAQQKQEKTSDRSSVLEMEKRERRALERKMSEMEEEMKVLTELKSDNQRLKDENGALIRVISKLSK

SEQ ID NO: 36045 - protein, 884 aa, Homo sapiens
  DOMAIN (76)..(116): Chloramphenicol acetyltransferase proteins domain identified by eMATRIX, accession number BL00100B, p-value=4.333e-30, raw score of 25.01
  DOMAIN (57)..(116): Chloramphenicol acetyltransferase domain identified by PFam, accession name CAT, E-value=6.5e-32, PFam score of 119.5
  misc_feature (1)...(884): Xaa = X or * as defined in Table 2
MRWTPGHEITKALQTFQRYTGIQHVHRIGMAERMWCDRNRERHTVSSSGGNRLPNPEHFEAFQSVAQCTYNQTVQLDITAFLKTVKKNKHKFYPAFIHILARLMNAHPEFRMAMKDVDSCSKLEQHSTLSRAILLIYKGFCRFRNHHQTGFSPAGANQRGPLAATLSGPGGEGQSAVARLTGEKKNHPGAQYANRLSPRVGRFINAAGTTGFPTGKRAVSATQLIYRELFPQPLVQLDPCSVPCMQPPTSPKSRAWVSDIALLEFQKKKEMEKKKEKERKKELQGGRGRRRGGGWGKGRERGGRGKKRRGGGEAIRDAEKAGRLPHPDMEIRGRVEQRVGYTIEQINHMRDVFGTRLRRAEDVFPPVIGVAAHKGGVYKTSVSVHLAQDLALKGLRVLLVEGNDPQGTASMYHGWVPDLHIHAEDTLLPFYLGEKDDVTYAIKPTCWPGLDIIPSCLALHRIETELMGKFDEGKLPTDPHLMLRLAIETVAHDYDVIVIDSAPNLGIGTINVHPAWGSAISLLEYSPGHLAGFVASIPAPLQLVPRWDTKPVLEDASASSRFSIPQRNPTHLHPTTSFPSCNPDTVDAWMRFLITWCLYTSPYSTLMGELFPFYQGMLLESTKQGSQVRKVFVWTLVPNWNNTQPYSRAILLIYKGFCRFRNHHQTGFSPAGANQRGPLAATLSGPGGEGQSAVARSHWXKEKPPWRPIRKPPLPARWPIPLMQLARQVSRLESGQXAQRNXFTENSSRSHWFSWTPVASHACSRPLRPNPGPGFLTSRFLSFRRRKRWRRRKRRKGRKSYREEEEDEEEEDGGKEEKEEEEEKREEEEERLSEMPRKQGDYRTRIWKFEDGLSNVLVIQLNKLIICVMCLVRDCDVLKTYFHR

SEQ ID NO: 36046 - protein, 2181 aa, Homo sapiens
  DOMAIN (282)..(1768): ParB-like nuclease domain identified by PFam, accession name ParBc, E-value=2.2e-12, PFam score of 54.6
  misc_feature (1)...(2181): Xaa = X or * as defined in Table 2
MVSRHLQFGRIVSGVIEIPYGCRRRKAAALTESNYRVLVAQLYDEQMAALSRLGNDYRPTSAYERGQRYASRLQNEFAGNIYALADAETTSRKIITRCINTAKLPKSVVALFSHPGELSARDFADFGTTIKQDFRLLGQTSVDRLLQLSQGQAVKGNQLLPVSLVKRKTTLAPNTQTASPRALADSLMQLARQVSRLESGHALHISLITPSFPTEGKSQFVLQLRPSLRGALLSLLDHYEWNCFVFLYDTDRXVMARGNAISLPVCGRDVKLLFEVLRGDSVEKTSRVWSGNERDQELLTEDALDDLILSFLLTGQQTPAFGXRVSGVIEIADGSRRRKAAALTESDYRVLVGELDDEQMAALSRLGNDYRPTSAYERGQRYASRLQNEFAGNISALADAENISRKIITRCINTAKLPKSVVALPSHPGELSARSGDALQKAFTDKEELLKQQASNLHEQKKAGTVFRLLTLESTSLIVDSCPKLKQHSTLSRVILLIYKGFCRFRNHHQTGFSPAGANQRGPLAATLSGPGGEGQSAVARLTGEKKNHPGAQYANRLSPRVGRFINAAGTTGFPTGKRAVSATQLMDFADFGTTIKQDFRLLGQTSVDRLLQLSQGQATVFRPLTWSPRSLIVDSCSKLEQHSTLSRAILLINKGFCRFRNHHQTGFSPAGANQRGPLAATLSGPGGEGQSAVARLTGEKKNHPGAQYANRLSPRVGRFINAAGTTGFPTGKRAVSATQLMDFADFGTTIKQDFRLLGQTSVDRLLQLSQGQAVKGNQLLPVSLVKRKTTLAPNTQTASPRALADSLMQLARQVSRLESGQDFADFGTTIKQDFRLLGQTSVDRLLQLSQGQAVKGNQLLPVSLVKRKTTLAPNTQTASPRALADSLMQLARQVSRLESGQDFADFGTTIKQDFRLLGQTSVDRLLQLSQGQAVKGNQLLPVSLVKRKTTLAPNTQTASPRALADSLMQLARQVSRLESGQDFADFGTTIKQDFRLLGQTSVDRLLQLSQGQAVKGNQLLPVSLVKRKTTLAPNTQTASPRALADSLMQLARQVSRLESGQDFADFGTTIKQDFRLLGQTSVDRLLQLSQGQAVKGNQLLPVSLVKRKTTLAPNTQTASPRALADSLMQLARQVSRLESGQDFADFGTPHQTGFSPAGANQRGPLAATLSGPGGEGQSAVARLTGEKKNHPGAQYANRLSPRVGRFINAAGTTGFPTGKRAVSATQLMDFADFGTTIKQDFRLLGQTSVDRLLQLSQGQAVKGNQLLPVSLVKRKTTLAPNTQTASPRALADSLMQLARQETAMTMITNSSSVPLHAFPIPVTGNLGILMVQVVGHRLDRRFFALDGWSPRSLIVDSCPKLEQHSTLSRAILLIYKGFCRFRNHHQTGFSPAGANQRGPLAATLSGPGGEGQSAVARLTGEKKNHPGAQYANRLSPRVGRFINAAGTTGFPTGKRAPLEGRWDQAPQSSALHTSPQAEGAGSGLGQPREGLPQCSSGLKDSSSVARVDTETEEAPRSIREDRNGRSQKTVHTEGDMNMNIKKIVKQATVLTFTTALLAGGATQAFAKENNQKAYKETYGVSHITRHDMLQIPKQQQNEKYQVPQFDQSTIKNIESAKGLDVWDSWPLQNADGTVAEYNGYHVVFALAGKPEDADDTSIYMFYQKGPGGEGQSAVARLTGEKKNHPGAQYANRLSPRVGRFINAAGTTGFPTGKRATPAFGRRVSGVIEIADGSRRRKAAALTESDYRVLVGELDDEQMAALSRLGNDNRPTSAYERGQRYASRLQNEFAGNISALADAENISRKIITRCINTARWPKSVVALFSHPGELSARSGDALQKAFTDKEELLKQQASNLHEQKKAGVIFEAEEVITLLTSVLKTSSASRTSLSSRHQFAPGATVFDKGNERVLNLGKVLVFQLECLEKNRETCRASCINESANARGEGGLRIGRQEGSTLVTVTTEVYGHELENELLPLDVQKEPFKHRVQDSNPVVFRGGEGALQVLPPLVDVISEARLNLVIYYPSQGSCSKVHFHLPYRWQMLIGKTWTDFEHMETIEKGYCNPGIHLGSPALSEPQLCEVLQVAGPDRFVVLETGGEAGITRSVVATTRARVCRRKYCQRPCDNLHLCKLNLLGRCNYSQSERELQQAVHAGLPQQAKILFDGWVPKSAKSLINQKNSPR

SEQ ID NO: 36047 - protein, 215 aa, Homo sapiens
WDFADFGTTIKQDFRLLGQTSVDRLLQLSQGQAVKGNQLLPVSLVKRKTTLAPNTQTASPRALADSLMQLARQVSRLESGQECHFLAADYQAQLFGSLEWSTFTAMRALRVTVDSCSKLEQHSTLSRAILLIYKGFCRFRNHHQTGFSPAGANQRGPLAATLSGPGGEGQSAVARLTGEKKNHPGAQYANRLSPRVGRFIKCSWHDRYSRLESGQ

SEQ ID NO: 36048 - protein, 997 aa, Homo sapiens
  DOMAIN (72)..(124): Receptor tyrosine kinase class V proteins domain identified by eMATRIX, accession number BL00790B, p-value=1.000e-40, raw score of 21.59
  DOMAIN (41)..(215): Ephrin receptor ligand binding domain identified by PFam, accession name EPH_lbd, E-value=1e-145, PFam score of 497.5
KRQEQRWHRRTMAGIFYFALFSCLFGICDAVTGSRVYPANEVTLLDSRSVQGELGWIASPLEGGWEEVSIMDEKNTPIRTYQVCNVMEPSQNNWLRTDWITREGAQRVYIEIKFTLRDCNSLPGVMGTCKETFNLYYYESDNDKERFIRENQFVKIDTIAADESFTQVDIGDRIMKLNTEIRDVGPLSKKGFYLAFQDVGACIALVSVRVFYKKCPLTVRNLAQFPDTITGADTSSLVEVRGSCVNNSEEKDVPKMYCGADGEWLVPIGNCLCNAGHEERSGECQACKIGYYKALSTDATCAKCPPHSYSVWEGATSCTCDRGFFRADNDAASMPCTRPPSAPLNLISNVNETSVNLEWSSPQNTGGRQDISYNVVCKKCGAGDPSKCRPCGSGVHYTPQQNGLKTTKVSITDLLAHTNYTFEIWAVNGVSKYNPNPDQSVSVTVTTNQAAPSSIALVQAKEVTRYSVALAWLEPDRPNGVILEYEVKYYEKDQNERSYRIVRTAARNTDIKGLNPLTSYVFHVRARTAAGYGDFSEPLEVTTNTVPSRIIGDGANSTVLLVSVSGSVVLVVILIAAFVISRRRSKYSKAKQEADEEKHLNQGVRTYVDPFTYEDPNQAVREFAKEIDASCIKIEKVIGVGEFGEVCSGRLKVPGKREICVAIKTLKAGYTDKQRRDFLSEASIMGQFDHPNIIHLEGVVTKCKPVMIITEYMENGSLDAFLRKNDGRFTVIQLVGMLRGIGSGMKYLSDMSYVHRDLAARNILVNSNLVCKVSDFGMSRVLEDDPEAAYTTRGGKIPIRWTAPEAIAYRKFTSASDVWSYGIVMWEVMSYGERPYWDMSNQDVIKAIEEGYRLPPPMDCPIALHQLMLDCWQKERSDRPKFGQIVNMLDKLIRNPNSLKRTGTESSRPNTALLDPSSPEFSAVVSVGDWLQAIKMDRYKDNFTAAGYTTLEAVVHVNQEDLARIGITAITHQNKILSSVQAMRTQMQQMHGRMVPV

SEQ ID NO: 36049 - protein, 41 aa, Homo sapiens
SFPVPSRIIGDGANSTVLLVSVSGSVVLVVILIAAFVISRR

SEQ ID NO: 36050 - protein, 320 aa, Homo sapiens
  DOMAIN (146)..(191): kw TRANSCRIPTASE REVERSE II ORF2 domain identified by eMATRIX, accession number DM01354N, p-value=4.420e-40, raw score of 13.17
MGKDFMTKTPTPMATKAKIDKWDLNKLKSFCTAKDTIVRVNRQPIEWEKIFAIYPSDKRLIATIYKELKQTYKKKINNLIKKQTGCGADLQQTPADLQQTGLSVRKKTDKQKGIASTSTKRTSTQKPHPKITNMKTKEIQTTIKEYYEHLYTNKLENLQEMDKFLDTYTFPGLNQEEVQSLNRPITSSEIEAVINSLPTKKSPGPDRFTAEFYQRDMDEAGNHHSQQTNTGTENQTLHILTHKWELNNENTWTQGGEYHTPGPVRVWGNRGGIALGEIPNECSSSPATDQSWMENDFDELKEEGFRRLVITNFSELKEDV

SEQ ID NO: 36051 - protein, 82 aa, Homo sapiens
  misc_feature (1)...(82): Xaa = X or * as defined in Table 2
NKRGYKQMEEHSMLMGRKNQYRKNGHTAQGNLXIQCHPHQATNDFLHRIGKNDFQVHMEPKKSPHRQVNPKPKEQSWRHHAT

SEQ ID NO: 36052 - protein, 201 aa, Homo sapiens
  misc_feature (1)...(201): Xaa = X or * as defined in Table 2
PDQVDRGGAHWQTDADDPWLADHLQHCQRCGEILRHYSGGIRGNVSAVKCAEHHVPAFARLRNPQCGDFQRLDYRLFDSPGVKRRELXTAYRFCHVAPXLMDLRSGWAAGAVYRYQSHXFTADRLRSVDMDEAGNHHSQQTSQDQKIKQRTFSLISGSXTTRTHGHREGNITHRGLSRPNTARILCASKAHLGLPLRSSLP

SEQ ID NO: 36053 - protein, 71 aa, Homo sapiens
NKRGHIQMEKHSMLMDRKNQYHEYGHTAQSNLWIQCYPHQATIDFLHRIRKNYFKVHTEPKKSPYSQDNPK

SEQ ID NO: 36054 - protein, 660 aa, Homo sapiens
MGDGTSDFDPIGDIGIRQSNYSCGGCPRIPYVWRVTGRAHGTQTIVVFMAKVYYGNVMRREKDSGGAWGNPWAGILLPPPSTRNCTVHSSFSNENIFPQHTSSCVVVHNQYIGADFPWSNFSFVVEYNYVEDSCWTKHCKELNIPYMAFKVILPDTVLERSTLLDRFGGFLLEIQIPYVFFASEGLLNTPDILQLLESKDMDEAGNHHSEQTVTRTENQTLHVLTHRWELNNENTWTQDGEHHTPGPVVGWRELIIAPGVEATALIIRQIADHSLMTSKRDPHEWLDKSWLKVSPSEENRNQISTLSSQSSASDLDSVIQEHNEYYQYLGLGETVQEDKTTILNDNSSIMELKEISSFLPPVTSYNQTSYWKDSSCKSNIGQNTPFLINIESRRPAYNSFLNHSDSESDVFSLGLTQMNCETIKSPTDTQKRVSVVPRFINSQKRRTHEAKGFINKDVSDPIFSLEGTQSPLHWNFKKNIWEQENHPFNLQYGAQQTACNKLYSQKGNLFTDQQKCLSDESEGLTCESSKDETFWRELPSVPSLDLFRASDSNANQKEFNSLYFYQRAGKSLGQKRHHESSFNSGDKESLTEEKTEAQEKMTTEDRGRGWGYATTNRRMPRIAGNHQEPGERRGTPPPSEAPEGSNPANTLILDFPPPEL

SEQ ID NO: 36055 - protein, 195 aa, Homo sapiens
  DOMAIN (125)..(145): RECOVERIN FAMILY SIGNATURE domain identified by eMATRIX, accession number PR00450D, p-value=5.014e-10, raw score of 16.58
  DOMAIN (133)..(161): EF hand domain identified by PFam, accession name efhand, E- value=0.012, PFam score of 22.2
MARHYLGIVEIDKDDVTSKVTQMEGTPFILQRSLTTTLFYHVTRKKRTKSEEIQKKKGIEEVQWDMDEAGNHHSQQTNTGTENQTPHVLTHKWELNNENTWTQGGACRRDGFVDFLEFIAAVNLIMQEKMEQKLKWYFKLYDADGNGSIDKNELLDMFMILRNSKRERDQLESRCMIHAYRIAGERVYTSQAREH

SEQ ID NO: 36056 - protein, 199 aa, Homo sapiens
MDENLPSELKANPTQTSYMPSIKSYRGAGQLKIAQESGVSVQGHWSMKREGFQKLERTHKNFQMKFSRWGIAVGKLNEQHDCHKEEAVTGTSCMKELKDKSYRRIQQHRDMDEAGNHHSQQTIRRTENRTLHALTHKWELNNENTWTQEDPSTPVNSTATNRIQVTSSGLWQKASSVSPLLPVPTLPWSRFHIIAQGIF

SEQ ID NO: 36057 - protein, 239 aa, Homo sapiens
  misc_feature (1)...(239): Xaa = X or * as defined in Table 2
MTSYNEQNKKPVTDPNEMAIHEDSNQEFKIAVVNETQRSPRSSPTEHLMTPPPLPTREQQPPLTVIFHYLPKSYKTAPPLSPFPDSLFGLSQPAPRDMDEAGNHHSQQTKQEQKTKHCMFSLTSGSXTMRTHGHREGTVIHRGLLGQFSQQLINKSEFSNTVCREKSGRVLQVNMESPLXMIQDALQDQTTPKGPITVFLXLFYLDHLLRSSHKVASYLSTESRSRGSITVLFIRCSEP

SEQ ID NO: 36058 - protein, 93 aa, Homo sapiens
  misc_feature (1)...(93): Xaa = X or * as defined in Table 2
DRNRKANTACFQHSQVGVEQXEHMDTGKVXSIXYGNYEHTSTCERMEIQKATTEHLNLXSXSGSFLRFTWKMLQFSKISRSFYQVLKHQQKIM

SEQ ID NO: 36059 - protein, 387 aa, Homo sapiens
  DOMAIN (87)..(161): Fibronectin type III domain identified by PFam, accession name fn3, E-value=0.0011, PFam score of 25.7
  misc_feature (1)...(387): Xaa = X or * as defined in Table 2
RSPTLLMHVHYIKVISWRELLLIWLRAANASINPGVEQSPSGDPKTVTGFPFLRLEAADWVEEASVPKGVHIALSSQEQRAGDPRDLEAPSNLVISERTHRSFRVSWTPPSDSVDRYKVEYYPVSGGKRQEVVRTPGVPDLRLPAIIPQAAWLLAHLPAPSAPPTELPTKHTEAQSQRCWSLLLCSVTEVAAPSQVVKEAPPSFHTGTENGYQGEESLFNKAYYGGGTNFFRKESQKLQQSAKKRDAELANGALGIIELNNDYTLKKVMKPLITSNTVTDEIERANVFKMNGKWYLFTDSRGSKMTIDENKIPRNPTYKGREGPLQGELQTTAQGNKRGYKQMEEHSMLMDRKNQYRENGLTAQAPQPPPSGIXGYTAPCFPWENLI

SEQ ID NO: 36060 - protein, 290 aa, Homo sapiens
MDEAGNHHSQQTITRTENQTMHVLTHKWELNNENVWTQVYKESSPHKAAAAQGAGKKKGFVNYYGPQRFGKGRKVHTDQIGLALLKNEMDAKGTLSLMPEFKVRERALLEALHRFGMTEEGCIQAWFSLPHSMRIFYVHAYTSKIWNEAVSYRLETYGARVVQGDLVCLDEDIDDENFPNSKVVLPVLGYNIQYPKNKVGQWYHDILSRDGLQTCRFKVPTLKLNIPGCYRQILKHPCNLSYQLMEDHDIDVKTKGSHIDETALSLLISFDLDASCYATVCLKEIMKHDV

SEQ ID NO: 36061 - protein, 148 aa, Homo sapiens
QACYIYTTEYYAAIKNDEFTVLCRDMDEAGNHHSQQTVTRTKNQTPHVLTHRWELNNENTWTQEGEHHTPGPVMLDSAPPTLGHQTPGSSAFGLWDLHQRLRLPRPQTKGSTVGFPGSEAFKLGLGHYWLSFFPSLQTAYRGTLPFNH

SEQ ID NO: 36062 - protein, 651 aa, Homo sapiens
MKLEAIILSKLTQEQKNQTLHVLTHRWELNNENTWTQGGEYHTLGPVDGFQKKEEAAIGAILQPLLVIQTVLGVDLQQTLADLQQRGLLEEKLTNRKKIAHTVRDHIQREHNSSPAREQNWMENTFDELTQVGFRRWVINSSELKEHDLTQCKKGTWMMLETIIFSKLTQEQKNQTLHVLTHKWELNNENTWTQGGEHHTLGPVWRMFQIYVVAERMLDKIPSLAFGLLDLRQWFARGCWSFGHRLKAARITAPRLAREQNWMENEFDKLTEVVFRRWVITKSKLKEHALTQCKEDKNLEKKELATQQKMSSRTASEASSVFTATPHCYHYYLSSASYHISGSIRFPVLEKIRLHMGLENKCKVLLSGGSSSQQMYGDLEGGWNGKVVFPWSWAVQEPASPPTTLGQISLTVCCSTVNGLPASVDVFFCREALPRNLQKFPAKDLGCILLQYIDNLLLGYSTAVGCARRMDALLRHLEDCGYKVSKKKAQICRQQTEGEQTIRERWIKLSDGRIAVPQLLGAAVVLAVHKTIHLGQESLEKLLGQYFYISHLPALAKTVAQQCVTCQQRHAKQGPSVPPGIQAYRVASFENLQVDFTEMPKCGDQGLERGSTVALVEGTPDHYPDHSHSYKGRRNPKLDSHSCVKPATAKT

SEQ ID NO: 36063 - protein, 290 aa, Homo sapiens
KRYRDAVEEKLAKLQKHNSELETQKEQIQLKLQEKTEELKEKMDNLTKQLFDDVQKEERQRMLLEKSFELKTQDYEKQIQSLKEEIKALKDEKMQLQHLVEGEHVTSDGLKAEVARLSKQVKTISEFEKEIELLQAQKIDVEKHVQSQKREMREKMSEITKQLLESYDIEDVRSRLSVEDLEHLNEDGELWFAYEGLKKATRVLESHFQSQKDCYEKEIEALNFKVVHLSQEINHLQKLFREENDINESIRHEVTRLTSENMMIPDFKQQIPELEKQKQDLEIRLNEQAE

SEQ ID NO: 36064 - protein, 159 aa, Homo sapiens
  misc_feature (1)...(159): Xaa = X or * as defined in Table 2
SKLNSGDGCWSGARRGSAHSRSPLPSPLRPRAKMATEGLHENETLASLKSEAESLKGKLEEERAKLHDVELHQVAERVVGPGAVCHEDQKDPQRPREQSPVHGLVQRXEEDRELVTGWEGDRVGFLHHKQGARGHHALHVGDGMCLCPIGMCHCLWWFG

SEQ ID NO: 36065 - protein, 128 aa, Homo sapiens
  misc_feature (1)...(128): Xaa = X or * as defined in Table 2
AKMATEGLHENETLASLKSEAESLKGKLEEERAKLHDVELHQVAERVVGPGAVCHEDQKDPQRPREQSPVHGLVQRXEEDRELVTGWEGDRVGFLHHKQDPDSERRWHMCPVGRGERAAAAELPRTWG

SEQ ID NO: 36066 - protein, 525 aa, Homo sapiens
  DOMAIN (25)..(110): Myosin head (motor domain) domain identified by PFam, accession name myosin_head, E-value=8.6e-34, PFam score of 118.5
MQKQYLGPDMLSCGAFLCYLVSSSQQHGRFDSKRIVQQLRACGVLETIRISAQSYPSRWTYIEFYSRYGILMTKQELSFSDKKEVCKVVLHRLIQDSNQYQFGKTKIFFRAGQVAYLEKLRLDKLRQSCVMVQKHMRGWLQRKKFLRERRAALIIQQYFRGQQTVRYVGIKEHMWNCGAFCADHLRRGGLIKDKGPFSCDPGCRRAWVPFVVVSIRARKTISEFEKEIELLQAQKIDVEKHVQSQKRQMREKMSEITKQLLESYDIEDVRSRLSVEDLEHLNEDGELWFAYEGLKKATRVLESHFQSQKDCYEKEIEALNFKVVHLSQEINHLQKLFREENDINESIRHEVTRLTSENMAQPPSLARSAAPAWPRPLLPMAVAELYTQMLEEHKAVILQKYARAWLARRRFQSIRRFVLNIQLTYRVQRLQKKLEDQGARNRGFESSELADRATETQRSTRLGVRVPGSGLCYLTGCDKKAMVWDMRSGQCVQAFETHESDINSVRSVSRMFMPPLCSAGIAWLG

SEQ ID NO: 36067 - protein, 163 aa, Homo sapiens
VSLFPCRREPGAPRGPPAPLSLPLPAGSQTHRSSRERAALPAPAPGLCPCSPGYHRRDTAGLRKYLRGEKGETGLLGRNMGPDGSGSEPASLVAPNSPSFLFTCHGRRWGTEGLLVKSQEGRFNRGSIWALRINKRLKIPASWELATERVDWFQYSCLKKKKK

SEQ ID NO: 36068 - protein, 464 aa, Homo sapiens
  DOMAIN (278)..(318): kw TRANSCRIPTASE REVERSE II ORF2 domain identified by eMATRIX, accession number DM01354Y, p-value=9.357e-39, raw score of 10.69
MNWSGLLTHGLAEAAMKHANQQSLLPGLSQQLRDSPPQTSPSVGTGATDTKKKKINNGTNPETTTSGGCHSPEDVSLGWPGSWRQRAQGVVEVSSAEKWGGGKWSKVLGTSKSDEGEALRVSRTPERQDRPKVWFGVIFIRHGLYQDGVFKFTVYIPDNYPDGDCPRIKYLGIQLTRDMKDLFKENYKPLLNEIKEDTNKRKNIPCSWVGRINIVKMAILPIVIYRFNAIPIKLPMTFFTELEKITLKFIWNQKRACIAKTILSQKNKAGGIMLPDFKLYYKDTVTKTAWYLYQNRDIDQWNRTEPTEITPHIYNYLIFDKPDKNKKWGKDSLFNKWCRENWLAICRTLKLDPFLTTFTKINSRWIKDLHVRPKTIKTLEENLGNTIQDIGMGKDFVTTTLKAMATKAKIDKWDLIKLKSYCMAKETTIRVNRQPTEWEKIFAIYSSDKGLISRIYKELKQIYN

SEQ ID NO: 36069 - protein, 520 aa, Homo sapiens
  DOMAIN (111)..(152): kw TRANSCRIPTASE REVERSE II ORF2 domain identified by eMATRIX, accession number DM01354I, p-value=1.000e-40, raw score of 15.55
MRLNMKNSKTAEPLEENVNENISETGLSREVYFAKVKDVPVTQPQEILMTFTHGVPHHTYSKIDHIVGSKALLSKCKRTEIITNYLSDHSAIKLELRIKKLTENRPTTWKLNNLLLNDYWVHNEMKAEIKTFFETNENKDTTYQNLWDTFKAGHKPPNTAGPVLMKVPRWLQTRLVVAKPGHLLPPLADHTLSRSYARKDQLAACQKVFPSFSKQQFESYIEHSITTEHLVRDANFLRMRRNTTASAKSPGGHRADLTNPPPEQELEDGLQNPPQPTWGLPEPIPFHLPFKLEGKGSQRRCFWLLETNTHASKSQYVPGSTMRLIKTKSGNQWCLQKPVFMIHIFQGRNGKQMLLGDRDDMEVNSSSKCDCGVTACATPGPLELPKTVVSLSAPMEATGEKSEKYESKSCVATWASQGLLLGGNEKQRLQMLTSSVLGKAVDLSAREIIPDAGTIGVGFLLPPGGDGGHRMQTFLFVCTSSASCQVENEESVRVLGSEPCRFSGFMDGLAQLGSNGVSHT

SEQ ID NO: 36070 - protein, 107 aa, Homo sapiens
ISCIVKAGCDWRDCHSHCACSPPPSSRLSSFPPCGVRWPGNEPSQQKNLHLECRSSQGAAASLPRPRAGPAPPWPSGDLSCPAGPNSTAQRRLRVPRPGPLAPSRPR

SEQ ID NO: 36071 - protein, 67 aa, Homo sapiens
MIHTASLVHDDVIDGASPRKRENTQFNKDLGVEKKAVPCWRFNSFCSIYSSGTNWKYNCYIYFNPSY

SEQ ID NO: 36072 - protein, 285 aa, Homo sapiens
  DOMAIN (141)..(156): Polyprenyl synthetases proteins domain identified by eMATRIX, accession number BL00723B, p-value=1.882e-10, raw score of 14.35
  DOMAIN (81)..(285): Polyprenyl synthetases domain identified by PFam, accession name polyprenyl_synt, E-value=1.1e-07, PFam score of 6.9
MPAQAHRQKGLDLSQIPYFNLVKHLTPACPNVYSISQFHHTTPYSKTHSGEKYTDPFKLGWRDLKGLYEGIRKEPLISTTELKEISEYYFDVKGKAFRPIIVVLMARACNIHHNNSRHVQASQRAIALIAEMIHTASLVHDDVIDDASSRRGKHTVNKIWGEKKAVLAGDLILSAASIALARIGNTTVISILTQVIEDLVRGEFLQLGSKENENERFAHYLEKTFKKTASLIANSCKAVHRRKGLDLSQLCPLSGSRNDDTQYSNSGFLTPFSTKRNVGSLENSE

SEQ ID NO: 36073 - protein, 112 aa, Homo sapiens
  DOMAIN (43)..(64): FATTY ACID DESATURASE FAMILY 1 SIGNATURE domain identified by eMATRIX, accession number PR00075A, p-value=3.903e-09, raw score of 16.97
  misc_feature (1)...(112): Xaa = X or * as defined in Table 2
MISLNVQQVHGMFGYQFTIYDSSFLTNSFLLYETHSFALKRHWTVVSLMATIHAILAYAFALAGKREASGNLYSKPWINLPPNLNNGIYWERERKPKTEEFPSFIPWXLLLS

SEQ ID NO: 36074 - protein, 1200 aa, Homo sapiens
  DOMAIN (774)..(806): Alpha-2-macroglobulin family thiolester region proteins domain identified by eMATRIX, accession number BL00477G, p-value= 2.650e-17, raw score of 19.43
  DOMAIN (30)..(485): Alpha-2-macroglobulin family N-terminal regi domain identified by PFam, accession name A2M_N, E-value=6.9e-95, PFam score of 323.7
MPRPASARTRCAHPLTCAHCPALPSEMNPDPQNNRIFQRQNVTSFRNITQLSFQLISEPMFGDYWIVVKRNSRETVTHQFAVKRYVLPKFEVTVNAPQTVTISDDEFQVDVCAKYNFGQPVQGETQIRVCREYFSSSNCEKNENEICEQFIAQLENGCVSQIVNTKVFQLYRSGLFMTFHVAVIVTESGTVMQISEKTSVFITQLLGTVNFENMDTFYRRGISYFGTLKFSDPNNVPMVNKLLQLELNDEFIGNYTTDENGEAQFSIDTSDIFDPEFNLKATYVRPESCYLPSWLTPQYLDAHFLVSRFYSRTNSFLKIVPEPKQLECNQQKVVTVHYSLNSEAYEDDSNVKFFYLMMVKGAILLSGQKEIRNKAWNGNFSFPISISADLAPAAVLFVYTLHPSGEIVADSVRFQVDKCFKHKVNIKFSNEQGLPGSNASLCLQAAPVLFCALRAVDRNVLLLKSEQQLSAESVYNMVPSIEPYGYFYHGLNLDDGKEDPCIPQRDMFYNGLYYTPVSNYGDGDIYNIVRNMGLKVFTNLHYRKPEVCVMERRLPLPKPLYLETENYGPMRSVPSRIASSGIRGENADYVEQAIIQTVRTNFPETWMWDLVSVDSSGSANLSFLIPDTITQWEASGFCVNGDVGFGISSTTTLEVSQPFFIEIASPFSVVQNEQFDLIVNVFSYRNTCVEISVQVEESQNYEANIHTLKINGSEVIQAGGRKTNVWTIIPKKLGAKASKQGVLDLPNDVVEGSARGFFTVVGDILGLALQNLVVLQMPYGSGEQNAALLASDTYVLDYLKSTEQLTEEVQSKAFFLLSNAALDSGVTNGYNHAILAYAFALAGKEKQVESLLQTLDQSAPKLNNVIYWERERKPKTEEFPSFIPWAPSAQTEKSCYVLLAVISRKIPDLTYASKIVQWLAQRMNSHGGFSSNQAPVDCKRPAFFVIPAAFGPLSDSKSQDQNTVTFSSEGSSEIFQVNGHNRLLVQRSEVTQAPGEYTVDVEGHGCTFIQATLKYNVLLPKKASGFSLSLEIVKNYSSTAFDLTVTLKYTGIRNKSSMVVIDVKMLSGFTPTMSSIEEGFGRADSFPFSVEQSNLVFNIQPAPAMVYDYYEKGLIQRCPSRWSKGIACAEDRPGRPMLASLLTSMAMAQEAFRSSCSGGSAWKLGQAVRERLPEPSVCHPRGTGWALGTCSLPLPELKPE

SEQ ID NO: 36075 - protein, 1379 aa, Homo sapiens
  DOMAIN (153)..(195): Chloramphenicol acetyltransferase proteins domain identified by eMATRIX, accession number BL00100C, p-value=1.000e-39, raw score of 23.60
  DOMAIN (110)..(283): Chloramphenicol acetyltransferase domain identified by PFam, accession name CAT, E-value=2.8e-132, PFam score of 452.9
MDQQAIYAELNLPTDSGPESSSPSSLPRGMERRKKERKKEKKERKKERKKERKKERKEERKKERKERERKEERKKGEKEKERERKERKERKREGGRKEGWKEGRKNILHTVQLDITAFLKTVKKNKHKFYPAFIHILARLMNAHPEFRMAMKDGELVIWDSVHPCYTVFHEQTETFSSLWSEYHDDFRQFLHIYSQDVACYGENLAYFPKGFIENMFFVSANPWVSFTSFDLNVANMDNFFAPVFTMGKYYTQGDKVLMPLAIQVHHAVCDGFHVGRMLNELQQYCDEWQGGAYNFGQPVQGETQIRVCREYFSSSNCEKNENEICEQFIAQLENGCVSQIVNTKVFQLYRSGLFMTFHVAVIVTESGTVMQISEKTSVFITQLLGTVNFENMDTFYRRGISYFGTLKFSDPNNVPMVNKLLQLELNDEFIGNYTTDENGEAQFSIDTSDIFDPEFNLKATYVRPESCYLPSWLTPQYLDAHFLVSRFYSRTNSFLKIVPEPKQLECNQQKVVTVHYSLNSEAYEDDSNVKFFYLMMVKGAILLSGQKEIRNKAWNGNFSFPISISADLAPAAVLFVYTLHPSGEIVADSVRFQVDKCFKHKVNIKFSNEQGLPGSNASLCLQAAPVLFCALRAVDRNVLLLKSEQQLSAESVYNMVPSIEPYGYFYHGLNLDDGKEDPCIPQRDMFYNGLYYTPVSNYGDGDIYNIVRNMGLKVFTNLHYRKPEVCVMERRLPLPKPLYLETENYGPMRSVPSRIASSGIRGENADYVEQAIIQTVRTNFPETWMWDLVSVDSSGSANLSFLIPDTITQWEASGFCVNGDVGFGISSTTTLEVSQPFFMEIASPFPVVQNEQFDLIVNVFSYRNTCVEISVQVEESQNYEANIHTLKINGSEVIQAGGRKTNVWTIIPKKLGAKASKQGVLDLPNDVVEGSARGFFTVVGDILGLALQNLVVLQMPYGSGEQNAALLASDTYVLDYLKSTEQLTEEVQSKAFFLLSNAALDSGVTNGYNHAILAYAFALAGKEKQVESLLQTLDQSAPKLNNVIYWERERKPKTEEFPSFIPWAPSAQTEKSCYVLLAVISRKIPDLTYASKIVQWLAQRMNSHGGFSSNQAPVDCKRPAFFVIPAAFGPLSDSKSQLKFSDPNNVPMVNKLLQLELNDEFIGNYTTDENGEAQFSIDTSDIFDPEFNLKISQPQLCLERVKNEGYLFCDVTGLPTSVPTRKTAACVIKNLKAMLSIMCYLTLVFPASFTQNANSSETQESASFNKCQAPCMKSNNALIVILGTVTLDAVGIGLVMPVLPGLLRDIVHSDSIASHYGVLLALYALMQFLCAPVLGALSDRFGRRPVLLASLLGATIDYAIMATTPVLWIYPLVNSPSC

SEQ ID NO: 36076 - protein, 451 aa, Homo sapiens
  DOMAIN (195)..(227): Alpha-2-macroglobulin family thiolester region proteins domain identified by eMATRIX, accession number BL00477G, p-value= 3.286e-16, raw score of 19.43
  DOMAIN (12)..(425): Alpha-2-macroglobulin family domain identified by PFam, accession name A2M, E-value=5.8e-83, PFam score of 276.8
SGIRGENADYVEQAIIQTVRTNFPETWMWDLVSVDSSGSANLSFLIPDTITQWEASGFCVNGDVGFGISSTTTLEVSQPFFIEIASPFSVVQNEQFDLIVNAFSYLNTCVEISVQVEESQNYEANINTWKINGSEVIQAGGRKTNIWTIIPKKLGAKASKQGVLDLPNDVVEGSARGFFTVVGDILGLAMQNLVVLQMPYGGGEQNAALLASDTYVLDYLKSTEQLTEEVQSKAFFLLSNGYQRQLSFKNSDGSYSVFWQQNQKGSIWLSALTFKTLERMKKFVFIDENVQKQTLIWLSSQQKTSGCFKNDGQLFNHAWEFPALRNALFCLEAALDSGVTNGYNHAILAYAFALAGKEKQVESLLQTLDQSATKLNNVIYWERERKPKTEEFPSFIPWAPSAQTEKSCYVLLAVISRKIPDLTYASSGRLQTTCFLCDPGLHSDPCRTVNP

SEQ ID NO: 36077 - protein, 63 aa, Homo sapiens
KRRLLCVEFASVASCDAAVAQCFLAENDWEMEVRFRCPRFRLHYLGRWSAQTSSLVPLFFRGL

SEQ ID NO: 36078 - protein, 88 aa, Homo sapiens
FLDFKVAFRGCVSLLPLLLGSTELPVPREVLGKGVLGEKEDGSLLALRVRNESSASESTEVFPNPETEVVYPVVELLLAHFSKLPYFA

SEQ ID NO: 36079 - protein, 590 aa, Homo sapiens
MRKITGGVGFRERSVKVRATEIPTRYPKEALHVAGVEMQLTAAMSFLTILQDESVSIHAYTHSFLQVILLHLEHRDTGVSNAWLETLLSVIEVLPKETLRHEILNPLVSKAQLSQTVQSRLVSCKILGKLTNKFDAHTIKREILPLVKSLCQDVEYEVRSCMCRQLENIAQGIGTELTKSVVLPELIELSRDEGSSVRLAAFETLVNLLDIFDTGIFTPDQHLRFLEFYKKLCTLGLQQENGHNENQIPPQILEQEKKYISVRKNCAYNFPAMIVFVDPKNFHMELYSTFFCLCHDPEVPVRYTIAICFYEVLDALIDHLPEILELMSTGGESSVQENKLSSLPDLIPALTAAEQRAAASLKWRTHEKLLQKYACLPHVISSDQIYYRFLQRMFTIMMTNNVLPVQKAASRTLCIFLRYNRKQEQRHEVIQKLIELKSTLKIPADKHLLQQLEMCVRKLLCQEKDKDVLAIVKREQLEKEKQQNDGRPMSDKMFEKKRKEIKKSKLIRSQSFNNQAFHAKYGNLEKCAREQQLTSLAGVWNDSFRTRNASSVPSSFSPNTPLPSTSRGTGNSVDPKSSGSKDTQPRKATL

SEQ ID NO: 36080 - protein, 81 aa, Homo sapiens
  misc_feature (1)...(81): Xaa = X or * as defined in Table 2
RKNRKPNTAFLTHKWELNNENTWTQGGNITHQGCWGVQGXRRDSIRRNTXCKCRVPGCSKPPWHVYTYVTNLHILHMYPRT

SEQ ID NO: 36081 - protein, 1030 aa, Homo sapiens
  DOMAIN (77)..(132): Domain present in ZO-1 and Unc5-like netrin receptors domain identified by eMATRIX, accession number PF00791B, p-value=7.443e- 14, raw score of 28.49
  DOMAIN (39)..(263): Ank repeat domain identified by PFam, accession name ank, E- value=9.3e-37, PFam score of 135.5
MKMADAKQKRNEQLKRWIGSETDLEPPVVKRQKTKVKFDDGAVFLAACSSGDTDEVLKLLHRGADINYANVDGLTALHQACIDDNVDMVKFLVENGANINQPDNEGWIPLHAAASCGYLDIAEFLIGQGAHVGAVNSEGDTPLDIAEEEAMEELLQNEVNRQGVDIEAARKEEERIMLRDARQWLNSGHINDVRHAKSGGTALHVAAAKGYTEVLKLLIQAGYDVNIKDYDGWTPLHAAAHWGKEEACRILVDNLCDMEMVNKVGQTAFDVADEDILGYLEELQKKQNLLHSEKRDKKSPLIESTANMDNNQSQKTFKNKETLIIEPEKNASRIESLEQEKVDEEEEGKKDESSCSSEEDEEDDSESEAETDKTKPLASVTNANTSSTQAAPVAVTTPTVSSGQATPTSPIKKFPTTATKISPKEEERKDESPATWRLGLRKTGSYGALAEITASKEGQKEKDTAGVTRSASSPRLSSSLDNKEKEKDSKGTRLAYVAPTIPRRLASTSDIEEKENRDSSSLRTSSSYTRRKWEDDLKKNSSVNEGSTYHKSCSFGRRQDDLISSSVPSTTSTPTVTSAAGLQKSLLSSTSTTTKITTGSSSAGTQSSTSNRLWAEDSTEKEKDSVPTAVTIPVAPTVVNAAASTTTLTTTTAGTVSSTTEVRERRRSYLTPVRDEESESQRKARSRQARQSRRSTQGVTLTDLQEAEKTIGRSRSTRTREQENEEKEKEEKEKQDKEKQEEKKESETSREDEYKQKYSRTYDETYQRYRPVSTSSSTTPSSSLSTMSSSLYASSQLNRPNSLVGITSAYSRGITKENEREGEKREEEKEGEDKSQPKSIRERRRPREKRRSTGVSFWTQDSDENEQEQQSDTEEGSNKKETQTDSISRYETSSTSAGDRYDSLLGRSGSYSYLEERKPYSSRLEKDDSTDFKKLYEQILAENEKLKAQLHDTNMELTDLKLQLEKATQRQERFADRSLLEMEKRERRALERRISEMEEELKMLPDLKADNQRLKDENGALIRVISKLSK

SEQ ID NO: 36082 - protein, 196 aa, Homo sapiens
  DOMAIN (64)..(173): Laminin G domain identified by PFam, accession name laminin_G, E-value=2e-35, PFam score of 128.2
FTVTRCYAVAQEGTYFDGSGYAALVKEGYKVQSDVNITLEVSNPRRNGVFLGISTAIVHAIGLELVDGKVLFHVNNGAGRITAAYEPKTATVLCDGKWHTLQANKSKHRITLIVDGNAVGAESPHTQSTSVDTNNPIYVGGYPAGVKQKCLRSQTSFRGCLRKLALIKSPQVQSFDFSRAFELHGVFLHSCPGTES

SEQ ID NO: 36083 - protein, 133 aa, Homo sapiens
LLPAQTDAFFPSALPDSRFFRFGLCDLHHKTPEGLSDFRSQTWGCFQNEPSYGFLWSSACRFPYAQRAPWSSSALSQDKQGTPYSPASEESPAAAHLPLAPWVCSSVDHADLCGLCLPSCDRRVKNKLFRQTE

SEQ ID NO: 36084 - protein, 221 aa, Homo sapiens
  DOMAIN (109)..(138): TYPE III EGF-LIKE SIGNATURE domain identified by eMATRIX, accession number PR00011C, p-value=5.979e-14, raw score of 24.25
  DOMAIN (92)..(138): Laminin EGF-like (Domains III and V) domain identified by PFam, accession name laminin_EGF, E-value=0.048, PFam score of 11.1
NVRAFISHCSWFPQKHETKDHPQPSKEVLGARALPLRRAGASSEPSCPGAAFEKSAFLPWLVLQKQHVHNWRLPFSKKHLHAEHSGGFGLICSCYPASTIVDMEQDLKANILENVFGPQCNECREGTFALRADNPLGCSPCFCSGLSHLCSELEDYVRTPVTLGSDQPLLRVVSQSNLRGTTEGVYYQAPDFLLDAATVRQHIRAEPFYWRLPQQFQGDQV

SEQ ID NO: 36085 - protein, 1355 aa, Homo sapiens
  DOMAIN (287)..(307): Elongation factor 1 beta/beta'/delta chain proteins domain identified by eMATRIX, accession number BL00824B, p-value=8.419e- 09, raw score of 9.21
VTPRAAWLGLGFRGSAVLGLCWQPRSPPSRAAGMMNRTTPDQELVPASEPVWERPWSVEEIRRSSQSWSLAADAGLLQFLQEFSQQTISRTHEIKKQVDGLIRETKATDCRLHNVFNDFLMLSNTQFIENRVYDEEVEEPVLKAEAEKTEQEKTREQKEVDLIPKVQEAVNYGLQVLDSAFEQLDIKAGNSDSEEDDANGRVELILEPKDLYIDRPLPYLIGSKLFMEQEDVGLGELSSEEGSVGSDRGSIVDTEEEKEEEESDEDFAHHSDNEQNQHTTQMSDEEEDDDGCDLFADSEKEEEDIEDIEENTRPKRSRPTSFADELAARIKGDAMGRVDEEPTTLPSGEAKPRKTLKEKKERRTPSDDEEDNLFAPPKLTDEDFSPFGSGGGLFSGGKGLFDDEDEESDLFTEASQDRQAGASVKEESSSSKPGKKIPAGAVSVFLGDTDVFGAASVPSLKEPQKPEQPTPRKSPYGPPPTGLFDDDDGDDDDDFFSAPHSKPSKTRKVQSTADIFGDEEGDLFKEKAVASPEATVSQTDENKARAEKKVTLSSSKNLKPSSETKTQKGLFSDEEDSEDLFSSQSASNLKGASLLPGKLPTSVSLFDDEDEEDNLFGGTAAKKQTLSLQAQREEKAKASELSKKKASALLFSSDEEDQWNIPASQTHLASDSRSKGEPRDSGTLQSQEAKAVKKTSLFEEDKEDDLFAIAKDSQKKTQRVSLLFEDDVDSGGSLFGSPPTSVPPATKKKETVSEAPPLLFSDEEEKEAQLGVKSVDKKVESAKESLKFGRTDVAESEKEGLLTRSAQETVKHSDLFSSSSPWDKGTKPRTKTVLSLFDEEEDKMEDSKPLSQAPQKEVGKGCDPDAHPKSTGVFQDEELLFSHKLQKDNDPDVDLFAGTKKTKLLEPIVGSLFGDDEDDDLFSSAKSQPLVQEKKRVVKKDHSVDSFKNQKHPESIQGSKEKGHMWKPETPQANLAINPAALLPTAASQISEVKPVLPELAFPSSEHRRSHGLESVPVLPGSGEAGVSFDLPAQADTLHSANKSRVKMRGKRRPQTRAARRLAAQESSEAEDMSIPRGPIAQWADGAISPNGHRPQLRAASGEDSTEEALAAAAAPWEGGPVPGVDTSPFAKSLGHSRGEADLFDSGDIFSTGTGSQSVERTKPKAKIAENPANPPVGGKAKSPMFPALGEASSDDDLFQSAKPKPAKKTNPFPLLEDEDDLFTDQKVKKNETKSSSQQDVILTTQDIFEDDIFATEAIKPSQKTREKEKTLESNLFDDNIDIFADLTVKPKEKSKKKVEAKSIFDDDMDDIFSSGIQAKTTKPKSRSAQAAPEPRFEHKVSNIFDDPLNAFGGQ

SEQ ID NO: 36086 - protein, 324 aa, Homo sapiens
MNMEPFGSIVIALDHVVREAGPLTYWLRAVGESPQREPDGGHVAFCVPALEVNGGPFPSFVGQDGHNGPSRFMGRGHRLPFLMEGLLTRSAQETVKHSDLFSSSSPWDKGTKPRTKTVLSLFDEEEDKMEDQNIIQAPQKEVGKGCDPDAHPKSTGVFQDEELLFSHKLQKDNDPDVDLFAGTKKTKVQEKKRVVKKDHSVNSFKNQKHPESIQGSKEKGIWKPETPQIMLDGCAVIKEYCRTQAVLLTETHSRYLKGKGSPRQQSETLSQKQIKWTENRSVRTNHLRDKPPEEWLLEWEEEKQKEKELKIGEAVVPVLNSAKQ

SEQ ID NO: 36087 - protein, 732 aa, Homo sapiens
  DOMAIN (191)..(246): Aconitase family proteins domain identified by eMATRIX, accession number BL00450B, p-value=4.214e-30, raw score of 42.34
  DOMAIN (63)..(502): Aconitase family (aconitate hydratase) domain identified by PFam, accession name aconitase, E-value=5.6e-224, PFam score of 734.8
  misc_feature (1)...(732): Xaa = X or * as defined in Table 2
MVPYSLLVTWLQKALGVRQYHVASVLCQRAKVAMRPFEPKYIHYDLLEKNINIVCKXLNRPLTLSEKIVYRHPDDPTSQEIERGGTYLQQWPDSVTMQDATAQMAMLQFISSRLSKVTMPSTIHCDHLIEAQLGSEKDLHQAKDINHEVYNFLATGSVKYGLSFWKPGSGIIHQIILENYEYPGVLLIGTDSHTPNGGSLGGICIGVGGADAVDVMTGIPWELKCPKVIGVKLMGSLSGWTSPKDVILKVAGILTMKGGTGAIVEYHGPVVDSISCTGMVTVCNMGLEIGTTTSVFHYNLRMKKYMSKTCQADIANLADEFKDHLVPDPGCHYDQLIEVNPSELKLHINGPFTPDLAHPVAEVGKVAEKEEWPLDIXVGLWGSCTNSSYEDMGCSAGVAKQALAHGLKCKSQFTITPCSEQIRASIEQDGYAQTLRDVGGIVLANACGPCIGQLHRKDINKQEKNIIVTSYNRNFMGHNDTNPETHAFITSPETVTALAIVGTLKFNPETNYLTGKDGKKFKLEAPDADELPQAEFGPGQDTYQHPPWGTTDHISAAGPXLKFRGHLDTISNNLLSGAINIENGKANSVHDAVTHEFGPFPDTARYKKYGISWVVIGDXNYGKGSSWEHAALEPRHLGGRAIITKSFARIHETNLRRQGLLPLTFADPADNKIHLVDKLTIQSLKDLTPGKPLKYIVKHPQEINLLNHTFNETEIEWFRAGSALYRTKEQQQ

SEQ ID NO: 36088 - protein, 400 aa, Homo sapiens
  DOMAIN (27)..(51): Aconitase family proteins domain identified by eMATRIX, accession number BL00450D, p-value=1.257e-15, raw score of 21.14
  DOMAIN (3)..(257): Aconitase family domain identified by PFam, accession name aconitase, E-value=1e-60, PFam score of 200.8
MAHGLKCKCQFSITPGSEQIRATIERDGYAQILRDMGGIVLANACGPCIGQWDRKDIKKGEKNTIVTSYNRNFTGRNDANPETHAFVTSPEIVTALAIAGTLKFNPETDYLTGTDGKKFRLEAPDADELNKGEFDPGQDTYQHPPKDSSGQHVDVSPTSQRLQLLEPFDKWDGKDLEDLQILIKVSSMGTAGQPHPARAPRPLSIGKGHEPGGSEHSQDAELDLASLRLGPSAIQQQLIRATSSGCGQIVTALAIAGTLKFNPETDYLTGTDGKKFRLEAPDADELPKGVFIRDKLMERRNRRTGRTEKARIWEVTDRTVRTWIGEAVAAAAADGVTFSVPVTPHTFRHSYAMHMLYAGIPLKVLQSLMGHKSISSTEVYTKVFALDVAARTRCKLRCPI

SEQ ID NO: 36089 - protein, 331 aa, Homo sapiens
  DOMAIN (197)..(211): ACONITASE FAMILY SIGNATURE domain identified by eMATRIX, accession number PR00415I, p-value=2.946e-13, raw score of 13.62
  DOMAIN (6)..(260): Aconitase family (aconitate hydratase) domain identified by PFam, accession name aconitase, E-value=1.7e-103, PFam score of 340.7
LNRPLTLSEKIVYRHPDDPTSQEIERGGTYLQQWPDSVTMQVIGVKLMGSLSGWTSPKDVILKVAGILTMKGGTGAIVEYHGPVVDSISCTGMVTVCNMGLEIGTTTSVFHYNLRMKKYMSKTCQADIANLADEFKDHLVPDPGCHYDQLIEVNPSELKLHTHGLKCKSQFTITPCSEQIRASIEQDGYAQTLRDVGGIVLANACGPCIGQLHRKDINKQEKNIIVTSYNRNFMGHNDTNPETHAFITSPETVTALAIVGTLKFNPETNYLTGKDGKKFKLEAPDADELECGASPATPPPPLPPSPSWCHVQVRLYMHHKRIRSIQPWLLI

SEQ ID NO: 36090 - protein, 205 aa, Homo sapiens
  DOMAIN (97)..(111): ACONITASE FAMILY SIGNATURE domain identified by eMATRIX, accession number PR00415F, p-value=1.000e-14, raw score of 11.66
  DOMAIN (1)..(201): Aconitase family (aconitate hydratase) domain identified by PFam, accession name aconitase, E-value=2.3e-115, PFam score of 379.5
ILENYAYPGVLLIGTDSHTPNGGGLGGICIGVGGADAVDVMAGIPWELKCPKVIGVKLTGSLSGWSSPKDVILKVAGILTVKGGTGAIVEYHGPGVDSISCTGMATICNMGAEIVATTSVFPYNHRMKKYLSKTGREDIANLADEFKDHLVPDPGCHYDQLIEINLSELKPHINGPFTPDLAHPVAEVGQVAEKEGWPLDILVDA

SEQ ID NO: 36091 - protein, 101 aa, Homo sapiens
  misc_feature (1)...(101): Xaa = X or * as defined in Table 2
DKPQPHLQHTRTSKRLNRSSQAFLQNLLPQELATSAGNLAIRPRNACSLGFLVSRVPSLAATPRAPWNSGPRLSDXLLPRSSRLSSXRLTLPDRLGSPVDH

SEQ ID NO: 36092 - protein, 138 aa, Homo sapiens
KQGQPFQTNGEGASVLTKKGMDLLSTVRVTYSVCDGPVCFQGDRQCQSSSAKPRRSGKESDGLGPEFQGLWKWLPCELNSPIFSGVLYRWDMAHEESWAVGTCSKLLWEEVLEEPLAAADQAFGVLVCWRCGCGLSHR

SEQ ID NO: 36093 - protein, 29 aa, Homo sapiens
REAHQTNSRHLRHLPRKSSTRFRACMEGS

SEQ ID NO: 36094 - protein, 42 aa, Homo sapiens
AKKVWEGVREPWARVPGALGVAAKVSGTVRFPVGSRTDGTRL

SEQ ID NO: 36095 - protein, 118 aa, Homo sapiens
  DOMAIN (32)..(75): kw TRANSCRIPTASE REVERSE II ORF2 domain identified by eMATRIX, accession number DM01354T, p-value=6.264e-11, raw score of 9.48
MGAVCEALRQYSPGASEAIGQRQSSAAKPRRSEKESENLGPEFQGLWEWLPVPQVLAREIRDEKEIKGIQIGKEQVKLSLFDDDIILNIAKRTDHQKTVRMDKLIESIAGYKSAYKTH

SEQ ID NO: 36096 - protein, 313 aa, Homo sapiens
  DOMAIN (242)..(253): RNase H domain identified by eMATRIX, accession number PF00075F, p-value=9.591e-09, raw score of 12.87
  DOMAIN (179)..(312): RNase H domain identified by PFam, accession name rnaseH, E- value=5.4e-14, PFam score of 59.9
MKVWKNYTIEDATVATEKAVKAIKPKTINSYWKNCVQMLCMTLRTYNRDNQTNHERDSGYGKNDVLEGGSRYESWRILELIDSTQEELMEGDLMELRPISAGPHWKLDCPTIPAATPRAPGTLAQGSLTPSQIFLVQQLKTDAARSPRKPPGPSQMLWVTLTVEGSSPFPHISNLPIPNPDHTWFIDGGSSKPNQFSPAKAGYAVMSHTSIIEAAALPPSTTSQQAKLIALTRVLSLAKGMHINIYTDSIYAFHILHNHAAIWVKRGFLTTQSSSTNNASLIEALKVVLLPAKAGIIHCKGHQKPTDLIAKKK

SEQ ID NO: 36097 - protein, 139 aa, Homo sapiens; identical to SEQ ID NO: 30816

SEQ ID NO: 36098 - protein, 85 aa, Homo sapiens
  misc_feature (1)...(85): Xaa = X or * as defined in Table 2
EDLGRSQSESLGPEFQGXVVAIETIWPTEPKIFTICLSGSHSQSPWNSGPRLSDXLLPRSSQLSSXRLTLPNRLRSLQDHHRCSR

SEQ ID NO: 36099 - protein, 367 aa, Homo sapiens
  DOMAIN (92)..(139): kw TRANSCRIPTASE REVERSE II ORF2 domain identified by eMATRIX, accession number DM01354V, p-value=1.000e-40, raw score of 12.97
  misc_feature (1)...(367): Xaa = X or * as defined in Table 2
FIDSMLSPSRYQXLSSQNWKKLLXISYGTKNEPAXPKQSXAQRTKLEASHXLTSNCTTSLHXSKQHGTGTKTEKKTXAIPFRTXAWAKTSXLKHQKQWQQKPKXTKKIKYLGIQLTTDVKDLFKENYKPLLNEIKEDTNKWKNIPCSWIGGINIMKMAILPKVIYRFNALPIKIPMTFFTELEKTTLNFIWNQKRARIAKTILSTKNKAGGITLADFKLYYKPTLVKTAWYWYQNREENLGNTIQDIGMGKNFMTKTPKAMATKAKIDKRDLIKPKSFCIAKETTIRMNRQPTEWEKLFAIYPSDKALISGIYKDLKQIYKKKNNPIKKWAKEMNRHFSKEDIYAANRHVKNAHHHWSSEKCKSKPQ

SEQ ID NO: 36100 - protein, 33 aa, Homo sapiens
FVVLLEEVLHIPCKLYSQVFYSLCSNCEWEFTH

SEQ ID NO: 36101 - protein, 133 aa, Homo sapiens
  misc_feature (1)...(133): Xaa = X or * as defined in Table 2
ADKQLQQSLRIQNQCTKITSILIHQQQTNREPNHEXTPIHNCFKENKIPRNPTYKGCEGPLQGELQTTAQGNKKGYKQMEEHSMLMGRKNQYRENGHTAQELEKTKVHMEPKKSPHRQVNPKPKEQSWRHHTT

SEQ ID NO: 36102 - protein, 49 aa, Homo sapiens
  misc_feature (1)...(49): Xaa = X or * as defined in Table 2
LPPPLPAGLCXXDQQQNSNAPLIHXEKERPPDDSYRIFLPRYHFHDDRI

SEQ ID NO: 36103 - protein, 159 aa, Homo sapiens
  DOMAIN (7)..(54): kw TRANSCRIPTASE REVERSE II ORF2 domain identified by eMATRIX, accession number DM01354V, p-value=4.892e-19, raw score of 12.97
  DOMAIN (40)..(111): FERM domain (Band 4.1 family) domain identified by PFam, accession name Band_41, E-value=4.9e-34, PFam score of 108.3
MSELPFTIATKRIKYLGIQLTRDVEDLLKENYKPQLKEHWLDGTKSIKKQVKIGSPYCLHLRVKFYSSEPNNLREELTRYLFVLQLKQDILSGKLDCPFDTAVQLAAYNLQEHCLLFLLFHVIAPFPPKVLKRHTLPDKSVNAKIGPSANFFLKRNAVM

SEQ ID NO: 36104 - protein, 105 aa, Homo sapiens
  misc_feature (1)...(105): Xaa = X or * as defined in Table 2
TPIHNCYKENKIPGNPTYKGCEGPLQGELQTTAQXNKRGQKQMEEHSMLMDRKNKYHENEPYSPRXFIDSMPSPSNYQXLSSQNWKKLLXGPYGTKKEPTXPRQS

SEQ ID NO: 36105 - protein, 351 aa, Homo sapiens
  DOMAIN (108)..(155): kw TRANSCRIPTASE REVERSE II ORF2 domain identified by eMATRIX, accession number DM01354V, p-value=6.806e-26, raw score of 12.97
  misc_feature (1)...(351): Xaa = X or * as defined in Table 2
MGPEICTSDKLSDEADVTVLEVLARAIRQEKEIKGIQLGKEEVKLSLFADDMIVYLENPIVSAQNLLKLISNFSKVSGYKINVQKSQAFLYTNNRQTESQIMSELPFTIASKRIKYLGIQLTRDVKDLFKENYKPLLKEIKEEHSIKWKNIPSSWVGRISIMKTAILPKVYIRIKDDEWNIYRRYTEFRSLHHKLQNKYPQVRAYNFPPKKAIGNKEAVLCHGRXHDCISRKPHRLSPKSPXADKQLQQSLRIQNQCAKITSILIYQXQTNREPNHEXTPIHNCFKENKIPRNPTYKGCEGPLQGELQTTAQGNKRGTFHQMEEHSILMGRKNQYHENGHTAQGLHPDKRR

SEQ ID NO: 36106 - protein, 90 aa, Homo sapiens
  misc_feature (1)...(90): Xaa = X or * as defined in Table 2
TPANQQHYRRMTLQLKENQTNRKRQQKQHQQKRPHKNPIQRSATSKIKGDGSIQPXMLPWGQSPQKALTLATAPEQRKDTPPVRGLSLQD

SEQ ID NO: 36107 - protein, 389 aa, Homo sapiens
  DOMAIN (150)..(197): kw TRANSCRIPTASE REVERSE II ORF2 domain identified by eMATRIX, accession number DM01354V, p-value=1.000e-40, raw score of 12.97
MKASCRLRGRRVLSAAAAAVPGRRLGSQPAQGERRGHGGAEEERAAAGQRRALGGEGAGEEAAARRRGRGARWQLLSPAGAEQPRAVAGQADLALKGLRVLLVEAQNLLKLISNFSKVSGYKINVQKSQAFLYTNNRQTESQIMSELPFTIASKRIKYLGIQLTRDVKDLFKENYKPLLKEIKEDTNKWKNIPCSWVGRINIVKMAILPKMAALSRLGNDYRPTSAYERGQRYASRLQNEFAGNISALADAENISRKIITRCINTAKLPKSVVALFSHPGELSARSGDALQKAFTDKEELLKQQASNLHEQKKAGVIFEAEEVITLLTSVLKTSSASRTSLSSRHQFAPGATVLYKGDKMVLNLDRSRVPTECIEKIEAILKELEKPAP

SEQ ID NO: 36108 - protein, 215 aa, Homo sapiens
  misc_feature (1)...(215): Xaa = X or * as defined in Table 2
KWPYCPRQFIDSMPSPSSYQRLSSQNWKKLLXSSYGTKKEPTSPSQSXAKRTKLEASRYLTSNYTTRLQXPKQHGTGTKTEIXINGTQQSPQKXQPHVYNYLIFNKPEKKKQWGKDSLFNKWDMDEVGNHHSQQTITRTGNQTPHVFTHRWELNNEITWTQGAGHHTPGPVVGLGAGRGIALREIPNANDELMVQQTNMAHIYLCIKPARCADVP

SEQ ID NO: 36109 - protein, 49 aa, Homo sapiens; identical to SEQ ID NO: 36102
  misc_feature (1)...(49): Xaa = X or * as defined in Table 2

SEQ ID NO: 36110 - protein, 70 aa, Homo sapiens
  misc_feature (1)...(70): Xaa = X or * as defined in Table 2
SFGYIPSNGMAGSNGISSSRSLRNRHTDFHNGXTSLQSHQQCKSVPISPHPLQHLLFPDFLMIAILTGVR

SEQ ID NO: 36111 - protein, 127 aa, Homo sapiens
MSSSEAVLPAQKLQVALICVHKGTSFQQFRGLSGSQSGPESSGAPIHFQGIFKGYGSNFQQVQAVRLIAEGKAPRLPQPEEGATYEGIQKKETAKAKNVETDNKCPISQIDQVNMVLSCTEEIGIQP

SEQ ID NO: 36112 - protein, 1077 aa, Homo sapiens
  DOMAIN (660)..(676): CBXX/CFQX SUPERFAMILY SIGNATURE domain identified by eMATRIX, accession number PR00819B, p-value=8.988e-10, raw score of 10.83
PRFRCLFCLQFAIPASRMEQLNELELLMEKSFWEEAELPAELFQKKVVASFPRTVLSTGMDNRYLVLAVNTVQNKEGNCEKRLVITASQSLENKELCILRNDWCSVPVEPGDIIHLEGDCTSDTWIIDKDFGYLILYPDMLISGTSIASSIRCMRRAVLSETFRSSDPATRQMLIGTVLHEVFQKAINNSFAPEKLQELAFQTIQEIRHLKEMYRLNLSQDEIKQEVEDYLPSFCKWAGDFMHKNTSTDFPQMQLSLPSDNSKDNSTCNIEVVKPMDIEESIWSPRFGLKGKIDVTVGVKIHRGYKTKYKIMPLELKTGKESNSIEHRSQVVLYTLLSQERRADPEAGLLLYLKTGQMYPVPANHLDKRELLKLRNQMAFSLFHRISKSATRQKTQLASLPQIIEEEKTCKYCSQIGNCALYSRAVEQQMDCSSVPIVMLPKIEEETQHLKQTHLEYFSLWCLMLTLESQSKDNKKNHQNIWLMPASEMEKSGSCIGNLIRMEHVKIVCDGQYLHNFQCKHGAIPVTNLMAGDRVIVSGEERSLFALSRGYVKEINMTTVTCLLDRNLSVLPESTLFRLDQEEKNCDIDTPLGNLSKLMENTFVSKKLRDLIIDFREPQFISYLSSVLPHDAKDTVACILKGLNKPQRQAMKKVLLSKDYTLIVGMPGTGKTTTICTLVRILYACGFSVLLTSYTHSAVDNILLKLAKFKIGFLRLGQIQKVHPAIQQFTEQEICRSKSIKSLALLEELYNSQLIVATTCMGINHPIFSRKIFDFCIVDEASQISQPICLGPLFFSRRFVLVGDHQQLPPLVLNREARALGMSESLFKRLEQNKSAVVQLTVQYRMNSKIMSLSNKLTYEGKLECGSDKVANAVINLRHFKDVKLELEFYADYSDNPWLMGVFEPNNPVCFLNTDKVPAPEQVEKGGVSNVTEAKLIVFLTSIFVKAGCSPSDIGIIAPYRQQLKIINDLLARSIGMVEVNTVDKYQGRDKSIVLVSFVRSNKDGTVGELLKDWRRLNVAITRAKHKLILLGCVPSLNCYPPLEKLLNHLNSEKLIIDLPSREHESLCHILGDFQRE

SEQ ID NO: 36113 - protein, 113 aa, Homo sapiens
  misc_feature (1)...(113): Xaa = X or * as defined in Table 2
KGSATCSPPQANATTTTALQMLGGIPWGNACGIFTRPPPQTYLNTHLSTRXRPLLLLLKCVRXKGSATCSPPQANATTTTALQMLGGIPWGNACGIFTRPPPQTYLNTHLSTR

SEQ ID NO: 36114 - protein, 263 aa, Homo sapiens
  misc_feature (1)...(263): Xaa = X or * as defined in Table 2
ISXVSFMSITHXXWKKKEQQLLGCWLAXMXSMLICVXRERIXTHKLEXLIILCIXRMKKILEIQKGMFKLLPYXTKRIMLKTLNRQLNSTVSSLHSRVDSLEKSNTKLIEELAIAKNNIIKLQEENHQLRSENKLILMKTQQHLEVTKVDVETELQTYKHSRQGLDEMYNEARRQLRDESQLRQDVENELAVQVSMKHEIELAMKLLEKDIHEKQDTLIGLRQQLEEVKAINIEMYQKLQGSEDGLKEKKEIIVRLYWSALCG

SEQ ID NO: 36115 - protein, 451 aa, Homo sapiens
MARPSDNSKDNSTCNIEVVKPMDIEESIWSPRFGLKGKIDVTVGVKIHRGYKTKYKIMPLELKTGKESNSIEHRSQLAIAKNNIIKLQEENHQLRSENKLILMKTQQHLEVTKVDVETELQTYKHSRQGLDEMYNEARRQLRDESQLRQTSPHPNKVPSGKAPGPCEVGLAQNHFRDPQMASEDSRSSRIPEKVGSITPPPDRAVPKPQGGQKPAAPYTFREPPGKLCKDLLINLRADTASRQLVSVQRLNLTIWLIHTAEKPGASQWGPREVGVGPVVYSLVLLSGSGLGPGRARMYGARKMGEATWNSLGPWDTTCKMGEGNGITGVHGGQEPSCPSEFYEYHALMMEEEGAVIVGLLVGLNVIDANLCVKGEDLDSQVGVIDFSMYLKNEEDIGNKERKLLKDVLPKIREYTKREVREFRQQELPQRGKRGNIFQVLYKCSEALQLSL

SEQ ID NO: 36116 - protein, 142 aa, Homo sapiens
  misc_feature (1)...(142): Xaa = X or * as defined in Table 2
TKELLHSKRNYHQSEQATYRMGENFCNLLIXQRANIQNLQXTQTNLQEKNKQPHQKVGEGYQQTLLKRRHLCSQKTHEKMLIITGHQGNTNQNHNEIPSHTSXNGDHXKVRKKQGHGXSWKPSFSANYRKDKKPNTSCSHSQ

SEQ ID NO: 36117 - protein, 65 aa, Homo sapiens
YGLMIRTIPVDPTIRTTSVSLTVRLATMNPRSRPAPVDTAPGPPHLHKNQKSSQHSQYLDLTSYC

SEQ ID NO: 36118 - protein, 40 aa, Homo sapiens
PLEFGFWNQSLGADELTFVRRSRYVEGGVQAAGHASPSVG

SEQ ID NO: 36119 - protein, 815 aa, Homo sapiens; identical to SEQ ID NO: 35517
  DOMAIN (61)..(81): POTASSIUM CHANNEL SIGNATURE domain identified by eMATRIX, accession number PR00169A, p-value=4.090e-11, raw score of 16.77
  DOMAIN (18)..(117): K+ channel tetramerisation domain identified by PFam, accession name K_tetra, E-value=7.9e-36, PFam score of 132.5

SEQ ID NO: 36120 - protein, 89 aa, Homo sapiens
  misc_feature (1)...(89): Xaa = X or * as defined in Table 2
TNLQEKNKQPHQKVGKGYEQTLLKRKHSCSQQTYEKMLIITGHQRNANQNHNDIPSHSSXNNDHXKDRKQQMLERMXRNRNAFTLLVGV

SEQ ID NO: 36121 - protein, 226 aa, Homo sapiens
MDEAGNHHSEQTIARTENQTRHVLILVQYSAKERQVYKANMPHQGVFSLGVPVDALFFIGNQLVATSHTGKVGVWNAVTQHWQVRTGLSTLVAREESCQKDLKTERMEIISGPIKVKSVYGIYSTARKLSTVLNSIKDTLPVKKRENATKYELQGYAVPQYRAPFSVDSNLSVVCVNWSDTFLLNGQLKEYVLTDGGRRVYSGLDTTLYIPRTADKTFFFQVICTT

SEQ ID NO: 36122 - protein, 266 aa, Homo sapiens
MAGSRGRDVVYTNNEEEEGQRITAHIRTRGYAHLHGILPDKGRTHETPFNLGTDKDYSPRRSRRSGCFENHELLYIARAASWREPWIGWNETFYGEQDTMRPGHPQGPPEQSVRRSLTEGALAHSGNPVSKGVHEDHQLDTEAGAPHCGTNPQLAQEHWGSEKNTSFFPGHQGDSGLEALLATLKDPSVAWKEVSQDLAAYFTGEGETVVGRAESGAGQTPAMGQSLGYPWEPKGNNMASLPSEKFPTGRRSHLFGRVSPNSGSRL

SEQ ID NO: 36123 - protein, 55 aa, Homo sapiens
MKDHQLDTEAGAPTLWNKPTACFRDPSQESVRTSNPTAQFRRCEAKNPSRWDKRH

SEQ ID NO: 36124 - protein, 158 aa, Homo sapiens
EPYPDRPREPKRDPEWSWGLWDKGGLVLSLGRTRTEAHTALSRLRASMWIDRSTRAVSVHFTLYNPPTQLFTSVSLRVEILPTGSLVPSSLVESFSIFRSDSALQYHLMLPQLVFLALSLIHLCVQLYRMMDKGVLSYWRKPRNWLEVASLVSFSFEK

SEQ ID NO: 36125 - protein, 929 aa, Homo sapiens
  DOMAIN (852)..(895): Envelope Polyprotein GP41 domain identified by eMATRIX, accession number PF00517B, p-value=6.654e-09, raw score of 22.57
ASVGYLSLLDADYDRKPPNRYLAKAVNYTVHFQWIRCLFWDKREWKSERFSPQPGTSPEKVNCSYHRLAAFALLRRKLKASFEVSDISKLQSHPENLLPSIFIMGSVILYGFLVAKSRQVDHHEKKKAGYIFLQEASLPGHQLYAVVIDTGFRAPASAPAQLGLLRKIRLWHDSRGPSPGWFISHVMVKELHTGQGWFFPAQCWLSAGRHDGRVERELTCLQGGLGFRKLFYCKFTEYLEDFHVWLSVYSRPSSSRYLHTPRLTVSFSLLCVYACLTALVAAGGQEQVRAIAFPYSSFQIRLHCGPFLPKKSTKLTVLREKFKPGEASLAAWGPEKEQEGSARLSKVPATCPHGPVLLSSPFIAGEHAWRTTSFLLQEAPGSARVEPHSPLRGGAQTEAPHGGSERRGLSRGLKQEGSEAQKNSESPVCLLSKYRQDRGRDTVEQQGSGVIAHTQQWFGGTNAPVVKGPSALVELCSVGHLWDRFFGLQFGDRISSLQMLNHSVRMGRSWLPDNKLATLLGASTIQGPAEGHQTEDEERESHTGCPEKQLFIFVLALRNARNCLGGLRNIADWWDWSLTTLLDGLYPGGTPSARVPGAQPGALGGKCYLIGSSVIRQLKVFPRHLCKPPRPFSALIEDSIPTCSPEVGGPENPYLIDPENQNVTLNGPGGCGTREDCVLSLGRTRSRVPESGDPPYGSLVPSSLVESFSIFRSDSALQYHLMLPQRTEKMHKALLMCFSSCKSITNFEFGLVIKGMNQQLVFLALSLIHLCVQLYRMMDKGVLSYWRKPRNWLELSVVGVSLTYYAVSGHLVTLAGDVTNQFHRGLCRAFMDLTLMASWNQVHGVLRAMQIEAMHCDAIQKAEVTQTLEGARQQICLISRDDALSWQMGVARTVKGLKSLRHALNTGVCGFCVEQNSRAWNSPSASRGR

SEQ ID NO: 36126 - protein, 57 aa, Homo sapiens
MSIFLFSSLASFNCFFKVSFNSFNASKEDLSLLVSLFFSLRTSVKCSTSASCCSFII

SEQ ID NO: 36127 - protein, 348 aa, Homo sapiens
MPKRPDRPVARFSALFHPSPPIPYPASIRSSPANPYPSYSAPGHRRNAEATPKRLNEASEENRKIDIQAKRVQARLDNLQRKYEFMTIQRLKGSSHAVHEMKSLKQEKAPVSKTYKVPLNGQVYELLTVFMDWISDHHLSKVKHEESGMDELSGQGHLATALIIAMSTIFIMAIAIVLIIMFYILKTKPSAPACCTSHPGKSVEAQVSKDEEKKEAPDNVVMFSEKDEFEKLTATPAKPTKSENDASSENEQLLSRSVDSDEEPAPDKQGSPELCLLSLVHLAREKSATSNKSAGIQSRRKKILDVYANVCGVVEETVSTLASSSGKRDQSFILDLAALSLPSSIPDV

SEQ ID NO: 36128 - protein, 120 aa, Homo sapiens
MNFDKRQHEARIQQMENEIHYLQENLKSMEEIQGLTDLQLQEADEEKERILAQLRELEKKKKLEDAKSQEQVFGLDKELKKLKKAVATSDKLATAELTIAKDQLKSLHGTVMKINQERAE

SEQ ID NO: 36129 - protein, 176 aa, Homo sapiens
MVRDRFHSRSLLLLGHRPAQHITVLNTVGNSNTSPCGQQNAMPFISRPKSFPQPYVIKIDDGGRDKYRKRFLQDTIDSVFPSLPTKKKLEDAKSQEQVFGLDKELKKLKKAVATSDKLATAELTIAKDQLKSLHGTVMKINQERAEDANANEIKIADHRRQKSNDESPERHNHGRR

SEQ ID NO: 36130 - protein, 78 aa, Homo sapiens
DIMCKVKSWVIDQKKPVRFYHDWNDKEVSCKYHAIYYCLCFHLLVGTRDWFHGRQFFHGWVMGVWFQDETVPPQIIRH

SEQ ID NO: 36131 - protein, 139 aa, Homo sapiens
GRRSRLAMRPLSMSYSFDLSDVTTPESTKNLVESSMVNGGLTSQTKENGLSTSQQVPAQRKKLLRAPTLAELDSSESEEETLHKSTSSSSVSPSFPEEPVLEAVFTRKKPPKFLPISSTPQPERRQPPQRRHSIEKETP

SEQ ID NO: 36132 - protein, 253 aa, Homo sapiens
VIESLGIIIYKALDYGLKENEERELSPPLEQLIDHMANTVEADGSNDEGYEAAEEGLGDEDEKRKISAIRSYRDVMKNEAADPCSVPVLKDGVPGVSSFKCLDVSGVSFFWWVPGLTGFRSEAADLCEPPKFLPISSTPQPERRQPPQRRHSIEKETPTNVRQFLPPSRQSSRSLRWFPDPAFACFRLEQNHQVTSSGPFPLGHYRAATGARWATQGRCVPGRAAQGQRTSTPARGPAAFRTGEAGAAQLHSR

SEQ ID NO: 36133 - protein, 692 aa, Homo sapiens
  DOMAIN (442)..(459): Zinc finger C2H2 type, domain proteins. domain identified by eMATRIX, accession number BL00028, p-value=3.118e-14, raw score of 16.07
  DOMAIN (161)..(686): Zinc finger, C2H2 type domain identified by PFam, accession name zf-C2H2, E-value=3.2e-124, PFam score of 426.1
MKEFLSTAQGNREVFHAGTLQIHESHHNGDFCYQDVDKDIHDYEFQWQEDERNGHEAPMTKIKKLTGITERYDQSHARNKPIKDQLGSSFHSHLPEMHIFQTEEKIDNQVVKSVHDASLVSTAQRISCRPKTHISNNHGNNFWNSSLLTQKQEVHMREKSFQCNESGKAFNYSSLLRKHQIIHLADKYKCDVCGKLFNQKRNLACHRRCHTGENPYKCNECGKTFSQTSSLTCHRRLHTGEKPYKCEECDKAFHFKSILERHRIIHTEEKPYKCNECGKTFRQKSILTRHHRLHTGEKPYKCNECGKTFSHKSSLTCHHRLHTGEKPYKCNECGKTFSHKSSLTCHRRLHTGEKPYKCEECDKAYSFRSNFEIHRKIHTEDNAYKCNECGKTFSRTSSLTCHRRRHTGEQPYKCEECDKAFRFKSNLERHRRIHTGEKPYKCNECGKTFSRKSYLTCHHRLHTGEKAYKCNECGKTFSWKSSLTCHRRLHSGEKPYKCKECGKTFNQQLTLKRHRRLHSGENPYKCEDSDKAYSFKSNLEIHQKIHTEENPYKCNECGKTFSRTSSLTCHRRLHTGEKPYKCEECDKAFRVKSNLEGHRRIHTGEKPYKCNECGKTFSRKSYFICHHRLHTGEKPYKCNECGKNFSQKSSLICHHRLHTGEKPYKCNECGKTFSQKSNLTCHRRLHTGEKQV

SEQ ID NO: 36134 - protein, 150 aa, Homo sapiens
HLYAFFIQWSPEIYAEDTGEYTREPGFIVVKKIEESETIEDSSNQAAAREWEITTREDINSKQVATVKADLESESFRPNLSDPSELLLPDQIEKLTKHLPPRTIGYPWTLVYGTGKHGTSLKTLYRTMTGLDTPVLMVIKDSDGQVFGAL

SEQ ID NO: 36135 - protein, 202 aa, Homo sapiens
SYANFGKTHTMQQTKQQRENIQQVSQKEAKHKITSADGHIESSALLKEKQRHRLHKFLCLRVGKPMRKTFVSQASATMQQYAQRDKKHEYWFAVPQERTDHLYAFFIQWSPEIYAEDTGEYTREPGFIVVKKIEESETIEDSSNQAAAREWEELSQFLCKTLQGIISKGKINLLTSPLTGIGAVQKKMEEKKIILETPCYIV

SEQ ID NO: 36136 - protein, 29 aa, Homo sapiens
MVLLESEQFLTELDQTFPEVRTSAALLSP

SEQ ID NO: 36137 - protein, 102 aa, Homo sapiens
  DOMAIN (81)..(96): TYPE I ANTIFREEZE PROTEIN SIGNATURE domain identified by eMATRIX, accession number PR00308A, p-value=3.647e-09, raw score of 5.90
  DOMAIN (1)..(60): Signal recognition particle 14kD protein domain identified by PFam, accession name SRP14, E-value=3e-20, PFam score of 80.7
ARDQPIPKKGTVEGFEPADNKCLLRATDGKKKISTVVSSKEVNKFQMAYSNLLRANMDGLKKRDKKNKTKKTKTSSSSSSSSSPAAATAATTAATTAATAAQ

SEQ ID NO: 36138 - protein, 749 aa, Homo sapiens
  DOMAIN (222)..(239): METHIONINE AMINOPEPTIDASE-1 SIGNATURE domain identified by eMATRIX, accession number PR00599B, p-value=5.339e-09, raw score of 12.01
  DOMAIN (56)..(138): Signal recognition particle 14kD protein domain identified by PFam, accession name SRP14, E-value=0.019, PFam score of 3.8
MVLLESEQVWLGLAGRGKGAAQALLETCASCRRTRALTRQDEDLGLANGAGPVVFQFLTELTRLFQKCRTSGSVYITLKKCKQREGSRAMLPGFPYTPVSSKAMYDAYWNGKFRDCAFHSGFNEDPFVCEYQGQSSDLPQPPVNAGGGSGGGSGGGSEGGGSEGGGSEGGGSEGDGSEGDGSGGGSGSGDFDYEKMANANKGAMTENADENALQSDAKGKLDSVATDYGAAIDGFIGDVSGLANGNGATGDFAGSNSQMAQVGDGDNSPLMNNFRQYLPSLPQSVECRPYVFGAGKPYEFSIDCDKIKILRGVFAFLLYVATFMLPVIANIAIPQKRPFMQQTRCEVQCREDIEVQKLKSYDKLLASINKKPGVNGWQKRRITVNAGEAHDQQALDYALYHLRIMTPAHDERSSIAAKGLTGEGYKGHVFWDTEVFLLPFHLFSDPTVARSLLRYRWHNLPGAQEKARRNGWQGALFPWESARSGEEETPEFAAINIRTGLRQKVASAQAEHHLVADIAWAVIQYWQTTGDESFIAHEGMALLLETAKFWISRAVRVNDRLEIHDVIGPDEYTEHVNNNAYTSYMARYNVQQALNIARQFGCSDDAFIHRAEMLGIVAHKKGICHQHSNAHSSANPAPKKSDTQTHIQSQLGWGHSPRSTECVRFQVACLCFSCGCTSTDAASGSSPSLGSHPESQPEEEGLSAWGPSPDSGCWNREGSLQAMAQRAPPARACQPPPLLMDSATCSADT

SEQ ID NO: 36139 - protein, 113 aa, Homo sapiens
  DOMAIN (4)..(84): Signal recognition particle 14kD protein domain identified by PFam, accession name SRP14, E-value=1.3e-18, PFam score of 75.3
MVLLESEQFLTELTRLFQKCWTSGSIYITLKKYGGGTKPVPKKGSVEGFEPSDKCLLRAIDGKKKEKNSFLNYNVSCILTMPQYMRQGYGKMLIDFSLGLDAKFGKGAKKTSH

SEQ ID NO: 36140 - protein, 153 aa, Homo sapiens
  DOMAIN (124)..(139): RIBOSOMAL PROTEIN P2 SIGNATURE domain identified by eMATRIX, accession number PR00456E, p-value=4.843e-11, raw score of 3.06
  DOMAIN (21)..(111): Signal recognition particle 14kD protein domain identified by PFam, accession name SRP14, E-value=4.1e-61, PFam score of 216.4
ALTARGLSGGSRASVAAMVLLESEQFLTELTRLFQKCRTSGSVYITLKKYDGRTKPIPKKGTVEGFEPADNKCLLRATDGKKKISTVVSSKEVNKFQMAYSNLLRANMDGLKKRDKKNKTKKTKAAAAAAAAAPAAAATAATTAATTAATAAQ

SEQ ID NO: 36141 - protein, 26 aa, Homo sapiens
  DOMAIN (12)..(26): WILM'S TUMOUR PROTEIN SIGNATURE domain identified by eMATRIX, accession number PR00049D, p-value=8.714e-11, raw score of 0.00
IYPPPLLPSPLPLPSPPPPPPSPPPP

SEQ ID NO: 36142 - protein, 214 aa, Homo sapiens
  DOMAIN (101)..(112): RNase H domain identified by eMATRIX, accession number PF00075F, p-value=2.588e-10, raw score of 12.87
  DOMAIN (37)..(190): RNase H domain identified by PFam, accession name rnaseH, E- value=1.4e-22, PFam score of 88.5
ASPHIIPDTTPDPHDCISLIHLAFTPFPHTSFFPIPHPDHTWFIDGSSTWPNRHSPAKVGYAIVVSSTSILEATALPPSTTSQQAELIALTRALALAKGLHVNIYTDSKYAFHILHHNAVIWAERGFLSTQRSSIIIASLIKTLLKAALLPKEAGVIHCKGHQKASDPIAQGNAYADKSDNGLAFTSQITQAVSQALGIQWNLHTPYRPQSSGK

SEQ ID NO: 36143 - protein, 194 aa, Homo sapiens
  DOMAIN (57)..(64): RNase H domain identified by eMATRIX, accession number PF00075I, p-value=5.263e-10, raw score of 16.21
  DOMAIN (49)..(153): Integrase core domain identified by PFam, accession name rve, E-value=4e-22, PFam score of 80.5
KLESFTARAIKKASDPIAQDNAYADKLAKKAASVPTSVPHGISQAPPPLPTHQARYWQIDFTHMPRVRKLKYLLVWVDTFTGWVEAFPTGSKKATAVISSLLSDIIPQFSLPTSIHSDSRLAFISQITQAVSQALGIQWKLRTPYHPQSSGKCWDYRHKSLHPAKCLLNSYSPSNVQGSGDTVVDRTPSLSLRK

SEQ ID NO: 36144 - protein, 72 aa, Homo sapiens
  DOMAIN (26)..(72): Glutathione S-transferases domain identified by PFam, accession name GST, E-value=2.7e-05, PFam score of 20.8
CGMRGENGSLGSKQGVSRATLLTLSLNQVLKSHGQDYLVGHKLSRADIHLVKLLYHVEELDTSLISNFPVLK

SEQ ID NO: 36145 - protein, 141 aa, Homo sapiens
ARIPHELLLWDVVTGQSVERASVSRNVVTHLCWVPREPYILQTSEDKTLRLWDSRGLQVAHMFPAKQHIQTYCEVSVDGHKCISCSNGFGGEGCEATLWDLRQTRNRICEYKGHFQTVASCVFLPRALALMPLIATSSHDW

SEQ ID NO: 36146 - protein, 150 aa, Homo sapiens
MMHTSVESIKEEIRQFLLLTINSCVSILWDSRGLQVAHMFPAKQHIQTYCEVSVDGHKCISCSNGFGGEGCEATNPGTPLVQNDYFAYWAKVVYKCSYNLASRVVQNGYVCTEGSFRYTELRPTYFRECNKGMKTGQRTVYTQLSTKNME

SEQ ID NO: 36147 - protein, 124 aa, Homo sapiens
  misc_feature (1)...(124): Xaa = X or * as defined in Table 2
XVTLTAKVCSFTPEASETTNPPGGTNNSRCAALRAVTLTAKVCSFSPKPARPRTHQKEETLNTSKHQKEQTLDMPPLRTVTLTTRVRGFILEVSETKNPPIPDTFWQPQRDYHLLPSGETIAKW

SEQ ID NO: 36148 - protein, 517 aa, Homo sapiens; identical to SEQ ID NO: 35663
  DOMAIN (319)..(330): RNase H domain identified by eMATRIX, accession number PF00075B, p-value=1.000e-13, raw score of 12.56
  DOMAIN (256)..(437): Reverse transcriptase domain identified by PFam, accession name rvt, E-value=6.4e-30, PFam score of 112.8

SEQ ID NO: 36149 - protein, 131 aa, Homo sapiens
  misc_feature (1)...(131): Xaa = X or * as defined in Table 2
LCTDNIEITSKVHLHCSHHGAGLGTCSPLCLSLPPPPWAPVQPEPPRXAPPPAPQRPVPSTIQGRKRLQLHSXSQXDHDAHAKVCSFTPEPARPRTHQKEETPNTSEHQKKQTPDTPPLRTVTLTARLHGF

SEQ ID NO: 36150 - protein, 180 aa, Homo sapiens
  DOMAIN (111)..(180): gag gene protein p24 domain identified by PFam, accession name gag_p24, E-value=3.4e-10, PFam score of 42.8
MGQVWALVRSTLELFHTDDEEEGEYDEVTEEVTEQVYLPAKAKVAQEEEVHPYPSAPPHYYFEEKEWPDPPDLSFLEDTGRKVVAPVTEQHLERLLSVLFRQEFSRLDERGPKELYADFIAWNLLRQESLKKVISDSAAQDIVLQLLAFGNVNLDCQAALRPIRGKAHLVDYIKACDGIG

SEQ ID NO: 36151 - protein, 238 aa, Homo sapiens; identical to SEQ ID NO: 35665
  DOMAIN (30)..(41): RNase H domain identified by eMATRIX, accession number PF00075B, p-value=7.923e-09, raw score of 12.56
  DOMAIN (61)..(167): RNase H domain identified by PFam, accession name rnaseH, E- value=2.2e-12, PFam score of 54.6

SEQ ID NO: 36152 - protein, 33 aa, Homo sapiens
  misc_feature (1)...(33): Xaa = X or * as defined in Table 2
KELPSGGHYNCRAPSSPHPAGSSXSGHQPNSQQ

SEQ ID NO: 36153 - protein, 206 aa, Homo sapiens
  DOMAIN (111)..(122): RNase H domain identified by eMATRIX, accession number PF00075B, p-value=1.000e-13, raw score of 12.56
  DOMAIN (48)..(206): Reverse transcriptase domain identified by PFam, accession name rvt, E-value=1.7e-13, PFam score of 58.3
SPVLDDCPQGPLPSEESWEQPVTRQYPLRPEVHKGLQNIVKHLKAPGLVRKCSSHCNTPILGVQKPNGQWRLVQDLRLINEAVVPLYPVVPNPYTLLSQTPEEAEWFMVLDLKDAFFCIPLHSDSQFLFAFEDPTDHTSQITWMVLPQGFRDSPYLFGQALAQDLGHFSSRGTLVLQYADDLLFATSSEASCQQATLDLLNFLANQ

SEQ ID NO: 36154 - protein, 367 aa, Homo sapiens; identical to SEQ ID NO: 35669
  DOMAIN (169)..(180): RNase H domain identified by eMATRIX, accession number PF00075B, p-value=1.000e-13, raw score of 12.56
  DOMAIN (106)..(287): Reverse transcriptase domain identified by PFam, accession name rvt, E-value=6.4e-30, PFam score of 112.8

SEQ ID NO: 36155 - protein, 28 aa, Homo sapiens
MLNWLKILLTNKGAGLISLKAVREYISM

SEQ ID NO: 36156 - protein, 40 aa, Homo sapiens
MLAICHGSSEIVGMVLQQNVDICAEDTCGMIATLCCCLWV

SEQ ID NO: 36157 - protein, 212 aa, Homo sapiens; identical to SEQ ID NO: 35670
  DOMAIN (95)..(106): RNase H domain identified by eMATRIX, accession number PF00075B, p-value=1.000e-13, raw score of 12.56
  DOMAIN (25)..(201): Reverse transcriptase domain identified by PFam, accession name rvt, E-value=8e-08, PFam score of 39.4
  misc_feature (1)...(212): Xaa = X or * as defined in Table 2

SEQ ID NO: 36158 - protein, 149 aa, Homo sapiens
  DOMAIN (97)..(114): Zinc finger, CCHC class domain identified by PFam, accession name zf-CCHC, E-value=0.021, PFam score of 18.9
  misc_feature (1)...(149): Xaa = X or * as defined in Table 2
MNKELGISSYKFCGMGRKTSVSAAKSVSATIPISRVQGLLQVLGQEVFLLLCQDQEEQAKREKRDQRKATALAMALRQTNLGGSERIENGAGQSPSRACYQCGLQGHFKKDYPTREPAAPCPLCXGNHWKMHCPRGQRSCDSHLAITHL

SEQ ID NO: 36159 - protein, 241 aa, Homo sapiens
  DOMAIN (144)..(155): RNase H domain identified by eMATRIX, accession number PF00075B, p-value=1.000e-13, raw score of 12.56
  DOMAIN (77)..(241): Reverse transcriptase domain identified by PFam, accession name rvt, E-value=4.6e-19, PFam score of 76.8
MFRKDEELTSSQRDLAVRNWAWSLARGERSANMHAVHTSLLVERTILTTTKERGSTLQYPLRPGAHKGLQDIVKRFKAQALIRKCSSPCNTPILGVQKPNGQWRLVQDLRLINEAVIPLYPVVPNPYNLLSQIPEEAEWFTVLDLKDAFFCIPLHSDSQFLFAFEDPTDHTSQLTWTVLPPGFRDSPPLFGQALAQDLGHFSSPGTLVLQYVDDLLLATSSEASCQQATLDLLNFLANQGY

SEQ ID NO: 36160 - protein, 138 aa, Homo sapiens
LPLLTIPGCLNPFCSQQGQMPQISPWGFLPWCTRRIGSHVGLENECKVLLSGSSSQQMGEPEGRQSRKMVFLLESGHSAAGLSSDHPVQTPRCSTCRWPAGACRCALDVQLLVCSSASVLLLTSSCLCLCLVGSQGVL

SEQ ID NO: 36161 - protein, 281 aa, Homo sapiens
  DOMAIN (211)..(222): RNase H domain identified by eMATRIX, accession number PF00075F, p-value=8.159e-09, raw score of 12.87
  DOMAIN (159)..(270): RNase H domain identified by PFam, accession name rnaseH, E- value=1.8e-06, PFam score of 19.8
MGQVWAVVRSTLELFHTDDEEEGEYNKVTVEVTDQVYLPPKSKAEKEGEVHPYPSAPPHYYFEENDPPDLSFLEDTGGKAHLVDYIKACDSIRGNLHKATLLAQAMAGLRVDKGNTPFPGACFNCGKHGHTKKNVEKKSATEQYCERFAFTIPAVSNLQPAKCFHCFTDGYSNGKASYSGSKGKVFQTPYTSAQKVELVAVIEVLTAFDMPINVISDSSYMVHSTQLIENAQLQFHTDEQLIIKTKKGEKQGLRDSPYTIESSIINFQFFKPAQRPDVISS

SEQ ID NO: 36162 - protein, 592 aa, Homo sapiens; identical to SEQ ID NO: 35674
  DOMAIN (495)..(507): RNase H domain identified by eMATRIX, accession number PF00075C, p-value=3.077e-09, raw score of 11.58
  DOMAIN (319)..(438): Gag P30 core shell protein domain identified by PFam, accession name Gag_p30, E-value=1.1e-16, PFam score of 62.0

SEQ ID NO: 36163 - protein, 394 aa, Homo sapiens
  DOMAIN (63)..(275): gag gene protein p24 domain identified by PFam, accession name gag_p24, E-value=1.4e-42, PFam score of 154.9
MGKVWAVVRSTLELFHTDDEEEGEYNEVTEEITEQVYLPAKAKAVKEREQRGNITATFEPFPFKLLKEFKQAINQYGPGSHFVMGLLKNVAVSSQMIPTDWDALTQACLTPAQFLQFKTWWAHEASIQAACNAQAQPQINITTGQLLGVGGWAGLDAQVVMQDDAIEQLRGVCIRAWEKIPLCGEQYASFSAIKQGPKEPYVDFIAWLQESLKKAGRQSEISSQNKKVIADLAAQDIVLQLLAFDNANPDCQAALRPIRGKAHLVDFIKACDVIGAYWTANRREAFQSPFPSILGLAGGQEGGPRAEALVQPPPGRCSCWVTISPLNQKKALLRITHGTDVVTHGSKVRTEVLALDPGKKLQNMLLSSRKGLAASLNTFQLHSLSEKLRGEIHG

SEQ ID NO: 36164 - protein, 92 aa, Homo sapiens
  misc_feature (1)...(92): Xaa = X or * as defined in Table 2
LSQWKNRWTRTFLASLSVIANILEPLLNILHVAVWLMLPNXSXVKKQVIMFWNWWVLGLTDFKNEATDPRVCSWPCWLRSEAADLCGECYSS

SEQ ID NO: 36165 - protein, 779 aa, Homo sapiens
  DOMAIN (247)..(259): PEPSIN (A1) ASPARTIC PROTEASE FAMILY SIGNATURE domain identified by eMATRIX, accession number PR00792C, p-value=1.931e- 09, raw score of 9.10
  DOMAIN (22)..(114): Gag P30 core shell protein domain identified by PFam, accession name Gag_p30, E-value=1.1e-17, PFam score of 65.5
MTAEERDKFPTSQQAVPSMDAHWDLDSDHGDWSRKHLLTCVLEGLRRIRKKPMNYSMMSTITQGKEENPSAFLEQLQEALRKYTPLSPNSLVGQLILKDKFITQSTTDIRRKLQNRDQEEQAQKEKRDQRKAIALVMALRQTLVVQRGQKMEQANHLVGLVTSVVCKDTLKKIVQRETSRPIVHVHYTEAITGSHTTQRAKLLWARSPQPDDPMTGLRMTAASTRSCHHPLTEPWVCLIIEGQEIDFLLDTGTTFSVLIPCLGRLSSRSVTIQGILGQPVTRQYPLRPEAHKGLQDIVKHLKAQDSVRKCSSPCNTPILGVQKLNSQWRLVQDLRLINEAVIPLYPVVRNPYTLLSQVPEEAEWFTVLDLKDAFFCIPLHSDSQFLFAFEDPTDHTSQLMWMVLPQRFRDSPHLFGQAQAQDLGHFSSPGTLVLQYSEIAKTLYTLIKEMERANTHLVEWEPEAETAFETLKQALVQAPALSLPTGQNFALYVIERAGIALGVLTQTHRTTPQPVAYLSKEIDVVAKGWPHCLRTVVAVAVLVSEAIKIIQGKDFTVWTTHDVNGILGAKGGLWPSDNCLLRYQALLLEEPVLQIHMCIAINPATFLPEDGEPIKHDCQQIIVQTYATQDDLLEVPLANPDFNLYNSGSSFVENGIQRAGYAIVSDVTVLGSKPLSPGTSTQLAELVALTRALELGKGKRINVYTDSKYAYLILHAHAAIWKEREFLTSGGTPIKYHKEIMELLHTVQKPKEVAVLHCRNHQKGSRPSSYRWSYKWNPK

SEQ ID NO: 36166 - protein, 248 aa, Homo sapiens
SKTRGSVASFLKSVRPRTHQEEQITPDAPPLRAATFIAMVCGFTPEVKRDHKPTGRNKFQTHFGDDQGTIAKHPLCGLGGQAKVQVFEDESVMATKSDLPRSSLWSRRKTSLSAAASVSATILISRVQGLLQVLGRQWGKQTNQNCPMRAIVLLLAFGPSIFNLFVKFVSSRIEAIKLQMVLQMEPHMCSTNNFYQGPLDRPAGPFTGLKSSPLEDTTTAGPLLCPYPAGISQSGHRPIPNGSWGCPV

SEQ ID NO: 36167 - protein, 1205 aa, Homo sapiens
  DOMAIN (963)..(988): ALDO-KETO REDUCTASE SIGNATURE domain identified by eMATRIX, accession number PR00069E, p-value=1.964e-23, raw score of 18.14
  DOMAIN (693)..(1032): Aldo/keto reductase family domain identified by PFam, accession name aldo_ket_red, E-value=6.9e-136, PFam score of 464.8
GPISLPPYPSLPIAPRPINDNPPLISPAQKEICEEISKGQQKPLGYRLCPLQAVGGGEFGPTWVHVPFSLSDLKQIKADLGNFSDDPDRYINVLQGLGQIFYLIWRDVMLLLDQTLAFNEKNAALAAAQEFGDTWYLSQVNDRMTAEERGKIPNGQQAVPSMDPHWDLDSDHGDCSCKHLLTCVLEGLRRIRKKYMNYSMMSTITQGKEENPSASLERLWEALRKYTPLSTKSLEGQLILKDKFITQSATDIRRKFQKQALGPKQNLETLLNLATSVFYNRDQEEQAQKEKQDQRKTAALVMALRQTNLGGSERTENGAGQSPERDTLAKAGAIIYMNMGNKLPICCPLPEEGINPEVWALEGQFGKAKNAHPVQIRLKDPTTFPYQRQYPLRPEAHKGLKDIVKYLKAQALVKKCSSPCNSPILGVQKPNSQWRLVQDLRLINEAVIPLYPVVPNPYILLSQIPEEAEWFTVLDLKDAFFCIPPHSDSQFLFAFEDPTDHMSQLMWTVLPQGFKDSPHLFGQALAQDLGYFSSPGTLVLQYVDDLLLATSSEASCQQATLDLLNFLANQGCKRVGIALGVLTQTHGTTPQPVAYLSKETDVAAKGPLTAILLLLAFGPCIFNLLVKLVSSRIDAIKLQMVLQMEPQMSSTNNFYRGPLDRPAGPFTGLKSSPLEDTTSAGPLLRPYPASLLGKVKEAVKVAIDAEYRHIDCAYFYENQHEVGEAIQEKIQEKAVMREDLFIVSKVHMAHLVWPTFFERPLVRKAFEKTLKDLKLSYLDVYLIHWPQGFKSLKKWYADVVFSKHQDPETLLNRTKCPDADSSKLFILYLQTGDDFFPKDDKGNMISGKGTFLDAWEAMEELVDEGLVKALGVSNFNHFQIERLLNKPGLKYKPVTNQNSLGTMQNRAGFPRDEDCLLLQVECHPYLTQEKLIQYCHSKGITVTAYSPLGSPDRPWAKPEDPSLLEDPKIKEIAAKHKKTTAQVLIRFHIQRNVTVIPKSMTPAHIVENIQVFDFKLSDEEMATILSFNRNWRAFDFKEERHPSKSRGHYTLELGEEKRVNIYTDSEYAYLVLHAHAVIWREREFLTSKGTPIKHQEAIRRLLLAVQKPKEVAVFHCWGHQKGKEREIEGNCQVDIEAKRAARIKAVKLQMVLQMEHQMQCMTKIYRGPLDWPASPCSDVNDIEGTPPEEISTAQPLLHPNSAGSS

SEQ ID NO: 36168 - protein, 593 aa, Homo sapiens
  DOMAIN (438)..(449): RNase H domain identified by eMATRIX, accession number PF00075B, p-value=1.000e-13, raw score of 12.56
  DOMAIN (111)..(222): gag gene protein p24 domain identified by PFam, accession name gag_p24, E-value=3.4e-24, PFam score of 93.8
MGQVWALVRSTLELFHTDDEEEGEYDEVTEEVTEQVYLPAKAKVAQEEEVHPYPSAPPHYYFEEKEWPDPPDLSFLEDTGRKVVAPVTEQHLERLLSVLFRQEFSRLDERDDAVEQLRGVCIRAWEKITSGGEQYPSFSAVKQGPKELYADFIAWNLLRQESLKKMIADSAAQVIVLQLLAFDNANADCQAALQPVRGKAHLVDYIKACDGIRGNLHKATLLAQEMAGLRVDKGNTPFPGACFNYGKHGHTKKECRKKSVSQAARWGKRKTADPEICPKCKKGKYWANQCHSKFDKDGTLISGNAMRAEQDCEWFTFTIPAVNNLQPAKHFHRFTDVSSNGKASYSGSKGGQARVQLFENASVRATNSDLPQSSLWCRRKTSVSVAVLVSATIPISRVQGPSQVLGQGEKQTNQNVVPNPYTLLSQIPEEAKWFTALDLKDAFFCIPLHSDSQFLFAFEDLTDHTSQLTWTILPQGFRDSPHLFGQALAQDLGHFSSPGTLVLQYVDDLLLATSSEASCQQATLDFLSFLANHGIEAIKLQMILQMEPQMSSTNNYQGPLDQPAGPFNGLKSSPLEDTTTAGPLLHPYPAGSS

SEQ ID NO: 36169 - protein, 140 aa, Homo sapiens
  DOMAIN (71)..(139): Eukaryotic protein kinase domain identified by PFam, accession name pkinase, E-value=5.7e-07, PFam score of 29.1
MSWMGSFLTSLPHLSISWGNRFEISNDQTRNHLPEQPSITVKYVQCPPYKTGDTEVTLDDERALGQRGRAVYFVRHKESRQRFAMKKINKQNLILRNQIQQAFVERDILTFAENPFVVSMYCSFETRRHLCMVMEYVEGI

SEQ ID NO: 36170 - protein, 544 aa, Homo sapiens
  DOMAIN (16)..(68): Ubiquitin domain proteins domain identified by eMATRIX, accession number BL00299, p-value=5.065e-29, raw score of 28.84
  DOMAIN (1)..(69): Ubiquitin family domain identified by PFam, accession name ubiquitin, E-value=1.5e-42, PFam score of 136.1
MQIFVKTLTGKTITLEVEPSDTIENVSAKIQDKEGIPPDKQRLIFASKQLEDGRTLSDYNVQKQPTPHLGFYGFRSNTRDVKDLFKENYKPLLNEIKEDTNKWKNIPCLWIGRINIVKMAILPKVIYRFNVIPIKLPMTFFTELEKTTLKFIWNQKGARIAKSILSQKNKAGGIMQPDFKLYYKATVTKTAWFGVYFVGGPRCGSSSWVLVDSGVPASLQAFTMLVKARHFCGEQEAPAIDCLCFCTGDGVGLVRGTDQCRSECLLGHLQAGGIAQVGQLKQIPPVQTCACKVMWGVAMGSGEVAVWVANTRLVCAVRAVLLEFSTGQAWPTGAEAILWATTAPKMALEEASRPRSAQVAPALTDGQDHSADIKSENSPRAKVYYGSKLSLEGSPSLSMHCCRHSCTKPSGLHISWLAALPLCLSLGGSTPERCGSAIIQFNQPRMESLCYGPKPGALCLVTSSWGIFQYLEVSPVKAAKQQRWWPSFLSGSSIPGKYRPVAGPNTLAIYSTDLSSIPLAVLDVKMIFPAGIPSTKLKTLGMWK

SEQ ID NO: 36171 - protein, 199 aa, Homo sapiens
  misc_feature (1)...(199): Xaa = X or * as defined in Table 2
KYLTKKTQAASVEAVKMLDEILLQLSASVPVDVMPGEFDPTNYTLPQQPLHPCMFPLATAYSTLQLVTNPYQATIDGVRFLGTSGQNVSDIFRYSSMEDHLEILEXLRVRHISPTAPDTLGCYPFYFCGNTPSFGSKIIRGPEDQTVLLVTVPDFSATQTACLVNLRSLACQPISFSGFGAEDDDLGGLGWAPDSKKWF

SEQ ID NO: 36172 - protein, 495 aa, Homo sapiens
RDAARRALNLLGLGEAVWTKQVRSVAMFSEQAAQRAHTLLSPPSANNATFARVPVATYTNSSQPFRLGERSFSRQYAHIYATRLIQMRPFLENRAQQHWGSGVGVKKLCELQPEEKCCVVGTLFKAMPLQPSILREVSEEHNLLPQPPRSKYIHPDDELVLEDELQRIKLKGTIDVSKLVTGTVLAVFGSVRDDGKFLVEDYCFADLAPQKPAPPLDTDRFVLLVSGLGLGGGGGESLLGTQLLVDVVTGQLGDEGEQCSAAHVSRVILAGNLLSHSTQSRDSINKAKYLTKKTQAASVEAVKMLDEILLQLSASVPVDVMPGEFDPTNYTLPQQPLHPCMFPLATAYSTLQLVTNPYQATIDGVRFLGTSGQNVSDIFRYSSMEDHLEILEWTLRVRHISPTAPDTLGCYPFYKTDPFIFPECPHVYFCGNTPSFGSKIIRGPEDQTVLLVTVPDFSATQTACLVNLRSLACQPISFSGFGAEDDDLGGLGLGP

SEQ ID NO: 36173 - protein, 143 aa, Homo sapiens
  DOMAIN (93)..(143): Ribosomal protein L30 proteins domain identified by eMATRIX, accession number BL00634, p-value=2.636e-23, raw score of 34.38
  DOMAIN (88)..(134): Ribosomal protein L30p/L7e domain identified by PFam, accession name Ribosomal_L30, E-value=2.3e-20, PFam score of 72.0
  misc_feature (1)...(143): Xaa = X or * as defined in Table 2
MEGVEEKKKEVPAVPETLKKKRRNFAELKIKRLRKKFAQKMLRKARRKLIYEKAKHYHKEYRQMYRTEIRMARMARKAGNFYVPAEPKLAFVIRXRGINGVSPKVRKVLQLLRLRQIFNGTFVKLNKASINMLRDCRAIYCMG

SEQ ID NO: 36174 - protein, 91 aa, Homo sapiens; identical to SEQ ID NO: 34981

SEQ ID NO: 36175 - protein, 268 aa, Homo sapiens
  DOMAIN (97)..(148): Ribosomal protein L30 proteins domain identified by eMATRIX, accession number BL00634, p-value=9.647e-19, raw score of 34.38
  DOMAIN (97)..(127): Ribosomal protein L30p/L7e domain identified by PFam, accession name Ribosomal_L30, E-value=2.7e-10, PFam score of 38.9
  misc_feature (1)...(268): Xaa = X or * as defined in Table 2
EKAKEFRRAEEKKKEVPAVPETLKKKXRNFAELKIKRLRKKFAQKMLQRARRKFIHEKAKHYHKEYRQMYRTEILMARMARKAGNFYVPAEPKLAFVIRIRGINGVSPKVRKVLQLLRLRQIFNGNLLXSSTKASINMLRDCRSHILAWGVPQILKSVNELIYKRGYGKINKKRIALTDNALIARSLGKYGILLAWEDLIHEIYTVGKRFKEANNFPVGPSNLSSPPRWKXKKKTTHFCKKVEDAGNREGRTRSNRPYLEGMDLRCLP

SEQ ID NO: 36176 - protein, 76 aa, Homo sapiens [sequence omitted]

SEQ ID NO: 36177 - protein, 150 aa, Homo sapiens
  DOMAIN (46)..(97): Ribosomal protein L30 proteins domain identified by eMATRIX, accession number BL00634, p-value=7.268e-17, raw score of 34.38
  DOMAIN (65)..(93): Ribosomal protein L30p/L7e domain identified by PFam, accession name Ribosomal_L30, E-value=1e-06, PFam score of 27.1
MAEQKQRKIPLVPENLLKKRKAYQVLKATQTKQALLAKKEQRKGKGLSKRIVGVSLLVQTAIARLHLKKIFSGVFVKVTPQNLKMLRIVEPYVIWGFPNLKSVREFILKHGQAKVNKNTIPLTDNTVIEEHLGKFGVICLEDLIHEIASQ

SEQ ID NO: 36178 - protein, 183 aa, Homo sapiens; identical to SEQ ID NO: 31806

SEQ ID NO: 36179 - protein, 192 aa, Homo sapiens
  DOMAIN (87)..(138): Ribosomal protein L30 proteins domain identified by eMATRIX, accession number BL00634, p-value=7.796e-20, raw score of 34.38
  DOMAIN (82)..(134): Ribosomal protein L30p/L7e domain identified by PFam, accession name Ribosomal_L30, E-value=1.2e-10, PFam score of 40.0
EQRKIPLVPENLLKKRKAYQALKATQAKQALLAKKEQKKGKGLRFKRLESFLHDSWRQKRDKVRLRRLEVKPHALELPDKHSLAFVVRIERIDGVSLLVQRTIARLRLKKIFSGVFVKVTPQNLKMLRIVEPYVTWGFPNLKSVRELILKRGQAKVKNKTIPLTDNTVIEEHLGECYSLGVSWGRKPGSLKL

SEQ ID NO: 36180 - protein, 882 aa, Homo sapiens
  DOMAIN (725)..(776): Ribosomal protein L30 proteins domain identified by eMATRIX, accession number BL00634, p-value=7.667e-18, raw score of 34.38
  DOMAIN (720)..(772): Ribosomal protein L30p/L7e domain identified by PFam, accession name Ribosomal_L30, E-value=7.2e-08, PFam score of 30.9
  misc_feature (1)...(882): Xaa = X or * as defined in Table 2
MFGRSRSWVGGGHGKTSRNIHSLDHLKYLYHVLTKNTTVTEQNRNLLVETIRSITEILIWGDQNDSSVFDFFLEKNMFVFFLNILRQKSGRYVCVQLLQTLNILFENISHETSLYYLLSNNYVNSIIVHKFDFSDEEIMAYYISFLKTLSLKLNNHTVHFFYNEHTNDFALYTEAIKFFNHPESMVRIAVRTITLNVYKVDNQAMLHYIRDKTAVPYFSNLVWFIGSHVIELDDCVQTDEEHRNRGKLSDLVAEHLDHLHYLNDILIINCEFLNDVLTDHLLNRLFLPLYVYSLENQDKVFLIIHHAPLVNSLAEVILNGDLSEMYAKTEQDIQRSSVLPTLSSLWQGSHLSLNQLQSGLHKCSSHLCGAQAAADSVTGEIPAIRSLEWLISAGSKARTFFFLKMLIGFWEKVDCEYQRRQVLSTRLQEALPSNRLTDVAAVHSSCMLGFGSTAPRGSWIGDPAAVHLPLPGELAEHLGSKGTTTVTKHQPQAKPSIRCFIKPTETLERSLEMNKHKGKRRVQKRPNYKNVGEEEDEEKGPTEDAQEDAEKAKGTEGGSKGIKTSGESEEIEMVIMERSKLSELAASTSVQEQNTTDEEKSAAATCSESTQWSRPFLDMVYHALDSPDDDYHALFVLCLLYAMSHNKENLLKKRKAYQALKATQAKQELLAKKEQKKGKGLRFKLLESFLHDYWQQKPDKVHLRRLEVKPHAVELPDKHSLAFVVRIERIDGVSLLVQRTIARLCLKKIFSGVFVKVTPQNLQMLRIVETYVTWGFPNLKSVRELILKRGQAKVKNKTIPLTRHSQXWRSTWGKFGVICLEDLIHEIAFPGKHFQEISWFLCPFHRLSGPSCYQKXEWASSRRWAHLGYRGERINQLIRQLN

SEQ ID NO: 36181 - protein, 134 aa, Homo sapiens
LEISIMAASISGYTFSAVCFHSANSNADHEGFLLGEVRQEETFSISDSQISNTEFLQVIKVIGWYRFRRNTQQQMSYREQVLHKQLTRILGVPDLVFLLFSFISTANNSTHALEYVLFRPNRRYNQRISLAIPN

SEQ ID NO: 36182 - protein, 280 aa, Homo sapiens
  DOMAIN (121)..(134): D-isomer specific 2-hydroxyacid dehydrogen domain identified by PFam, accession name 2-Hacid_DH, E-value=0.015, PFam score of 7.0
MVLRLSGLWSAGREAAVCVSSQSRKWMGSGSSSCIRPQIMNGPLHPRPLVALLDGRDCTVEMPILKDLATVAFCDAQSTQEIHEKVLNEAVGAMMYHTITLTREDLEKFKALRVIVRIGSGYDNVDIKAAGELGECEAALAAWSCPELCGPCSGGLGEAAGTGTTEQPLLAVARWLPPGRAVEHLAALPSHDTGQRNKYACMKLIAVAQEKRQSARPDTAEDALQAAVSRRPRAPRTPRQSSTLKTAVGRGKERELGRRAPPTHNQGRAPADVTLCRPAP

SEQ ID NO: 36183 - protein, 419 aa, Homo sapiens
EISIMAASISGYTFSAVCFHSANSNADHEGFLLGEVRQEETFSISDSQISNTEFLQVIQIYNHQPCSKLFSFYDYASKVNEESLDRILKDRRKKVIGWYRFRRNTQQQMSYREQVLHKQLTRILGVPDLVFLLFSFISTANNSTHALEYVLFRPNRRYNQRISLAIPNLGNTSQQEYKVSSVPNTSQSYAKVIKEHGTDFFDKDGVMKDIRAIYQVYNALQEKVQAVCADVEKSERVVESCQAEVNKLRRQITQRKNEKEQERRLQQAVLSRQMPSESLDPAFSPRMPSSGFAAEGRSTLGDAEASDPPPPYSDFHPNNQESTLSHSRMERSVFMPRPQAVGSSNYASTSAGLKYPGSGADLPPPQRAAGDSGEDSDDSDYENLIDPTEPSNSEYSHSKDSRPMAHPDEDPRNTQTSQI

SEQ ID NO: 36184 - protein, 247 aa, Homo sapiens
MSTDMKLCVSVDEHMGLASDADKTSEIAMCRAHQVYIERRTSRHADGIIKVIGWYRFRRNTQQQMSYREQVLHKQLTRILGVPDLVFLLFSFISTANNSTHALEYVLFRPNRRPPPAQPMSDRLFPGSGGWSTQGDVSRRAALIVSRRRASAQFPFLSAADCGLEGAGLPRGQRNKYACMKLIAVAQDIEDLPPTVQEKLFDEVLDRDVQKELEEESPIINLVLGIGYTFGQSTVCTLEPDCRRLPT

SEQ ID NO: 36185 - protein, 1022 aa, Homo sapiens; identical to SEQ ID NO: 33980
  DOMAIN (986)..(1003): Zinc finger C2H2 type, domain proteins. domain identified by eMATRIX, accession number BL00028, p-value=8.714e-09, raw score of 16.07
  DOMAIN (472)..(1007): Zinc finger, C2H2 type domain identified by PFam, accession name zf-C2H2, E-value=4.2e-28, PFam score of 106.8
  misc_feature (1)...(1022): Xaa = X or * as defined in Table 2

SEQ ID NO: 36186 - protein, 209 aa, Homo sapiens
  DOMAIN (173)..(190): Zinc finger C2H2 type, domain proteins. domain identified by eMATRIX, accession number BL00028, p-value=8.714e-09, raw score of 16.07
  DOMAIN (16)..(194): Zinc finger, C2H2 type domain identified by PFam, accession name zf-C2H2, E-value=4.7e-08, PFam score of 40.2
  misc_feature (1)...(209): Xaa = X or * as defined in Table 2
LCQHNRIKHKGIRKVYACSHCPDSRRTFTKRLMLEKHVQLMHSLKDPDLKETDRCHQXGGNRNKRRHLSSPVPSGSWKNQFSRCAMCGFTTENLLQFHEHIPQHKSDSSSYQCQECGLWYTSHVSLSRHLFIVHKLKEPQPVSKQNGAGEDNQQENKPSHEDESPNGTVSDRKCKVCVKTFETEAALNTHMRIHGMAFIKSKRMSSAKK

SEQ ID NO: 36187 - protein, 254 aa, Homo sapiens
  DOMAIN (218)..(235): Zinc finger C2H2 type, domain proteins. domain identified by eMATRIX, accession number BL00028, p-value=6.143e-09, raw score of 16.07
  DOMAIN (21)..(241): Zinc finger, C2H2 type domain identified by PFam, accession name zf-C2H2, E-value=0.056, PFam score of 20.0
  misc_feature (1)...(254): Xaa = X or * as defined in Table 2
MQRDVYISHVRKEHGKQMKKQPCCQRDKPFSSSHSLCWHNRIKHKVIRKVYTCSHCSDSRGTFTKQLMLEKHVQLTHGIKDPDLKETDRRHQXGGNRNKRRPQGPQSQVEVERTGSGVQASQGAITQPLKKLKINVFKVHKCARAGFTTENLLQFHEHIPQHKSDGSSYQCREHLFVVHKLKEPQPVSKQNGAGEDNQQENKPSHEDESPNGAMSDRKCKVCAKTFETEAALNTHMQTHGMAFIKSKRMSSDEK

SEQ ID NO: 36188 - protein, 73 aa, Homo sapiens
  misc_feature (1)...(73): Xaa = X or * as defined in Table 2
AFFLDTLYTQFSRCXSRAFVPFAHPTAMACSSRRLIRVQEQDAAQVTHQSFKDDLCVVLGDTLHHRFFLIFRH

SEQ ID NO: 36189 - protein, 379 aa, Homo sapiens
  DOMAIN (5)..(276): NAD dependent epimerase/dehydratase family domain identified by PFam, accession name Epimerase, E-value=1.4e-65, PFam score of 231.3
RRPDIFRLATGMKYCCRMALHAEAQRHRVYRLLTKCALFMPDAALTPYPAYKIVQIQYIAEFSDKKNSFRFHHISTDEVYGDLPHPDEVNNTEELPLFTETTAYAPSSPYSASKASSDHLVRAWKRTYGLPTIVTNCSNNYGPYHFPEKLIPLVILNALEGKALPIYGKGDQIRDWLYVEDHARALYTVVTEGKAGETYNIGGHNEKKNIDVVLTICDLLDEIVPKEKSYREQITYVADRPGHDRRYGVPPVSISFEVMPGESVDGKFDSFRSLKKALLEEIGDENSKVYRALMECEDLDAAGIAASVKRDYQQNRVARWADDQKIVGQADPVAWVSLQDIQGKDDKWSVPLTVRGKSADIHYQVSVDCKAGMAEYQRR

SEQ ID NO: 36190 - protein, 460 aa, Homo sapiens
MYDADRDSLTAVDVIHKEVYPEQSDAPKRELCLANDSWIFYYVRKHPVTLLPYQVWRHAIGTPASQDKLIYEEKDDTYYVSLHKTTSKHYVVIHLASATTSEVRLLNAEMANAEPFVFLPRRKDHEYSLDHYQHRFYLRSNRHGKNFGLYRTRMRDEQQWEELIPPHENIMLEGFTLFTDWLAYDCGAFWGEQGTRAASANSQWNYQKPLTPLIFRHSRFAVHADLVMNIGTFTTHDDESSKAKIGNDTIVFTLYKKEAAMWETLSVTGVDKEMMQRIREKSILQAQERAKEATEAKAAAKREDQKYALSVMMKISDNVWKNIVKIPVLFYSVLMTGASSSQSRCVLLLYTDDLLLEHAMAVGCAKGTDALLQHLENCVYKVSKKKAQICRQQVHYLGFAIRKGERSLGSERKRVICSLQEPKTRRQNMDAKSLINTGNGIQQHSRKLTHTDQVGSIPGM

SEQ ID NO: 36191 - protein, 168 aa, Homo sapiens
ELKMSSKQEIMSDQRFRRVAKDPRFWEMPEKDRKVKIDKRFRAMFHDKKFKLNYAVDKRGRPISHSTTEDLKRFYDLSDSDSNLSGEDSKALSQKKIKKKKTQTKKEIDSKNLVEKKKETKKANHKGSENKTDLDNSIGIKKMKTSCKFKIDSNISPKKDSKEFTQKN

SEQ ID NO: 36192 - protein, 299 aa, Homo sapiens
  DOMAIN (128)..(156): Uracil-DNA glycosylase proteins domain identified by eMATRIX, accession number BL00130C, p-value=3.357e-09, raw score of 16.92
MLSAGLGLLMLVAVVEFLIGLIGNGSLVVWSFREWIRKFNWSSYNLIILGLAGCRFLLQWLIILDLSLFPLFQSSRWLRYLSIFWVLVSQASLWFATFLSVFYCKKITTFDRPAYLWLKQRAYNLSLWCLLGYFIINLLLTVQIGLTFYHPPQGNSSIRYPFESWQYLYAFQLNSGSYLPLVVFLVSSGMLIVSLYTHHKKMKVHSAGRRDVRAKAHITALKSLGCFLLLHLVYIMASPFSITSKTYPPDLTSVFIWETLMAAYPSLHSLILIMGIPRVKQTCQKILWKTVCARRCWGP

SEQ ID NO: 36193 - protein, 188 aa, Homo sapiens
  DOMAIN (71)..(108): Chaperonins TCP-1 proteins domain identified by eMATRIX, accession number BL00750E, p-value=8.714e-19, raw score of 24.59
  DOMAIN (47)..(102): TCP-1/cpn60 chaperonin family domain identified by PFam, accession name cpn60_TCP1, E-value=6.5e-14, PFam score of 55.0
MLEILLPDCCYQSYQPPTFGACSKGHVLGVALNSQSITLYTNKKCKESDITKERIQKILATGANVILTTGGIDDMCLKYFVQAGAMAVRRVLKRDLKRIAKASAVLGLQHYSSNSAVFTKDKESTYVPITSGLDKENLVHIHHGILCSRKKNETMFFAAIWIQLKAIILSELMQEQKTKYSMFSLATA

SEQ ID NO: 36194 - protein, 504 aa, Homo sapiens
  DOMAIN (82)..(102): TAILLESS COMPLEX POLYPEPTIDE 1 (CHAPERONE) SIGNATURE domain identified by eMATRIX, accession number PR00304C, p-value=7.429e- 23, raw score of 8.69
  DOMAIN (28)..(483): TCP-1/cpn60 chaperonin family domain identified by PFam, accession name cpn60_TCP1, E-value=2.4e-188, PFam score of 639.1
MEGPLSVFGDRSTGETIRSQNVMAAASIANIVKSSLGPVGLDKMLVDDIGDVTITNDGATILKLLEVEHPAAKVLCELADLQDKEVGDGTTSVVIIAAELLKNADELVKQKIHPTSVISGYRLACKEAVRYINENLIVNTDELGRDCLINAAKTSMSSKIIGINGDFFANMVVDAVLAIKYTDIRGQPRYPVNSVNILKAHGRSQMESMLISGYALNCVVGSQGMPKRIVNAKIACLDFSLQKTKMKLGVQVVITDPEKLDQIRQRESDYHQGENSEDPGNWCQLRRVLTRDLKRIAKASGATILSTLANLEGEETFEAAMLGQAEEVVQERICDDELILIKNTKALKRVLESKSVVPGGGAVEAALSIYLENYATSMGSREQLAIAEFARSLLVIPNTLAVNAAQDSTDLVAKLRAFHNEAQVNPERKNLKWIGLDLSNGKPRDNKQAGVFEPTIVKVKSLKFATEAAITILRIDDLIKLHPEILRIKHGSYEDAVHSGALND

SEQ ID NO: 36195 - protein, 76 aa, Homo sapiens
  DOMAIN (51)..(76): 1 HERPESVIRUS GLYCOPROTEIN H domain identified by eMATRIX, accession number DM01803J, p-value=5.385e-09, raw score of 12.93
AESGVDRGEPEPMEVEEGELEIVPVRRSLKELIPITVVFLKDEKYHSLPIIIKGSVGGLLVLIVILVILFKMMSLM

SEQ ID NO: 36196 - protein, 1223 aa, Homo sapiens
  DOMAIN (242)..(260): VON WILLEBRAND FACTOR TYPE A DOMAIN SIGNATURE domain identified by eMATRIX, accession number PR00453A, p-value=8.594e- 13, raw score of 12.79
  DOMAIN (243)..(423): von Willebrand factor type A domain identified by PFam, accession name vwa, E-value=4.7e-66, PFam score of 232.9
  misc_feature (1)...(1223): Xaa = X or * as defined in Table 2
IPAPVSGRPPPGLLAEGKLSGPRPMCRTRLGSHTAASAPARMWLFHTLLCIASLALLAAFNVDVARPWLTPKGGAPFVLSSLLHQDPSTNQTWLLVTSPRTKRTPGPLHRCSLVQDEILCHPVEHVPIPKGRHRGVTVVRSHHGVLICIQVLVRRPHSLSSELTGTCSLLGPDLRPQAQANFFDLENLLDPDARVDTGDCYSNKEGGGEDDVNTARQRRALEKEEEEDKEEEEDEEEEEAGTEIAIILDGSGSIDPPDFQRAKDFISNMMRNFYEKCFECNFALVQYGGVIQTEFDLRDSQDVMASLARVQNITQVGSVTKTASAMQHVLDSIFTSSHGSRRKASKVMVVLTDGGIFEDPLNLTTVINSPKMQGVERFAIGVGEEFKSARTARELNLIASDPDETHAFKVTNYMALDGLLSKLRYNIISMEGTVGDALHYQLAQIGFSAQILDERQVLLGAVGAFDWSGGALLYDTRSRRGRFLNQTAAAAADAEAAQYSYLGYAVAVLHKTCSLSYVAGAPQYKHHGAVFELQKEGREASFLPVLEGEQMGSYFGSELCPVDIDMDGSTDFLLVAAPFYHVHGEEGRVYVYRLSEQDGSFSLARILSGHPGFTNARFGFAMAAMGDLSQDKLTDVAIGAPLEGFGADDGASFGSVYIYNGHWDGLSASPSQRIRASTVAPGLQYFGMSMAGGFDISGDGLADITVGTLGQAVVFRSRPVVRLKVSMAFTPSALPIGFNGVVNVRLCFEISSVTTASESGLREALLNFTLDVDVGKQRRRLQCSDVRSCLGCLREWSSGSQLCEDLLLMPTEGELCEEDCFSNASVKVSYQLQTPEGQTDHPQPILDRYTEPFAIFQLPYEKACKNKLFCVAELQLATTVSQQELVVGLTKELTLNINLTNSGEDSYMTSMALNYPRNLQLKRMQKPPSPNIQCDDPQPVASVLIMNCRIGHPVLKRSSAHVSVVWQLEENAFPNRTADITVTVTNSNERRSLANETHTLQFRHGFVAVLSKPSIMYVNTGQGLSHHKEFLFHVHGENLFGAEYQLQICVPTKLRGLQVAAVKKLTRTQASTVCTWSQERACAYSSVQHVEEWHSVSCVIASDKENVTVAAEISWDHSEELLKDVTELQILGEISFNKSLYEGLNAENHRTKITVVFHESXEYHFLPITIXGHALVDVLVLIVILVILFKCGFFKRKYQQLELGRAFRKAQLXIQRILLEEEN

SEQ ID NO: 36197 - protein, 1063 aa, Homo sapiens; identical to SEQ ID NO: 33934
  DOMAIN (178)..(218): G-protein coupled receptors proteins domain identified by eMATRIX, accession number BL00237A, p-value=2.909e-14, raw score of 27.68
  DOMAIN (500)..(657): Gag P30 core shell protein domain identified by PFam, accession name Gag_p30, E-value=4.3e-36, PFam score of 130.0

SEQ ID NO: 36198 - protein, 449 aa, Homo sapiens
  DOMAIN (375)..(390): OLFACTORY RECEPTOR SIGNATURE domain identified by eMATRIX, accession number PR00245B, p-value=2.286e-14, raw score of 10.38
  DOMAIN (241)..(449): 7 transmembrane receptor (rhodopsin family) domain identified by PFam, accession name 7tm_1, E-value=5.3e-17, PFam score of 56.2
  misc_feature (1)...(449): Xaa = X or * as defined in Table 2
LRAGGPGQGGKGPAHPGRRVDELLLGHPTAVGCAKGTDCPTPTPGGLWVXGVQEESSDLPTAVDSSRPDIRDQAWASVHWELYVHGSSFINTXGERGAGYAVITWSTVVEARSMPQGTSAQKAELIAFIRALELSEALAKTVRQRCVSCRQHHARQGPAVPPGIQAYGAAPFEDLQVDFTEMPKCGDIRKIVTGDVNTPAILGVVSSSPPSHIGNNITEDPELQPILAGLSLSMYLVTVLRNLLIILAVSSDPHLHTPMCFFLSNLCWADIGFTLATVPKMIVDMQSHTRVISYEGCLTRISFLVLFACIEDMLLTVMAYDCFVAICRPLHYPVIVNPHLCVFFLLVYFFLSLLDSQLHSWIVLQFTIIKNVEISNFVCDPSQLLKLACSDSVINSIFMYFHSTMFGFLPISGILLSYYKIVPSILRISSSDGKYKAFSTCGSHLAVVC

SEQ ID NO: 36199 - protein, 609 aa, Homo sapiens; identical to SEQ ID NO: 33937
  DOMAIN (87)..(109): OLFACTORY RECEPTOR SIGNATURE domain identified by eMATRIX, accession number PR00245A, p-value=7.612e-16, raw score of 18.03
  DOMAIN (186)..(560): Gag P30 core shell protein domain identified by PFam, accession name Gag_p30, E-value=5.1e-31, PFam score of 112.2

SEQ ID NO: 36200 - protein, 45 aa, Homo sapiens
MGAASSTPKERERLEKQHLPPFGHQCSLKHLILDLLLLKKKRTFS

SEQ ID NO: 36201 - protein, 266 aa, Homo sapiens
  DOMAIN (107)..(147): G-protein coupled receptors proteins domain identified by eMATRIX, accession number BL00237A, p-value=9.743e-13, raw score of 27.68
  DOMAIN (58)..(171): 7 transmembrane receptor (rhodopsin family) domain identified by PFam, accession name 7tm_1, E-value=3.5e-14, PFam score of 47.2
MVTGKCTPPAILGVMLSSPNLDVSNEITEGVYTPCDIGSNMILSPPGYWERYHSAVLRNLLSIPAVSSDSHLHTPTYFFLSILCWADIGFTSATVPKMIVDMQWYSRVISHAGCLTQMSFLVLFACIEGMLLTVMAYDCFVGIYRPLHYPVIVNPHLCVFFVLVSFFLSLLDSQLHSWIVLQFTIIKNVEISNFVCDPSQLLKLASYDSVINSIFIYFDSTMFGFLPISGILSSYYKIVPSILRMSSSDGKYKTFSTYGSHLAFVC

SEQ ID NO: 36202 - protein, 40 aa, Homo sapiens
  misc_feature (1)...(40): Xaa = X or * as defined in Table 2
ANSFCLSGANLIGKKASFRFQKVNQLSSAGGNTNNVDGLX

SEQ ID NO: 36203 - protein, 152 aa, Homo sapiens
  misc_feature (1)...(152): Xaa = X or * as defined in Table 2
GTDALHWHLEDCGCKVSKKKAQICRQQALAATALRVQEANKLTLEQNLNIKASRAVVTLMNTKGHHWLTNARLTQYQTWLCENPRITIEVCNSLHPATLLPVSESPVEPRCVEVLDTIDSSRPDLRGQPWASVDWELYVDGSSFFNPQGERX

SEQ ID NO: 36204 - protein, 212 aa, Homo sapiens
MGMTTAYITDATTPFLGDDDTAEVRWADGHKSVIGHQSQEHVFYTCKKDKERHLCQAARIRDDSAMRLHVHNHLGNCGRGETNVSPGQVGEEEVHGGVEVGVRAASQDDEQVPQHRDQGGEDNNTALSIAGNVRHPVIFFLISRGRENDITPNIVEVYSPPVILFLISVGWPIPGFGPTEDSVDSAASSGPYSSPPNSDKVFSCSLETSRPD

SEQ ID NO: 36205 - protein, 273 aa, Homo sapiens
  DOMAIN (114)..(189): Gag P30 core shell protein domain identified by PFam, accession name Gag_p30, E-value=1.1e-23, PFam score of 86.4
  misc_feature (1)...(273): Xaa = X or * as defined in Table 2
MSGQFDFLLWTPEEDNSDESDAEGEHGDGAEEEAPPPVPRPGPKPAGLGRRPCPYEQAQGGDGPEEQWMSFCWDIPRKSGAPRERITLRRHLEDCGCKVSKKKAQICRQQKDPQEESPAQFYERLCEAYGMYTPFDPDSPENQRMIHMALVRQSAEDMRRKLQKQAGLAGMNPSQLLERASQVFVNRDAVTPXGKQQREWRERGXYDSQYRRGGTQPCDIVPNIRRERRXYHSQYRRRARPPGPHXSERGALRPGSLPRQAAXRVPSGPADGQ

SEQ ID NO: 36206 - protein, 620 aa, Homo sapiens; identical to SEQ ID NO: 33954
  DOMAIN (433)..(473): G-protein coupled receptors proteins domain identified by eMATRIX, accession number BL00237A, p-value=7.171e-13, raw score of 27.68
  DOMAIN (39)..(228): Gag P30 core shell protein domain identified by PFam, accession name Gag_p30, E-value=2e-47, PFam score of 169.9

SEQ ID NO: 36207 - protein, 1410 aa, Homo sapiens
  DOMAIN (872)..(917): kw TRANSCRIPTASE REVERSE II ORF2 domain identified by eMATRIX, accession number DM01354N, p-value=1.000e-40, raw score of 13.17
  DOMAIN (1209)..(1410): Caveolin domain identified by PFam, accession name Caveolin, E-value=9.9e-77, PFam score of 268.3
  misc_feature (1)...(1410): Xaa = X or * as defined in Table 2
IRIGKNYFKVHMEPKKSPHRQVNPKPKEQSWRHHTTXLQTILQGYSNQNSMPGPTPQPSTPAPGGNLRNPQSSDLLQVTKQQGQALAIQREAPLHRIPAPEAIPWYFQPQPATQLGSPPVDPPSSAMMSRRAHRSRGPDRQGYPLQGDXPGEPRPQEHXRGHSQERLPSSEKQTPICPPAQATQHPEEPDAHQPYKHLFQVCAHQGHPVAQRRNXPGYWERYHSAEDPELQPILAGLSLSMYLVTVLRNLLISLAVSSDSHLHTPMCFFLSNLCWADIGFTSATVPKMIVDMRSHSGVISYADCLTRMSFLVLFACVEDMLLTVMAYDCFVAICRPLHYPVIVNPHLCVFLVSVSFFLSLLDSQLHRILLSYCKIVPSILRISTSDGKYKAFSTCGSHLALVCLFYGAGIGVYLTSAVSPPPRNGVVVSVMYTVVTPMLNPFIYSLRNRDIQSTLRRLLSRTVESHDLFHPFSCVGKRKSNQECDTTHLDGCDKQTSIGETRGKEYTLCDSRSNLTQGYKEQIQRMHTCCDISSNIHLGYYEYYHNVNTPCDIRSNIPLQYWEPYHTVYTPCDIRGRPMNRGSRWPSVAAVTAQHKAKHFYLLYHSKAASACKGSNSPKQAPGPKESPRQGNIECQAQGIRPSGHLDTVRLQELPPLHQEELTYQGDSLETACPIKAMIPNLTLQLREDIQTKGKEVENFEKNLEECITRITNTEKCLKELMELKTKARELRKECSSLRSRCHQLEERVSAMEDEMNEMKWEGKFREKRIKRNKQSLQEIWDYVKRPNLRLIGVPESDGENGTKLENTLQDIVQNFPNLARQTNVQIQEIQRTPQRYSSRRATPRHIIVRFTKVEMKEKMLRAAREKEIQTTIREYYKHLYANKLENLEEMDKFLDTYTLPRLNQEEVESLNRPITGSEIVAIINSLPTKKSPGPDGFTAEFYQRYKEELVPFLLQLFQSIEKEGILPNSFYEASIILIPKAGRDTTKKENFRPISLMNVDAKILNKILAKRIQQHIKKLIHHDQVGFIPGMQGWFNIRKSINVIQHINRAKDKNHMIISIDAEKAFDKIQQPFMLKTLNKLELEKTTLKFIWNQKRARIAKSILSQKNKAGGITLPDFKLYYKATVTKTACLAPHHSPSTPAPGGNLRNPQSSDLLQVTKQQGQALAIQREAPLHRIPAPEAIPWYFQPQPATQLGSPPVDPPSSAMMAEEHTDLEAQIVKDIHCKEIDLVNRDPKNINEDIVKNACLLQKNKHPFAPRLRLHNTQRNQMPTSPTNTCSRFVLIRDTLLHKEETDLVDFEDVIAEPVGTYSFDGVWKVSYTTFTVSKYWCYRLLSTLLGVPLALLWGFLFACISFCHIWAVVPCIKSYLIEIQCISHIYSLCIRTFCNPLFAALGQVCSSIKVVLRKEV

SEQ ID NO: 36208 - protein, 792 aa, Homo sapiens
  DOMAIN (633)..(673): G-protein coupled receptors proteins domain identified by eMATRIX, accession number BL00237A, p-value=9.526e-12, raw score of 27.68
  DOMAIN (4)..(95): Gag P30 core shell protein domain identified by PFam, accession name Gag_p30, E-value=4.7e-30, PFam score of 108.9
MRGAQKATNVNKLSEDIQGKEESPTQFYERLWEAYRMYTPFDPDSPENQRMIPMALVRQSAEDMRRKLQKQAGLAGMNPSQLLEIASQVFVNRDAVSRKENGKENGGQARRYADLFSRTKNYQPVQDLRLLHQAKLTFHPTVPNPSTLLGFPPAEDSWFTCLDLKDAFFPIRLAPERQKLFAFQWEDPESGWPPCWRALAATALLVQEANKLTLGQKLNIKASRAVVTLMNTKGHHWLTNATLTDYQTLLCENPRITIEVCNTLHPATLLPVSKSPVKPGCVEVLDSIDSSRPDLWDQPWASVDWELYLDGSSFFNPQGEVEGMQGGHQRASTLLGLRNSRADSEARKAASSPFWASGLPQAPDLGPTSSNEEKDFLQHDMRQGLAVLPGIRASGAAPFEGLQVDFTEMSKCGGNKYVVVLGHTYSGWEEAYQTRTEKSREVTPVLLRDLIPRFRRPLGIGSDNGPAFLVALVQKTAKEDFHRGVFTPCDIGSKIILSTQEMTNKVMGMCTPPAILGVMSSSPNLDVSNQITKGLYTPCDIGCNMILSRPGYRERYHTAEDPELQPLLALLSLSLSMHLVMVLRNLLNILAVSSDSPLHTPTYFFLSNLCWADIGFTSATVPNMIVDMQSHSRVISHADCLTQISFLLLFACIEGMLLTVMTYDCFVAICCPLHYPVIVNPHLCVFFVLVSFFLSLLDSQLHSWIVLQFTIIKNVEISNSVCDPSQLLKLACSDSVINSIFMHFHNTMFGFLPISGILVSYYKIVPSILRISSSDGKYKAFSTCGSHLAVVC

SEQ ID NO: 36209 - protein, 2246 aa, Homo sapiens
  DOMAIN (434)..(449): POLLEN ALLERGEN POA PI SIGNATURE domain identified by eMATRIX, accession number PR00833H, p-value=3.077e-09, raw score of 2.30
  DOMAIN (4)..(95): Gag P30 core shell protein domain identified by PFam, accession name Gag_p30, E-value=1.4e-27, PFam score of 100.2
  misc_feature (1)...(2246): Xaa = X or * as defined in Table 2
MRGAQKATNVNKLSEVIQGKEESPAQFYQRLCEVYRMYTPCDPDSPENQHMIHMALVRQSPEDMRRKLQKQAGLAGMNPSQLLEIASQVFVNRDAVSRKENGKENGGQARRYADLFSPVEPDCVEVLDSIHSSRPDLRDQPWPSGDWELYVDGSSFFNPQGERGAGYAVITLDTVVEATSLPQATSGQKAELIAFIGALELSEGETVNIYTDSRHGTEEGQQILKQPVSERLDFVCSFLQRRNSFYMGTCQDEPEQLDDWNRIAELQQRNRVCPPHLKTCYPLESRPSLSLGTITDEEMKTGDPQETLRRASMQPIQIAEGTGITTRQQRKRVSLEPHQGPGTPESKKATSCFPRPMTPRDRHEGRKQSTTEAQKKAAPASTKQADRRQSMAFSILNTPKKLGNSLLRRGASKKALSKASPNTRSGTRRSPRIATTTASAATAAAIGATPRAKGKLGQDDVTLDNLFRVHEHTGEVGAVQGRGQLLQHQGLAQLRTCAPTFPAGAEGKERYGFQEVHPVFYVVVIAENRKHPSSPECLVSAQKVLEGSELELAKMTMLLLYHSTMSSKSPRDWEQFEYKIQAELAVILKFVLDHEDGLNLNEDLENFLQKAPVPSTCSSTFPEELSPPSHQAKREIRFLELQKVASSSSGNNFLSGSPASPMGDILQTPQFQMRRLKKQLADERSNRDELELELAENRKLLTEKDAQIAMMQQRIDRLALLNEKQAASPLEPKELEELRDKNESLTMRLHETLKQCQDLKTEKSQMDRKINQLSEENGDLSFKLREFASHLQQLQDALNELTEEHSKATQEWLEKQAQLEKELSAALQDKARAKGDLGNKMMGPMFADVYEGLCGNLKCLEEKNEILQGKLSQLEEHLSQLQDNPPQEKGEVLGDVLQLETLKQEAATLAANNTQLQARVEMLETERGQQEAKLLAERGHFEEEKQQLSSLITDLQSSISNLSQAKEELEQASQAHGARLTAQVASLTSELTTLNATIQQQDQELAGLKQQAKEKQAQLAQTLQQQEQASQXLRHQVEQLSSSLKQKEQQLKEVAEKQEATRQDHAQQLATAAEEREASLRERDAALKQLEALEKEKAAKLEILQQQLQVANEARDSAQTSVTQAQREKAELSRKVEELQACVETARQEQHEAQAQVAELELQLRSEQQKATEKERVAQEKDQLQEQLQALKESLKVTKGSLEEEKRRAADALEEQQRCISELKAETRSLVEQHKRERKELEEERAGRKGLEARLQQLGEAHQAETEVLRRELAEAMAAQHTAESECEQLVKEVAAWRERYEDSQQEEAQYGAMFQEQLMTLKEECEKARQELQEAKEKVAGIESHSELQISRQQNELAELHANLARALQQVQEKEVRAQKLADDLSTLQEKMAATSKEVARLETLVRKAGEQQETASRELVKEPARAGDRQPEWLEEQQGRQFCSTQAALQAMEREAEQMGNELERLRAALMESQGQQQEERGQQEREVARLTQERGRAQADLALEKAARAELEMRLQNALNEQRVEFATLQEALAHALTEKEGKDQELAKLRGLEAAQIKELEELRQTVKQLKEQLAKKEKEHASGSGAQSEAAGRTEPTGPKLEALRAEVSKLEQQCQKQQEQADSLERSLEAERASRAERDSALETLQGQLEEKAQELGHSQSALASAQRELAAFRTKVQDHSKAEDEWKAQVARGRQEAERKNSLISSLEEEVSILNRQVLEKEGESKELKRLVMAESEKSQKLEERLRLLQAETASNSARAAERSSALREELEHTSTQALVSELLPAKHLCQQLQAEQAAAEKRHREELEQSKQAAGGLRAELLRAQRELGELIPLRQKVAEQERTAQQLRAEKASYAEQLSMLKKAHGLLAEENRGLGERANLGRQFLEVELDQAREKYVQELAAVRADAETRLAEVQREAQSTARELEVMTAKYEGAKVKVLEERQRFQEERQKLTAQVEQLEVFQREQTKQVEELSKKLADSDQASKVQQQKLKVGQLGEWVWPLDKGGKLFSKLWGRGGLVYKWFLLIYKISYATGIVGYMAVMFTLFGLNLLFKIKPEDAMDFGISLLFYGLYYGVLERDFAEMCADYMASTIGFYSESGMPTKHLSDSVCAVCGQQIFVDVSEEGIIENTGAQLPRVLHPWLVHRGKEANVSLLQREGRPQEDVQQSVSFIGVVVGSGLWEESTGQCDLHLGPPGALTSAPNQNMSNHEQQKDYEGDDEDKEDDDRHHGIMNPY

SEQ ID NO: 36210 - protein, 73 aa, Homo sapiens
  misc_feature (1)...(73): Xaa = X or * as defined in Table 2
XSGGEPWKGPVSDIRKEDGMNVLPLKYIPNVGVNFSFAGVYLASETLPGFIRTSGSHFTGSRRNRNHTLGIGG

SEQ ID NO: 36211 - protein, 657 aa, Homo sapiens
  DOMAIN (81)..(238): Gag P30 core shell protein domain identified by PFam, accession name Gag_p30, E-value=4.3e-36, PFam score of 130.0
YHPLPLHTGKNITDYIWINITGCVYTYCDIERSIMLSPSLEIRSNITARLRPKTGTQMPLRVQRYTGIDEDGHVVERRVFGEERRRVLQAGTKWLEEHALADYQNPQEYGRTQLPGTDPQLDPHEREEMQRLNRDREALLEGLMRGAQKATNVNKLSEVIQGKEESPAQFYERLCEAYRMYTPFDPDSPENQHMIHMALVRQSAEDMRRKLQKQAGLAGMNPSQLLEIASQVFINRDAVSPKENGKENGGWPPCLRALAATALLVQEANKLTLGQNLNIKASRAVVTLMNTKGHHWLTDARLTKYQTLLCENPRITTEVCNTLHPATLLPVSESPVEPDCVEVLDSVDSSRPDLRDQAWASVDWELYVDGSSFFNPQGERGAGYAVVTLDTVVEARSLPQATSAQKAELVAFIRALELSEEEKDFLQVEGRTSDGGRMDSVTGWESTVPQLLGAAVVLAVQETTHRHQESLEKLLGRYFYISPLSALAKTVRQRCVTCRQHDARQGPAVLPGIGAYGAAPFEGLQVDFTEMPKCGGNKYVLVLVCTYSGWVEAYPTLTEKAREVTRVLLRDLIPRFRPPLRIGSDKGPAFLAALLQKTAKVSKTQRATESHRCLRIPPPGTLRGSRTAAGPRFALPVPVHVSGHGAEEPAQHPGCQL

SEQ ID NO: 36212 - protein, 1209 aa, Homo sapiens
  DOMAIN (1137)..(1152): OLFACTORY RECEPTOR SIGNATURE domain identified by eMATRIX, accession number PR00245B, p-value=2.286e-14, raw score of 10.38
  DOMAIN (97)..(679): Gag P30 core shell protein domain identified by PFam, accession name Gag_p30, E-value=1e-69, PFam score of 245.0
MNVQPPGTISQKRCTLPAILGLISYASSVNIRSNITGWLYIDRYVGSHVILYPLGIRMGVTGEMKGERRRGLHAATKWLEEHAPADYQNPQEYGRTQLPGTQPQLDPHEREDMQRLNRDREALLEGFKRGAQKATNVNKVSEVIQGKEESPAQFHQRLCEACAKQVLVNGDAVSREEKRKENERQARRNADLLVSCSNQSGPPKEAREELWTKDYRPGQDLRLLSQATLTFHPTVPSPSTLLGLLPAEDSWFTCLDLKDAFFPIRSAPESQKLFAFQWEDPESALAKTVRQRCVSCRQHHARQGPAVPPGIQAYGAAAFEDLQVDFTEMPECGGNKYLPVLGRTYSGWVETYPTRAEKAREVTRVLLRDLIPRLELPFRIGSDNGPAFVADLLQKTATVLGITRKLHAASRPQSSGKGIQNNITGGVYTLCDIDSHIILFRSGYMPLREQRYTGIDEDGHVVERRAFGYQPFTCVDLLNWKNNTPPYTEKPQALIDFLQAVIQTHSPTLADWHQLLVFLFNSEERRRVLQAATKWLEEHAPADYQNPQEHGRTQLPGTDPHLDPHEREDMQRLNRDREALLEGLMRGAQKATNVSKLSEVIQGKEESPAQFDERLCEAYRMYTPFDPDSPENQRMIHMALVRQSAEDMRRKLQKQAGLAGMNPSQLLEIASQMFVNRDAVSPKENGKENGDGVSKGWPPCLRALAATALLVQEANKLTLGQNLNIKASRAVVTLMNTKGHHWLTDARLIKYQTLLCENPRITIEVCNTLHPASLLPVSESTVEPDCVEVLDSVDSSRPDLRDQAWASGDWKLYVYGSSFFNPQGKREVQALAKTVRQRCVTCRQHDARQGPAVPHGIRAYGAAPFEGLQVDFKEMPKCGGNKYVLFLGRTYSGWVEAYPTRTEKAREVTPVLLRDLIPKFRPPLWIGSNNGPAFLAALVQKTAKILGKNVTGDVNSPAILRVVSSSPPLYIGNNITEDPELQPVLALLSLSLSMYLVTVLRNLLSILAVRSESPLHTTMYFFLSILCWADIGFTSATVPKMIVDMQWYSKVISHAGCLTQMSFLVLFACIEGMLLTVMAYDCFVGICRPLHYPVIVNPHLCVFFVLVSFFLSLLDSQLHSWIVLQFTIIKNVEISNFVCDPSQLLKLACSDSVINSIFIYFGSTMFGFLPISGILLSYYKIVPSILRISSSDGKYKAFSTYGSHLAVFC

SEQ ID NO: 36213 - protein, 402 aa, Homo sapiens
  DOMAIN (94)..(304): Gag P30 core shell protein domain identified by PFam, accession name Gag_p30, E-value=4.4e-58, PFam score of 206.4
TTHLASAVEPNGDSWCKQRSPRVSVHYIRINITGWVCTCCDIERNIMLSPSLNIRNNITARLRPKTGTQMPLREQRYTGIDENAHVVERRVFGYQPFTCVDLLNWKNNTSPYTEKPQALIDLLQTVIQTHNHTWTDWHQLLIFLFNSEERQRVLQAATKWLEEHAPADYQNPEQYGRTQLPGTDPQLDPHEREEMQRLNRDREALLEGLMRGAQKATNVNKLSEVIQGKEESPAQFYERLYEAYHMYTPFDPDSPENQRMIHMALVHQSAEDMRRKLQKQTGLAGKNPSQLLEIASQVFVNRYAVSRKENGKENGGQARPHADLFVSCSNQRGPRKEARERGPWERNSAWLSEFAALMTFCWDTPRQSGVPREQMPYIGTWRTVGVRCPRRKLRSADSRRSF

SEQ ID NO: 36214 - protein, 497 aa, Homo sapiens
  DOMAIN (328)..(371): kw TRANSCRIPTASE REVERSE II ORF2 domain identified by eMATRIX, accession number DM01354T, p-value=1.000e-40, raw score of 9.48
  DOMAIN (218)..(450): Reverse transcriptase domain identified by PFam, accession name rvt, E-value=4.6e-41, PFam score of 149.9
MKSGHPEKEQDNSDVQETREITIRGLLCTALMRHSTGAIAYLGVLSGSASLKLAGVPLRCCEGDKDAGHPLETQTALCERGRGARSLVGNTIMTSQPVPNETIIVLPSNVINFSQAEKPEPTNQGQDSLKKHLHAEIKVIGVNLIQNVLERGWGKCQEMIYVLGLDICRPFFVSRVSEEGRMGQRGEEDANSLDFPPASLLCLICQEQGVNGESCSPVGMYHREIVPVYEVLSVITGLQIQVFSGKEADSVIKRSIGWGPFFKPRTKDKNHMIISIDAEKAFDKIQQHFMLKTLSKLGIDGTYLKIIRAIYDKPTANIILNGQKLEAFPLKTGTRQGCPLSPLLFNIVLEVLARAIRQEKEIKGIQLGKEEVKLSLFADDMIVYLENPIVSDQNLLKLISNFSKVSGYKINVQKSQAFLYTNNRQTESQIMSELPFTIASKRIKYLGIQLTRDVKDLFKENYKPLLNEIKEDTNKWKNIPCSWVGRINIVKMAILPK

SEQ ID NO: 36215 - protein, 144 aa, Homo sapiens
  DOMAIN (42)..(62): RIBOSOMAL PROTEIN L5 SIGNATURE domain identified by eMATRIX, accession number PR00058B, p-value=1.529e-27, raw score of 8.75
  DOMAIN (25)..(144): Ribosomal L18p/L5e family domain identified by PFam, accession name Ribosomal_L18p, E-value=2.4e-45, PFam score of 164.1
NALAPLGLQVSVEQRTPVSVPQDEGKTDYYARKRLVIQDKNKYNTPKYRMIVRVTNRDIICQIAYARIEGDMIVCAAYAHELPKYGVKVGLTNYAAAYCTGLLLARRLLNRFGMDKIYEGQVEVTGDEYNVESIDGQPGAFTCY

SEQ ID NO: 36216 - protein, 389 aa, Homo sapiens
  DOMAIN (288)..(309): RIBOSOMAL PROTEIN L5 SIGNATURE domain identified by eMATRIX, accession number PR00058F, p-value=6.400e-28, raw score of 8.67
  DOMAIN (104)..(263): Ribosomal L18p/L5e family domain identified by PFam, accession name Ribosomal_L18p, E-value=4.5e-23, PFam score of 90.1
  misc_feature (1)...(389): Xaa = X or * as defined in Table 2
MGGNAADKFRAGVELALQSGNKVCVCSPRTTISGDAVAPRSVLPGCRHIPGEISQHSHCWAGRSLSSRKRGSLFRRMGFIKVVKNKAYFKRYQVKFRRRRKGKTDYYARKRLVIQDKNKYNTPKYRMIVRVTNRDIICQMLYARRIEGDMIVCAAYCTPNLPKIWVXRVGLTNYAAAYCTGLLLARRLLNRFGMDKIYEGQVELTGDEYNVESIDGQPGAFTCYLDAGLARTTTGNKVFGAPEGKLWMGGLSIPHSTKRFPGYDSESKEFNAEVTSGKHIMGPKCLQNYMRYLMEEDEDAYKKQFSQYIKNSVTPDMMEEMYKKAHAAIREESSSMEKKAQGKKFKKKRWNRPKMSLAQKKDRVAQKKASFLQSSRSGLLESLTPAIFP

SEQ ID NO: 36217 - protein, 397 aa, Homo sapiens
  DOMAIN (57)..(100): kw TRANSCRIPTASE REVERSE II ORF2 domain identified by eMATRIX, accession number DM01354T, p-value=1.000e-40, raw score of 9.48
  DOMAIN (1)..(179): Reverse transcriptase domain identified by PFam, accession name rvt, E-value=1.2e-10, PFam score of 48.8
MTISIDAEKAFDKIQQRFMLKTLNKLGIDGTYLKIIRAIYDKPTANIILNGQKLEAFPLKTGTRQGCPLSPLLFNTMLEVLARAIRQEKEIKGIRLGKEEVKLSLFAEDMTVCLENPIVSAQNLLKLISNFSKVSGYKINVQKSQAFLYTKNRQTESQIMSELPFTIASKRIKYLGIQLTRDVKDLFKENYKPLLNKIKEDTNKWKNIPCSWIGRINIVKMAILPKVIYRFNAIPIKLPMTFFTELVETSLKFIWNQKRACIAKTILNQKKKAAGITLPDLKLYYKATIEYQATFSLNNQVEEPTLILAQRTNFQWLHPIPPVCMWALFRKNQSEMCGQTGAVLPLGRGFHLGPAVWSFSLQAVLGLKGLTIPTEIKKLISISASRTTCKEQPVQPF

SEQ ID NO: 36218 - protein, 45 aa, Homo sapiens
  misc_feature (1)...(45): Xaa = X or * as defined in Table 2
PRSSVRPAGGFSSTCPPSWAASRSCTTSHGCGHQXCAGTGTQTRL

SEQ ID NO: 36219 - protein, 354 aa, Homo sapiens
  DOMAIN (33)..(49): Calcium-binding EGF-like domain proteins pattern proteins domain identified by eMATRIX, accession number BL01187B, p-value= 8.333e-12, raw score of 12.04
  DOMAIN (72)..(115): TB domain identified by PFam, accession name TB, E-value=6.1e -14, PFam score of 59.7
MTGAIGPYGEQEDDWADDNECHAQPDLCVNGRCVNTAGSFRCDCDEGFQPSPTLTECHDIRQGPCFAEVLQTMCRSLSSSSEAVTRAECCCGGGRGWGPRCELCPLPGTSAYRKLCPHGSGYTAEGRGPLPSHPSNLTFAEEAIPGKALAAGAAVGARDIETVTSWAAPVLLGDAFIQVCRRWSPDPPPHGCFEKQTGKTESGHRGPGSDPWYEPRVNIRGTRPTRGVCSRVTDQSPGNARAHRKRGRAPTGEGKTGKTRRNRPSETAGKQGKGDRARERFQGAGDTPLRRRSILMTFSYSANLLQHWLSGAAVTRFLWMIIQEGVPTFESIKDAVAEPVVYMIDRYVVVLLLR

SEQ ID NO: 36220 - protein, 82 aa, Homo sapiens
MHPFVQPTHGQEKTPLEHIFRAILIKKTDRRAVSIRLGKKEHRTRGQQACVLGCMRLLENEAEEVINDFSVLKFEVGSGSVW

SEQ ID NO: 36221 - protein, 214 aa, Homo sapiens
LREPATAPSPPSVPYAAEMGCGLNKLEKRDEKRPGNIYSTLKRPQVETKIDVSYEYRFLEFTTLSAAELPGSSAVRLASLRDLPAQLLELYQQGFSLAALHPFVQPTHEREKTPLEHIFRAILIKKTDRSQKTDLHNEGYILELDCCSSLDHPTDQKLIPEFIKKIQEAASQGLKFVGVIPQKIKKKESKFQWRFSREEMHNRQMRKSKGKLSA

SEQ ID NO: 36222 - protein, 215 aa, Homo sapiens
  DOMAIN (34)..(47): Laminin-type EGF-like (LE) domain proteins domain identified by eMATRIX, accession number BL01248, p-value=7.171e-12, raw score of 11.02
  DOMAIN (1)..(185): Laminin EGF-like (Domains III and V) domain identified by PFam, accession name laminin_EGF, E-value=2.2e-38, PFam score of 140.9
CFCNGHADQCIPVHGFRPVKAPGTFHMVHGKCMCKHNTAGSHCQHCAPLYNDRPWEAADGKTGAPNECRTCKCNGHADTCHFDVNVWEASGNRSGGVCDDCQHNTEGQYCQRCKPGFYRDLRRPFSAPDACKPCSCHPVGSAVLPANSVTFCDPSNGDCPCKPGVAGRRCDRCMVGYWGFGDYGCRPCDCAGSCDPITGDCISSHTDIDWYHEVS

SEQ ID NO: 36223 - protein, 185 aa, Homo sapiens
  DOMAIN (133)..(152): TYPE III EGF-LIKE SIGNATURE domain identified by eMATRIX, accession number PR00011D, p-value=7.000e-17, raw score of 14.03
  DOMAIN (115)..(166): Laminin EGF-like (Domains III and V) domain identified by PFam, accession name laminin_EGF, E-value=7.5e-13, PFam score of 56.1
MVKPCLYNTRISQACWCAPARIIKKFFYVNPKKGSFDLFVLDTLFARSKKCSRGIAAINMGDLKRDSFFKAKDRGEVMGKEERRERGSRGGAGEGAEEEEETVADKKRLEVKRACSCHPVGSAVLPANSVTFCDPSNGDCPCKPGVAGRRCDRCMVGYWGFGDYGCRPCDCAGSCDPITGDCISR

SEQ ID NO: 36224 - protein, 120 aa, Homo sapiens
  DOMAIN (15)..(56): CAMP-DEPENDENT PROTEIN KINASE REGULATORY CHAIN domain identified by eMATRIX, accession number DM01513A, p-value=8.568e- 14, raw score of 13.61
MPLPDTMFCAQQIHIPPELPDILKQFTKAAIRTQPADVLRWSAGYFSALSRGDPLPVKDRMEMPTATQKTDTGLTQGLLKVLHRQCHHKRYVELTDLEHKRKNLWPAEGKIQSALTTGSL

SEQ ID NO: 36225 - protein, 971 aa, Homo sapiens
  DOMAIN (267)..(318): Neuromodulin (GAP-43) proteins domain identified by eMATRIX, accession number BL00412D, p-value=6.327e-09, raw score of 16.54
VSLAFCQPLSLSLSPLLPLASSLAPERTHLPGPGSLLLSPPSFPARPREPRGCVTAAPPDKMDTAEEDICRVCRSEGTPEKPLYHPCVCTGSIKFIHQECLVQWLKHSRKEYCELCKHRFAFTPIYSPDMPSRLPIQDIFAGLVTSIGTAIRYWFHYTLVAFARWEVVLLPACRIYKCLFLGSVSSLLTLPLDMLSRKNLLADCLQGCFVVTCTLCAFISLVWLREQIVHGGAPIWLEHAAPPFNAAGHHQNEAPAGGNGAENVAADQPANPPAENAVVGENPDAQDDQAEEEEEDNEEEDDAGVEDAADANNGAQDDMNWNALEWDRAAEELTWERMLGLDGSLVFLEHVFWVVSLNTLFILVFAFCPYHIGHFSLVGLGFEEHVQASHFEGLITTIVGYILLAITLIICHGLATLVKFHRSRRLLGVCYIVVKVSLLVVVEIGVFPLICGWWLDICSLEMFDATLKDRELSFQSAPGTTMFLHWLVGMVYVFYFASFILLLREVLRPGVLWFLRNLNDPDFNPVQEMIHLPIYRHLRRFILSVIVFGSIVLLMLWLPIRIIKSVLPNFLPYNVMLYSDAPVSELSLELLLLQVVLPALLEQGHTRQWLKGLVRAWTVTAGYLLDLHSYLLGDQEENENSANQQVNNNQHARNNNAIPVVGEGLHAAHQAILQQGGPVGFQPYRRPLNFPLRIFLLIVFMCITLLIASLICLTLPVFAGRWLMSFWTGTAKIHELYTAACGLYVCWLTIRAVTVMVAWMPQGRRVIFQKVKEWSLMIMKTLIVAVLLAGVVPLLLGLLFELVIVAPLRVPLDQTPLFYPWQDWALGVLHAKIIAAITLMGPQWWLKTVIEQVYANGIRNIDLHYIVRKLAAPVISVLLLSLCVPYVIASGVVPLLGVTAEMQNLVHRRIYPFLLMVVVLMAILSFQVRQFKRLYEHIKNDKYLVGQRLVNYERKSGKQGSSPPPPQSSQE

SEQ ID NO: 36226 - protein, 301 aa, Homo sapiens
  DOMAIN (109)..(150): CAMP-DEPENDENT PROTEIN KINASE REGULATORY CHAIN domain identified by eMATRIX, accession number DM01513A, p-value=9.909e- 11, raw score of 13.61
ESGRDVKTGRETGSTSRIHLNRCCGFYQTTGHPSISVASIGCPERAMMPGPLMDSQIPAAPPDTNSTLHLSVSVPDQGSPARRDSPAWSLLRRAMPLPDTMFCAQQIHIPPELPDILKQFTKAAIRTQPADVLRWSAGPNPVLKSTYTTADKTCPHLSLQFNTFLHKGTDGKRGKRTLGYRKKQKKIEHEKEEAPAGGNGAENVAADQPANPPAENAVVGENPDAQDDQAEEEEEDNEEEDDAGVEDAADANNGAQALALDSHGSGNPIGNCECEGSRLCAHYENLMPDDLKQNSFILKSR

SEQ ID NO: 36227 - protein, 102 aa, Homo sapiens
  misc_feature (1)...(102): Xaa = X or * as defined in Table 2
XGWPEGAGPLGLRLLHHRGLGLHLPHDHKLSDQREALSHGQNPLPIYCALNTKGQSLTTFEFGGIWSNLYAANLQDSLYWASEPSQFWDRWVRNQANLDKEQ

SEQ ID NO: 36228 - protein, 1746 aa, Homo sapiens
  DOMAIN (391)..(445): Kinesin light chain repeat proteins domain identified by eMATRIX, accession number BL01160B, p-value=4.730e-10, raw score of 19.54
  DOMAIN (54)..(1256): Spectrin repeat domain identified by PFam, accession name spectrin, E-value=4e-122, PFam score of 419.1
MAEAALEAVRSELREFPAAARVPPPEARGLFESSSFDDSGGQLEADAVIMLAAYFADAAEAASWLRERRSSLERASCGQDQAAAETLLRRHVRLERVLRAFAAELRRLEEQGRAASARASLFTVNSALSPPGESLRNPGPWSEASCHPGPGDAWKMALPAEPDPDFDPNTILQTQDHLSQDYESLRALAQLRRARLEEAMALFGFCSSCGELQLWLEKQTVLLQRVQPQADTLEVMQLKYENFLTALAVGKGLWAEVSSSAEQLRQRYPGNSTQIQRQQEELSQRWGQLEALKREKAVQLAHSVEVCSFLQECGPTQVQLRDVLLQLEALQPGSSEDTRHALQLAQKKTLVLERRVYFLQSVVVKYGQRSGGIGRQVEEPGYAESQPLQGQVETLQGLLKQVQEQVAQRARRQAETQARQSFLQESQQLLLWAESVQAQLRSKEVSVDVASAQRLLREHQDLLEEIHLWQERLQQLDAQSQPMAALDCPDSQEVPNTLRVLGQQGQELKVLWEQRQQWLQEGLELQKFGREVDGFTATCANHQAWLHLDNLGEDVREALSLLQQHREFGRLLSTLGPRAEALRAHGEKLVQSQHPAAHTVREQLQSIQAQWTRLQGRSEQRRRQLLASLQLQEWKQDVAELMQWMEEKGLMAAHEPSGARRNILQTLKRHEAAESELLATRRHVEALQQVGRELLSRRPCGQEDIQTRLQGLRSKWEALNRKMTERGDELQQAGQQEQLLRQLQDAKEQLEQLEGALQSSETGQDLRSSQRLQKRHQQLESESRTLAAKMAALASMAHGMAASPAILEETQKHLRRLELLQGHLAIRGLQLQASVELHQFCHLSNMELSWVAEHMPHGSPTSYTECLNGAQSLHRKHKELQVEVKAHQGQVQRVLSSGRSLAASGHPQAQHIVEQCQELEGHWAELERACEARAQCLQQAVTFQQYFLDVSELEGWVEEKRPLVSSRDYGRDEAATLRLINKHQALQEELAIYWSSMEELDQTAQTLTGPEVPEQQRVVQERLREQLRALQELAATRDRELEGTLRLHEFLREAEDLQGWLASQKQAAKGGESLGEDPEHALHLCTKFAKFQHQVEMGSQRVAACRLLAESLLERGHSAGPMVRQRQQDLQTAWSELWELTQARGHALRDTETTLRVHRDLLEVLTQVQEKATSLPNNVARDLCGLEAQLRSHQGLERELVGTERQLQELLETAGRVQKLCPGPQAHAVQQRQQAVTQAWAVLQRRMEQRRAQLERARLLARFRTAFSPLFSERAAFTLGHTEMQDKAQQCSGSRSPVVKNLGSAVSTAKFMSRPHQLTAVGLGKIGNSIVCVINAKRIMYMKLQARMTLPSSVPPTTHSSKSATRKLDPGKREIEGNSKKRFKQPDRRWQLAGPYRFRKAFPKRLSFLNGFLGSTTKAFPGVLPSVSPYITAMKESVVGSGPILMPGKSCSSIWSNLYAANLQDSLYWASEPSQFWDRWVRNQANLDKEQVPLLKIEEPPSTAGRIAEFFTDLLTWRPLAQATHNFLRGLHFHKDYFQHPHFSTWKATTLDGLPNQLTPSEPHLCLLDVGYLINTSCLPLLQPTRDVDLILSLDYNLHGAFQVEKGGQPTREAQLQLLGRFCQEQGIPFPPISPSPEEQLQPRECHTFSDPTCPGAPAVLHFPLVSDSFREYSAPGVRRTPEEAAAGEVNLSSSDSPYHYTKVTYSQEDVDKLLHLTHYNVCNNQEQLLEALRQAVQRRRQRRPH

SEQ ID NO: 36229 - protein, 173 aa, Homo sapiens
MRLRRGLLTEWCEFSPYEVGFPKYGAFIPSELFGSEFFMGQLMKRLPESRICFLEGIWSNLYAANLQDSLYWASEPSQFWDRWVRNQANLDLLDYGSLRPDRPLHNLAFAFLVAEQELGIAQLLDPEDVAAAQPDERSIMTYVSLYYHYCSRLHQGQTVQRRLTKVGEKGGVG

SEQ ID NO: 36230 - protein, 1020 aa, Homo sapiens
  DOMAIN (250)..(264): SYNAPTOTAGMIN SIGNATURE domain identified by eMATRIX, accession number PR00399B, p-value=6.186e-09, raw score of 14.27
  DOMAIN (248)..(332): C2 domain identified by PFam, accession name C2, E-value=9.4e -09, PFam score of 42.5
TRDAAMAEAALEAVRSELREFPAAARELCVPLAVPYLDKPPTPLHFYRDWVCPNRPCIIRNALQHWPALQKWSLPYFRATVGSTEVSVAVTPDGYADAVRGDRFMMPAERRLPLSFVLDVLEGRAQHPGVLYVQKQCSNLPSELPQLLPDLESHVPWASEALGKMPDAVNFWLGEAAAVTSLHKDHYENLYCVVSGEKHFLFHPPSDRPFIPYELYTPATYQLTEEGTFKVVDEEAMEKAEVSRTCLLTVRVLQAHRLPSKDLVTPSDCYVTLWLPTACSHRLQTRTVKNSSSPVWNQSFHFRIHRQLKNVMELKVFDQDLVTGDDPVLSVLFDAGTLRAGEFRRESFSLSPQGEGRLEVEFRLQSLADRGEWLVSNGVLVARELSCLHVQLEETGDQKSSEHRVQLVVPGSCEGPQEASVGTGTFRFHCPACWEQELSIRLQDAPEEQLKAPLSALPSGQVVRLVFPTSQEPLMRVELKKEAGLRELAVRLGFGPCAEEQAFLSRRKQVVAAALRQALQLDGDLQEDEIPVVAIMATGGGIRAMTSLYGQLAGLKELGLLDCVSYITGASGSTWALANLYEDPEWSQKDLAGPTELLKTQVTKNKLGVLAPSQLQRYRQELAERARLGYPSCFTNLWALINEALLHDEPHDHKLSDQREALSHGQNPLPIYCALNTKGQSLTTFEFGEWCEFSPYEVGFPKYGAFIPSELFGSEFFMGQLKKRLPESRICFLEGIWSNLYAANLQDSLYWASEPSQFWDRWVSRNQANLDKEQVPLLKIEEPPSTAGRIAEFFTDLLTWRPLAQATQNFLRGRSIFHKDYFQHPHFSTWKATTLDGLPNQLTPSEPHLCLLDGGYTLINTSCLPLLQPTRDVDLILSLDYNLHGAFQQLQLLGRFCQEQGIPFPPISPSPEEQLQPRECHTFSDPTCPGAPAVLHFPLVSDSFREYSAPGVRRTPEEAAAGEVNLSSSDSPYHYTKVTYSQEDVDKLLHLTHYNVCNNQEQLLEALRQAVQRRRQRRPH

SEQ ID NO: 36231 - protein, 143 aa, Homo sapiens
MYASSWFLTLFLSTFPLPVATRVFDIFMYEGLEIVFRVGLALLQVNQAELMQLDMEGMSQGNRARAAPGGQGLHVGDQYFQRVIPHQFDSCPDKLVLKAYQVKYNPKKMKRLEKEYAAMKSKEMEEQIEIKASCERLPRLTPR

SEQ ID NO: 36232 - protein, 230 aa, Homo sapiens
  DOMAIN (164)..(215): Formate--tetrahydrofolate ligase proteins domain identified by eMATRIX, accession number BL00721H, p-value=4.823e-09, raw score of 21.20
MKMRVGCMLTAESLSDGGNSHQRTLSLFEESKESQCEARGEVSKAGVWLVPLEPSSDALPKITSLVRPAVPWRPSSEAGLCEVRGGVLGKASKAPIKEPQLDRGMGLGAQRRGSSGTEVQSGETLGASGSPRGLLEPRPDWVSNNGAGSLGFQQLPIVDKIRTIAQAVCGAKDIELCPEAQVKIDRYTQQYYSCVNQNLEQGQRFFHFDDSYSSSLQYRTASGQHGLSYF

SEQ ID NO: 36233 - protein, 125 aa, Homo sapiens
  DOMAIN (73)..(124): Formate--tetrahydrofolate ligase proteins domain identified by eMATRIX, accession number BL00721H, p-value=8.239e-39, raw score of 21.20
ARVKTDTRAEIDLVCELAKRAGAFDAVPCYHWSVGGKGSVDLARAVREAASKRSRFQFLYDVQVPIVDKIRTIAQAVYGAKDIELSPEAQAKIDRYTQQGFGNLPICMAKTHLSLSHQPDKKGVP

SEQ ID NO: 36234 - protein, 157 aa, Homo sapiens
  DOMAIN (78)..(129): Formate--tetrahydrofolate ligase proteins domain identified by eMATRIX, accession number BL00721H, p-value=1.000e-10, raw score of 21.20
MRVLTKKDEKGAKSRRSSFHAMESHPSVLKAHLASSHLPSFIAHVDHFRSGLKGNAFVGPEIQKVKPQLPIVDKIRTIAQAVYGAKDIELCPEAQVKIDRYTQQNYGVQPGCTKPRSAVSTQVGEEPTLTFKTLRGSIAATHEEIRRSHMTEQEPTQ

SEQ ID NO: 36235 - protein, 202 aa, Homo sapiens
MAKVPELEDTFLQAQPAPQLSPGIQEDCCVQLLGKGLLVYPEETVYLAAEGQPGGEQGGGEKGEDPELPGAVKSEMHLNNGNFSSEEEDADNHDSKTKAADQYLSQKKTITQIVKDKKKQTQLTLQCPWQCPSTFCLNEVDSWIPHVPIVDKIRTIAQAVYGAKDIELSPDAQAKIDRYTQQEAQPPSPKGPYASSVPPTLV

SEQ ID NO: 36236 - protein, 917 aa, Homo sapiens
  DOMAIN (394)..(449): Formate--tetrahydrofolate ligase proteins domain identified by eMATRIX, accession number BL00721B, p-value=1.000e-40, raw score of 13.21
  DOMAIN (298)..(917): Formate--tetrahydrofolate ligase domain identified by PFam, accession name FTHFS, E-value=0, PFam score of 1343.0
SPGGRTPAARDSIVREVIQNSKEVLSLLQEKNPAFKPVLAIIQAGDDNLMQEINQNLAEEAGLNITHICLPPDSSEAEIIDEILKINEDTRVHGLALQISENLFSNKVLNALKPEKDVDGVTDINLGKLVRGDAHECFVSPVAKAVIELLEKSGVNLDGKKILVVGAHGSLEAALQCLFQRKGSMTMSIQWKTRQLQSKLHEADIVVLGSPKPEEIPLTWIQPGTTVLNCSHDFLSGKVGCGSPRIHFGGLIEEDDVILLAAALRIQNMVSSGRRWLREQQHRRWRLHCLKLQPLSPVPSDIEISRGQTPKAVDVLAKEIGLLADEIEIYGKSKAKVRLSVLERLKDQADGKYVLVAGITPTPLGEGKSTVTIGLVQALTAHLNVNSFACLRQPSQGPTFGVKGGAAGGGYAQVIPMEEFNLHLTGDIHAITAANNLLAAAIDTRILHENTQTDKALYNRLVPLVNGVREFSEIQLARLKKLGINKTDPSTLTEEEVSKFARLDIDPSTITWQRVLDTNDRFLRKITIGQGNTEKGHYRQAQFDIAVASEIMAVLALTDSLADMKARLGRMVVASDKSGQPVTADDLGVTGALTVLMKDAIKPNLMQTLEGTPVFVHAGPFANIAHGNSSVLADKIALKLVGEEGFVVTEAGFGADIGMEKFFNIKCRASGLVPNVVVLVATVRALKMHGGGPSVTAGVPLKKEYTEENIQLVADGCCNLQKQIQITQLFGVPVVVALNVFKTDTRAEIDLVCELAKRAGAFDAVPCYHWSVGGKGSVDLARAVREAASKRSRFQFLYDVQVPIVDKIRTIAQAVYGAKDIELSPEAQAKIDRYTQQGFGNLPICMAKTDLSLSHQPDKKGVPSDFILPISDVRASIGAGFIYPLVGTMSTMPGLPTRPCFYDIDLDTETEQVKGLF

SEQ ID NO: 36237 - protein, 134 aa, Homo sapiens
  DOMAIN (10)..(40): Electron transfer flavoprotein beta-subunit proteins domain identified by eMATRIX, accession number BL01065C, p-value=8.125e- 25, raw score of 16.45
  DOMAIN (1)..(134): Electron transfer flavoprotein beta subunit domain identified by PFam, accession name ETF_beta, E-value=3e-08, PFam score of 4.0
RLKEKKLVKEVIAVSCGPAQCQETIRTALAMGADRGIHVEVPPAEAERLGPLQVARVAVVTADLRLNEPCYATLPNIMKAKKKKIEVIKPGDLGVDLTSKLSVISVEDPPQRTAGVKVETTEDLVAKLKEIGRI

SEQ ID NO: 36238 - protein, 111 aa, Homo sapiens
  DOMAIN (23)..(53): Electron transfer flavoprotein beta-subunit proteins domain identified by eMATRIX, accession number BL01065C, p-value=5.433e- 09, raw score of 16.45
MEQCVVTETLLHLHQLWGFLPGSHILSQIPCGEMRETIRTALAMGADRGIHVEVPPAEAERLGPLQVARVLAKLAEKEKVDLVLLGKQVAVVSPPCAPLLIPAREEGGGDT

SEQ ID NO: 36239 - protein, 258 aa, Homo sapiens
  DOMAIN (166)..(217): Electron transfer flavoprotein beta-subunit proteins domain identified by eMATRIX, accession number BL01065E, p-value=6.400e- 38, raw score of 31.58
  DOMAIN (4)..(258): Electron transfer flavoprotein beta subunit domain identified by PFam, accession name ETF_beta, E-value=7.6e-86, PFam score of 298.6
MADVRVLVAVKRVIDYAVKIRVKPDRTGVVTDGVKHSMNPFCEIAVEEAVRLKEKKLVKEVIAVSCGPAQCQETIRTALAMGADRGIHVEVPPAEAERFGVPLQVARVLGQAWQRRRRLDLVLLGKQAIACTDCNQTGQMTAGFLDWPQGTFASQVTLEGDKLKVEREIDGGLETLRLKLPAVVTADLRLNEPRYATLPNIMKAKKKKIEVIKPGDLGVDLTSKLSVISVEDPPQRTAGVKVETTEDLVAKLKEIGRI

SEQ ID NO: 36240 - protein, 258 aa, Homo sapiens
MSAPPLVCTHLAGAAAAPGLGHSFAPKSERALGVRRGSEHALLSWAVAAVPGSTGLLPCKLGRGGVPSCSQPKGYMEHVAPATPPLLQRHLCRSCSRQNNTTYLIGLFTPAVSDYSRIALGPKRGPSVTEKEVLTCILCQEEQEVKIENNAMVLSACVQKSTALTQHRGKPIELSGEALDPLFMDPDLAYGTYTGSCGHVMHAVCWQKYFEAVQLSSQQRIHVDLFDLESGEYLCPLCKSLCNTVIPIIPLQPQKINR

SEQ ID NO: 36241 - protein, 519 aa, Homo sapiens
APARRGLGDRCSSSSFSSSFFSSASSPRRLATAAARAGGAAVIPVPEEPALPVPGGRGAGEAGPRRTQQVEPGVPGRAPPAHHAALCHLSRPQAKILSMMEDNKQLALRIDGAVQSASQEVTNLRAELTATNRRLAELSGGGGPGPGPGAAASASAAGDSAATNMENPQLGAQVLLREEVSRLQEEVHLLRQMKEMLAKDLEESQGGKSSEVLSATELRVQLAQKEQELARAKEALQAMKADRKRLKGEKTDLVSQMQQLYATLESREEQLRDFIRNYEQHRKESEDAVKALAKEKDLLEREKWELRRQAKEATDHATALRSQLDLKDNRMKELEAELAMAKQSLATLTKDVPKRHSLAMPGETVLNGNQEWVVQADLPLTAAIRQSQQTLYHSHPPHPADRQAVRVSPCHSRQPSVISDASAAEGDRSSTPSDINSPRHRTHSLCNVRPAAAGPGPLGPAQKLQGRGWRGEAILAVSSRPPREHSGECISCSVLSFCKKRWMWGEKGMRPVCSLCPGG

SEQ ID NO: 36242 - protein, 253 aa, Homo sapiens
MIASPYEVDPFSVLVLNISLLGCEIGTIWGTRKRGNPETEPTVLPNSHSCESHGETAVDDRLLWNPSPNSLQAKILSMMEDNKQLALRIDGAVQSASQEVTNLRAELTATNRRLAELSGGGGPGPGPGAAASASAAGDSAATNMENPQLGAQAATQICAADPSRTFVCHQLILSVPSNNLNSETDKLETEESSGTCWLATEQIGSSKEGTFSWSFYFPGELPSEKTVAGMEAKSFMCWSTRTGAGPPKAFVIC

SEQ ID NO: 36243 - protein, 111 aa, Homo sapiens
  DOMAIN (76)..(91): FIBRONECTIN TYPE III REPEAT SIGNATURE domain identified by eMATRIX, accession number PR00014D, p-value=5.050e-09, raw score of 12.04
  DOMAIN (26)..(92): Fibronectin type III domain identified by PFam, accession name fn3, E-value=4.4e-06, PFam score of 33.6
PQPLNDRRVPFLSLPQDADPLVTGAPGAPMDLQCHDANRDYVIVTWKPPNTTTESPVMGYFVDRFVVHGLTTGEQYIFRVKAVNAVGMSENSQESDVIKVQAALRPIEDTR

SEQ ID NO: 36244 - protein, 59 aa, Homo sapiens
  DOMAIN (23)..(47): HMW KININOGEN SIGNATURE domain identified by eMATRIX, accession number PR00334B, p-value=9.337e-11, raw score of 8.69
WKKQQNQLGSPVGFALTLFHHHHHHHHHHHNHHCHHHHHHHNHHHHYHHHHHHQYHHHH

SEQ ID NO: 36245 - protein, 33 aa, Homo sapiens
NCKSRAWETSKLREDPEVTPSKTGKMPSESTWP

SEQ ID NO: 36246 - protein, 198 aa, Homo sapiens
  DOMAIN (112)..(155): kw TRANSCRIPTASE REVERSE II ORF2 domain identified by eMATRIX, accession number DM01354T, p-value=1.000e-40, raw score of 9.48
  DOMAIN (3)..(198): Reverse transcriptase domain identified by PFam, accession name rvt, E-value=3.3e-10, PFam score of 47.3
MAIKIREHTGPNSCRASSFSVPGSHPPSVFSLGPSAVAAAGDLVEDLQSREDQYQAIRSIDAEKVFNKIQHPFMIKTLSKIGIQGTYLNVMKAIYGKPTANIILNGEKLKAFPLGTGTRQGCPLSPLLFNIVLEVLARAIKQEKEIKGIQISKEEVKLSLFAEDVIVYLENPKDSSRKLLELIKAFGKVFRYKINVQK

SEQ ID NO: 36247 - protein, 142 aa, Homo sapiens
DEALQSNAFNQQNWLYKSATLSHTTYLLKNKDRNSLLKQSLIFMKGDMDECTHVANFSGTNFYMKLRIFADVLSNRARICQKTKNKQTKKNEEEERKKVKEEKEEMKKEEEGRIKKEEVEHKVVDYQKLRLDMPAFRLYETP

SEQ ID NO: 36248 - protein, 300 aa, Homo sapiens
VVLVLLVMLVHFGCHGAQERLQEQDERLREQEEWRVREQERLCEQNERLREQQKTLREQGERLRKQEQRLCKQEERLRKEEERLRKQEKRLWDQEERLWDQEERLWEKEERLQKQEERLMLSQNHKLDKQLAEPQCSFEDLTLHLTIFYSSFKSQLKCHFLREAFLDLTTIIATWASPSHRFASLGSCEDLLTSLGSCEDLLTGLAAPAFALKPSIYPRRWFSPWRLLPGAQESVWVQAWVEVQEQILPPSSYLLCTMAAKGWSSTLKPGCHASSGRFNIPAPVLATLALGLSSLREVLA

SEQ ID NO: 36249 - protein, 650 aa, Homo sapiens
DEEASKNSDEINIPRLIVSQLKWLDRVVDGKDLTTKIMQLISIAPENLQHDIITSLPEILGDSQHADVGKELSSSGNQESSGQSCIILLFDVIKSAIRYEKTISEAWIKAIENTASVSEHKVFDLVMLFIIYSTNTQTKKYIDRVLRNKIRSGCIQEQLLQSTFSVHYLVLKDMCSSILSLAQSLLHSLDQSIISFGSLLYKYAFKFFDTYCQQEVVGALVTHICSGNEAEVDTALDVLLELVVLNPSAMMMNAVFVKGILDYLDNISPQQIRKLFYVLSTLAFSKQNEASSHIQDDMHLVIRKQLSSTVFKYKLIGIIGAVTMAGIMAADRSESPSLTQERANLSDEQCTQVTSLLQLVHSCSEQSPQASALYYDEFANLIQHEKLDPKALEWVGHTICNDFQDAFVVDSCVVPEGDFPFPVKALYGLEEYDTQDGIAINLLPLLFSQDFAKDGGPVTSQESGQKLVSPLCLAPYFRLLRLCVERQHNGNLEEIDGLLDCPIFLTDLEPGEKLESMSAKERSFMCSLIFLTLNWFRENDLLTFTVELLFVLAQAYAYCFDSIVNAFCQETSPEMKGKVLTRLKHIVELQIILEKYLADAYTNGTEESPEISPYTYNELILSKGAKNIHWGKTLSSINGVGKTGYPYAEE

SEQ ID NO: 36250 - protein, 763 aa, Homo sapiens
  DOMAIN (27)..(45): HIV REV INTERACTING PROTEIN SIGNATURE domain identified by eMATRIX, accession number PR00405B, p-value=8.442e-12, raw score of 11.83
  DOMAIN (3)..(124): Putative GTP-ase activating protein for Arf domain identified by PFam, accession name ArfGap, E-value=5e-43, PFam score of 156.4
  misc_feature (1)...(763): Xaa = X or * as defined in Table 2
MSRKGPRAEVCADCSAPDPGWASISRGVLVCDECCSVHRSLGRHISIVKHLRHSAWPPTLLQMVHTLASNGANSIWEHSLLDPAQVQSGRRKANPQDKVHPIKSEFIRAKYQMLAFVHKLSCRDDDGVTAKDLSKANXHSSVRTGKPWKTCLRLLSLGAQANFFHPEKGTTPLHVAAKAGQTLQAELLVVYGADPGSPDVNGRTPIDYARQAGHHELAERLVECQYELTERLAFYLCGRKPDHKNGHYIIPQMADSLDLSELAKAAKKKLQALSNRLFEELAMDVYDEVDRRENDAVWLATQNHSTLVTERSAVPFLPVNPEYSATRNQGRQKLARFNAREFATLIIDILSEAKRRQQGKSLSSPTDNLELSLRSQSDLDDQHDYDSVASDEDTDQEPLRSTGATRSNRARSMDSSDLSDGAVTLQEYLELKKALATSEAKVQQLMKVNSSLSDELRRLQREIHKLQAENLQLRQPPGPVPTPPLPSERAEHTPMAPGGSTHRRDRQAFSMYEPGSALKPFGGPPGDELTTRLQPFHSTELEDDAIYSVHVPAGLYRIRKGVSASAVPFTPSSPLLSCSQEGSRHTSKLSRHGSGADSDYENTQSGDPLLGLEGKRFLELGKEEDFHPELESLDGDLDPGLPSTEDVILKTEQVTKNIQELLRAAQEFKHDSFVPCSEKIHLAVTEMASLFPKRPALEPVRSSLRLLNASAYRLQSECRKTVPPEPGAPVDFQLLTQQVIQCAYDIAKAAKQLVTITTREKKQ

SEQ ID NO: 36251 - protein, 308 aa, Homo sapiens
  DOMAIN (117)..(127): Ank repeat proteins domain identified by eMATRIX, accession number PF00023B, p-value=5.091e-09, raw score of 14.20
VFDLVMLFIIYSTNTQTKKYIDRVLRNKIRSGCIQEQLLQSTFSVHYLGILDYLDNISPQQIRKLFYVLSTLAFSKQNEASSHIQQLHSSVRTGNLETCLRLLSLGAQANFFHPEKGTTPLHVAAKAGQTLQAELLVVAAKNPEKREYTTENGSPAETPTCSAGKRGTPRTKMSDISSEDLRREIQAVLKDADLATISAKRVREQVEGKLNCSLLSRKKEFDKIVMEVINEQQDEEDEDDDEGKDPDADPDDESEPSEEEDPSSSEEEAAKKKKQTPKKRPQPTKHKAPKKKRKTLNADDSGTADERL

SEQ ID NO: 36252 - protein, 58 aa, Homo sapiens
  misc_feature (1)...(58): Xaa = X or * as defined in Table 2
RRAFHPTPVTSARSTLHSFGQLRLPHSMXSGGTLLISMMQANQSLSLEFSKWTSFPLD

SEQ ID NO: 36253 - protein, 546 aa, Homo sapiens
  DOMAIN (326)..(345): TYROSINE KINASE CATALYTIC DOMAIN SIGNATURE domain identified by eMATRIX, accession number PR00109B, p-value=1.818e-11, raw score of 12.27
  DOMAIN (215)..(496): Eukaryotic protein kinase domain identified by PFam, accession name pkinase, E-value=1.9e-91, PFam score of 317.2
EFLASGPAVPALAGFFKPHSIDRMKKFKRRLSLTLRGSQTIDESLSELAEQMTIEENSSKDNEPIVKNGRPPTSHSMHSFLHQYTGSFKKPPLRRPHSVIGGSLGSFMAMPRNGSRLDIVHENLKMGSDGESDQASGTSSDEVQSPTGVCLRNRIHRRISMEDLNKRLSLPADIRIPDGYLEKLQINSPPFDQPMSRRSRRASLSEIGFGKMETYIKLEKLGEGTYATVYKGRSKLTENLVALKEIRLEHEEGAPCTAIREVSLLKDLKHANIVTLHDIVHTDKSLTLVFEYLDKDLKQYMDDCGNIMSMHNVKLFLYQILRGLAYCHRRKVLHRDLKPQNLLINEKGELKLADFGLARAKSVPTKTYSNEVVTLWYRPPDVLLGSSEYLTQIDMWGVGCIFFEMASGRPLFPGSTVEDELHLIFRLLGTPSQETWPGISSNEEFKNYNFPKYKPEPLINHAPRLDSEGIELIRKFLQYESKKRVSAEEAMKHVYFRSLGPRIHALPESVSIFSLKEIQLQKDPGFRNSSYPETGHGKNRRQSMLF

SEQ ID NO: 36254 - protein, 366 aa, Homo sapiens
MGSDGESDQASGTSSDEVQSPTGVCLRNRIHRRISMEDLNKRLSLPADIRIPDGYLEKLQINSPPFDQPMSRRSRRASLGPLCFSECARDARLPRDRRQATACTHTPGGPGRVNMAAQGSPSSSPSDDSTTSGSLPELPPTSTATSRSPPESKGSSRSSLLQWTCPEDSLPLAVFYGPLDAKNPLLASCEKEIQELLGFMRKKKALATTEEEKHEFRRRCSWGNAFQLLLIQYDIGCDFVIDGSYYLEEYKLALLQCYGRYLQQFNTNFDENKVDVTQFKATFFPKGFKDKTAGLTLRKYQSWKIHHYRFQLKWASRTPRLSLIPSADVPPCNPQKPSFHPIPNYLASHLPVATEVSSSSSSRAPE

SEQ ID NO: 36255 - protein, 181 aa, Homo sapiens
  DOMAIN (55)..(154): gag gene protein p24 domain identified by PFam, accession name gag_p24, E-value=1.5e-27, PFam score of 104.9
  misc_feature (1)...(181): Xaa = X or * as defined in Table 2
NSSQVLQFXYLWVNEAPFRLLTMPQPYPQINITADQLWGSVAVLVXMHNGLPGLCIXAWEKTTSGGEQYPSSSAIKQGPKEPYADFIARLQESLKKVIADLAAQDIVLWLLAFDNANPECQAALRPIRGKAHLVDYTKVCDGIRDKLHKATLLAQAMAGLRMGKGNTPFPGACFNCGKHGH

SEQ ID NO: 36256 - protein, 215 aa, Homo sapiens; identical to SEQ ID NO: 34299
  DOMAIN (88)..(204): gag gene protein p24 domain identified by PFam, accession name gag_p24, E-value=4.3e-14, PFam score of 57.3
  misc_feature (1)...(215): Xaa = X or * as defined in Table 2

SEQ ID NO: 36257 - protein, 44 aa, Homo sapiens
SPPQHQYQPGQCPPEKKDLEGHFLQNNNEGVQNGRDEPLPPLPL

SEQ ID NO: 36258 - protein, 37 aa, Homo sapiens
MDQVLLFVMGLLKNIAVSSQMIPTDCDALTQACLTPA

SEQ ID NO: 36259 - protein, 311 aa, Homo sapiens; identical to SEQ ID NO: 35675
  DOMAIN (111)..(184): gag gene protein p24 domain identified by PFam, accession name gag_p24, E-value=3.3e-10, PFam score of 42.8

SEQ ID NO: 36260 - protein, 280 aa, Homo sapiens
  misc_feature (1)...(280): Xaa = X or * as defined in Table 2
MGKVWGLVHSTLELFHTDVEEEGEYNEVTEEVTKHVYLPAKAKAAKEGEVHPYHSAPPHYYFEENDPPDLSFLEDTGTPRLAAAATTKANAKQPLLLSPSMHRPLPTRPLLAGQATALPQGVXPLIAPPTRPHLEHCSTQXRPQPAPTLGEITPVTVPQAPLHPRAVQPWHSTPTRSWLQAVMPGIAPPSRSPPWAVQLRILTYLGCLSTTPAAVQSLSQPPASVRQARVPQAPASSLCQEKPPSPPPVAPHGAAAAARPPSYHSSCASVAVVAANVLIG

SEQ ID NO: 36261 - protein, 36 aa, Homo sapiens
  misc_feature (1)...(36): Xaa = X or * as defined in Table 2
MGQVWXKSQSPKAXEPGVSCPRAGRREASVPRWYSS

SEQ ID NO: 36262 - protein, 386 aa, Homo sapiens
  DOMAIN (275)..(286): RNase H domain identified by eMATRIX, accession number PF00075F, p-value=8.159e-09, raw score of 12.87
  DOMAIN (121)..(232): gag gene protein p24 domain identified by PFam, accession name gag_p24, E-value=4.7e-34, PFam score of 126.5
MGISCPGSSKMLNSRALPVLKLTQGALRDCKERANYTNFNIYKAVESQGKFVCVLYNGQQSPEYVMIPCTSVSPTGQEVPEDRGMRMVMKNKPNKPSKMQSLKSSKHLTNSVIVIAVGIFFSVTLQARDPQLDDAIEQLRGVCIRAWEKITSGGEQYPSFSAIKQGPKEPYIDFIARLQESLKKMIADSAAQDIVLQLLAFDNANPDCQAALRPIRGKAHLVDCIKACDDIGDGSSNGKASYFGSKSKVFQTSYTSAQKAELVAVIEVLTAFDMPINVISDSSYMVYSTQLIENAQLRFHTDEQLMTLFTQLQTAFRSTMHPFYITHIRAHTPLPGPLTEGNQMADRLVANAISNARHFHNLTHVNASGLKRRYNITWKEAKAIIQ

SEQ ID NO: 36263 - protein, 223 aa, Homo sapiens
  DOMAIN (123)..(173): gag gene protein p24 domain identified by PFam, accession name gag_p24, E-value=7.5e-12, PFam score of 48.9
MGIALGSPTTGPKAMKQNLSIGPAGILLPQPVMTPGCPAAAPPVAPRCGYVLSEDAWGNLQGLCTGLSCGQPVAPWATDSGGAQDPVALLPPFPSRGLLGPSCMQRSQVVKGGRQSEISSQNKKVIADLAAQDIVLQLLAFDNANPDCQAALRPIRGKAHLVDFIKACDVIGGIPNLLLHPRGLRAITIAVFGKQIRTSGSNPLRSTFLSRSRSISKNCSAEV

SEQ ID NO: 36264 - protein, 394 aa, Homo sapiens; identical to SEQ ID NO: 36163
  DOMAIN (63)..(275): gag gene protein p24 domain identified by PFam, accession name gag_p24, E-value=1.4e-42, PFam score of 154.9

SEQ ID NO: 36265 - protein, 357 aa, Homo sapiens
  DOMAIN (181)..(222): CORE POLYPROTEIN PROTEIN GAG CONTAINS: P domain identified by eMATRIX, accession number PD02059C, p-value=9.531e-09, raw score of 21.58
  DOMAIN (164)..(292): gag gene protein p24 domain identified by PFam, accession name gag_p24, E-value=6.9e-35, PFam score of 129.3
  misc_feature (1)...(357): Xaa = X or * as defined in Table 2
TQPPTWGQIKKLSQMVEENLRKAGQLVTMNNLMVAMIVVITTTEEQEYSEVTEEVTEQVYLPAKAKVAKEGEVHPYPSAPPHYYFEEKEWPDPPDLSFLEDTRQKVVAPVTVRAAPRATVLSSIQAGIQQARXEGDLEAWQFPVRIHPPDQQGNIIVTFEPFPFKLFKEFKQAVNQYGPGSPFVMGLLKNVAVSSWMIPTDWDALTRACLTPAQFLQFKTCAMKQGPREPYVDFIARLQESLKKMIADSAAQEIVLQLLAFDNAHPDCQAALRPIRGKAHLVDYVKACDGIGEYTPSTYEKKVNCKTASCRSFRRYPEEGIVITGDDSSMRVVVPEDLPVGQDVEVEDRDIDDPDPV

SEQ ID NO: 36266 - protein, 100 aa, Homo sapiens
MSCAGRAGPARLAALALLTCSLWPARADNASQEYYTALINVTVQEPGRGAPLTFRIDRGRYGLDSPKAEVRGQVLAPLPLHGAEGAPESSSEEDHTSPTF

SEQ ID NO: 36267 - protein, 124 aa, Homo sapiens
RNYARGALRKGGGDRLQVISDFDMTLSRFAYNGKRCPSSYNILDNSKIISEECRKELTALLHHYYPIEIDPHRTVKEKLPHMVEWWTKAHNLLCQQKIQKFQIAQVVRNYPTDESVPPQHPHRV

SEQ ID NO: 36268 - protein, 992 aa, Homo sapiens
  DOMAIN (45)..(58): BTB (also known as BR-C/Ttk) domain proteins domain identified by eMATRIX, accession number PF00651, p-value=2.286e-10, raw score of 15.00
  DOMAIN (644)..(945): Kelch motif domain identified by PFam, accession name Kelch, E-value=8.4e-17, PFam score of 69.2
MAAAAVAAAAAAAAAASLQNEQRRQGLFCDITLCFGGAGGREFRAHRSVLAAATEYFTPLLSGQFSESRSGRVEMRKWSSEPGPEPDTVEAVIEYMYTGRIRVSTGSVHEVLELADRFSVGAINAPGDFGPSVSMHSSTGAAAPGEKDQSQRPAGLESRINNPDMRVQILKDYVRQHFPATPLLDYALEVEKITTSKKPNLILNVDGLIGVAFVDMLRNCGSFTREEADEYIDIGALNGIFVLGRSMGFIGPELLPKPNSCLAPGRRPKASTDRLRILEGQVRQIARAQKFKYSLGNMVQFGHAGACANQASETAVAKNQALKEAGVFVPRSFDELGEIIQSVYEDLVANGVIVPAQEVPPPTVPMDYSWARRGIWQGHRTIVEGREGYKTFFNTLYHNNIPLFIFSAGIGDILEEIIRQMKVFHPNIHIVSNYMDFNEDGFLQGFKGQLIHTYNKNSSACENSGYFQQLEGKTNVILLGDSIGDLTMADGVPGVQNILKIGFLNDKAADMIRRNFHKVIQDEEFYTLPFHLIRDWLSDLEITVDSEEVLFETVLKWVQRNAEERERYFEELFKLLRLSQMKPTYLTRHVKPERLVANNEVCVKLVADAVERHALRAENIQSGTCQHPTSHVSLLPRYGQNMDVIMVIGGVSEGGDYLSECVGYFVDEDRWVNLPHIHNHLDGHAVAVTESYVYVAGSMEPGFAKTVERYNPNLNTWEHVCSLMTRKHSFGLTEVKGKLYSIGGHGNFSPGFKDVTVYNPELDKWHNLESAPKILRDVKALAIEDRFVYIAARTPVDRDTEDGLKAVITCYDTETRQWQDVESLPLIDNYCFFQMSVVNSNFYQTASCCPKSYCLENEEAVRKIASQVSDEILESLPPEVLSIEGAAICYYKDDVFIIGGWKNSDDIDKQYRKEAYRYCAERKRWMLLPPMPQPRCRATACHVRIPYRYLHGTQRYPMPQNLMWQKDRIRQMQEIHRHALNMRRVPSSQIEC

SEQ ID NO: 36269 - protein, 86 aa, Homo sapiens
GRYYPPQASGSPVISDFDMTLSRFAYNGKRCPSSYNILDNSKIISEECRKELTALLHHYYPIEIDPHRTVKEKLPHMVEWWTKAHN

SEQ ID NO: 36270 - protein, 1241 aa, Homo sapiens
  DOMAIN (266)..(300): FKBP-type peptidyl-prolyl cis-trans isomerase proteins domain identified by eMATRIX, accession number BL00453B, p-value=1.250e- 20, raw score of 23.86
  DOMAIN (26)..(307): FKBP-type peptidyl-prolyl cis-trans isomer domain identified by PFam, accession name FKBP, E-value=3.8e-44, PFam score of 143.4
HLRRLWLADQGHGPGAAGHVSWREKEIIIPPFLAYGEKGYGEGGKGHKGKFRRRGKNQASTYSCSGCILHEGIQPRTQGTVIPPQASLVFHVLLIDVHNPKDAVQLETLELPPGCVRRAGAGDFMRYHYNGSLMDGTLFDSSYSRNHTYNTYIGQGYIIPGMDQGLQGACMGERRRITIPPHLAYGENGTGDKIPGSAVLIFNVHVIDFHNPADVVEIRTLSRPSETCNETTKLGDFVRYHYNCSLLDGTQLFTSHDYGAPQEATLGANKVIEGLDTGLQGMCVGERRQLIVPPHLAHGESGGVTKIVSVVLKYLYAYELHPCIQKNWWEEKIPLAKTTLEKTWLFHEIGRCYLELDQAWQAQNYGEKSQQCAEEEGDIEWQLNASVLVAQAQEASLYEDRIITREKDMRRVRDEPEKVVKQWDHSEDEKETDEDDEAFGEALQSPASGKQKDVLTQLSLLLRAEVALVFDLINNPDMRVQILKDYVRQHFPATPLLDYALEVEKITTSKKPNLILNVDGLIGVAFVDMLRNCGSFTREEADEYIDIGALNGIFVLGRSMGFIVTSGHLVVYVQEANFENVLHTRNPIGHGEVPDRVSQQDDIGFALKLLEVTRVLTRRAVLVPKQDLAHIFIKIHVVRHDVDVGVEHFHLSDNFFQDITNARRKDEKGNVVMVQFGHAGACANQASETAVAKNQALKEAGVFVPRSFDELGEIIQSVYEDLVANGVIVPAQEVPPPTVPMDYSWARLTALLHHYYPIEIDPHRTVKEKLPHMVEWWTKAHNLLCQQKIQKFQIAQVVRESNAMLRIPLCRTNSRIVPRLWRPGAAASRWRLRQWRRRRRRPRLHLFRYWKWRAWRRAAAGSAGLAAEVRGSGTVDFGPGPGISAMEASGGDPGPEAEDFECSSHCSELSWRQNEQRRQGLFCDITLCFGGAGGREFRAHRSVLAAATEYFTPLLSGQFSESRSGRVEMRKWSSEPGPEPDTVEAVIEYMYTGRIRVSTGSVHEVLELADSSGFQAKSTHLTAALPDVPCATYFHVIALQTDSMAVQFRKYSPSVDWLQAAKLKCALDDANKGIIRELRKTNYVENLKEKSEGGKSTTLFSRHTKAIVWGMQTRAVQGMLDFDYVCSRDEPSVAAMVYPFTGDHKQKFYWGHKEILIPVFKNMADAMRKHPEVDVLINFASLRSAYDSTMETMNYAQVEERRERYMDSYDIVLEKDETLDVVNGLLQHILCQGVQLEMQGP

SEQ ID NO: 36271 - protein, 109 aa, Homo sapiens
  misc_feature (1)...(109): Xaa = X or * as defined in Table 2
MCLGDDLFLMNFPGXXXXXXXXXXXXXXXXXXXXXXXXXXXXXXXXXXXXXXXXXXXXXXXXXXXXXXXXXXXXXXXXXPFFWKKGLFFSPSLKGWGAILGYWNLPPPD

SEQ ID NO: 36272 - protein, 85 aa, Homo sapiens
  misc_feature (1)...(85): Xaa = X or * as defined in Table 2
MKERAVKQKHQVTCKGKLXXXXXXXXXXXXXXXXXXXXXXXXXXXXXXXXXXXXXXXXXXXYEGKIQLFQTNREFTTTKPPVQEC

SEQ ID NO: 36273 - protein, 368 aa, Homo sapiens
  DOMAIN (308)..(349): kw TRANSCRIPTASE REVERSE II ORF2 domain identified by eMATRIX, accession number DM01354I, p-value=9.824e-31, raw score of 15.55
  DOMAIN (98)..(297): AP endonuclease family 1 domain identified by PFam, accession name AP_endonucleas1, E-value=2.1e-09, PFam score of 27.0
  misc_feature (1)...(368): Xaa = X or * as defined in Table 2
GSRPGGHTLQSHRGRHAQGLRSPLLAPVCLGCGTWGQRRLFWSLKIXRLLCWFCRRLQINCKNKPAIPRGPTGPSEKSGLLLQDQGDTTNTEEENSKSLENIFGRVIKENFQSLVRDLDIQYKKHKEHPGNSSQKDHHLGTLSSGYPKLRQRKESXELSDRSTRKISQSYNLYTPNTGAPRFIKQLLTDLRNEIDSNTIIVGYFSTPLTALDRSSRQKVNDETVDLNYTLEQMDLTEIYRTFHPTTTEYTFYSTVHGTFSKIDHMICHKMSLNEFKKTEIISSTLSDHSGIKLEINSKMNLQNHANTWKLNNLLLNEHWVKNEIKMEIEKFFKLNDSNDTTYQNLWDMAKAVLRGKFIALNTYIKKMM

SEQ ID NO: 36274 - protein, 788 aa, Homo sapiens
  DOMAIN (656)..(667): RNase H domain identified by eMATRIX, accession number PF00075F, p-value=2.059e-10, raw score of 12.87
  DOMAIN (596)..(730): RNase H domain identified by PFam, accession name rnaseH, E- value=1.3e-17, PFam score of 71.9
MVSGHLGCALQQCDEGQLDADEPRPAFLTWLPGCCSQSSPSSQETWRVFSRESVQPKKKELKKCGLLRTCQGSSPPVQTRKGSRPKGSGTKVHSPNQTPRATTAEKGRSGWVTPQHFQGECPDAVIPEAKNKHRDSSRLLVEPNVSWELATLGEPQACAMCPALTVIISLNLNNAPSSIVNAIVQIKTLILHMDSGIMRPILFSLLLSPWKPFGNSEALILRHVAHSCFLQEPIGGSNGPAKKHLLRDLDIQIQEAQRTPGKFIAKRSSPRHIVIRLSKVKTKERILRAVRQKHQIQNCGMDKNSPTICCLQETHPTHKDLHKLKWAVLGGADPPSLSSDGSELVLSPSSPLESSVENLLSPLPYLSSLLYTHDSLRNLAQEVADGEEGTVRVHLPFSMSDLALCKEKFGHFSEDPGKFIDEFEKLTLTYGLTWQDPHVLCSLCCTVEEKQRILGTARTHADEVLAHNLNHNMYQAGGIAVPDQDPEWNYQRGSEDLGRRIETTKTSYGSPNSYGQLLEMTFLVFNNRDKAEEAERARRTSHKVQLLAAASNLPPTWGCPPGCWPGQGKLKDHSCIQIMELVYSSHLDLKDEPLDNPEVEWFTDGSSFVHQENWQAGAVVSQHEVIGSQALQASTLAQKAELIALIRALQLGKDLRINIYTDSKYAFLEWGLLTVKGSPAKHYLEIRRILGAVLLPKEVAINHCRGYQRGDSGAAKGNSFADATANAAALKEPIGLIGMLVPSATALTDPRYTKEEQEWAKGQGLIKDPLAGLSMTTNCYYQVLISGK

SEQ ID NO: 36275 - protein, 36 aa, Homo sapiens
  misc_feature (1)...(36): Xaa = X or * as defined in Table 2
WREGARQCQEDPAEFLSDXDWADPGPPHNAPGQNWH

SEQ ID NO: 36276 - protein, 487 aa, Homo sapiens
MQEDFQVEVLVEYPLRCLVLVAQVVAEMWRRNGLSLISQVFYYQDVKCREEMYDKDIIMLQKKYDAGFLSQIGASLMDPNKFLLLVLQRYELAEAFNKTISTKDQDLIKQYNTLIEEMLQVLIYIVGERYVPGVGNVTKEEVTMREIIHLLCIEPMPHSAIAKNLPENAFHILALGLLEEKQQLQKAPEEEVTFDFYHKASSTRREFDPLPFPASRGCPYSPADGPLSPSSKSAATVGQVLMSFRQHQCLGACRVPVLQHGIPLSIACNQGTHFTDLVVFRSGPLQTLNQQPAAFIVLDVSANFAGHTGVPKRGEAGSSWHCRAPSRHQCLPCTWLQLQECRSRNCLVLDSRFVPLFSESAKIRIALGGCDEVQGLPNLSLIETLPEELDQVLAIGLLPAIELQQAVDTCFHKDSITDGIQTHARLLKPADLLPAVSNESVMSFATRNKACSSSTHQPTVRARWRLSASCFLGSTSSQNATSTVKPR

SEQ ID NO: 36277 - protein, 257 aa, Homo sapiens
  DOMAIN (149)..(164): Polyprenyl synthetases proteins domain identified by eMATRIX, accession number BL00723B, p-value=4.600e-14, raw score of 14.35
  DOMAIN (91)..(257): Polyprenyl synthetases domain identified by PFam, accession name polyprenyl_synt, E-value=3.6e-09, PFam score of 33.3
  misc_feature (1)...(257): Xaa = X or * as defined in Table 2
SAWWNSRELLDPQSRSRSGFCFXEYPPTSGTEQESVSGNRALCSSLRMNGDQNSDVYAQEKQDFVQHFSQIVRVLTEDEMGHPEIGDAIARLKEVLEYNAIGGKYNRGLTVVVAFRELVEPRKQDADSLQRAWTVGWCVELLQAFFLVADDIMDSSLTRRGQICWYQKPGVGLDAINDANLLEACIYRLLKLYCREQPYYLNLIELFLQSSYQIEIGADPGPPHSPPRAMWILSDSLKRGTNLLSSTRQLSTPSTFL

SEQ ID NO: 36278 - protein, 178 aa, Homo sapiens
RLNEAEQKYKDIQDKLQIISEETNARAPECMALKADVVAKKRAYNEAEVLYNRSLNEYKALKKDDEQLCKRIEELKKRVLTNRLEPERLERQKKISWLKERVKAFQNQENSVNQEIEQFQQALEKDKEEHGKIKREKLDVKHALSYNQRLLKELKDSKTDRLKRFGPNVPALLEAIDD

SEQ ID NO: 36279 - protein, 118 aa, Homo sapiens
DISITLRNRGDDAFKASVYGNSILIQQHISIDGSRSYKLKSATGSVVSTRKEELIAILDHFNIQFFMKATQLEQMKEDYSYIMETKERTKEQIHQGEEVRLNEAEQKVQGYSRQTRKD

SEQ ID NO: 36280 - protein, 920 aa, Homo sapiens
  DOMAIN (743)..(755): Sushi domain proteins (SCR repeat proteins domain identified by eMATRIX, accession number PF00084B, p-value=7.188e-10, raw score of 9.45
  DOMAIN (370)..(842): Sushi domain (SCR repeat) domain identified by PFam, accession name sushi, E-value=1.4e-44, PFam score of 161.5
LVSFLLFQDALPEGDASPLGPYLLPSGAPERGSPGKEHPEERVVTAPPSSSQSAEVLGELVLDGTAPSAHHDIPALSPLLPEEARPKHALPPKKKLPSLKQVNSARKQLRPKATSAATVQRAGSQPASQGLDLLSSSTEKPGPPGDPDPIVASEEASEVPLWLDRKESAVPTTPAPLQISPFTSQPYVAHTLPQRPEPGEPGPDMAQEAPQEDTSPMALMDKGENELTGSASEESQETTTSTIITTTVITTEQAPALCSVSFSNPEGYIDSSDYPLLPLNNFLECTYNVTVYTGYGVELQVKSVNLSDGELLSIRGVDGPTLTVLANQTLLVEGQVIRSPTNTISVYFRTFQDDGLGTFQLHYQAFMLSCNFPRRPDSGDVTVMDLHSGGVAHFHCHLGYELQGAKMLTCINASKPHWSSQEPICSAPCGGAVHNATIGRVLSPSYPENTNGSQFCIWTIEAPEGQKLHLHFERLLLHDKDRMTVHSGQTNKSALLYDSLQTESVPFEGLLSEGNTIRIEFTSDQARAASTFNIRFEAFEKGHCYEPYIQNGNFTTSDPTYNIGTIVEFTCDPGHSLEQGPAIIECINVRDPYWNDTEPLCRAMCGGELSAVAGVVLSPNWPEPYVEGEDCIWKIHVGEEKRIFLDIQFLNLSNSDILTIYDGDEVMPHILGQYLGNSGPQKLYSSTPDLTIQFHSDPAGLIFGKGQGFIMNYIEVSRNDSCSDLPEIQNGWKTTSHTELVRGARITYQCDPGYDIVGSDTLTCQWDLSWSSDPPFCEKIMYCTDPGEVDHSTRLISDPVLLVGTTIQYTCNPGFVLEGSSLLTCYSRETGTPIWTSRLPHCVSEAAAETSLEGGNMALAIFIPVLIISLLLGGAYIYITRCRYYSNLRLPLMYSHPYSQITVETEFDNPIYETGGTQKV

SEQ ID NO: 36281 - protein, 990 aa, Homo sapiens
  DOMAIN (743)..(755): Sushi domain proteins (SCR repeat proteins domain identified by eMATRIX, accession number PF00084B, p-value=7.188e-10, raw score of 9.45
  DOMAIN (370)..(907): Sushi domain (SCR repeat) domain identified by PFam, accession name sushi, E-value=1.3e-58, PFam score of 208.2
LVSFLLFQDALPEGDASPLGPYLLPSGAPERGSPGKEHPEERVVTAPPSSSQSAEVLGELVLDGTAPSAHHDIPALSPLLPEEARPKHALPPKKKLPSLKQVNSARKQLRPKATSAATVQRAGSQPASQGLDLLSSSTEKPGPPGDPDPIVASEEASEVPLWLDRKESAVPTTPAPLQISPFTSQPYVAHTLPQRPEPGEPGPDMAQEAPQEDTSPMALMDKGENELTGSASEESQETTTSTIITTTVITTEQAPALCSVSFSNPEGYIDSSDYPLLPLNNFLECTYNVTVYTGYGVELQVKSVNLSDGELLSIRGVDGPTLTVLANQTLLVEGQVIRSPTNTISVYFRTFQDDGLGTFQLHYQAFMLSCNFPRRPDSGDVTVMDLHSGGVAHFHCHLGYELQGAKMLTCINASKPHWSSQEPICSAPCGGAVHNATIGRVLSPSYPENTNGSQFCIWTIEAPEGQKLHLHFERLLLHDKDRMTVHSGQTNKSALLYDSLQTESVPFEGLLSEGNTIRIEFTSDQARAASTFNIRFEAFEKGHCYEPYIQNGNFTTSDPTYNIGTIVEFTCDPGHSLEQGPAIIECINVRDPYWNDTEPLCRAMCGGELSAVAGVVLSPNWPEPYVEGEDCIWKIHVGEEKRIFLDIQFLNLSNSDILTIYDGDEVMPHILGQYLGNSGPQKLYSSTPDLTIQFHSDPAGLIFGKGQGFIMNYIEVSRNDSCSDLPEIQNGWKTTSHTELVRGARITYQCDPGYDIVGSDTLTCQWDLSWSSDPPFCEKIMYCTDPGEVDHSTRLISDPVLLVGTTIQYTCNPGFVLEGSSLLTCYSRETGTPIWTSRLPHCVSEESLACDNPGLPENGYQILYKRLYLPGESLTFMCYEGFELMGEVTIRCILGQPSHWNGPLPVCKVAEAAAETSLEGGNMALAIFIPVLIISLLLGGAYIYITRCRYYSNLRLPLMYSHPYSQITVETEFDNPIYETGETREYEVSI

SEQ ID NO: 36282 - protein, 82 aa, Homo sapiens
  misc_feature (1)...(82): Xaa = X or * as defined in Table 2
CQDYRWLLASSVLCWLYXKTQQSDTEDLLCSAPTGPPNPEEDDGKSXPEKCRQMTXKKWSINCKCFFASSHNTTLSIGLFLR

SEQ ID NO: 36283 - protein, 72 aa, Homo sapiens
  misc_feature (1)...(72): Xaa = X or * as defined in Table 2
MSESGLELQKDPAGKHVTLFGNKVFADVIRQMGSYWIGVGLKSNDWYLPKKVMWKMQRDTLREECHVMMGAX

SEQ ID NO: 36284 - protein, 996 aa, Homo sapiens
  DOMAIN (743)..(755): Sushi domain proteins (SCR repeat proteins domain identified by eMATRIX, accession number PF00084B, p-value=7.188e-10, raw score of 9.45
  DOMAIN (370)..(842): Sushi domain (SCR repeat) domain identified by PFam, accession name sushi, E-value=1.4e-44, PFam score of 161.5
  misc_feature (1)...(996): Xaa = X or * as defined in Table 2
LVSFLLFQDALPEGDASPLGPYLLPSGAPERGSPGKEHPEERVVTAPPSSSQSAEVLGELVLDGTAPSAHHDIPALSPLLPEEARPKHALPPKKKLPSLKQVNSARKQLRPKATSAATVQRAGSQPASQGLDLLSSSTEKPGPPGDPDPIVASEEASEVPLWLDRKESAVPTTPAPLQISPFTSQPYVAHTLPQRPEPGEPGPDMAQEAPQEDTSPMALMDKGENELTGSASEESQETTTSTIITTTVITTEQAPALCSVSFSNPEGYIDSSDYPLLPLNNFLECTYNVTVYTGYGVELQVKSVNLSDGELLSIRGVDGPTLTVLANQTLLVEGQVIRSPTNTISVYFRTFQDDGLGTFQLHYQAFMLSCNFPRRPDSGDVTVMDLHSGGVAHFHCHLGYELQGAKMLTCINASKPHWSSQEPICSAPCGGAVHNATIGRVLSPSYPENTNGSQFCIWTIEAPEGQKLHLHFERLLLHDKDRMTVHSGQTNKSALLYDSLQTESVPFEGLLSEGNTIRIEFTSDQARAASTFNIRFEAFEKGHCYEPYIQNGNFTTSDPTYNIGTIVEFTCDPGHSLEQGPAIIECINVRDPYWNDTEPLCRAMCGGELSAVAGVVLSPNWPEPYVEGEDCIWKIHVGEEKRIFLDIQFLNLSNSDILTIYDGDEVMPHILGQYLGNSGPQKLYSSTPDLTIQFHSDPAGLIFGKGQGFIMNYIEVSRNDSCSDLPEIQNGWKTTSHTELVRGARITYQCDPGYDIVGSDTLTCQWDLSWSSDPPFCEKIMYCTDPGEVDHSTRLISDPVLLVGTTIQYTCNPGFVLEGSSLLTCYSRETGTPIWTSRLPHCVSEESCLMXQPRAAXKWIPNPVQATLPARRVPHLHVLRRLXAHGXSDHPLHPGTAIPLERAPARVXSXSRQFXTCFRSRAAAETSLEGGNMALAIFIPVLIISLLLGGAYIYITRCRYYSNLRLPLMYSHPYSQITVETEFDNPIYETGGTQKV

SEQ ID NO: 36285 - protein, 395 aa, Homo sapiens
  DOMAIN (352)..(364): Sushi domain proteins (SCR repeat proteins domain identified by eMATRIX, accession number PF00084B, p-value=7.188e-10, raw score of 9.45
  DOMAIN (331)..(386): Sushi domain (SCR repeat) domain identified by PFam, accession name sushi, E-value=1.3e-14, PFam score of 62.0
MDIKMEIVDTGDSKDLADLLMLSIRSLPYLIVAFFSKTNTEQTKQVTIGSLDINMSFDHCLPFFDHGTHFVMGKIHAMEVRQCPHPPQIHVCRKAQDVTLFGNKVFADVIRQMGSYWIGVGLKSNDWYLPKKVMWKMQRDTLREECHVMMGAESQTGQRVQGAFGGLQGRDKEKLQYLDKSLMTAQHQDLLCARPTHIRGIVLVGCESSLGSGQRLAGLQEADIKPHNSKNGGAWGLALDDASPLLRMHWGSDAHLSRGQANTKAKAPTINHNVSMEYLANTGVAQGPQLLKYKKCERKAVLVQRGYRKRRGLRGELSFSSGKKVSRNDSCSDLPEIQNGWKTTSHTELVRGARITYQCDPGYDIVGSDTLTCQWDLSWSSDPPFCEKKLMVCML

SEQ ID NO: 36286 - protein, 47 aa, Homo sapiens
  misc_feature (1)...(47): Xaa = X or * as defined in Table 2
PSVVLDINVSFNHWSAIFLTMEPFCHRVRSHAMESRXGSVLPXNKPQ

SEQ ID NO: 36287 - protein, 124 aa, Homo sapiens
KGPGELSHKMCDFTENQTAEFKEAFQLLDRTEMNVKVLDFEHFLPMLQTGAKNKDQGTYEDYVEGLRVFDKEGNGTVMGAEIRHVLVTLGEKMTEEEVQMLVAGHEDSNGCINYEELVRMVLNG

SEQ ID NO: 36288 - protein, 228 aa, Homo sapiens
GTSAGDGCPHPHTVLWPPDIMPPKKDVPVKKPAGPSISKPAAKPAAAGAPPAKTKAEPAVPQAPQKTQEPPVDLSKVVIEFNKDQLEEFKEAFELFDRVGDGKILYSQCGDVMRALGQNPTNAEVLKVLGNPKSDEMNVKVLDFEHFLPMLQTVAKNKDQGTYEDYVEGLRVFDKEGNGTVMGAEIRHVLVTLGEKMTEEEVEMLVAGHEDSNGCINYEELVRMVLNG

SEQ ID NO: 36289 - protein, 160 aa, Homo sapiens
AVYMCDLTENQTADLIPSTEFKEAFQLFDRTGDGKILYSQCGDVMRALGQNPTNAEVLKVLGNPKSDEMNVKVLDFEHFLPMLQTVAKNKDQGTYEDYVEGLRVFDKEGNGTVMGAEIRHVLVTLGEKMTEEDVHMLVAGHEDSNGCINYEAFVRHILSG

SEQ ID NO: 36290 - protein, 135 aa, Homo sapiens
MIHNSSHSKVLAYVGKHPLIQIMGTGQAGSWRSHKQRQQLAKARTAELGGLNKDQMHGDSSVFLDSPSSLEPCAPSQGPHPELGCRLHLDLPRQHQEKVERLLEVSREPDKGWRGLADHLGYQAEAVEIMAQGQV

SEQ ID NO: 36291 - protein, 137 aa, Homo sapiens
  DOMAIN (79)..(111): ABC transporters family proteins domain identified by eMATRIX, accession number BL00211B, p-value=2.406e-14, raw score of 13.37
APEQMLRGHVTVRGLSKGFGLATQEPWIQFATIRDNILFGKTFDAQLYKEVLEACALNDDLSILPAGDQTKVGEKGVTLSGGQRARIALARAVYQEKELYFLNDPLAAVNANVANPLLHRGILGMLSYPTRCSHPPH

SEQ ID NO: 36292 - protein, 157 aa, Homo sapiens
  DOMAIN (84)..(105): GTP1/OBG GTP-BINDING PROTEIN FAMILY SIGNATURE domain identified by eMATRIX, accession number PR00326A, p-value=7.600e- 11, raw score of 8.75
MLILPLNNFPWVINGLLEAKVSLDRIQLFLDLPNHNPQAYYSPDPPAEPSTVLELHGALFSWDPVGTSLETFISHLEVKKGMLVGIVGKVGCGKSSLLAAIAGELHRWEQEPWIQFATIRDNILFGKTFDAQLYKEVLEACALNDDLSILPAGDQTE

SEQ ID NO: 36293 - protein, 198 aa, Homo sapiens
  DOMAIN (34)..(55): GTP1/OBG GTP-BINDING PROTEIN FAMILY SIGNATURE domain identified by eMATRIX, accession number PR00326A, p-value=7.600e- 11, raw score of 8.75
  DOMAIN (31)..(191): ABC transporter domain identified by PFam, accession name ABC_tran, E-value=1.1e-07, PFam score of 30.0
  misc_feature (1)...(198): Xaa = X or * as defined in Table 2
TRTSLHAALFSWDPVGTSLETFISHLEVKKGMLVGIVGKVGCGKSSLLAAIAGELHRWEQVQCGGHTLHXAPEQMLRGHVAVRGLSKGFGLATQEPWIQFATIRDNILFGKTFDAQLYKEVLEACALNDDLSILPAGDQTEVGEKGVTLSGGQRARIALARAVYQEKELYLLDDPLAAVDADVANPPACTGCNPWGNA

SEQ ID NO: 36294 - protein, 78 aa, Homo sapiens
  misc_feature (1)...(78): Xaa = X or * as defined in Table 2
XGSSRGESRADYARDGRGDHPGDSGSRRRSPGLCSDSLEKSLRITVGNDHFCVSTPERRRLSDRLGSPVDNLEDMDRG

SEQ ID NO: 36295 - protein, 466 aa, Homo sapiens
  DOMAIN (56)..(77): GTP1/OBG GTP-BINDING PROTEIN FAMILY SIGNATURE domain identified by eMATRIX, accession number PR00326A, p-value=7.600e- 11, raw score of 8.75
MLILPLNNFPWVINGLLEAKVSLDRIQLFLDLPNHNPQAYYSPADACVASLQGMLVGIVGKVGCGKSSLLAAIAGELHRLRGHVAVRGLSKGFGLATQEPWIQFATIRDNILFGKTFDAQLYKEVLEACALNDDLSKCHHHYPTQKKEVRKEKQYSKKCSLSLTYPPDQYSSDTIGELRSKQQSRLRGHVAVRGLSKGFGLATQEPWIQFATIRDNILFGKTFDAQLYKEVLEACALNDDLSKCHHHYPTQLRRRAPSLRLGRPRVRAVAVAAAARTMYRSSARSSVSSHRPKDDGGGGPRSGRSSGSSSGPARRSSKPPPPSGSSSRTPARRPRSPSGHRGRRASPSPPRGRRVSPSPPRARRGSPSPPRGRRLFPPGPAGFRGSSRGESRADYARDGRGDHPGDSGSRVIPPLVQDSLHPPVPSPGIPVSRNARGLQTRVLSAKPPANSLGDAEPGGFCQTRER

SEQ ID NO: 36296 - protein, 305 aa, Homo sapiens
  DOMAIN (258)..(298): Zinc finger, C3HC4 type (RING finger) domain identified by PFam, accession name zf-C3HC4, E-value=2e-09, PFam score of 34.8
MSFLRITPSTHSSVSSGLLRLSIFLLLSFPDSNGKAIWTAHLNITFQVGNEITSELGESGVFGNHSPLERVSGVVALPEGWNQNACHPLTNFSRPKQADSWLALIERGGCTFTHKINVAAEKGANGVIIYNYQGTGSKVFPMSHQGTENIVAVMISNLKGMEILHSIQKGVYVTVIIEVGRMHMQWVSHYIMYLFTFLAATIAYFYLDCVWRLTPRVPNSFTRRRSQIKTDVKKAIDQLQLRVLKEGDEELDLNEDNCVVCFDTYKPQDVVRILTCKHFFHKACIDPWLLAHRTCPMCKCDILKT

SEQ ID NO: 36297 - protein, 175 aa, Homo sapiens
  DOMAIN (42)..(58): MEMBRANE ALANYL DIPEPTIDASE (M1) FAMILY SIGNATURE domain identified by eMATRIX, accession number PR00756D, p-value=4.194e- 10, raw score of 10.58
  DOMAIN (44)..(75): Peptidase family M1 domain identified by PFam, accession name Peptidase_M1, E-value=0.00013, PFam score of 13.8
AQFQECRDEEEPGWAVESRLSPHIMFLSQSILTGGNHLCGTRLCHEIAHAWFGLTIGARDWTEEWLSEGFATHLEDVFWATAQQLAPYEAREQQELRACLRWRRLQDEMQCSPEEMQVLRCKTQTYLKCVLAVERAGLWLIECGEEENECIQNDFEVFELDSWVDGDPICVMVKT

SEQ ID NO: 36298 - protein, 72 aa, Homo sapiens
PHSSLFPLEDWKPRKVPVANHLWSSTLLRLRAFLTSSEQPIPWVELGGKVSINCAKTGYSATVIFHTKPFSS

SEQ ID NO: 36299 - protein, 242 aa, Homo sapiens
  DOMAIN (44)..(54): Oxysterol-binding protein family proteins domain identified by eMATRIX, accession number BL01013C, p-value=4.906e-12, raw score of 9.97
TDPRVRKFPRTGSSLRGLLSALLPAVANTPWPMTLPKSYKLRFVAEQVSHHPPISCFYCECEEKRLCVNTHVWTKSKFMGMSAGVSMIGEGVLRLLEHGEEYVFTLPSAYAGSILTIPWVELGEKVSIICAKAGYSATVIFHTKPFYGGKVHRVPAEVKHNPTTPIVCKAHGEWNGTLEFPYNNGETKVIDTTTLPVYPKKIRPLEKQGPMESSNLWREVTRYMRLGNIDAAAEHKRPLEEK

SEQ ID NO: 36300 - protein, 179 aa, Homo sapiens
  DOMAIN (68)..(116): Cadherins extracellular repeat proteins domain proteins domain identified by eMATRIX, accession number BL00232B, p-value= 6.671e-15, raw score of 32.79
  DOMAIN (2)..(76): Cadherin domain identified by PFam, accession name cadherin, E-value=0.071, PFam score of 11.9
MALHSDLDKGEGTAKYTLSGDGAGTVFTIDETTGDIHAIRSLDREEKPFYTLRAQAVDIETRKPLEPESEFIIKVQDINDNEPKFWDGPYVATVPEMSPVDKTIRIFLGPTRIIRAAELEPLYKEFAAHIRREKCISKVKSVDFFTFSFGVPVQDVQVCYIDKHVPGWFAAPINPSHRY

SEQ ID NO: 36301 - protein, 69 aa, Homo sapiens
  misc_feature (1)...(69): Xaa = X or * as defined in Table 2
AANSLYKGSNSAALIILVGPXISCLTHPVYMKXAPSXTICLLYSMVILKALFFPQNINFIFLPVKSRHS

SEQ ID NO: 36302 - protein, 849 aa, Homo sapiens
  DOMAIN (305)..(323): CADHERIN SIGNATURE domain identified by eMATRIX, accession number PR00205B, p-value=2.364e-15, raw score of 11.39
  DOMAIN (694)..(840): Cadherin cytoplasmic region domain identified by PFam, accession name Cadherin_C_term, E-value=1.1e-97, PFam score of 337.9
YSRSLFIKRINACIIISAIKQEAKWWRPQTPQTWIPQFYVKCWSFYYSAVGKPLPMLTRNCLSLLLWVLFDGGLLTPLQPQPQQTLATEPRENVIHLPGQRSHFQRVKRGWVWNQFFVLEEYMGSEPQYVGKLHSDLDKGEGTVKYTLSGDGAGTVFTIDETTGDIHAIRSLDREEKPFYTLRAQAVDIETRKPLEPESEFIIKVQDINDNEPKFLDGPYVATVPEMSPVGAYVLQVKATDADDPTYGNSARVVYSILQGQPYFSIDPKTGVIRTALPNMDREVKEQYQVLIQAKDMGGQLGGLAGTTIVNITLTDVNDNPPRFPKSIFHLKVPESSPIGSAIGRIRAVDPDFGQNAEIEYNIVPGDGGNLFDIVTDEDTQEGVIKLKKPLDFETKKAYTFKVDASNLHLDHRFHSAGPFKDTATVKISVLDVDEPPVFSKPLYTMEVYEDTPVGTIIGAVTAQDLDVGSSAVRYFIDWKSDGDSYFTIDGNEGTIATNELLDRESTAQYNFSIIASKVSNPLLTSKVNILINVLDVNEFPPEISVPYETAVCENAKPGQIIQIVSAADRDLSPAGQQFSFRLSPEAAIKPNFTVRDFRNNTAGIETRRNGYSRRQQELYFLPVVIEDSSYPVQSSTNTMTIRVCRCDSDGTILSCNVEAIFLPVGLSTGALIAILLCIVILLAIVVLYVALRRQKKKDTLMTSKEDIRDNVIHYDDEGGGEEDTQAFDIGALRNPKVIEENKIRRDIKPDSLCLPRQRPPMEDNTDIRDFIHQRLQENDVDPTAPPYDSLATYAYEGSGSVAESLSSIDSLTTETDQDYDYLTDWGPRFKVLADMFGEEESYNPDKVT

SEQ ID NO: 36303 - protein, 201 aa, Homo sapiens
  DOMAIN (75)..(123): Cadherins extracellular repeat proteins domain proteins domain identified by eMATRIX, accession number BL00232B, p-value= 7.474e-22, raw score of 32.79
  DOMAIN (2)..(83): Cadherin domain identified by PFam, accession name cadherin, E-value=0.011, PFam score of 21.4
MVEIYNLKFLHSDLDKGEGTAKYTLSGDGAGTVFTIDETTGDIHAIRSLDREEKPFYTLRAQAVDIETRKPLEPESEFIIKVQDINDNEPKFWDGPYVATVPEMSPVGHAMKIVHATVRAEADKTIRIFLGPTRIIRAAELEPLYKEFAAHIRREKCIWKVKSVDFFTFSFGVPVQDVQVCYIDKHVPGWFAAPINPSHRY

SEQ ID NO: 36304 - protein, 146 aa, Homo sapiens
  DOMAIN (100)..(118): Cadherins extracellular repeat proteins domain proteins domain identified by eMATRIX, accession number BL00232C, p-value= 8.263e-09, raw score of 10.65
  misc_feature (1)...(146): Xaa = X or * as defined in Table 2
RNCIANYDFLILPTSFXWCSFFVLLFLFLSLSLSSLKLHSDLDKGEGTAKYTLSGDGAGPVFTIDETTGDIHAIRSLDREEKPFYTLRAQAVDIETRKPLEPESEFIIKVQDINDNEPKFWGWDLMVATGPQKWSPVGXVGQIKIL

SEQ ID NO: 36305 - protein, 503 aa, Homo sapiens
  DOMAIN (164)..(178): LEUCINE-RICH REPEAT SIGNATURE domain identified by eMATRIX, accession number PR00019A, p-value=8.043e-10, raw score of 11.19
  DOMAIN (66)..(233): Leucine Rich Repeat domain identified by PFam, accession name LRR, E-value=4.9e-23, PFam score of 90.0
MAPGPFSSALLSPPPAALPFLLLLWAGASRGQPCPGRCICQNVAPTLTMLCAKTGLLFVPPAIDRRVVELRLTDNFIAAVRRRDFANMTSLVHLTLSRNTIGQVAAGAFADLRALRALHLDSNRLAEVRGDQLRGLGNLRHLILGNNQIRRVESAAFDAFLSTVEDLDLSYNNLEALPWEAVGQMVNLNTLTLDHNLIDHIAEGTFVQLHKLVRLDMTSNRLHKLPPDGLFLRSQGTGPKPPTPLTVSFGGNPLHCNCELLWLRRLTREDDLETCATPEHLTDRYFWSIPEEEFLCEPPLITRQAGGRALVVEGQAVSLRCRAVGDPEPVVHWVAPDGRLLGNSSRTRVRGDGTLDVTITTLRDSGTFTCIASNAAGEATAPVEVCVVPLPLMAPPPAAPPPLTEPGSSDIATPGRPGANDSAAERRLVAAELTSNSVLIRWPAQRPVPGIRMYQVQYNSSVDDSLVLQVGAGAAVPGPPPKPRGTLPPTCPFPWPSCSARVL

SEQ ID NO: 36306 - protein, 201 aa, Homo sapiens
MSESQDEVPDEVENQFILRLPLEHACTVRNLARSQSVKMKDKLKIDLLRSLRVHWEDINFNLYFSSADGRHAVVEVEDVPLAAKLVDLPCVIESLRTLDKKTFYKTADISQMLVCTADGDIHLSPEEPAASTDPNIVRKKERGREEKCVWKHGTHFPTGTVAAFSEEVRRAIGVAHKPWIHHPDCRLDETVHVFVPSVALC

SEQ ID NO: 36307 - protein, 85 aa, Homo sapiens
  misc_feature (1)...(85): Xaa = X or * as defined in Table 2
GFSPTWQXMNTHPSLMCFSPSRTTGSAAANXRGQQKSGVPFWSXSHVKGKDQIPVPICPCTTAPVTMESTCICXPTHVSCKTLMV

SEQ ID NO: 36308 - protein, 42 aa, Homo sapiens
  misc_feature (1)...(42): Xaa = X or * as defined in Table 2
RVLVPDIRGAIXAVPKSPSIKSYPALPRALFLLPPYPDDLGI

SEQ ID NO: 36309 - protein, 304 aa, Homo sapiens
MAKETTTSVGKDVEQLELSYIVSRNVKRYHHYVKRPETPSEPVSPSTGPGTLAAVGPSVASLLPHMPEPSSPEPVSPTIGPGSPGAVGTPTAMEPLAATGLPAVCLLPDRPETCSKMVPSPTDPSSPTAMDTPVVCLPPNKPETPPEPVFSAMGPGILVEVGTSILVGPLASAGAGPFQNLTPKPQAHSQEAPSQPVPVHRSLRLSRSSARNTPFDRSLSCRHGMELDSTSFPTSRGGPHSLHLQPQRLHVVPMAPFWGGERVRLRRSSTGTVERPHWQDHFRLLLRVLRTAGGKSWCPDCVLG

SEQ ID NO: 36310 - protein, 57 aa, Homo sapiens
  DOMAIN (22)..(52): Flocculin repeat proteins domain identified by eMATRIX, accession number PF00624I, p-value=7.261e-11, raw score of 9.10
KRREQRRLRMGTSKTLLRLSSSSSSSDSSISAESSSSSSSSSSSSSSSISSYSSGPI

SEQ ID NO: 36311 - protein, 127 aa, Homo sapiens
DNKDQVTAISVNFLNFLRGQGLRVSKNKIQFIESEVKYLGHLISKGERKIGSERIEEQPFHLFINVSKGVALGVLTQKHGGHRQPVVFLSKILDPVTRGWPECVQSIAATALLTEESRKITFGGNLF

SEQ ID NO: 36312 - protein, 441 aa, Homo sapiens
MTLEELEDREDKFNEEDECAIEMYRQQRLDEWKATKLKNKFEEVLGIWRGGGGEQGLQVSKNKLQFVEPEVKYLGHLISKGKRKIGPKQIEGMVSLPLPETKQELRKFSGLVGYCHLWINSYALKTKPLYQKLTQERPDPVNPSLDPIRDPTEQPFHLFVNISKGVALGVLTHKHGGHQWPVAFLSKILDPVTRGWPECVQSIAATALLTEESRKITFGGNLIISTPHQVRTILNQKAERWLTDSRILKYEVILLERDDLTLTTDNSLNPAAFLTGNPNPEESTHKCLDLISSQTRVRLDLSKTPFQTGHHLFTDGSPRIIEGKRYNRYSTVDGEILTENQEGTIYTDSKYAFRVVHTFGKIWTERGFINTAIPIFSHVDLSLKKIGAQESPEGKQALPDGREMLSKPLMREILSQLHPGTHWGPQAMCNVALRVYGCIEY

SEQ ID NO: 36313 - protein, 84 aa, Homo sapiens
TRLHDPPALPKSYLHMFSPLTAGGCAAPLLPPLPILSDFPWGVRYPFCVKMSFHSVYALGNMHLVSSSVAQTSCAAAPPPLSSL

SEQ ID NO: 36314 - protein, 107 aa, Homo sapiens
MGSDRARKGGGGPKDFGAGLKYNSRHEVSAGRGPGALGSSCPPDPAARRWARPAPLACPSVAELWAHSQEMLGKLNMLRNDGHFCDITIRVQDKIFRAHKWLLGSLQ

SEQ ID NO: 36315 - protein, 199 aa, Homo sapiens
GGIHQPMLVSLLKKKRNDNSEAQLAHLIPELCFLTGLTDQATSDFQLMKAVAEKTRLSPSGRQQRLARLVDNIQRNTNARFELETWGLHFGSQISLTGRIVPSEKILMQDHICQPVSAADWSKDIRTCKILNAQSLNTWLILCSDRTEYVAESFLNCLRRVAGSMGFNVDYPKIIKVQENPAAFVRAIQQYVDPDVQLV

SEQ ID NO: 36316 - protein, 341 aa, Homo sapiens
  DOMAIN (91)..(204): ZAP domain identified by PFam, accession name ZAP, E-value= 6.3e-19, PFam score of 76.3
MKHPLAMASWEQAGSQPTVTELSSETQRGETIKMTITLKRELPSSSPVCIQVFNIIFRKLSLWPGFAISVSYFERKLLFSADVSYKVLRNETVLEFMTALCQRTGLSCFTQTCEKQLIGLIVLTRYNNRTYSIDDIDWSVKPTHTFQKRDGTEITYVDYYKQQYDITVSDLNQPMLVSLLKKKRNDNSEAQLAHLIPELCFLTGLTDQATSDFQLMKAVAEKTRLSPSGRQQRLARLVDNIQRFPVAEFTVPPCKGQYREETDRYIQQGQERKGQARVGEAKRLGSHTRGQDRESLTRVFQAQPRDTVLSSVQTLIPESMALHSSCEAVHVDFNVSDASQG

SEQ ID NO: 36317 - protein, 202 aa, Homo sapiens
TKINSRWIKDLNVRPKTIKTLEENLGNTIQELGVGKDFMTKTPKAMATKAKIDKWDLIKRKSFCTAKETTIRVNRQPTEWEKIFAIYPSDKGLISRIYKELKQIYKKKTSTPIKKWAKDMNRHCSKEDIYVANGHMKKCSSSLVVREMQIQTTMRYHLTPVRMAIIKKSGNNRCWRGCGEIGTLLHCWWECKLVQPLWKTVW

SEQ ID NO: 36318 - protein, 512 aa, Homo sapiens
  DOMAIN (235)..(246): RNase H domain identified by eMATRIX, accession number PF00075F, p-value=3.382e-10, raw score of 12.87
  DOMAIN (185)..(314): RNase H domain identified by PFam, accession name rnaseH, E- value=8.4e-46, PFam score of 165.6
MPIQMQYPQYKLVENKTQPPVIYQYWPPADLQYRPPPEVKYRPQVVCPVPNSTAPYQQPTAVVFNPTAPPSGQGIIAQNTDLVEWFFLPHSTIKTFTLYLDQMATLIGQARLRIIKLCESDSDKIIVPLNKEQVRQAFINSGAWQIGLADFVGIIDNHYPKTKIFQFLKLTTWILPKITRHKPLENALTVFTDGSSNGKAAYTRPKERLIETQYHWAQRAELVAVITVLQDFNQPINIVSDSAYVVQATKDVETALIKYSIDDQLNQLFNMLQQTVRKRNFPFYVTHIRAHTNLPEPLTKANEQVDLLVSSAFLEAQELHALTHVNATGLKNKFDITWKQAKNIVQHYTQCQIPHLPTQEAGVNPREQHFTGKKNSPHEGKLIWWKDKKNKTWEIGKVITWERGFACVSQGENQLPGWIPTRNLKFYNEPLGDAKKSASAETKNPQLSIIDSPGKAPGCLMPTTQNWLVEVPTVSATSKFTYHMVYPPAPKRQRPARTGHNDDGSFVKKGDM

SEQ ID NO: 36319 - protein, 464 aa, Homo sapiens
  DOMAIN (220)..(267): kw TRANSCRIPTASE REVERSE II ORF2 domain identified by eMATRIX, accession number DM01354V, p-value=2.000e-32, raw score of 12.97
  DOMAIN (74)..(286): AP endonuclease family 1 domain identified by PFam, accession name AP_endonucleas1, E-value=2.5e-10, PFam score of 41.3
LREFIITKPPLQKLLKGALNLETNPGNTSKQNIFKHKLHRTYKTKIQVKKLKQKTKNLSTQTTKNMMNVTIPHISIQTLNAYGLNAPLKRYRTAECVRIHQPTICCLQETHLTHKDSHKLKVKGWKKALHANGHQKQAGVAILIPNKTNFKAIAVKRDKEGHYIMVKGLVQQENITILNIYGPNTGVSRLIKQLLVDLTNEIDNNTITVSDINIPLTALDSCKNKIKYLEIYLITEVKDLYKENYETLLKEITDDTNKWKHNPCSWMGRINIVKMTIVPNAIYKFNTILIKISPSFFTEFEKTILKFIKRAHIAKARLRKKNKPGGITLPDFKLYCKAIVTKTASCWYENNHIDQWNRTENSEINPNTYSQLIFDKANKDIKWGKDTLFIKWFWDKWLATCRRMKLDPHLSPYSKINSRWIKGLNLRPETIKILEDNVGKTLLDIGFGKDFITKNPKANAKKQR

SEQ ID NO: 36320 - protein, 225 aa, Homo sapiens
  DOMAIN (112)..(155): kw TRANSCRIPTASE REVERSE II ORF2 domain identified by eMATRIX, accession number DM01354T, p-value=1.000e-40, raw score of 9.48
  DOMAIN (2)..(222): Reverse transcriptase domain identified by PFam, accession name rvt, E-value=4.4e-20, PFam score of 80.2
GWKKAFHANGHQKRAGAAILIPDKTNFKVTAVKRDQEGHYIMVKTLSNRKYHNPKNRGTCDAEKAFDKIQHPFMIKTLSKISIQRTYLNVINSIYDKPTANVILNGEKLKAFPLGTGTRQECPLSPLLFNIVLEVLARAIRQEKEIKGIQISKQEVKLSLFADDTIVYLENPKDSSRKLLELIKEFSKVSGYKINIHKSVVLPYTNSDQAENQIKNSTSFTIAAK

SEQ ID NO: 36321 - protein, 119 aa, Homo sapiens
FEVQEEGYLAKILVPEGTRDVPLGTPLCIIVEKEADISAFADYRPTEVTDLKPQAPPPTPPPVAAVPPTPQPLAPTPSAPCPATPAGPKGRVFVSPLAKKLAVEKGIDLTQVKGTGPDG

SEQ ID NO: 36322 - protein, 212 aa, Homo sapiens
MMQNQSTYLVDPWVEDPDWLRAPHALYTEQKILRHQREILLTVIYARGQRFSNKSLIKVGSVAAVPPTPQPLAPTPSAPCPATPAGPKGRVFVSPLAKKLAVEKGIDLTQVKGCLSQLSVAIKEYLRLGNLGGKEVCLAHNSAGWKVGHLVKASIGFHSRQKANGSWHVLRLHGERKQESGGRDSLRKRQLLTQHAKELDEGSALEENVKIQ

SEQ ID NO: 36323 - protein, 286 aa, Homo sapiens
  DOMAIN (1)..(55): Matrix protein (MA) p15. domain identified by eMATRIX, accession number PF01140A, p-value=4.124e-09, raw score of 11.51
  DOMAIN (2)..(69): Matrix protein (MA), p15 domain identified by PFam, accession name gag_MA, E-value=0.00074, PFam score of 17.1
MGQAQSKPTPPGTMLKNFKKGFKGDYGVTLTPGKVRTLCEIDWPALEVDFPSEVSLDGSVVSKGENLAFLGDLKGCSELKNFQELINQSALVHPQADVWWYCGGPLLGTLPNNWSGICALVQLAIPFTLAFHQPEGGKIRHCKVREAPYGPFNSHIYLDAIGIQKGIPDQFKAQNQIAAGFESIFWWVTVNKNVDWINYIYYNQQQRAFHELKEKLMSALALGLPDQTKPFTLYVSDREKKMAVRVLTQTMGPWLGPVAYLSKQLDGVSKSWPPCLRALAATALLA

SEQ ID NO: 36324 - protein, 237 aa, Homo sapiens
  DOMAIN (22)..(49): XERODERMA PIGMENTOSUM GROUP B PROTEIN SIGNATURE domain identified by eMATRIX, accession number PR00851C, p-value=1.554e- 20, raw score of 12.16
MIEELQKRCIHLEYPLLAEYDFQKDSVNLDINTDLKPTGVLRPYQEKSLWKIKSNSNENNPEKVVKQQVGNWIRKIAAASSLHRCPNGSIRALGVQCHRPSTLIDSTHFLAMSHKEYLLETSGEYLAWRYAGCLSIHHNRLHLIRGFNESEQFIIKALLNDGYLDDAPRGHKHSHPCQGQMKRDEYAHHANHGPGNSKRLISEAGVWQCLMFVIVTHCQSISTRFWNIRVVCSLQAN

SEQ ID NO: 36325 - protein, 808 aa, Homo sapiens
  DOMAIN (648)..(674): XERODERMA PIGMENTOSUM GROUP B PROTEIN SIGNATURE domain identified by eMATRIX, accession number PR00851J, p-value=1.519e- 31, raw score of 8.62
  DOMAIN (598)..(676): Helicases conserved C-terminal domain identified by PFam, accession name helicase_C, E-value=6.8e-17, PFam score of 69.5
AGSPPRADAAAGLWERGHLLSAAVAAMGKRDRADRDKKKSRKRHYEDEEDDEEDAPGNDPQEAVPSAAGKQVDESGTKVDEYGAKDYRLQMPLKDDHTSRPLWVAPDGHIFLEAFSPVYKYAQDFLVAIAEPVCRPTHVHEYKLTAYSLYAAVSVGLQTSDITEYLRKLSKTGVPDGIMQFIKLCTVSYGKVKLVLKHNRYFVESCHPDVIQHLLQDPVIRECRLRNSEGEATELITETFTSKSAISKTAESSGGPSTSRVTDPQGKSDIPMDLFDFYEQMDKDEEEEEETQTVSFEVKQEMIEELQKRCIHLEYPLLAEYDFRNDSVNPDINIDLKPTAVLRPYQEKSLRKMFGNGRARSGVIVLPCGAGKSLVGVTAACTVRKRCLVLGNSAVSVEQWKAQFKMWSTIDDSQICRFTSDAKDKPIGCSVAISTYSMLGHTTKRSWEAERVMEWLKTQEWGLMILDEVHTIPAKMFRRVLTIVQAHCKLGLTATLVREDDKIVDLNFLIGPKLYEANWMELQNNGYIAKVQCAEVWCPMSPEFYREYVAIKTKKRILLYTMNPNKFRACQFLIKFHERRNDKIIVFADNVFALKEYAIRLNKPYIYGPTSQGERMQILQNFKHNPKINTIFISKVGDTSFDLPEANVLIQISSHGGSRRQEAQRLGRVLRAKKGMVAEEYNAFFYSLVSQDTQEMAYSTKRQRFLVDQGYSFKVITKLAGMEEEDLAFSTKEEQQQLLQKVLAATDLDAEEEVVAGEFGSRSSQASRRFGTMSSMSGADDTVYMEYHSSRSKAPSKHVHPLFKRFRK

SEQ ID NO: 36326 - protein, 311 aa, Homo sapiens
MKKVLAIWMEDQTSHNISLSQSLIQSKILTLFNSVKADRGEEAVEEKLEASRGWFMRFKEGSYLYNVKLQGEAASADVEATASSPGNLAEIIDEAGYTKKPQIRRRYYYLRNTFHKAIVAIDSDSSVGSGQCKLKPGKDSPFQTLSYWTIRAPDALLFVEKEDTVEDIQSSCCCPTQRGFLGEETLATTQYLPGQWQWSVPQPSASSAPFLYLQPSEVIYQPVEIAQDGGCVPPPLSLMETSVPESQAPLLQVCRSLLEIHPRPCLPGYHQRKLRNSKDCCLLLLLEASSQRDTHQMPTGALLYEVSVNPC

SEQ ID NO: 36327 - protein, 293 aa, Homo sapiens
  DOMAIN (185)..(207): w INTEGRASE CP4-57 SYT P4 domain identified by eMATRIX, accession number DM01282A, p-value=1.776e-12, raw score of 17.37
MAGCRSPTLPHGEVAEAWLALSACGFSKHTVQATGGSTILDSGRWWPFSYSSTRQFPSGNGVNYSHCQGTAWAIASEGAKFKLHMWLSTLGLTGSEKKKVHSTINEVVTREHIINIHKGACGVNFKKHVPLELREIWKFAMKQEGKKAEDNSCKEGKKAEDNSCKEGKKAEDNDKPKNLGFGRLEKTHPTGKMFILSDEEGKNGIIELMEPLHEEISGILEVLEESFSWEQPPKRPPPAPSAPLLNPAIFSAPPTLIRQPKVDDMSVATIEKKATTTTSAKPQITANSKAELT

SEQ ID NO: 36328 - protein, 242 aa, Homo sapiens
MAGARAAAAAASAGSSASSGNQPPQELGLGELLEEFSRTQYRAKDGSGTGGSKVERIEKRCLELFGRDYCFSVIPNTNGDICGHYPRHIVFLEYESSEKEKDTAAAKISDGSQYYVLLIITDGVISDMTQTKEAIVSASSLPMSIIIVGVGPAMFEAMEELDGDDVRVSSRGRYAERDIVQFVPFRDYVDRSGNQVLSMARLAKDVLAEIPEQLLSYMRTRDIQPRPPPPANPSPIPAPEQP

SEQ ID NO: 36329 - protein, 503 aa, Homo sapiens
  DOMAIN (137)..(156): TYROSINE KINASE CATALYTIC DOMAIN SIGNATURE domain identified by eMATRIX, accession number PR00109B, p-value=4.529e-12, raw score of 12.27
  DOMAIN (51)..(282): Eukaryotic protein kinase domain identified by PFam, accession name pkinase, E-value=3.4e-76, PFam score of 266.6
MCADVWEYMYDQVSRDVDTRRALAVVGGQWAMLGAVEGPRWKQAEDIRDIYDFRDVLGTGAFSEVILAEDKRTQKLVAIKCIAKEALEGKEGSMENEIAVLHKVSGGELFDRIVEKGFYTERDASRLIFQVLDAVKYLHDLGIVHRDLKPENLLYYSLDEDSKIMISDFGLSKMEDPGSVLSTACGTPGYVAPEVLAQKPYSKAVDCWSIGVIAYILLCGYPPFYDENDAKLFEQILKAEYEFDSPYWDDISDSAKDFIRHLMEKDPEKRFTCEQALQHPWIAGDTALDKNIHQSVSEQIKKNFAKSKWKQAFNATAVVRHMRKLQLGTSQEGQGQTASHGELLTPVAGGEERALQKGMGGPQRAAAFISDGSQYYVLLIITDGVISDMTQTKEAIVSASSLPMSIIIVGVGPAMFEAMEELDGDDVRVSSRGRYAERDIVQFVPFRDYVDRSGNQVLSMARLAKDVLAEIPEQLLSYMRTRDIQPRPPPPANPSPIPAPEQP

SEQ ID NO: 36330 - protein, 566 aa, Homo sapiens
MGISGRYNSKLRFGVPIVDAAADSRGSPAAAKISDGSQYYVLLIITDGVISDMTQTKEAIVSASSLPMSIIIVGVGPAMFEAMEELDGDDVRVSSRGRYAERDIVQGYDISFLITNFHTEQMYKHKLVDFVIHFMEEIDKEISEMKLSVNARARIVAEEFLKNDVHKVLASISFKPQVSEGAELRHLDTQVQRCEDILQQLQAVVPQIDMEGDRNIWIVKPGAKSRGRGIMCMDHLEEMLKLVNGNPVVMKDGKWVVQKYIERPLLIFGTKFDLRQWFLVTDWNPLTVWFYRDKLYPLFQAAILQLKNLDKSSKELLLQPVTISRNEKEKVLIEGSINSVRVSIAVKQVERIEKRCLELFGRDYCFSVIPNTNGDICGHYPRHIVFLEYESSEKEKDTFESTVQVSKLQDLIHRSKMARCRGRFVCPVIPVQGQGFPVLWRGSSKASHMNRLRNAKIYVERAVKQKKIFTIQGCYPVIRCLLRRRGWVEKKMVHRSGPTLLPPQKDLDSSAMGDSDTTEDEDEDEDEEFQPSQLFDFDDLLKFDDLDGTHALMVGLCLNLRNLPWV

SEQ ID NO: 36331 - protein, 350 aa, Homo sapiens
  DOMAIN (77)..(162): C2 domain identified by PFam, accession name C2, E-value=6.5e -07, PFam score of 36.4
  misc_feature (1)...(350): Xaa = X or * as defined in Table 2
VPTSSAPMPWPSRQWERSSRTMTVISSSQLMALGPXRTAQVLAAAPAXLGASSAARGIDPQAGKTQKETDIATMQLCANKLDKKDFFGKSDPFLVFYRSNEDGTFTICHKTEVVKNTLNPVWQPFSIPVRALCNGDYDRTVKIDVYDWDRDGSHDFIGEFTTSYRELSKAQNQFTVYEVLNPRKKCKKKKYVNSGTVTLLSFSVDSEFTFVDYIKGGTQLNFTVAIDFTASNGETRMSEKVGGNPLQPTSLHYMSPYQLSAYAMALKAVGEIIQDYDSDKLFPAYGFGAKLPPEGRISHQFPLNNNDEDPNCAGIEGVLESYFQSLRTVQLYGPTYFAPVINQVASLPSS

SEQ ID NO: 36332 - protein, 353 aa, Homo sapiens
MGFRSPSSCPLPTHWLWKLWGAAAKISDGSQYYVLLIITDGVISDMTQTKEAIVSASSLPMSIIIVGVGPAMFEAMEELDGDDVRVSSRGRWAERERSFRTQLNFTVAIDFTASNGETRMSEKVGGNPLQPTCLHYMSPYQLSAYAMALKAVGEIIQDYDSDKLFPAYGFGAKLPPEGRISHQFPLNNNDEDPNCAGIEGVLESYFQSLRTVQLYGPTYFAPVINQVARCWRNSGKQDKASGFGELMSGALAVVGGQWAMLGAVEGPRWKQAEDIRDIYDFRDVLGTAPFKRLVPGTYSQGASDTHPLGPPHTPVLDPFPQDGFPVLWRGSSKASHMNRLRNAKIYVERAVKV

SEQ ID NO: 36333 - protein, 50 aa, Homo sapiens
STQRHTFTGNPSYSIRPPRARRGSSLTPQTPPSVLGPGACSGPAPRRAPP

SEQ ID NO: 36334 - protein, 316 aa, Homo sapiens
  DOMAIN (165)..(259): Calpain large subunit, domain III domain identified by PFam, accession name Calpain_III, E-value=1.6e-10, PFam score of 30.5
FFTVPKCAVSFRGNNNRSGECAMPVGRIECPSSPSFPRDISHECRVCGVTEVGLSAYAKHISGQLHKDNVDAQEREDDGKGEEEEEDYFDKELIQLIKQRKEQSRTLFHISQPLNCLNGPRCLRPITSGHAKVGFAVPRRDCSAQPRLPFPLPVPILPCTICPLHDTFWTNPQYRLKLLEEDDDPDDSEVICSFLVALMQKNRRKDRKLGASLFTIGFAIYEVCSPDWLQPRKHTFPGRTLPGASRGALWLPQYPVTHRAPGIRTTCVCNKQKIPGGALKRQWSGPGKTSAWGSGFRMRAAIAGIAFRRLLILIHI

SEQ ID NO: 36335 - protein, 597 aa, Homo sapiens
  DOMAIN (370)..(417): kw TRANSCRIPTASE REVERSE II ORF2 domain identified by eMATRIX, accession number DM01354V, p-value=1.000e-40, raw score of 12.97
  DOMAIN (211)..(383): Reverse transcriptase domain identified by PFam, accession name rvt, E-value=0.00034, PFam score of -10.0
MPWGDPNYRSANFKEHIQRRHRFSYDTFVTARRQANPAWKIRRWKARRLIEGAGNGVADGEGAAGAVRPGPETCTFILAWGGGSSKWDLFSTDTIDRGLSTHPCQLGNFGAGKGLSVATVLAERSSSPAIEQSWTEDDFDELRGEGFRRSNFSELKEDDRTHHKEAKNLEKRLDEWLTRITSAEKSLNDLTELKTMARELHDACTSFSSQFDQLEKRVSVIEDQMNEIKPNLRLIGVPESDGENVTKLENTLQDIIQENFPNLARQTNIQIQEIQRTPQRYSSRRATTRHIIVRLTKVDMKEIMLRAAREKDDMIAYLENPIISAQNLLKLISNFSKVSGYKINVQKSQAFLYTNNRQTESQIMSEIPFTTASKRIKYLGIQLTRDVKDLFKENYKPLLNKIKEDKNKWKNIPCSWIGRINIVKMGILPKSGPSSAGLLEFAGGPLQTLFVRISPVEAAEQQILQNSKYCCPILPLQALSQKGTYLYEVSVGPYWDVSPTRLPPRSLISDCCTSSEQGSMGVGPAKPGMGENLLVCRLRRPWEKPNIWAEVSHFSRIERYNPSPPVTVVLLGVRPTQCEDEDEEEEDLYDDPLPLNE

SEQ ID NO: 36336 - protein, 216 aa, Homo sapiens
RRMFEPIAKKLKTLKKRLDERLTRITNAEKSLKDLMELKTMARELRDECTSFSSQFDQLEERVSVMEDQMNEMKREEKFREKRVKRNERSLQEIWDYVKRPKLHLIGVPESDGENEAKSENTLQDIIQENFPNLARQANIQIQEIQRTPQRYSWRRATPRHIIVRFTKVEMKEKMLRAAREKDRVTHKGKPIRLTADLSAETLQASREWGPMFNIL

SEQ ID NO: 36337 - protein, 42 aa, Homo sapiens
  misc_feature (1)...(42): Xaa = X or * as defined in Table 2
LPLRLSYEIYLYFTFXKPEHNKSHFLESHLIRNTRSALNTRK

SEQ ID NO: 36338 - protein, 258 aa, Homo sapiens
  DOMAIN (112)..(123): dUTPase domain identified by eMATRIX, accession number PF00692B, p-value=5.304e-09, raw score of 8.14
  DOMAIN (35)..(174): dUTPase domain identified by PFam, accession name dUTPase, E- value=3.4e-10, PFam score of 47.3
MAFEQAKQAVQLALDLWPIRDGPVELQVTVLDQYANWSLGQKQDGKRVLFGIWTQKPPEGGKAYTSFKKQLLFNQQEDQQAKISTITAILNVGKWITTCSSLAMRGIIVYGGITDRDYQGELKVILYNNTPDSFAIKPQMLVAQLLVVPCEQLTPEEIFVQQSLHTELGDSDPLVQGITYLLMVSTCVFVSEAKNKFINFLATAATEANHNQCWLYVELQEDAKNGYLGESSLTTFLNGYIVTNGPQQQHLQSNLGFL

SEQ ID NO: 36339 - protein, 838 aa, Homo sapiens
  misc_feature (1)...(838): Xaa = X or * as defined in Table 2
PRGAKPAVPAGPERPGPGPGPCSPRPMVLPTCPMAEFALPRHSAVMERLRRRIELCRRHHSTCEARYEAVSPERLELERQHTFALHQRCIQAKAKRAGKHRQPPAATAPAPAAPAPRLDAADGPEHGRPATHLHDTVKRNLDSATSPQNGDQQNGYGDLFPGHKKTRREAPLGVAISSNGLPPASPLGQSDKPSGADALQSSGKHSLGLDSLNKKRLADSSLHLNGGSNPSESFPLSLNKELKQEPVEDLPCMITGTVGSISQSNLMPDLNLNEQEWKELIEELNRSVPDEDMKDLFNEDFEEKKDPESSGSATQTPLAQDINIKTEFSPAAFEQEQLGSPQVRAGSAGQTFLGPSSAPVSTDSPSLGGSQTLFHTSGQPRADNPSPNLMPASAQAQNAQRALAGVVLPSQGPGGASELSSAHQLQQIAAKQKREQMLQNPQQATPAPAPGQMSTWQQTGPSHSSLDVPYPMEKPASPSSYKQDFTNSKLPHDAXCEXEFPSARRPLPPAQPCEPAESPATEXLESELREYTRGLCWIRQYKTPFSLQSGLWARQPGVWPEQASPDGLSSPAAVPYKSRAELPVSDEAKARKYAFPITGSTWPGAEPFQCPCASPGYQCWDPAACRVRGQLPQQLPLSQQPATGRCNEAASVAFGPTETKGAAAKAFTATAVPSEATAPSRGTGEATVSAPSDPPTTPVPRPDTRQLPTAGWTVHRVLCCRARHEHLGSIQLQLSSSVPSGWESDANGPWTCFSFLSPHKLRPTGPGCGSVPWLPKHASEQPLWHGFWHNPDSCPAPATGHQWTCPHSTADQRGPEHLRLSCLWAELSGKLWPLPAAQ

SEQ ID NO: 36340 - protein, 354 aa, Homo sapiens
  DOMAIN (125)..(281): TBC domain identified by PFam, accession name TBC, E-value= 0.0027, PFam score of -55.5
MAACMYRQTRSILAETILRPQFAGTHTTIIAHQANADRCTCTPSSTIQASIDRPTRTIWPSESQPPGCPPDTVGAMEPVPLPHSAVLEPGSLCLSGMALRDRETGKQAGRALEARPIGHIANRTGERGLPTSIRRCAPSGAPEPVRRWPDRKRRKPQQPERELTRNTGNISHEQNSLFLMKPKPGNMPFRSLVTTWPGALVDQGIFEELTRDFLPQLSEKMQDLGVISSISLSWFLTLFLSVMPFESAVVIVDCFFYEGIKVILQVALAVLDANMEQLLGCSDEGEAMTMLGRYYCRYVLSDYGCHGYGGLHAERLNAGGVSELPTSLFAAKDVFKDPILNRRFERAGNPRATN

SEQ ID NO: 36341 - protein, 186 aa, Homo sapiens
  DOMAIN (20)..(32): KH domain proteins family of RNA binding proteins domain identified by eMATRIX, accession number PF00013, p-value=4.150e-09, raw score of 5.78
  DOMAIN (9)..(58): KH domain identified by PFam, accession name KH-domain, E- value=4.6e-16, PFam score of 66.8
ASRPPVTLRLVVPASQCGSLIGKGGCKIKEIRESTGAQVQVAGDMLPNSTERAITIAGIPQSIIECVKQICVVMLESPPKGVTIPYRPKPSSSPVIFAGGQAYTIQGQYAIPQPDLTKLHQLAMQQCHFPMTHGNTGFQWALESSFPEVKGYWAGLDASAQTTSHELTIPNDLIGCIIGRQGAKIN

SEQ ID NO: 36342 - protein, 174 aa, Homo sapiens
  misc_feature (1)...(174): Xaa = X or * as defined in Table 2
TLRSSWQVVRTGTAQAATVRGFPPHPPRPSASTLTLEGPPLEAYTIQGQYAIPQPDLTKLHQLAMQQSHFPMHGDGIHSDYSAGLDASAQTTSHELTISKRILIGLAXSGRSRAPKINGGSRQMSGAQIKIANPVEGSTDXGRFTITGSAASISLAQYLINVRLSSETGGMGSS

SEQ ID NO: 36343 - protein, 387 aa, Homo sapiens
  DOMAIN (126)..(138): KH domain proteins family of RNA binding proteins domain identified by eMATRIX, accession number PF00013, p-value=4.150e-09, raw score of 5.78
  DOMAIN (29)..(385): KH domain identified by PFam, accession name KH-domain, E- value=2e-13, PFam score of 58.1
  misc_feature (1)...(387): Xaa = X or * as defined in Table 2
PLKVQLPRTLLDMDTGVIEGGLNVTLTIRLLMHGKEVGSIIGKKGESVKKMREESGARINISEGNCPERIITLAGTHXLPSFKAFAMIIDKLGRRDISSSMTNSTAAQLGPPVTLKLGAPASQCGSLIGKGGCKIKEIRESTGAQVQVAGDMLPNSTEAGHHYLLGIPQSIIECVKQILRGSCWETLFPSSPPKGVTIPYRPKPSSSPVIFAGGPGQVPAQAATVRAFPTPPRPCGSTLTWEGPPLEAYTIQGQYAIPQPDLTKLHQLAMQQSHFPMTHGNTGFSGIESSFPEVKGYWAGLDASAQTTSHELTIPNGFDWAGIIGAFKGAKINEIRQMSGAQIKIANPVEGSTDRQVTITGSAASISLAQYLINVRLSSETGGMGNN

SEQ ID NO: 36344 - protein, 230 aa, Homo sapiens
MEDVTGKRSQFRPQERVLGSYARKNLGKGDCFSLVSLTVDGVVAGKILFRRSHIRDVAVKRLKPIDEYCRALVRLPPHISQCDEVFRFFEARPEDVNPPKESQQASRGPPPPSSTKQPLLSFYTKCHSVHDHMLKRCTVVSDGDGASPLEHLQLSSFLGCLLVVLPLVWLLSGVLLRSWLEHLCGTCLASLSSMTVSGTLIWLFWNKGHMSLASSLQAFLITFVGADLRP

SEQ ID NO: 36345 - protein, 133 aa, Homo sapiens
  DOMAIN (71)..(123): Ubiquitin domain proteins domain identified by eMATRIX, accession number BL00299, p-value=2.025e-10, raw score of 28.84
MDGQARWLTPVIPALWEAEVFIEHMLYALNILRTVLGRARTLSLNHRCRLLLLSLLVLHCVRSVRSWYLFCEAAAEKTLAFAMAEEKPKALSMGQIRFRFDSQPINETDTPVQVEMEDIDIIDVFHQQIGGVY

SEQ ID NO: 36346 - protein, 131 aa, Homo sapiens
  DOMAIN (69)..(121): Ubiquitin domain proteins domain identified by eMATRIX, accession number BL00299, p-value=2.250e-25, raw score of 28.84
IPASFFCRSWCCLCARLVRSWYLFCEAAAEETPGLAMADEKPKEGVKTENNDHINLKVAGQDGSVVQFKIKRHTPLSKLMKAYCERQGLSMRQIRFRFDGQPINETDTPAQLEMEDEDTIDVFQQQTGGVY

SEQ ID NO: 36347 - protein, 82 aa, Homo sapiens
GLGQRRCHHGDLFSSLAGGGLRSLQGCPTGLLPLPLPAVLRVEKDQPESSPEDPGGGQPRGPPAFSTGSWTPEEGGRGDTSM

SEQ ID NO: 36348 - protein, 100 aa, Homo sapiens
  DOMAIN (77)..(97): Elongation factor 1 beta/beta'/delta chain proteins domain identified by eMATRIX, accession number BL00824B, p-value=2.080e- 21, raw score of 9.21
PSVRRGGGKRLRLYIRNFPVSSGPFSSLQRGAPTICALSFCCSPALGYSLPGVKKALGKYGPADVEDTTGSGATDSKDDDDIDLFGSDDEEESEEAKRLR

SEQ ID NO: 36349 - protein, 134 aa, Homo sapiens
  DOMAIN (59)..(74): Elongation factor 1 beta/beta'/delta chain proteins domain identified by eMATRIX, accession number BL00824A, p-value=4.316e- 10, raw score of 13.78
DRPILLIYFQMQQKVQGQSVGHLIQGPQFVHGELSDTAKAMGFGDLKSPAGLQVLNDYLTDKSYIKGYVPSQADVAVFEAVPRPLPADLCHALCWYNHIKSYEKEKASLPGVKKALGKYGPADVEDTLVPNSCS

SEQ ID NO: 36350 - protein, 435 aa, Homo sapiens
MEHLLTLATCSLMGSSYREGLTPVLSLLTECSRAHRNIRKFLKDQEWGTGHRCTSTDSGGVTCTLERRTGGQAAGPGIRGVGATVGVVGCRMHGWKRLGAQTRMPKPETFSGESNAHPRNEGGEKVLKGPKGHWGKQNEAGQNHATKGRGKTGKKKKGVGISPGDPKEKLRKVQTGPKEESLRVMYALAVENILNTFTHTHHALDRYSLRSALPFLAYNPMENLRFLGPSLEHTSPLEFVWADSSTEVKVQQPLISLVCFSWGGTMFRHQDDCCPGILSSVTSKVQLLSHEEGQNGRRASIFSPPEMIPPSKAEREKKSLRFKGGGRERQQAGLVVIVKIEMSHIRCLPPALPSAMSKSFLRLPRKDAALLPVQPVELSVPAVTALSDDDDDDDNDDGYDDSKPFLCRLRKTPGRFVPSRKKLPFHTSSNHSQDW

SEQ ID NO: 36351 - protein, 189 aa, Homo sapiens
  DOMAIN (71)..(91): Elongation factor 1 beta/beta'/delta chain proteins domain identified by eMATRIX, accession number BL00824B, p-value=1.865e- 14, raw score of 9.21
MGFRDLKSPASLQVLNDYLVDKSYIEGMCHHKHIKSYEKEKASLPGVKKAVGRYGPAKVEDTTGSGATNSKDDDEIDLLGSDEEESEEAKSSVPAVTALSDDDDDDDNDDGYDDSKPFLCKLRKTPGRFVPVRKKLPFHTSPKHSQDWVKIPSITVFRLHILSHWKVFRGNGMHGAVISCDSNAFWNTP

SEQ ID NO: 36352 - protein, 279 aa, Homo sapiens
  DOMAIN (221)..(256): Elongation factor 1 beta/beta'/delta chain proteins domain identified by eMATRIX, accession number BL00824D, p-value=6.192e- 39, raw score of 14.04
  DOMAIN (198)..(279): EF-1 guanine nucleotide exchange domain identified by PFam, accession name EF1BD, E-value=1.1e-47, PFam score of 171.9
PLTFGPARWRETPPSLYKEFSGLFGSFFLSSAWGAHNLRALFLLLPSSRIQPTPWVFGDLKSPAGLQVLNDYLADKSYIEGYVPSQADVAVFEAVSSPPPADLCHALRWYNHIKSYEKEKASLPGVKKALGKYGPADVEDTTGSGATDSKDDDDIDLFGSDDEEESEKPKRLREERLAQYESKKAKKPGLVAKSSILLLVKPWDDETDMAKLEECVRSIQADGLVWGSSKLVPVGYGIKKLQIQCVVEDDKVGTDMLEEQITAFEDYVQSMDVAAFNKI

SEQ ID NO: 36353 - protein, 70 aa, Homo sapiens
  DOMAIN (58)..(69): SH2 DOMAIN SIGNATURE domain identified by eMATRIX, accession number PR00401B, p-value=7.333e-09, raw score of 12.94
  DOMAIN (37)..(68): Src homology domain 2 domain identified by PFam, accession name SH2, E-value=1.5e-09, PFam score of 31.2
MILQQSKDGDWWTVLSEVSGREYNIPSVHVAKVSHGWLYEGLSREKAEELLLLPGNPGGAFLIRESQTRR

SEQ ID NO: 36354 - protein, 71 aa, Homo sapiens
  misc_feature (1)...(71): Xaa = X or * as defined in Table 2
EVFGSWWQVPHEWLGSVLVVMSEFLFHXLMXELVLKRVXCLSHLSLAPFLAMXYACSSSSPSTMIVSFFFF

SEQ ID NO: 36355 - protein, 196 aa, Homo sapiens
  DOMAIN (89)..(142): DECARBOXYLASE BIOSYNTHESIS S-ADENOSYLMETHIONINE domain identified by eMATRIX, accession number PD02625D, p-value=2.768e- 23, raw score of 27.32
  DOMAIN (102)..(195): Adenosylmethionine decarboxylase domain identified by PFam, accession name SAM_decarbox, E-value=1.8e-35, PFam score of 127.0
MVEGEEEEQAYHMAKKGARERFPNAYIRLSRVAREKPGVVAHACNTNTGRPSSSTLSILVATSTTNSPVVIMLLPVGFSRFDYCEYYDVLRAAGATQGHRKVISQPDQTLENLMSGLDPAVMDQFYMKDGVTAKDVICESGIHNLIPGSVINATMFNPYGYSMNGMKSDGTYWTIHITPEPESFYVSFETNLSHLL

SEQ ID NO: 36356 - protein, 348 aa, Homo sapiens
  DOMAIN (61)..(113): DECARBOXYLASE BIOSYNTHESIS S-ADENOSYLMETHIONINE domain identified by eMATRIX, accession number PD02625B, p-value=1.000e- 40, raw score of 20.85
  DOMAIN (15)..(348): Adenosylmethionine decarboxylase domain identified by PFam, accession name SAM_decarbox, E-value=6.1e-167, PFam score of 568.0
  misc_feature (1)...(348): Xaa = X or * as defined in Table 2
LIFCGCWLFASLTVMEAAHFFEGTEKLLEVWFSRQQPDANQGSGDLRTIPRSEWDILLKDVQCSIISVTKTDKQEAYVLSESSMFVSKRRFILKTCGTTLLLKALVPLLKLARDYSGFDSIQSFFYSRKNFMKPSHQGYPHRNFQEEIEFLNAIFPNGAGYCMGRMNSDCWYLYTLDFPEERVISQPDQTLEILMSELDPAVMDQFXHEDGVTAKDVTRESGIRDLIPGSVIDATMFNPCGYSMNGMKSDGTYWTIHITPEPEFSYVSFETNLSQTSYDDLIRKVVEVFKPGKFVTTLFVNQSSKCRTRLGLPQKIEGFKRLDCQEGWFKDSNFFFTSFAKKQQQQQS

SEQ ID NO: 36357 - protein, 229 aa, Homo sapiens
  DOMAIN (50)..(81): kw TRANSCRIPTASE REVERSE II ORF2 domain identified by eMATRIX, accession number DM01354G, p-value=5.582e-29, raw score of 11.57
LGNEIDSNTIIAGDFSTPLTALDRSSRQKLNKETMDLNYTLEQMDLADIYRTFHPTTAEYTFYSTAHGTFSKIDHTIGHKTSLNKFKKTEITSSTLSDHSGIKLEIDSKRNLQNHANTWKLNNLLNEHWVKNKTKMEIKTFFELNDNDATTYQNLWDTAKVVLTGKFIALNAYIKRSERAQTDNLRSYLKELDKQEQTKPKPSGRKKTAEISTELNEIEITTTTTKYIR

SEQ ID NO: 36358 - protein, 298 aa, Homo sapiens
MVESMDAEPTDTRHAAQTLCFQSLVDPPNGPHLPQSQHTLLNLRGACSLRGSVHVDLGAFSHCSHHLRYLLPSTPNNETTLRTFDHQIDIGAFLRRLDSSFTVERGKSDQITRKSRTAPHSQNRAHLKRRGLKEISASMGPQGNISLHSARAAFQLWATRHLRQRETPFNSKWIKDLNVRPKTIKTLEENLDNTIQDTGMGKDFMTTTPKAMATKAKIDKWDLTKPKSFCTAKETTICEKIFAIYPSDKGLISRIYKELKQIYKNKANNPIKKWAKDMNRHFSKEDIYAANRWMKKCS

SEQ ID NO: 36359 - protein, 485 aa, Homo sapiens
  DOMAIN (166)..(213): kw TRANSCRIPTASE REVERSE II ORF2 domain identified by eMATRIX, accession number DM01354V, p-value=1.000e-40, raw score of 12.97
  DOMAIN (1)..(179): Reverse transcriptase domain identified by PFam, accession name rvt, E-value=5.1e-08, PFam score of 40.1
MIISIDAEKAFDKIQQPFILKTLNKLGIDGMYLKIISAIYDKPTANIILNGQKLETFPLKTSTGQGCPLSPLLFNIVLEVLAGAIRQEKEIKSIQSGKEEVKLSLFADDMTVYLENPIVSASNLLKLISNFSKVSGYIINVQKSQAFLYTNYRQTESQIMSELPFTIASKRIKYLGIQLTRDVKDLFKENYKPLLKEIKEDTNKWKNIPCSWIGRINIVKMAILPKVIYRFNAIPIKLPMTSFTELEKTTLKFIWNQERDSIAKSILSKKNKAGGIMLPDFQLYYNVIVTKIAWYWYQYRYTDQWNRTETSEITPHIYNHLIFDKPDKNKKWGKDSLFNKWCWENWLDICRKLKLDPFLTPYTKINSRWIKDLNVRPKTIKSLEENLGNTIQDIGMGKDFMTKTPKAMATKAKIDKWHLIKLKSFCTAKETTIRVNRQPVGRKFRQPEWEKIFATYSSDKGLICRIYNKLKQIYMKKQTTPSKSG

SEQ ID NO: 36360 - protein, 354 aa, Homo sapiens
MTADAVLIKNGSKDADWEYEEGDKLEEFLRSLNSSKPLYLGQTGLGNIEELGKLGLEPGENFCMGGPGMIFSREVLRRMVPHIGECLREMYTTHEDVEVGRCVRRFGGTQCVWSYEGRCSFRVVPDSAIEFSMDFEKILMLDPTLHPLCQNLLQRLNTMWKPPNVGLVPSKATAQAVRWSLLAMARAGAATMPGALSQGCIEVSRLLKKLPDDEGITMDTVGFAPLCLWQRLTLANHQRYFADGPQPVCNHMQPAPHHFASMRSSAASPTSLPAFADPAAVPPLEHVYVWTLLLCQRWCTYMYMDSTATTLTKHCCCPPPIPPIGVLLPADWGHIGPSSDSRSENKAMGSSPST

SEQ ID NO: 36361 - protein, 406 aa, Homo sapiens
  DOMAIN (323)..(370): kw TRANSCRIPTASE REVERSE II ORF2 domain identified by eMATRIX, accession number DM01354V, p-value=1.000e-40, raw score of 12.97
  DOMAIN (83)..(336): Reverse transcriptase domain identified by PFam, accession name rvt, E-value=2.2e-32, PFam score of 121.0
MDDSKIFSGKKYALKRAVDLPAQHSSSAKGQTASSSGSLIPMPPTGRHLPAGVNRHPIQENSGWHLAGDPLGQSFQRKEQAAIFAVLQPLLAIPIKQTGLGVDLQQTPADLQQRGLTVRRKTNKPKGIASISTKSTSTPKPHPKVTNIKEGRTNDKNHMIISTDAEKAFNKIQHPFMLKTLNKLGIDGTYLKIIRAIYNKSIANILNGQKLEAFPLKMSTRHGCLLSPLLFNMVLEVLARAIKQEKEIKSIRIGREEVKLSLFADDMIVYLENPIVSAQNLLKLISNFSKVSGYKINVQKSQTFLYTNNRQTESQIISELLFTIATKRIKYLGIQLTRDVKDLFKENYKPLLKEIREDTNKWKNISCSWIGRINIVKMAILPKVIYRFNAVPIKLPLTYFTELEKF

SEQ ID NO: 36362 - protein, 1076 aa, Homo sapiens
  DOMAIN (539)..(576): Diacylglycerol kinase catalytic domain proteins (presumed) domain identified by eMATRIX, accession number PF00781F, p-value= 4.000e-37, raw score of 16.43
  DOMAIN (390)..(514): Diacylglycerol kinase catalytic domain domain identified by PFam, accession name DAGKc, E-value=1.6e-58, PFam score of 207.9
RSGRIAWAQEMDAAGRGCHLLPLPAARGPARAPAAAAAAAASPPGPCSGAACAPSAAAGAGAMNPSSSAGEEKGATGGSSSSGSGAGSCCLGAEGGADPRGAGSAAAAGAAALDEPAAAGQKEKDEALEEKLRNLTFRKQVSYRKAISRAGLQHLAPAHPLSLPVANGPAKEPRATLDWSENAVNGEHLWLETNVSGDLCYLGEENCQVRFAKSALRRKCAVCKIVVHTTACIEELEKINFRCKPTFREGGSRSTRENFVRHHWVHRRRQEGKCKQCGKGFQQKFSFHSKEIVAISCSWCKQAFHNKVTCFMLHHIEEPCSLGAHAAVIVPPTWIIKVKKPQNSLKASNRKKKRTSFKRKASKRGMEQENKGRPFVIKPISSPLMKPLLVFVNPKSGGNQGTKVLQMFMWYLNPRQVFDLSQEGPKDALELYRKVPNLRILACGGDGTVGWILSILDELQLSPQPPVGVLPLGTGNDLARTLNWGGGYTDEPVSKILCQVEDGTVVQLDRWNLHVERNPDLPPEELEDGVCKLPLNVFNNYFSLGFDAHVTLEFHESREANPEKFNSRFRNKMFYAGAAFSDFLQRSSRDLSKHVKVVCDGTDLTPKIQELKFQCIVFLNIPRYCAGTMPWGNPGDHHDFEPQRHDDGYIEVIGFTMASLAALQVGGHGERLHQCREVMLLTYKSIPMQVDGEPCRLAPAMIRISLRNQANMVQKSKRRTSMPLLNDPQSVPDRLRIRVNKISLQDYEGFHYDKEKLREASISDWLRTIAGELVQSFGAIPLGILVVRGDCDLETCRMYIDRLQEDLQSVSSGSQRVHYQDHETSFPRALSAQRLSPRWCFLDDRSQEHLHFVMEISQDEIFILDPDMVVSQPAGTPPGMPDLVVEQASGISDWWNPALRKRMLSDSGLGMIAPYYEDSDLKDLSHSRVLQSPVSSEDHAILQAVIAGDLMKLIESYKNGGSLLIQGPDHCSLLHYAAKTGNGEIVKYILDHGPSELLDMADSETGETALHKAACQRNRAVCQLLVDAGASLRKTDSKGKTPQERAQQAGDPDLAAYLESRQNYKVIGHEDLETAV

SEQ ID NO: 36363 - protein, 36 aa, Homo sapiens
HWKGRQLAGLQRPPTPCGAPTAPTATVAAGPRNSVY

SEQ ID NO: 36364 - protein, 326 aa, Homo sapiens
MMRVYYVSRNRKSWFDIHDVPNNPVVCSSRAFFEENAVNGEHLWLETNVSGDLCYLGEENCQVRFANRTKHAVRRASSEFSCGTREAIPTIIEHETVSDFRNRLRNPWNSIELNAERSVKHEARLGQELLARREAFQASLNHSLKRKSESDKSICKQNKGISVSGFLLQVSWQRYCSVLVPARERATLEAGSHSAGAVLLLLLLKCVGGAGSDIPVVVCLQNQWIRQSPFICHLGDGKGSNIISHNGLHFPGLPRHPEGPVGEKKLGLRKNNLTARRMPISGLSEKLGEHRLQRRALFLEATPSFTSVVTDHQRDILKGVDGCQGK

SEQ ID NO: 36365 - protein, 346 aa, Homo sapiens
  DOMAIN (11)..(28): BROMODOMAIN SIGNATURE domain identified by eMATRIX, accession number PR00503B, p-value=9.280e-17, raw score of 9.96
  DOMAIN (1)..(69): Bromo domain identified by PFam, accession name bromodomain, E-value=2.1e-31, PFam score of 112.9
PFHHPVNKKFVPDYYKVIVNPMDLETIRKNISKHKYQSRESFLDDVNLILANSVKYNGPESQYTKTAQEIVNVCYQTLTEYDEHLTQLEKDICTAKEAALEEAELESLDPMTPGPYTPQPPDLYDTNTSLSMSRDASVFQDESNMSVLDIPSATPEKQVTQEGEDGDGDLADEEEGTVQQPQASVLYEDLLMSEGEDDEEDAGSDEEGDNPFSAIQLSESGSDSDVGSGGIRPKQPRMLQENTRMDMENEESMMSYEGDGGEASHGLEDSNISYGSYEEPDPKSNTQDTSFSSIGGYEVSEEEEDEEEEEQRSGPSVLSQVHLSEDEEDSEDFHSIAGDSDLDSDE

SEQ ID NO: 36366 - protein, 133 aa, Homo sapiens
EKLANHTPWGSGQTVMDASVLYEDLLISEGEDDEEDAGSDEEGDNPFSAIQLSESGSDSDVTVAIAKVGIKVTKSNKWGSSGGYTQQPLRKKRKIVSSRKRRSRGEGVKCLIQEWILEFLGAEEIGPFRLRAQ

SEQ ID NO: 36367 - protein, 1924 aa, Homo sapiens
  DOMAIN (1559)..(1584): Bromodomain proteins domain identified by eMATRIX, accession number BL00633B, p-value=6.850e-21, raw score of 13.82
  DOMAIN (1406)..(1616): Bromo domain identified by PFam, accession name bromodomain, E-value=4.3e-66, PFam score of 232.2
MGPGCDLLLRTAATITAAAIMSDTDSDEDSAGGGPFSLAGFLFGNINGAGQLEGESVLDDECKKHLAGLGALGLGSLITELTANEELTGTDGALVNDEGWVRSTEDAVDYSDINEVAEDESRRYQQTMGSLQPLCHSDYDEDDYDADCEDIDCKLMPPPPPPPGPMKKDKDQDSITGVSENGEGIILPSIIAPSSLASEKVDFSSSSDSESEMGPQEATQAESEDGKLTLPLAGIMQHDATKLLPSVTELFPEFRPGKVLRFLRLFGPGKNVPSVWRSARRKRKKKHRELIQEEQIQEVECSVESEVSQKSLWNYDYAPPPPPEQCLSDDEITMMAPVESKFSQSTGDIDKVTDTKPRVAEWRYGPARLWYDMLGVPEDGSGFDYGFKLRKTEHEPVIKSRMIEEFRKLEENNGTDLLADENFLMVTQLHWEDDIIWDGEDVKHKGTKPQRASLAGWLPSSMTRNAMAYNVQQGFAATLDDDKPWYSIFPIDNEDLVYGRWEDNIIWDAQAMPRLLEPPVLTLDPNDENLILEIPDEKEEATSNSPSKESKKESSLKKSRILLGKTGVIKEEPQQNMSQPEVKDPWNLSNDEYYYPKQQGLRGTFGGNIIQHSIPAVELRQPFFPTHMGPIKLRQFHRPPLKKYSFGALSQPGPHSVQPLLKHIKKKAKMREQERQASGGGEMFFMRTPQDLTGKDGDLILAEYSEENGPLMMQVGMATKIKNYYKRKPGKDPGAPDCKYGETVYCHTSPFLGSLHPGQLLQAFENNLFRAPIYLHKMPETDFLIIRTRQGYYIRELVDIFVVGQQCPLFEVPGPNSKRANTHIRDFLQVFIYRLFWKSKDRPRRIRMEDIKKAFPSHSESSIRKRLKLCADFKRTGMDSNWWVLKSDFRLPTEEEIRAMVSPEQCCAYYSMIAAEQRLKDAGYGEKSFFAPEEENEEDFQMKIDDEVRTAPWNTTRAFIAAMKGKCLLEVTGVADPTGCGEGFSYVKIPNKPTQQKDDKEPQPVKKTVTGTDADLRRLSLKNAKQLLRKFGVPEEEIKKLSRWEVIDVVRTMSTEQARSGEGPMSKFARGSRFSVAEHQERYKEECQRIFDLQNKVLSSTEVLSTDTDSSSAEDSDFEEMGKNIENMLQNKKTSSQLSREREEQERKELQRMLLAAGSAASGNNHRDDDTASVTSLNSSATGRCLKIYRTFRDEEGKEYVRCETVRKPAVIDAYVRIRTTKDEEFIRKFALFDEQHREEMRKERRRIQEQLRRLKRNQEKEKLKGPPEKKPKKMKERPDLKLKCGACGAIGHMRTNKFCPLYYQTNAPPSNPVAMTEEQEEELEKTVIHNDNEELIKVEGTKIVLGKQLIESADEVRRKSLVLKFPKQQLPPKKKRRVGTTVHCDYLNRPHKSIHRRRTDPMVTLSSILESIINDMRDLPNTYPFHTPVNAKVVKDYYKIITRPMDLQTLRENVRKRLYPSREEFREHLELIVKNSATYNGPKHSLTQISQSMLDLCDEKLKEKEDKLARLEKAINPLLDDDDQVAFSFILDNIVTQKMMAVPDSWPFHHPVNKKFVPDYYKVIVNPMDLETIRKNISKHKYQSRESFLDDVNLILANSVKYNGPESQYTKTAQEIVNVCYQTLTEYDEHLTQLEKDICTAKEAALEEAELESLDPMTPGPYTPQPPDLYDTNTSLSMSRDASVFQDESNMSVLDIPSATPEKQMRQGRGRLGEEDSDVDIEGYDDEEEDGKPKTPAPEGEDGDGDLADEEEGTVQQPQASVLYEDLLMSEGEDDEEDAGSDEEGDNPFSAIQLSESGSDSDVGSGGIRPKQPRMLQENTRMDMENEESMMSYEGDGGEASHGLEDSNISYGSYEEPDPKSNTQDTSFSSIGGYEVSEEEEDEEEEEQRSGPSVLSQVHLSEDEEDSEDFHSIAGDSDLDSDE

SEQ ID NO: 36368 - protein, 1886 aa, Homo sapiens
  DOMAIN (1550)..(1575): Bromodomain proteins domain identified by eMATRIX, accession number BL00633B, p-value=6.850e-21, raw score of 13.82
  DOMAIN (1397)..(1607): Bromo domain identified by PFam, accession name bromodomain, E-value=4.3e-66, PFam score of 232.2
  misc_feature (1)...(1886): Xaa = X or * as defined in Table 2
VTSGRLLFYFRSMGPGCDLLLRTAATITAAAIMSDTDSDEDSAGGGPFSLAGFLFGNINGAGQLEGESVLDDECKKHLAGLGALGLGSLITELTANEELTGTDGALVNDEGWVRSTEDAVDYSDINEVAEDESRRYQQTMGSLQPLCHSDYDEDDYDADCEDIDCKLMPPPPPPPGPMKKDKDQDSITGEKVDFSSSSDSESEMGPQEATQAESEDGKLTLPLAGIMQHDATKLLPSVTELFPEFRPGKVLRFLRLFGPGKNVPSVWRSARRKRKKKHRELIQEEQIQEVECSVESEVSQKSLWNYDYAPPPPPEQCLSDDEITMMAPVESKFSQSTGDIDKVTDTKPRVAEWRYGPARLWYDMLGVPEDGSGFDYGFKLRKTEHEPVIKSRMIEEFRKLEENNGTDLLADENFLMVTQLHWEDDIIWDGEDVKHKGTKPQRASLAGWLPSSMTRNAMAYNVQQGFAATLDDDKPWYSIFPIDNEDLVYGRWEDNIIWDAQAMPRLLEPPVLTLDPNDENLILEIPDEKEEATSNSPSKESKKESSLKKSRILLGKTGVIKEEPQQNMSQPEVKDPWNLSNDEYYYPKQQGLRGTFGGNIIQHSIPAVELRQPFFPTHMGPIKLRQFHRPPLKKYSFGALSQPGPHSVQPLLKHIKKKAKMREQERQASGGGEMFFMRTPQDLTGKDGDLILAEYSEENGPLMMQVGMATKIKNYYKRKPGKDPGAPDCKYGETVYCHTSPFLGSLHPGQLLQAFENNLFRAPIYLHKMPETDFLIIRTRQGYYIRELVDIFVVGQQCPLFEVPGPNSKRANTHIRDFLQVFIYRLFWKSKDRPRRIRMEDIKKAFPSHSESSIRKRLKLCADFKRTGMDSNWWVLKSDFRLPTEEEIRAMVSPEQCCAYYSMIAAEQRLKDAGYGEKSFFAPEEENEEDFQMKIDDEVRTAPWNTTRAFIAAMKGKCLLEVTGVADPTGCGEGFSYVKIPNKPTQQKDDKEPQPVKKTVTGTDADLRRLSLKNAKQLLRKFGVPEEEIKKLSRWEVIDVVRTMSTEQARSGEGPMSKFARGSRFSVAEHQERYKEECQRIFDLQNKVLSSTEVLSTDTDSSSAEDSDFEEMGKNIENMLQNKKTSSQLSREREEQERKELQRMLLAAGSAASGNNHRDDDTASVTSLNSSATGRCLKIYRTFRDEEGKEYVRCETVRKPAVIDAYVRIRTTKDEEFIRKFALFDEQHREEMRKERRRIQEQLRRLKRNQEKEKLKGPPEKKPKKMKERPDLKLKCGACGAIGHMRTNKFCPLYYQTNAPPSNPVAMTEEQEEELEKTVIHNDNEELIKVEGTKIVLGKQLIESADEVRRKSLVLKFPKQQLPPKKKRRVGTTVHCDYLNRPHKSIHRRRTDPMVTLSSILESIINDMRDLPNTYPFHTPVNAKVVKDYYKIITRPMDLQTLRENVRKRLYPSREEFREHLELIVKNSATYNGPKHSLTQISQSMLDLCDEKLKEKEDKLARLEKAINPLLDDDDQVAFSFILDNIVTQKMMAVPDSWPFHHPVNKKFVPDYYKVIVNPMDLETIRKNISKHKYQSRESFLDDVNLILANSVKYNGPESQYTKTAQEIVNVCYQTLTEYDEHLTQLEKDICTAKEAALEEAELESLDPMTPGPYTPQPPDLYDTNTSLSMSRDASVFQDESNMSVLDIPSATPEKQVTQEGEDGDGDLADEEEGTVQQPQASVLYEDLLMSEGEDDEEDAGSDEEGDNPFFCYSQLSESGSDSXCWVLGGLRPKQPRMLQENTRMDMENEESMMSYEGDGGEASHGLEDSNISYGSYEEPDPKSNTQDTSFSSIGGYEVSEEEEDEEEEEQRSGPSVLSQVHLSEDEEDSEDFHSIAGDSDLDSDE

SEQ ID NO: 36369 - protein, 118 aa, Homo sapiens
MDASVLYEDLLISEGEDDEEDAGSDEEGDNPFSAIQLSESGSDSDVTVAIAKVGIKVTKSNKWGSSGGYTQQPLRKKRKIVSSRKRRSRGEGVKCLIQEWILEFLGAEEIGPFRLRAQ

SEQ ID NO: 36370 - protein, 222 aa, Homo sapiens
MGKDFISKTPKAMATKAKIDKWDLIKLKSFCTAKETTIRVNGQPTEWEKIFAVYSSDKGLISRIYKELKQTHKKKTNNPIKKWAKDMNRHFSQEDIYASKRHMKKCSSSLAIREMQIKTTMRYHLTPVRMAIIKKSGNRNILPWVKVPEDLKDPEVFQVQTRLLEAMFESLYCFTTCCLLGLSLTSASTCVSWLAEQQWPALPVSTESLEIFTMKRKQHVGA

SEQ ID NO: 36371 - protein, 109 aa, Homo sapiens
  misc_feature (1)...(109): Xaa = X or * as defined in Table 2
TYPAVGESSRRPERSRGVPGPDAAAESHFRPGRISNPLHRAGEQGHARAEGSGVFRPHRGRGLRLLFVQAPDQVDAPVHGXVAPPAPGARDAQTCRSHECPRTRPLDEV

SEQ ID NO: 36372 - protein, 365 aa, Homo sapiens
  DOMAIN (82)..(96): DEAD/DEAH box helicase domain identified by PFam, accession name DEAD, E-value=0.0048, PFam score of 12.5
MENLKRAVKTKKRNVADLPPIKKNFYKESTATSAMSKVEADSWRKENFNITWDDLKDGEKRPIPNPTCTFDDAFQCYPEVMENIKKAGFQKPTPIQPEHEQAVARFFMASGTPFKLGLVSNISASQHSTGVHFSDSYIHVAPNQTGSSRSPPVYRDRRPAFWAPIPKGVLGRPRSKGTPGDAQGAGSEQERRKRRGLEERAKRPPRACVPRTQSLGLSPRSWRCGALSHGLEHPLGPELVQIGAVNHASVRSEDSRPSARAWPCSPARCKGFEIRPGLLGKRDEIPGPAETPEPGSPPVLGTLTENVSAAASGPGTPLDLSGLRELSPTAGYVYVPGEFPSYDPHNQDHSPAQTRPNHAGEAQGR

SEQ ID NO: 36373 - protein, 149 aa, Homo sapiens
GPCHAHGQHPPVLVPACPELTREMVLAQGLLSMALLALCWERSLAGAEETIPLQTLRCYNDYTSHITCRWADTQDAQRLVNVTLIRRVNEDLLEPVSCDLSDDMPWTACPHPRCVPRRCVIPCQSFVVTDGDYFSFQPDRPLGTRLTVT

SEQ ID NO: 36374 - protein, 207 aa, Homo sapiens
MVLAWELLLMALLALCWGLSLAGAEETVLLQTLRCYSDYTSHITCGWADTQDAQRLVNVTLIRRVNESVTLGAGATVCSQPRTLRNPFKAFIKICNAFAHDCFPLTSSEIQSRSKTRSFFSERRCVIPYQSFVISDIDYFSFQPDGPLGTWLTVTLTQHDPESCYLRHWVDEVTPAQDTQHDPWPKSPHFNALGTLTLHPGCPASID

SEQ ID NO: 36375 - protein, 61 aa, Homo sapiens
  misc_feature (1)...(61): Xaa = X or * as defined in Table 2
MFPSHFSAQRGHDDDVSSTSEDDGYPEDMDQDKHDDSTDDSDTDKSDGESDGDEFVHRDNX

SEQ ID NO: 36376 - protein, 301 aa, Homo sapiens
  DOMAIN (5)..(35): PPGPP GTP PYROPHOSPHOKINASE ATP: domain identified by eMATRIX, accession number PD02309B, p-value=9.182e-32, raw score of 20.29
MHSLYKPRPGRVKDYIAIPKANGYQSLHTSMIGPHACAAALMIPSVSPPPASPLPTLNSEDSSNEKLRFGEIDKLSRGYTVIRLRSCHLHLQTAKEVNSSGLVAGGIVAVSSSAIVPSNPEVTVALPVTTLHNTVTSSVSTLKAELPPTGTSNATRVENVHSPLPISPSPSEQSSLSTDDTNMADTFTEIMTMMSPSQFLSSSPLRMTNNEDSLSPTSSTLSNLELDAAEKDRKLQEKEKQIEELQRKLEQEQKLVEVLKMQLEVEKRGQQQRAPGSPAQCPRSFCQVRSEARQPWLLHQR

SEQ ID NO: 36377 - protein, 285 aa, Homo sapiens
  DOMAIN (125)..(168): kw TRANSCRIPTASE REVERSE II ORF2 domain identified by eMATRIX, accession number DM01354T, p-value=1.000e-40, raw score of 9.48
  DOMAIN (7)..(247): Reverse transcriptase domain identified by PFam, accession name rvt, E-value=5.7e-40, PFam score of 146.2
MSNRPNNNPGGSLRRSQRNTAGAQPQDDSIGGRCEAVNNIGPQIGSRVGEGRQEDSSEHINRTKDKNHMFISIDAEKASDEIQQPFMLKTLNKLGIDGTYLKIITAIYDKPTANIILNGQKLEAFPLETGTRQGCPLSPLLFNMVLEVLARAIRQGKEIKCIQLGKEEVKLSLFADDMIVYLENPIVSAQNLLKLISNFSKVSGYKINVQKSQAFLYTNNRQTESQTMGERPFTIASKRIKYLGIQLTRDVKDLFKENYKPLLNEIKEDTNKWKNIPCSWVGRIS

SEQ ID NO: 36378 - protein, 80 aa, Homo sapiens
WIKDTNLKPATIKILKDDIGNTLLDNGLGKDFMTKNPKANATKTKVAKENNAVKHWVEHTLLTYRRDRARSASLVDFSLP

SEQ ID NO: 36379 - protein, 275 aa, Homo sapiens
  misc_feature (1)...(275): Xaa = X or * as defined in Table 2
LTDCLKDVDLIPPFNRMLLEVTFGKLYAWTVQNILNVLMDASAKFKELGIQPVPLQTITSENPLGPSLGSIPQARFLLMMLSMLTLQHSANNLDLLLNSGTLALTQTALRLIVLPDVELLIXDHLLXMQTSIVXLPVLALLLAQHRSFGPSCDNVEEDMNASAQGASATVLEATRKETAPVHLPVSGPELAATMKIGTRVMRGVDWKWGDQEAEQTERNIHPTTMMFTSTINLLQTLCLPARVHAEIMQSEATKTLCGLLQILVESGTTDKTRME

SEQ ID NO: 36380 - protein, 1763 aa, Homo sapiens
  DOMAIN (1619)..(1636): Zinc finger present in dystrophin CBP/p300. domain identified by eMATRIX, accession number PF00569, p-value=2.125e-12, raw score of 13.42
  DOMAIN (1607)..(1651): Zinc finger present in dystrophin, CBP/p300 domain identified by PFam, accession name ZZ, E-value=4e-05, PFam score of 30.5
  misc_feature (1)...(1763): Xaa = X or * as defined in Table 2
IFVFGCPGSPRLQMVENRYTESFFTGQNCRNNEKVTLVRIADLENHNNDGGFWTVIDGKVYDIKDFQTQSLTENSILAQFAGEDPVVALEAALQFEDTRESMHAFCVGQYLEPDQEGVTIPDLGSLSSPLIDTERNLGLLLGLHASYLAMSTPLSPVEIECAKWVQSSIFSGGLQTSQIHYRYNEEKDEDHCSSPGGTPASKSRLCSHRRALGDHSQAFLQAIADNNIQDHNVKDFLCQIERYCRQCHLTTPIMFPPEHPVEEVGRLLLCCLLKQEDLGHVALSLVHAGALDIEQVKHRTLPKSVVDVCRVVYQAKCSLIKTHQEQGRSYKEVCAPVIKRLRFLLNELRPAVCNDLSIMSKFKLLSSLPHWRRIAQKIIREPRKKRVPKKPESTDDEEKIGNEESDLEEACILPHSPINVDKRPIAIKSPKDKWQPLLSTVTGVHKYKWLKQNVQGLYPQSPLLSTIAEFALKEEPVDVEKRKCLLKQLERAEVRLEGIDTILKLYLVSKNFLLPSVPYAMFCGWQRLIPEGIDIGEPLTDCLKDVDLIPPFNRMLLEVTFGKLYAWAVQNIRNVLVDASAKFKELGIQPVPLQTITNENPSGPSLGTIPQAHFLLVMLSMLTLQHSANNLDLLLNSGTLALAQTALRLIGPSCDSVEEDMNASAQGASATVLEETRKETAPVQLPVSGPELAAMMKIGTRVMRGVDWKWGDQDRPPPGLGRVIGELGEDGWIRVQWDTGSTNSYRMGKEGNYDLKLAELPAPAQPSAEDSDTEDDSEAEQTERNIHPTAMMFTSTINLLQTLCLSAGVHAHIMQSEATKTLCGLLQMLVYREQHRSWCTLGFVQRLALTLQVCGTLSSLQWITLLMEVVDGHAPFTATSLQRQILAVHLLQAVLPSWDKTERARDMKCLMEKLFDFLGSLLTMCSSDVPLLRGGWPSPFPVPWXRAVQCRHSEVGGRLPSLCPGEEPCSAITQRWVAVSLPCTLVKSGAVPSLRGGWPSPFPVSWXRAVXWPHSEVGGRLPSLCPGEERRSVVTQRXVTISLPCDPGEEWCSSFSPGFLLESTLRRRRVCPQASLTATHSSTLAEEVVALLHTLHSLTQWNGLINKYINSPCRSITHSFAGRPSKGAQLEDYFPDSENPEVGGLMAVLAVVGGIDGRLCLGGQVVHDDFGEVTMTRITLKGKITVQFSDMRTCHVCPLNQLKPLPAVAFNVNNLPFTEPMLSVWAQLVNLAGSKLEKHKIKKSTKQAFAGQVDLDLLRWQQLELSILKAGRGVVSHQDKLCQILSQPAVQETGTVHTDDGAVVSPDLGDMSPEGPQPPMILLQQLLASATQPSPVKAIFDKQELETAALAVVESTHPSSPGFEDCSSSEATTPVNVQHIRPARVKRRKQSPVPALPIVVQLMEMGFPRRNIEFALKSLTGASGNASGLPGVEALVGWLLDHSDIQVTELSDADTVSDEYSDEEVVEDMDDAAYSMSTGAVVTESQTYKNRAGFLGNDDYAVYVRENIQVGMMVRCCRTYEEVCEGDVDVGKVIKLDRDGLHDLNVQCDWQQKGGIYWFRYIHVELIGYPPPRSSSHIKIGDKVRVKASVTTPKYKWGSVTHQSVGVVKACDGCQMFPINGSRFKCRNCDDFDFCETCFKTKKHNTRHTFGRINEPGFSRRNTSYKSRPNRKANLKIHYPPAIRIILRSTHIYDDVQRFSLGRKRHTLRRSCMTLLLWKFNLFIVFWALWVVRAGLWVLGNSSGSQHSKAKLTSSSHTLQEKH

SEQ ID NO: 36381 - protein, 869 aa, Homo sapiens; identical to SEQ ID NO: 34720
  misc_feature (1)...(869): Xaa = X or * as defined in Table 2

SEQ ID NO: 36382 - protein, 2432 aa, Homo sapiens
  DOMAIN (624)..(653): Regulator of chromosome condensation (RCC1) proteins domain identified by eMATRIX, accession number BL00625A, p-value=8.230e- 16, raw score of 16.21
  DOMAIN (475)..(737): Regulator of chromosome condensation (RCC1) domain identified by PFam, accession name RCC1, E-value=7.8e-35, PFam score of 127.0
MVKDGEIVYTGTESTQNGELPPRKDDSVEPSGTKKEDLNDKEKKDEEETPAPIYRAKSILDSWVWGKQPDVNELKECLSVLVKEQQALAVQSATTTLSALRLKQRLVILERYFIALNRTVFQENVKVKWKSSGISLPPVDKKSSRPAGKGVEGLARVGSRAALSFAFAFLRRAWRSGEDADLCSELLQESLDALRALPEASLFDESTVSSVWLEVVERATRFLRSVVTGDVHGTPATKGPGSIPLQDQHLALAILLELAVQRGTLSQMLSAILLLLQLWDSGAQETDNERSAQGTSAPLLPLLQRFQSIICRKDAPHSEGDMHLLSGPLSPNESFLRYLTLPQDNELAIDLRQTAVVVMAHLDRLATPCMPPLCSSPTSHKGSLQEVIGWGLIGWKYYANVIGPIQCEGLANLGVTQIACAEKRFLILSRNGRVYTQAYNSDTLAPQLVQGLASRNIVKIAAHSDGHHYLALAATGEVYSWGCGDGGRLGHGDTVYVSLIPGGVEGIIADSIRWEDPKLGEKQSNAYRVVHVCQAQNSPTLTVLPLEEPKVISAFSGKQAGKHVVHIACGSTYSAAITAEGELYTWGRGNYGRLGHGSSEDEAIPMLVAGLKGLKVIDVACGSGDAQTLAVTENGQVWSWGDGDYGKLGRGGSDGCKTPKLIEKLQDLDVVKVRCGSQFSIALTKDGQVYSWGKGDNQRLGHGTEEHVRYPKLLEGLQGKKVIDVAAGSTHCLALTEDSEVHSWGSNDQCQHFDTLRVTKPEPAALPGLDTKHIVGIACGPAQSFAWSSCSEWSIGLRVPFVVDICSMTFEQLDLLLRQVSEGMDGSADWPPPQEKECVAVATLNLLRLQLHAAISHQVDPEFLGLGLGSILLNSLKQTVVTLASSAGVLSTVQSAAQAVLQSGWSVLLPTAEERARALSALLPCAVSGNEVNISPGRRFMIDLLVGSLMADGGLESALHAAITAEIQDIEAKKEAQKEKEIDEQEANASTFHRSRTPLDKDLINTGICESSGKQCLPLVQLIQQLLRNIASQTVARLKDVARRISSCLDFEQHSRERSASLDLLLRFQRLLISKLYPGESIGQTSDISSPELMGVGSLLKKYTALLCTHIGDILPVAASIASTSWRHFAEVAYIVEGDFTGQNCRNNEEVTLIRKADLENHNKDGGFWTVIDGKVYDIKDFQTQSLTGNSILAQFAGEDPVVALEAALQFEDTRESMHAFCVGQYLEPDQEIVTIPDLGSLSSPLIDTERNLGLLLGLHASYLAMSTPLSPVEIECAKWLQSSIFSGGLQTSQIHYSYNEEKDEDHCSSPGGTPASKSRLCSHRRALGDHSQAFLQAIADNNIQDHNVKTHQEQGRSYKEVCAPVIERLRFLFNELRPAVCNDLSIMSKFKLLSSLPRWRRIAQKIIRERRKKRVPKKPESTDDEEKIGNEESDLEEACILPHSPINVDKRPIAIKSPKDKWQPLLSTVTGVHKYKWLKQNVQGLYPQSPLLSTIAEFALKEEPVDVEKMRKCLLKQDVDLIPPFNRMLLEVTFGKLYAWAVQNIRNVLMDASAKFKELGIQPVPLQTITNENPSGPSLGTIPQARFLLVMLSMLTLQHGANNLDLLLNSGMLALTQTALRLIGPSCDNVEEDMNASAQGASATVLEETRKETAPVQLPVSGPELAAMMKIGTRVMRGVDWKWGDQDGPPPGLGRVIGELGEDGWIRVQWDTGSTNSYRMGKEGKYDLKLAELPAAAQPSAEDSDTEDDSASPNRLVYREQHRSWCTLGFVRSIALTPQVCGALSSPQWITLLMKVVEGHAPFTATSLQRQILAVHLLQAVLPSWDKTERARDMKCLVEKLFDFLGSLLTTCSSDVPLLRESTLRRRRVRPQASLTATHSSTLAEEVVALLRTLHSLTQWNGLINKYINSQLRSITHSFVGRPSEGAQLEDYFPDSENPEVGGLMAVLAVIGGIDGRLRLGGQVMHDEFGEGTVTRITPKGKITVQFSDMRTCRVCPLNQLKPLPAVAFNVNNLPFTEPMLSVWAQLVNLAGSKLEKHKIKKSTKQAFAGQVDLDLLRCQQLKLYILKAGRALLSHQDKLRQILSQPAVQETGTVHTGPQPPMILLQQLLASATQPSPVKAIFDKQELEAAALAVCQCLAVESTHPSSPGFEDCSSSEATTPVAVQHIRPARVKRRKQSPVPALPIVVQLMEMGFSRRNIEFALKSLTGASGNASSLPGVEALVGWLLDHSDIQVTELSDADTVSDEYSDEEVVEDVDDAAYSMSTGAVVTESQTYKKRADFLSNDDYAVYVRENIQQIFEYVLYAKHQWTEAPALREPAFWCWKTYLTSELMVGMMVRCCRAYEEVCEGDVGKVIKLDRDGLHDLNVQCDWQQKGGTYWVRYIHVELIGYPPPSSSSHIKIGDKVRVKASVTTPKYKWGSVTHQSVGVVK

SEQ ID NO: 36383 - protein, 76 aa, Homo sapiens
  misc_feature (1)...(76): Xaa = X or * as defined in Table 2
SLRVTPGGRNVSEKKDRKKTGRPPELERKSHTERLYLEEGSAEPAXVGRRAPESVNDRGGAIQRAQRGQPAPPLPR

SEQ ID NO: 36384 - protein, 145 aa, Homo sapiens
PKKPESTADEEKIGNEESDLEEACILPHSPINVDKRPIAIKSPKTITSENPLGPSLGSIPQARFLLMMLSMLTLQHSANNLDLLLNSGTLALTQTALRLIVPKKPESTADEEKIGNEESDLEEACILPHSPINVDKRPIAIKSPK

SEQ ID NO: 36385 - protein, 141 aa, Homo sapiens
MTELPTLWKPLKNSPMFRVIARAFCVTFILVSTHQEMLTITSENPLGPSLGSIPQARFLLMMLSMLTLQHSANNLDLLLNSGTLALTQTALRLIGGTPVELPAELAAPAFRAAAAVDKNPRRRGQKVAVAKSGGDRGKKSR

SEQ ID NO: 36386 - protein, 4854 aa, Homo sapiens
  DOMAIN (4776)..(4808): HECT-domain (ubiquitin-transferase) domain identified by eMATRIX, accession number PF00632C, p-value=2.742e-16, raw score of 20.66
  DOMAIN (533)..(4339): Regulator of chromosome condensation (RCC1) domain identified by PFam, accession name RCC1, E-value=2.6e-139, PFam score of 476.2
RRGGRALRVRPETWEEAGEKMPSESFCLAAQARLDSKWLKTDIQLAFTRDGLCGLWNEMVKDGEIVYTGTESTQNGELPPRKDDSVEPSGTKKEDLNDKEKKDEEETPAPIYRAKSILDSWVWGKQPDVNELKECLSVLVKEQQALAVQSATTTLSALRLKQRLVILERYFIALNRTVFQENVKVKWKSSGISLPPVDKKSSRPAGKGVEGLARVGSRAALSFAFAFLRRAWRSGEDADLCSELLQESLDALRALPEASLFDESTVSSVWLEVVERATRFLRSVVTGDVHGTPATKGPGSIPLQDQHLALAILLELAVQRGTLSQMLSAILLLLQLWDSGAQETDNERSAQGTSAPLLPLLQRFQSIICRKDAPHSEGDMHLLSGPLSPNESFLRYLTLPQDNELAIDLRQTAVVVMAHLDRLATPCMPPLCSSPTSHKGSLQEVIGWGLIGWKYYANVIGPIQCEGLANLGVTQIACAEKRFLILSRNGRVYTQAYNSDTLAPQLVQGLASRNIVKIAAHSDGHHYLALAATGEVYSWGCGDGGRLGHGDTVPLEEPKVISAFSGKQAGKHVVHIACGSTYSAAITAEGELYTWGRGNYGRLGHGSSEDEAIPMLVAGLKGLKVIDVACGSGDAQTLAVTENGQVWSWGDGDYGKLGRGGSDGCKTPKLIEKLQDLDVVKVRCGSQFSIALTKDGQVYSWGKGDNQRLGHGTEEHVRYPKLLEGLQGKKVIDVAAGSTHCLALTEDSEVHSWGSNDQCQHFDTLRVTKPEPAALPGLDTKHIVGIACGPAQSFAWSSCSEWSIGLRVPFVVDICSMTFEQLDLLLRQVSEGMDGSADWPPPQEKECVAVATLNLLRLQLHAAISHQVDPEFLGLGLGSILLNSLKQTVVTLASSAGVLSTVQSAAQAVLQSGWSVLLPTAEERARALSALLPCAVSGNEVNISPGRRFMIDLLVGSLMADGGLESALHAAITAEIQDIEAKKEAQKEKEIDEQEANASTFHRSRTPLDKDLINTGICESSGKQCLPLVQLIQQLLRNIASQTVARLKDVARRISSCLDFEQHSRERSASLDWLLRFQRLLISKLYPGESIGQTSDISSPELMGVGSLLKKYTALLCTHIGDILPVAASIASTSWRHFAEVAYIVEGDFTGVLLPELVVSIVLLLSKNADLMQEAGAVPLLGGLLEHLDRFNHLAPGKERDDHEELAWPGIMESFFTGQNCRNNEEVTLIRKADLENHNKDGGFWTVIDGKVYDIKDFQTQSLTGNSILAQFAGEDPVVALEAALQFEDTRESMHAFCVGQYLEPDQEIVTIPDLGSLSSPLIDTERNLGLLLGLHASYLAMSTPLSPVEIECAKWLQSSIFSGGLQTSQIHYRYNEEKDEDHCSSPGGTPASKSRLCSHRRALGDHSQAFLQAIADNNIQDHNVKDFLCQIERYCRQCHLTTPIMFPPEHPVEEVGRLLLCCLLKHEDLGHVALSLVHAGALGIEQVKHRTLPKSVVDVCRVVYQAKCSLIKTHQEQGRSYKEVCAPVIERLRFLFNELRPAVCNDLSIMSKFKLLSSLPRWRRIAQKIIRERRKKRVPKKPESMDDEEKIGNEESDLEEACILPHSPINVDKRPIAIKSPKDKWQPLLSTVTGVHKYKWLKQNVQGLYPQSPLLSTIAEFALKEEPVDVEKMRKCLLKQLERAEVRLEGIDTILKLASKNFLLPSVQYAMFCGWQRLIPEGIDIGEPLTDCLKDVDLIPPFNRMLLEVTFGKLYAWAVQNIRNVLMDASATFKELGIQPVPLQTITNENPSGPSLGTIPQARFLLVMLSMLTLQHGANNLDLLLNSGMLALTQTALRLIGPSCDNVEEDMNASAQGASATVLEETRKETAPVQLPVSGPELAAMMKIGTRVMRGVDWKWGDQDGPPPGLGRVIGELGEDGWIRVQWDTGSTNSYRMGKEGKYDLKLAELPAAAQPSAEDSDTEDDSEAEQTERNIHPTAMMFTSTINLLQTLCLSAGVHAEIMQSEATKTLCGLLRMLVESGTTDKTSSPNRLVYREQHRSWCTLGFVRSIALTPQVCGALSSPQWITLLMKVVEGHAPFTATSLQRQILAVHLLQAVLPSWDKTERARDMKCLVEKLFDFLGSLLTTCSSDVPLLRESTLRRRRVRPQASLTATHSSTLAEEVVALLRTLHSLTQWNGLINKYINSQLRSITHSFVGRPSEGAQLEDYFPDSENPEVGGLMAVLAVIGGIDGRLRLGGQVMHDEFGEGTVTRITPKGKITVQFSDMRTCRVCPLNQLKPLPAVAFNVNNLPFTEPMLSVWAQLVNLAGSKLEKHKIKKSTKQAFAGQVDLDLLRCQQLKLYILKAGRALLSHQDKLRQILSQPAVQETGTVHTDDGAVVSPDLGDMSPEGPQPPMILLQQLLASATQPSPVKAIFDKQELEAAALAVCQCLAVESTHPSSPGFEDCSSSEATTPVAVQHIHPARVKRRKQSPVPALPIVVQLMEMGFSRRNIEFALKSLTGASGNASSLPGVEALVGWLLDHSDIQVTELSDADTVSDEYSDEEVVEDVDDAAYSMSTGAVVTESQTYKKRADFLSNDDYAVYVRENIQVGMMVRCCRAYEEVCEGDVGKVIKLDRDGLHDLNVQCDWQQKGGTYWVRYIHVELIGYPPPSSSSHIKIGDKVRVKASVTTPKYKWGSVTHQSVGVVKAFSANGKDIIVDFPQQSHWTGLLSEMELVPSIHPGVTCDGCQMFPINGSRFKCRNCDDFDFCETCFKTKKHNTRHTFGRINEPGQSAVFCGRSGKQLKRCHSSQPGMLLDSWSRMVKSLNVSSSVNQASRLIDGSEPCWQSSGSQGKHWIRLEIFPDVLVHRLKMIVDPADSSYMPSLVVVSGGNSLNNLIELKTININPSDTTVPLLNDYTEYHRYIEIAIKQCRSSGIDCKIHGLILLGRIRAEEEDLAAVPFLASDNEEEEDEKGNSGSLIRKKAAGLESAATIRTKVFVWGLNDKDQLGGLKGSKIKVPSFSETLSALNVVQVAGGSKSLFAVTVEGKVYACGEATNGRLGLGISSGTVPIPRQITALSSYVVKKVAVHSGGRHATALTVDGKVFSWGEGDDGKLGHFSRMNCDKPRLIEALKTKRIRDIACGSSHSAALTSSGELYTWGLGEYGRLGHGDNTTQLKPKMVKVLLGHRVIQVACGSRDAQTLALTDEGLVFSWGDGDFGKLGRGGSEGCNIPQNIERLNGQGVCQIECGAQFSLALTKSGVVWTWGKGDYFRLGHGSDVHVRKPQVVEGLRGKKIVHVAVGALHCLAVTDSGQVYAWGDNDHGQQGNGTTTVNRKPTLVQGLEGQKITRVACGSSHSVAWTTVDVATPSVHEPVLFQTARDPLGASYLGVPSDADSSAASNKISGASNSKPNRPSLAKILLSLDGNLAKQQALSHILTALQIMYARDAVVGALMPAAMIAPVECPSFSSAAPSDASAMASPMNGEECMLAVDIEDRLSPNPWQEKREIVSSEDAVTPSAVTPSAPSASARPFIPVTDDLGAASIIAETMTKTKEDVESQNKAAGPEPQALDEFTSLLIADDTRVVVDLLKLSVCSRAGDRGRDVLSAVLSGMGTAYPQVADMLLELCVTELEDVATDSQSGRLSSQPVVVESSHPYTDDTSTSGTVKIPGAEGLRVEFDRQCSTERRHDPLTVMDGVNRIVSVRSGREWSDWSSELRIPGDELKWKFISDGSVNGWGWRFTVYPIMPAAGPKELLSDRCVLSCPSMDLVTCLLDFRLNLASNRSIVPRLAASLAACAQLSALAASHRMWALQRLRKLLTTEFGQSININRLLGENDGETRALSFTGSALAALVKGLPEALQRQFEYEDPIVRGGKQLLHSPFFKVLVALACDLELDTLPCCAETHKWAWFRRYCMASRVAVALDKRTPLPRLFLDEVAKKIRELMADSENMDVLHESHDIFKREQDEQLVQWMNRRPDDWTLSAGGSGTIYGWGHNHRGQLGGIEGAKVKVPTPCEALATLRPVQLIGGEQTLFAVTADGKLYATGYGAGGRLGIGGTESVSTPTLLESIQHVFIKKVAVNSGGKHCLALSSEGEVYSWGEAEDGKLGHGNRSPCDRPRVIESLRGIEVVDVAAGGAHSACVTAAGDLYTWGKGRYGRLGHSDSEDQLKPKLVEALQGHRVVDIACGSGDAQTLCLTDDDTVWSWGDGDYGKLGRGGSDGCKVPMKIDSLTGLGVVKVECGSQFSVALTKSGAVYTWGKGDYHRLGHGSDDHVRRPRQVQGLQGKKVIAIATGSLHCVCCTEDGEVYTWGDNDEGQLGDGTTNAIQRPRLVAALQGKKVNRVACGSAHTLAWSTSKPASAGKLPAQVPMEYNHLQEIPIIALRNRLLLLHHLSELFCPCIPMFDLEGSLDETGLGPSVGFDTLRGILISQGKEAAFRKVVQATMVRDRQHGPVVELNRIQVKRSRSKGGLAGPDGTKSVFGQMCAKMSSFGPDSLLLPHRVWKVKFVGESVDDCGGGYSESIAEICEELQNGLTPLLIVTPNGRDESGANRDCYLLSPAARAPVHSSMFRFLGVLLGIAIRTGSPLSLNLAEPVWKQLAGMSLTIADLSEVDKDFIPGLMYIRDNEATSEEFEAMSLPFTVPSASGQDIQLSSKHTHITLDNRAEYVRLAINYRLHEFDEQVAAVREGMARVVPVPLLSLFTGYELETMVCGSPDIPLHLLKSVATYKGIEPSASLIQWFWEVMESFSNTERSLFLRFVWGRTRLPRTIADFRGRDFVIQVLDKYNPPDHFLPESYTCFFLLKLPRYSCKQVLEEKLKYAIHFCKSIDTDDYARIALTGEPAADDSSDDSDNEDVDSFASDSTQDYLTGH

SEQ ID NO: 36387 - protein, 58 aa, Homo sapiens
DALSPTTPPAAAGSPTSALSEVSLRLLCHDDIDTVKHLCGDWFPIEYPDSWYRDITSN

SEQ ID NO: 36388 - protein, 1658 aa, Homo sapiens
  DOMAIN (1594)..(1611): Zinc finger present in dystrophin CBP/p300. domain identified by eMATRIX, accession number PF00569, p-value=2.125e-12, raw score of 13.42
  DOMAIN (1583)..(1627): Zinc finger present in dystrophin, CBP/p300 domain identified by PFam, accession name ZZ, E-value=4e-05, PFam score of 30.5
  misc_feature (1)...(1658): Xaa = X or * as defined in Table 2
ESFFTGQNCRNNEKVTFVRIADLENHNNDGGFWTVIDGKVYDIKDFQTQSLTENSILAQFAGEDPVVALEAALQFEDTRESMHAFCVGQYLEPDQEGVTIPDLGSLSSPLIDTERNLGLLLGLHASYLAMSTPLSPVEIECAKWLQSSIFSGGLQTSQIHYSYYEEKDEDHCSSPGGTPASKSRLCSHRRALGDHSQAFLQAIADNNIQDHNVKDFLCQIERYCRQCHLTTPIMFPPEHPVEEVGRLLLCCLLKHEDLGHVALSLVHAGALDIEQVKHRTLPKSVVDVCRVVYQAKCSLIKTHQEQGRSYKEVCAPVIKRLRFLFNELRPAVCNDLSIMSKFKLLSSLPHWRRIAQKIIREPRKKRVPKKPESTDDEEKIGNEESDLEEACILPHSPINVDKRPIAIKSPKDKWQPLLSTVTDVHKYKWLKQNVQGLYPQSPLLSTIAEFALKEEPVDVEKRKCLLKQLERAEVRLEGIDTILKLYLVSKNFLLPSVPYAMFCGWQRLIPEGIDIGEPLTDCLKDVDLIPPFNRMLLEVTFGKLYAWAVQNIRNVLVDASAKFKELGIQPVPLQTITNENPSGPSLGTIPQAHFLLVMLSMLTLQHSANNLDLLLNSGTLALAQTALRLIGPSCDSVEEDMNASAQGASATVLEETRKETAPVQLPVSGPELAAMMKIGTRVMRGVDWKWGDQDGPPPGLGQVIGELGEDGWIRVQWGTGSTNSYRMGKEGKYDLKLAELPAAAQPSAEDLDTEDDSEAEQTERNIHPTAMMFTSTITLLQTLCLSAGVHAEIMQSEATKTLCGLLRMLVESGITDKTSSPNRLVYREQHRSWCTLGFVQSIALTLQVCGALSSPQWITLLMKVVEGHAPFTATSLQRQILAVHLLQAVLPSWDKTERVRDMKCLMEKLFDFLGSLLTMCSSDVPLLRGGWPSPFPVPWXRAVQCRHSEVGGRLPSLCPGEERCSAVTQRWVAVSLPCTLVKSGAVPSLRGGWPSPFPVSWXRAVXCRHSEVSGRLPSLCPGEEWCSSFSPGFLLESTLRRRRVCPQASLTATHSSTLAEEVVALLHTLHSLTRWNGFINKYINSQLRSITHSFAGRPSKGAQLDDYFPDSENPEVGGLMAVLAVVGGIDGRLCLGGQVVHDDFGEVTMTRITLKGKITVQFSDMRTCRVCPLNQLKPLPAVAFNVNNLPFTEPMLSVWAQLVNLAGSKLEKHKIKKSTKQAFAGQVDLDLLRRQQLKLYILKAGRALFSHQDKLRQILSQPAVQETGTVHTDDGAVVSPDLGDMSPEGPQPPMILLQQLLASATQPSPVKAIFDKQELETAALAVVESTHPSSPGFEDCSSSEATTPVNVQHIRPARVKRRKQSPVPALPIVVQLMEMGFPRRNIEFALKSLTGASGNASGLPGVEALVGWLLDHSDIQVTELSDADTVSDEYSDEEVVEDMDDAAYSMSTGAVVTESQTYKNRAGFLGNDDYAVYVRENIQVGMMVRCCRTYEEVCEGDVDVGKVIKLDRDGLHDLNVQCDWQQKGGIYWFRYIHVELIGYPPPRSSSHIKIGDKVRVKASVTTPKYKWGSVTHQSVGVVKACDGCQMFPINGSRFKCRNCDDFDFCETCFKTKKHNTRHTFGRINEPGFSRRNTSYKSRPNRKGEALGCPTTWVS

SEQ ID NO: 36389 - protein, 617 aa, Homo sapiens
MTELPTLWKPLKNSQMFRVIARAFCVTFILVSTHKKCQWVSMLISQMFKVIARAFCVMFILVSITRNTITSENPLGPSLGSIPQARFLLMMLSMLTLQHSANNLDLLLNSGTLALTQTALRLIGPSCDNVEEDMNASAQGVSATVLEATRKETAPVHLPVSGPELAATMKIGTRVMRGVDWKWGDQDGPPPGLGRVIGELGEDGWIRVQWGTGSTNSYRMGKEGKYDLKLAELPAAAQPSAEDSDTEDDSASPNRLVYREQHRSWCMLGFVRSIALTPQVCGALSSPQWITLLMKVMKGHAPFPAASLQRQILAVHLLQAVLRSWDKTKRARDMKCLVEKLFDFLGSLLTTCSSDVPLLRESMPRWRRVRPQALLTATHSSTLVEVVVALLCTLHSLTQWNGLINKYINSQLRSITHSFAGRPSEGAQLEDYFPDSENPEVGGLMAVLAVIGGIDGRLCLGGQIVHDEFGEGTVTGITPKGKITVQFSDMRTCHICPLNQLKPERERLCRNLDSGRRGHFPPMAAGGRELKEGWASPLPVEWGLPDKRRGLFLGSHSHLCSTVLRAQEAPTPAAQLLHLRLTGSPQPCNPLHLLDGEPVATQVLHSVYVIVAKGGAG

SEQ ID NO: 36390 - protein, 123 aa, Homo sapiens
  misc_feature (1)...(123): Xaa = X or * as defined in Table 2
YHLTLLIHGTKVSATRPGHCSPGKLPSWVPISLQCTPSSPECRSVXRQLXHGHMHELLYIITKADSVITASCLISRSEWWGDGGTVSLVQRFVDYGSSQCQRPHRTGCASSSAPQRASSVAPG

SEQ ID NO: 36391 - protein, 20 aa, Homo sapiens
  misc_feature (1)...(20): Xaa = X or * as defined in Table 2
EWSGTRTWWRPWSCRTXCRT

SEQ ID NO: 36392 - protein, 242 aa, Homo sapiens
  DOMAIN (72)..(82): dUTPase domain identified by eMATRIX, accession number PF00692C, p-value=7.333e-10, raw score of 11.65
MGQVWALVHSTLETFHTNDAEEGEYNKVTEEVSEQDTGQKVVAPVTVRAAPRMTALSSIQAGIPQARREAEPGQRIAQLLIVLYVEMGKSEIKRAGGFGSTNKQGKAAYWVNQITDKHPTCEITIQGQNQQPIWIPLRHLKPYHETDAEEEIPGGSRAPPSCSHVENDSEEDPNCHKQHPLNTAIHLGTDQEAVTDGGKNLRKAGQAVTSNLMVAIIAVITTAMSIPSTRADTENNYTYWAY

SEQ ID NO: 36393 - protein, 39 aa, Homo sapiens
RSAAHIASGSAAPGSPPGPCSRPFLGQTSSDASGLHRAR

SEQ ID NO: 36394 - protein, 138 aa, Homo sapiens
MAQWGSARDQSPPCLLAPSRGWGLSRPRPGGGARRQPRRSRGGRGGAGSGVSDQAAGGGERGARPELRSPGGGLIIIDSMPDIRKRKPIPLVSDLASDEEGCFWKLLDAFPLHLEEYGRAEVGGRKTMSVGRHCPCMQ

SEQ ID NO: 36395 - protein, 178 aa, Homo sapiens
  misc_feature (1)...(178): Xaa = X or * as defined in Table 2
RRREFPAKERESASMSSPEEXPDMAKGAPPSQPPPNSVPADCSRSVRLSSSNFEESLRPTEDDEGQEGQDSMSRAKANWLRAFNKVRMQLQEARGEGEMSKSLWFKGGPGGGLIIIDSMPDIRKRKPIPLVSDLAMSLVQSRKAAITSALASSTLNNEELKNHVYKKTLQALIYPISC

SEQ ID NO: 36396 - protein, 74 aa, Homo sapiens
MKATLPLAITYESYAAPPEVKPSTSCSEPFSSPDSSRLDIHCQPDPNSSPGESHRSEHHFTATATPPMWRLATS

SEQ ID NO: 36397 - protein, 94 aa, Homo sapiens
NGIPDFSNTTLLRGLQMPGARGPCCGSQRHINLLMGTGVFLVKMKANEFFFLDSETRLCKIAPEGWREQPQKTSMNTFTLFLRIKFFVSHYGLL

SEQ ID NO: 36398 - protein, 219 aa, Homo sapiens
RPTPGHGDFWMQPLTKDAGMSLSSVTLASALQVRGEALSEEEIWSLLFLAAEQLLEDLRNDSSDYVVCPWSALLSAAGSLSFQGRVSHIEAAPFKAPELLQGQSEDEQPDASQMHVYSLGMTLYWSAGFHVPPHQPLQLCEPLHSILLTMCEDQPHRRCTLQSVLEACRVHEKEVSVYPAPAGLHIRRLVGLVLGTISEVSREPCFSSSSCWSCVAIKI

SEQ ID NO: 36399 - protein, 126 aa, Homo sapiens
MMKSSSSTDWRSWSGEGLLESMSRDNELEGEDSPILDQEDSWRDSASPDAGEGLGLRPESSQKAIREAQWGQNRERPWASSLTHSPESHPHLCKLHQERDESTLATSLEKDVRQNCYSVCDIMRLG

SEQ ID NO: 36400 - protein, 291 aa, Homo sapiens
  DOMAIN (120)..(133): HTRA/DEGQ PROTEASE FAMILY SIGNATURE domain identified by eMATRIX, accession number PR00834F, p-value=7.811e-09, raw score of 10.91
  DOMAIN (74)..(186): PDZ domain (Also known as DHR or GLGF) domain identified by PFam, accession name PDZ, E-value=0.0021, PFam score of 24.7
  misc_feature (1)...(291): Xaa = X or * as defined in Table 2
MPRPDLAPALLVAVLVLLYLLVSAAAPAPSSDSTPENVCPVETTTNFIWELSSPHNTSAVLLVVFHKGPSPKFEVKLKKNANGLGFSFVQMEKESCSHLKSDLVRIKRLFPGHPAEENGAIAAGDIILAVNGSPRKASSSRCRGSWAMQLSVQAGPSFASYYPAAVEVLHLLRGAPQEVTLLLCRPPPGALPELEQEWQGQKYKCAWAIVNEAEVEEVVEVAGTVEFFGDQGAXCHHPACSGKPLGWHGGLSRKCPRLFFRGATRVTGAQGLKEVKQQSFRSNMMWLGLRL

SEQ ID NO: 36401 - protein, 561 aa, Homo sapiens
  DOMAIN (327)..(342): Tyrosine specific protein phosphatases proteins domain identified by eMATRIX, accession number BL00383A, p-value=5.235e- 16, raw score of 13.34
  DOMAIN (324)..(552): Protein-tyrosine phosphatase domain identified by PFam, accession name Y_phosphatase, E-value=3.3e-89, PFam score of 309.8
MRAKVDGDVGTAGWTAATVNQRRPLPSEKASFLDPFSLGIGTCGSYELSQRIWWRKELWRKAPLCSRTEATCSGRGCVGQAARAQRHRPRSVCILAEVENANAIPLTDEEATFKQIRSQDNEGPGGSCAVRASCFLWEPYSGRVAEQQHASILLPLSIAIPCCITSNHKTQWLKATIMNLAHDSVFENKVNSEKVKLSLRNFPHNDYEDVFEEPSESGSDPSMWTARGPFRRDRWSSEDEEAAGPSQALSPLLSDTRKIVSEGELDQLAQIRPLIFNFHEQTAIKDCLKILEEKTAAYDIMQEFMALELKNLPGEFYSGNQPSNREKNRYRDILPYDSTRVPLGKSKDYINASYIRIVNCGEEYFYIATQGPLLSTIDDFWQMVLENNSNVIAMITREMEGGIIKCYHYWPISLKKPLELKHFRVFLENYQILQYFIIRMFQVVEKSTGTSHSVKQLQFTKWPDHGTPASADSFIKYIRYARKSHLTGPMVVHCSAGIGRTGVFLCVDVVFCAIVKDCSFNIMDIVAQMREQRSGMVQTKEQYHFCYDIVLEVLRKLLTLD

SEQ ID NO: 36402 - protein, 382 aa, Homo sapiens
  DOMAIN (117)..(202): PDZ domain (Also known as DHR or GLGF) domain identified by PFam, accession name PDZ, E-value=2.1e-13, PFam score of 58.0
MANLSPAHQARSKPLIWIQRLSCSENELFVSRLQGAAGGLLSTSMDNFNVDGSKEAGAEGIGRSPCTGREQLKSACVIQKPMTWDSLSGPPVQSMHAGSKNNRRKSFIAEPGREIVRVTLKRDPHRGFGFVINEGEYSGQADPGIFISSIIPGGPAEKAKTIKPGGQILALNHISLEGFTFNMAVRMIQNSPDNIELIISQSKGVGGNNPDEEKNSTANSGVSSTDILSFGYQGSLLSHTQDQDRNTEELDMAGVQSLVPRLRHQLSFLPLKGAGSSCPPSPPEISAGEIYFVELVKEDGTLGFSVTVRVFRRAVFRLGLEGLAKPGVRDVGSKNDKPFPIPATAEHVQCPLEPIVLSASRNHLSAGAKFCLGFEHPHFGLL

SEQ ID NO: 36403 - protein, 1898 aa, Homo sapiens
  DOMAIN (472)..(495): Band 41 family domain proteins. domain identified by eMATRIX, accession number BL00660E, p-value=1.286e-10, raw score of 23.41
  DOMAIN (646)..(731): PDZ domain (Also known as DHR or GLGF) domain identified by PFam, accession name PDZ, E-value=2.1e-13, PFam score of 58.0
MPRPDLAPALLVAVLVLLYLLVSAAAPAPSSDSTPENVCPVETTTNFIWELSSPHNTSAVLLVVFHKGPSCRNSGFKPLNDEKARSVFYLISFSPRLCSVNDYEGNDSEAEDLNFREALPSSSQENTPRSKVFENKVNSEKVKLSLRNFPHNDYEDVFEEPSESLGKGGEKVNKWMDLRRLVCKVKVVGGDGVCDQTLGFGNYFTSGPVSGGYSLNTFMCSNDAKAKTSLSPPASVWIVPFPSTSYFQQVESKPYFHVEDYIPASLIERMTALRVQVEVSEMHRLSSALWGEDAELKFLRAGHWIFQHQRSINIDLYDDKDIDDDDDDNDDDDDDDRVSPKLNEGGLGNGIPDFSNTTLLRGLQMPGARGPCCGSQRHINLLMGTGVFLVKMKVTQQLPEYGVLVHQVFSEKRRPEEEMALGICAKGVIVYEVKNNSRIAMLRFQWRETGKISTYQKKFTITSSVTGKKHTFVTDSAKTSKYLLDLCSAQHGFNAQMGSGQPSHVLFASPFSSVDCGVCRFEYHDKFVQMANLSPAHQARSKPLIWIQRLSCSENELFVSRLQGAAGGLLSTSMDNFNVDGSKEAGAEGIGRSPCTGREQLKSACVIQKPMTWDSLSGPPVQSMHAGSKNNRRKSFIAEPGREIVRVTLKRDPHRGFGFVINEGEYSGQADPGIFISSIIPGGPAEKAKTIKPGGQILALNHISLEGFTFNMAVRMIQNSPDNIELIISQSKGVGGNNPDEEKNSTANSGVSSTDILSFGYQGSLLSHTQDQDRNTEELDMAGVQSLVPRLRHQLSFLPLKLILSHRPVSKGFSLALQCGLHVLCKLAGMSLSSVTLASALQVRGEALSEEEIWSLLFLAAEQLLEDLRNDLWEELCLQPMMMVEFAGVPCQRWSAVMAQAIATGGQVGSTHCRSHMLGGFSAYSRGSWSDTLHMFCEGDGSQHGPMEEAVHLCLQRHLLPLPHPGGSDEQLRSSQKTSCLGSWSVSRELRLVLNSSPITGLVSDSSDYVVCPWSALLSAAGSLSFQGRVSHIEAAPFKAPELLQGQSEDEQPDASQPLQLCEPLHSILLTMCEDQPHRRCTLQSVLEACRVHEKEVSVYPAPAGLHIRRLVGLVLGTISEGQVGELRAGLMRAKVDGDVGTAGWTAATVNQRRPLPSEKASFLDPFSLGIGTCGSYELSQRIWWRKELWRKAPLCSRTEATCSGRGCVGQAARAQRHRPRSVCILAEVENANAIPLTDEEATFKQIRSQDNEGPGGSCAVRASCFLWEPYSGRVAEQQHASILLPLSIAIPCCITSNHKTQWLKATIMNLAHDSCFTPSQPLASALPGADPQDQQAGRRLSSGSVHSAADSSWPTTPSQRGFLQRRSKGYSQGEQRPLQVPGTLLCDFATPVAGSMHHAPRRVKKPKLPSHDSAVPAQTISGPPRGYTLCMEMRLVPGLGAGWTKKGKSYLALRDLCVVLLNGQHLEVKCDVESTVGAVFNAVTSFANLEELTYFGLAYMKSKEFFFLDSETRLCKIAPEGWREQPQKTSMNTFTLFLRIKFFVSHYGLLHSLSLDMLSSNPSPLQDLQSVELLLFIITPTPLPCHTCPRPCAPVTRVAPLKNGGGHFLLNPPCQPSGFPLHAGWWHHAPLIPKALQGPCHLHNFLHFCFINDGPSTLVFLSLKHPKAMSNDLLESKHQQDLGHQVLYVVLVMVSPSGTISDHFYPHPRDEESWGLERTGNCPRPMQHSRLPSLMPELPESLALKVSQPKSKHVNIYKKTQMSEEAESGRGRRPTERTPENPAVGLTFQSARNQGQWPAASTKLMQDAGLCITFVQLGFWEPLICNIAVTSSPLPAFTSVTHLPPSTLLKGMAISANTNAFSSERERMTPTNSCSSQLPFPPNLPSSWASNFAASTI

SEQ ID NO: 36404 - protein, 160 aa, Homo sapiens
SSLTSSMEDPAAPGTGGPPANGNGNGGGKGKQAAPKGREAFRSQRRESEGSVDCPTLEFEYGDADGHAAELSELYSYTENLEFTNNRRCFEEDFKTQVQGKEWLELEEDAQKAYIMGLLDRLEVVSRERRLKAARAVLYLAQGTFGECDSEVDVLHWSRY

SEQ ID NO: 36405 - protein, 882 aa, Homo sapiens
MEDPAAPGTGGPPANGNGNGGGKGKQAAPKGREAFRSQRRESEVRSPESFGWGPETPAGGKRRLRTPFTCQYIPYYHSTQGSVDCPTLEFEYGDADGHAAELSELYSYTENLEFTNNRRCFEEDFKTQVQGKEWLELEEDAQKAYIMGLLDRLEVVSRERRLKVARAVLYLAQGTFGECDSEVDVLHWSRYNCFLLYQMGTFSTFLELLHMEIDNSQACSSALRKPAVSIADSTELRVLLSVMYLMVENIRLERETDPCGWRTARETFRTELSFSMHNEEPFALLLFSMVTKFCSGLAPHFPIKKVLLLLWKVVMFTLGGFEHLQTLKVQKRAELGLPPLAEDSIQVVKSMRAASPPSYTLDLGESQLAPPPSKLRGRRGSRRQLLTKQDSLDIYNERDLFKTEEPATEEEEESAGDGERTLDGELDLLEQDPLVPPPPSQAPLSAERVAFPKGLPWAPKVRQKDIEHFLEMSRNKFIGFTLGQDTDTLVGLPRPIHESVKTLKQHKYISIADVQIKNEEELEKCPMSLGEEVVPETPCEILYQGMLYSLPQYMLRTLDLEGDTSASDWLPSITVLQSMKLGIDVNRHKEIIVKSISTLLLLLLKHFKLNHIYQKSESSLLVEEQVLRVQRGFCRVYVHGPINQGIFPLSYIRRHLWIQPIPAVAIYLKPVLISASYSISVLDYPCCTIQDLPELTTESLEAGDNSQFCWRNLFSCINLLRLLNKLTKWKHSRTMSHGALEITLQPSEQCAAKVGPWKLAHRPNPDPGSCLYGCRQIFAFYPEPSIHGLYCSLCLPSAGGVLRVTCLPLTLGLFIVWNGSESNSMMTQDNDNTDQIDRACDMGWFFHRRVAAQVNLVAAGEAAMKKKSWMEGNTGERAVAWL

SEQ ID NO: 36406 - protein, 390 aa, Homo sapiens
  DOMAIN (255)..(284): ALPHA G-PROTEIN (TRANSDUCIN) SIGNATURE domain identified by eMATRIX, accession number PR00318D, p-value=1.900e-34, raw score of 16.28
  DOMAIN (42)..(390): G-protein alpha subunit domain identified by PFam, accession name G-alpha, E-value=1e-245, PFam score of 829.7
FSPLEPRLCSLGGWGALQAGEPCQPSRAGCGREGATMGCTLSAEERAALERSKAIEKNLKEDGISAAKDVKLLLLGAGESGKSTIVKQMKIIHEDGFSGEDVKQYKPVVYSNTIQSLAAIVRAMDTLGIEYGDKERKADAKMVCDVVSRMEDTEPFSAELLSAMMRLWGDSGIQECFNRSREYQLNDSAKYYLDSLDRIGAADYQPTEQDILRTRVKTTGIVETHFTFKNLHFRLFDVGGQRSERKKWIHCFEDVTAIIFCVALSGYDQVLHEDETTNRMHESLMLFDSICNNKFFIDTSIILFLNKKDLFGEKIKKSPLTICFPEYTGPNTYEDAAAYIQAQFESKNRSPNKEIYCHMTCATDTNNIQVVFDAVTDIIIANNLRGCGLY

SEQ ID NO: 36407 - protein, 351 aa, Homo sapiens
  DOMAIN (49)..(65): G-PROTEIN ALPHA SUBUNIT GROUP S SIGNATURE domain identified by eMATRIX, accession number PR00443A, p-value=3.363e-10, raw score of 15.16
  DOMAIN (6)..(68): G-protein alpha subunit domain identified by PFam, accession name G-alpha, E-value=1.7e-17, PFam score of 67.2
MGCTLSAEERAALERSKAIEKNLKEDGISAAKDVKLLLLADTHQFFPTVCVPTGAGESGKSTIVKQMKETGLCCLTVTPQAPVRAPAATVPLVLFYGHSLTCPFSPLMIQEHLVPQSIGCQYQFSPKKVPTCTLKVMKDTRKSSCTGMFADWVLNKCGHRKRKVRICPYAPKANSGARGFIPTHYHIAFPERLESHGEGGLRATRWRAGPRGTEAALAASWGAHLTVLRAARPRAPIDKEPFGWGEHGKGVGENKDETCISWQLTDRDAISRVREHEKRSGLGGLATSKVPGDTQVSMQGTCQGSRQHPYLPLTPQAPWNLLDHVAQEAEQLVQQPGSVAEPSPVLGPTQN

SEQ ID NO: 36408 - protein, 125 aa, Homo sapiens
  DOMAIN (1)..(36): Phosphofructokinase domain identified by PFam, accession name PFK, E-value=2.7e-06, PFam score of 18.2
IYDGFDGFAKGQIKEIGWTDVGGWTGQGGSILGTKRVLPGKYMEEIATQMRTHSINALLIIGGFEAYLGLLELSVFVTLKLFYQHFMHVLLTLIPNRRVPICPTSPSACCLWSVSHAFRCAYEQN

SEQ ID NO: 36409 - protein, 197 aa, Homo sapiens
MAVLEGTGLSLMLLVQAGLCPSSQSVLPGKYLEEIATQMRTHSINALLIIGGFEPRGEDLGNVRILVKFFLALNFNFLICKMRKILLLPAISKVIQACQTLRKTPDKQQVHSSGPSALKTKPHKGGFKTARPSSPRAEDGVARPSVNRALEKPAAMFTYRSLSLQGPQRDRQRLSLLCPSSPAATAFARVTSIIEEE

SEQ ID NO: 36410 - protein, 795 aa, Homo sapiens
  DOMAIN (176)..(215): Phosphofructokinase proteins domain identified by eMATRIX, accession number BL00433C, p-value=5.950e-38, raw score of 19.21
  DOMAIN (36)..(712): Phosphofructokinase domain identified by PFam, accession name PFK, E-value=0, PFam score of 915.0
PGRAAPLGLLAMDADDSRAPKGSLRKFLEHLSGAGKAIGVLTSGGDAQGMNAAVRAVVRMGIYVGAKVYFIYEGYQGMVDGGSNIAEADWESVSSILQVGGTIIGSARCQAFRTREGRLKAACNLLQRGITNLCVIGGDGSLTGANLFRKEWSGLLEELARNGQIDKEAVQKYAYLNVVGMVGSIDNDFCGTDMTIGTDSALHRIIEVVDAIMTTAQSHQRTFVLEVMGRHCGYLALVSALACGADWVFLPESPPEEGWEEQMCVKLSENRARKKRLNIIIVAEGAIDTQNKPITSEKIKELVVTQLGYDTRVTILGHVQRGGTPSAFDRILASRMGVEAVIALLEATPDTPACVVSLNGNHAVRLPLMECVQMTQDVQKAMDERRFQDAVRLRGRSFAGNLNTYKRLAIKLPDDQIPKTNCNVAVINVGAPAAGMNAAVRSAVRVGIADGHRMLAIYDGFDGFAKGQIKEIGWTDVGGWTGQGGSILGTKRVLPGKYLEEIATQMRTHSINALLIIGGFEAYLGLLELSAAREKHEEFCVPMVMVPATVSNNVPGSDFSIGADTALNTITDTCDRIKQSASGTKRRVFIIETMGGYCGYLANMGGLAAGADAAYIFEEPFDIRDLQSNVEHLTEKMKTTIQRGLVLRNESCSENYTTDFIYQLYSEEGKGVFDCRKNVLGHMQQGGAPSPFDRNFGTKISARAMEWITAKLKEARGRGKKFTTDDSICVLGISKRNVIFQPVAELKKQTDFEHRIPKEQWWLKLRPLMKILAKYKASYDVSDSGQLEHVQPWSV

SEQ ID NO: 36411 - protein, 153 aa, Homo sapiens
MQPLEDSLAARVLQSVGLGRCGPSHGGKFCEGSTRTLKLCNSQKCPRDSVDFRAAQCAEHNSRRFRGRHYKWKPYTQVEAICRPDKMRQHRIRQGLLLFFRSRRQKTFQHNQCRTDTDGSIGKVEGACPEVGRSRRGQEIETILANTVKPCLY

SEQ ID NO: 36412 - protein, 1284 aa, Homo sapiens
  DOMAIN (422)..(467): kw TRANSCRIPTASE REVERSE II ORF2 domain identified by eMATRIX, accession number DM01354N, p-value=1.000e-40, raw score of 13.17
  DOMAIN (17)..(247): AP endonuclease family 1 domain identified by PFam, accession name AP_endonucleas1, E-value=2.8e-89, PFam score of 310.0
  misc_feature (1)...(1284): Xaa = X or * as defined in Table 2
RAKSPANIIMTGSNSHITILTLNVNGLNSPIKRHRLASWIKSQDPSVCCIQETHLMCRDTHRLKIKGWRKIYQANGKQKKAGVAILVSDKTDFKPTKIKRDKEGHYMMVKGSIQQEELTILNMYAPNTGAPRFIKQVLSDLQRDLDSHTLIMGDFNTPLSTLDRSTRQKVNKDTQELNSALHQADLIDIYRTLHPKSTEYTFFSAPHHSYSKIDHILGSEALLSKCKRTEIITNYLSDHSAIKLELRIKNLTQSRSTTWKLNNLLLNDYWVHNEMKAEIKMFFETNENKDTTYQNLXDAFKAVCRGKFIALNAHKRKQERSKIDTLTSQLKELEKQEQTHSKASRRQEITKIRAELKEIETQKTLQKINESRSWFFERINKIDRPLARLIKKKREKNQIDTIKNDKGDITTDPTEIQTTIREYYKHLYANKLENLEEMDTFLDTYTLPRLNQEEVESLNRPITGAEIVAIINSLSTKKSPGPDGFTAEFYQRYKEELVPFFLKLFQSIEKEGILPNSFYEASIILIPKPGRDTTKKENFRPISLMNIDAKILNKILANQIQQHIKKLIHHDQVGFIPGMQGWFNIRKSINVIQHINRAKDKNHMIVSIDAEKAFDKIQQPFMLKTINKIGIDGMYFKIIRAIYDKTTANIILNGQKLEAFPLKTGTRQGCPLSPLLFNIVLEFLARAIRQEKEIKGIQLGKEEVKLSLFADDMIVDLENPIVSAQNLLKLISNFSKLSGYKINVQKSQAFLYTNNRQTESQIMSELPFTIASKRIKYLGIQLTRDVKDLFKENYKPLLKEIKEDTKKWKNTPCSWVGRINIVKMAILPKVIYRFNAIPIKLPMTFFTELEKTTLKFIWNQKRARIAKSILSQKNKAGGITLPDFKLYYKATVTKTAWYWYQNRDIDQWNRTEPSEITPLTYNYLIFDKPEKNKQWGKDSLFNKWCWENWLAICRKLKVDPFLTPYTKINSRWIKDLNVRPKTIKTLEENLGITIQDIGVGKDFMSKTPKAMATKAKIDKWDLIKLKSFCTAKETTIRVNRQPTTWETIFTTYSSDKGLISRIYNELKQIYKKKTNNPIKKWAKDMNRHFSKEDIYAAKKHMKKCSSSLAIREMQIKTTMRYHLTPVRMAIIKKSGNNRCWRGCGEIGTLLHCWWDCKLVQPLWKSVWRFLRDLELEIPFDPAIPLLGIYPNDYKSCCYKDTCTRMFIAALFTIAKTWNQPKCPTMIDWIKKMWHIYTMEYYAAIKNDEFMSFVGTWMKLETIILSKLSQEQKTKHRIFSLIGGN

SEQ ID NO: 36413 - protein, 1218 aa, Homo sapiens
  DOMAIN (56)..(111): kw TRANSCRIPTASE REVERSE II ORF2 domain identified by eMATRIX, accession number DM01354Q, p-value=1.000e-40, raw score of 9.23
  DOMAIN (1)..(284): Reverse transcriptase domain identified by PFam, accession name rvt, E-value=8.2e-52, PFam score of 185.6
MDKFLDTYTLPRLNQEEVESLNRPITGAEIVAIINSLPTKKSPGPDGFTAKFYQSKILANQIQQHIKKLTHQDQVDFIPGMQGWFNIRKSINVIQHINRSKDKNHMIISIDAEKAFDKIQQHFMLKTLNKLRIDGTYLKIIRAIYDKPTANIILNGQKLEAFPLKTGTRQGCSLSPLLFNIVLEVLARAIRQEKEIKGIQLGKEEVKLSLFADDMIVYLENPIVSAQNLLKLISNFSKVSGYKINVQKSQAFLYTNNRQTESQIMSELPFTIASKRIKYLGIQLTRDVKDLFKENYKPLLKEIKEDTNKWKNIPCSWVGRINIVKMAILPKIIYRFNAIPIKLPMTFFTELEKTTLKFIWNQKRARIAKAILSQKNKAGGITLPDFKLYYKATVTKTAWYWYQNRDIDQWNRTEPSEITLHIYNFLIFDKPEKNEQWGKDSLFNKWCWENWLAICRKLKLDPFLTPYTKINSRWIKDLNVRPKTIKTLEENLGITIQDIGMGKDFMSKTPKAMATKAKIDKWDLIKLKNFCTAKETTIRVNRQPTKWEKIFTTYSSDKGLISRIYNELQQIYKKKTNNPIKKWAKDMNRHFSKEDIYAAKKHMKKCSPSLAIREMQIKTTMRYHVTPVRMATIKKSGNNSWRSCLQPWAAHSTTYRHPGTMEKKTSSGDTPTVFPSTLGRKKSTSAQLTELTALTLELSKGKVRNAPSKLDLSPFEMLYGWPFLTNDFLLDQETSELGKHVNSLARFQQELTQVAEAQPQEVGPPLFNPGYLVLPKQGGPYTILLSMPSAVKVTGIDSWIHHAQVKAWKTERAIPGSPAECLGYQCEEIRDLKLKIKRDKKMSKGYSSYSVPVIHSVIQSSSLCTTGTQKSRIEVWEPLPRFPKMYGYAWIPRQKFAAGAGPSWRTSVKAVQKGNVGSKPHHRDPTGALPSGAVRRGPPSSRPQNGRSTGSLHRVPGKARPQHQPVKAARREAVPYKATGVELPKTMGTHLLHQCDLDLPATFSLSLHIKYLKHRHSYSPHLHLLFTVMGPHARQMIRISGIDVDTRNLYKLNLKVKWLEVLDQEEPEYSRTTSRKKQGFPNSDEEDVLWMEKQLSCFCDKYQKWIPTRQLKGQLSYVKEADLIPDVMPPQALFHDDDEMEGNGAIDAGMEYVYNIDTLLRWSDGEEEGEGGEEGRGGGRGGEGGGKREEGEGKKEEEQGGWGGGQEVEEEGGGGGGN

SEQ ID NO: 36414 - protein, 1709 aa, Homo sapiens; identical to SEQ ID NO: 32700
  DOMAIN (797)..(842): kw TRANSCRIPTASE REVERSE II ORF2 domain identified by eMATRIX, accession number DM01354N, p-value=1.000e-40, raw score of 13.17
  DOMAIN (391)..(621): AP endonuclease family 1 domain identified by PFam, accession name AP_endonucleas1, E-value=7e-83, PFam score of 288.8

SEQ ID NO: 36415 - protein, 1221 aa, Homo sapiens; identical to SEQ ID NO: 35785
  DOMAIN (387)..(432): kw TRANSCRIPTASE REVERSE II ORF2 domain identified by eMATRIX, accession number DM01354N, p-value=1.000e-40, raw score of 13.17
  DOMAIN (473)..(746): Reverse transcriptase domain identified by PFam, accession name rvt, E-value=1.8e-87, PFam score of 304.0

SEQ ID NO: 36416 - protein, 1070 aa, Homo sapiens
  DOMAIN (154)..(195): kw TRANSCRIPTASE REVERSE II ORF2 domain identified by eMATRIX, accession number DM01354I, p-value=1.000e-40, raw score of 15.55
  DOMAIN (400)..(594): Reverse transcriptase domain identified by PFam, accession name rvt, E-value=8.6e-35, PFam score of 129.0
MVKGSIQQEELTILNIYAPNTGALRFIKQVLRDLQRDLDSHTIIMGDFHTPLSTLDRSTRQKVNKDIQELNSALHQEDLIDIYRTLHPKSTEYTFFSAPHHTYSKIDHIVGSKALLSKCKRTEIITNCLSDHSAIKLELRIKNLTQNRSTTWKLNNLLLNDYWVHNEMKAEIKMFFETNENKDTTYQNLWDTFKAVCRGKFIALNAHKRKQERSKIDTLTSQLKELEKQEQTHSKASRRQEITKIRAELKEIETQKTLQNINESRSWFFERINKIDRPLARLIKKKREKNQIDAIKNDKGDITTDPTEIQTTIREYYKHLYANKLENLEEMDKFLNTYTLPTLNQEEVESLNRPITGAEIVAIINSLPTKKSPGPDGFTAEFYQRYKEELVPFLLKPFQSIEKEGILPNSFYEASIILIPKPGRDTTKKENFRPISLMNIDAKILNKILAKRIQQHIKNLIHHDQVGFIPGMQGWFNIRKSINVIQHINRAKDKNHMIISIDAEKAFDKIQQPFMLKTLNKLDDMIVYLENPIVSAQNLLKLISNFSKVSGYKINIQKSQAFLYTNNRQTESQIMSELPFTIASKRIKYLGIQLTRDVKDLFKENHKPLLNEIKEDTNKWKNIPCSWVGRINIVKMAILPKVIYRFNAIPIKLPMTFFTELEKTTLKFIWNQKRARIAKSILSQKNKAGGITLPDFKLYYKATVTKTAWYWYQNRDIDQWNRTEPSERTPHIYNYLIFDKREKNKQWGKDSLFNKWCWENWLAICRKLKLDPFLTPYTKINSRWIKDLNVRPKTIKTLEENLGFTIQDIGMGKDFISKTPKAMATKAKIDKWDLIKLKSFCTAKETTIRVNRQPTKWEKIFATYSSDKGLISRIYNELKQIYKKKTNNPIKKWAKDMNRHFSKEDIYAAKKHMKKCSPSLAIREMQIKTTMRYHLTPVRMAIIKKSGNNRCWRGCGEIGTLLHCWWDCKLVQPLWKAVWRFLRDLELEIPFDPAIPLLGIYPKDYKSCCYKDTCTRRKQLDCAEPVEPRKVGDGEWSLTKWTRPGSRALPWPPEQAKPYPPTLPTLAQDF

SEQ ID NO: 36417 - protein, 1691 aa, Homo sapiens; identical to SEQ ID NO: 34342
  DOMAIN (795)..(836): kw TRANSCRIPTASE REVERSE II ORF2 domain identified by eMATRIX, accession number DM01354I, p-value=1.000e-40, raw score of 15.55
  DOMAIN (1031)..(1306): Reverse transcriptase domain identified by PFam, accession name rvt, E-value=1.3e-79, PFam score of 277.9

SEQ ID NO: 36418 - protein, 1357 aa, Homo sapiens
  DOMAIN (272)..(317): kw TRANSCRIPTASE REVERSE II ORF2 domain identified by eMATRIX, accession number DM01354N, p-value=1.000e-40, raw score of 13.17
  DOMAIN (287)..(535): Reverse transcriptase domain identified by PFam, accession name rvt, E-value=1.3e-45, PFam score of 164.9
MGDFNTPLSTLDRSTRQKVNKDTQELNSALHQADLTDIYRTLHPKSTEYTFFSAPHHTYSKIDHIVGSKALLSKWKRTEIITNYLSDHSAIKLELRIKNPTQSRSTTWKLNNLLLNDYWVHNKMKAEIKMFFETNENKDTTYQNLWDAFKAVCRGKFIPLNAHKRKQERSKIDTLTSQLKELEKQEQTHSKASRRQEITKIRAELKEIETQKTLQKINESRSWFFERINKTDRPLARLIKKKREKNQIDTIKNDKGDITTDPTEIQTTIREYYKHLYANKLENLEEMDKFLDTYTLPRLNQEEVESLNRPITGAEIVAIINSLPTKKGPGPDGFTAEFYQRYKEELHINRAKDKNHMIISIDAEKAFDKIQQPFMLKTLHKLGIDGTYFKIIRPIYHKPTANIILNGQKLEAFPLKTGTRQGCPLSPLLFNIVLEVLARAIRQEKEIKGIQSGKEEVKLSLFADDVIVYLENPIVSAQNLLKLISNFSKVSGYKINVQKSQAFLYTNNRQTESQIRSELPFTIASKRIKYLGIQLTRDVKDLYKENDKPLLKEIKEDTNKWKNIPCSWVGRINIVKMAILPKVIYRFNAIPIKLPMTFFTELEKTTLKFIWNQKRARITKAILSQKNKAGGITLPDYKLYYKATVTKTAWYWYQNRDIDQWNRIEPSEKTPHTYNYLNFDKPEKNKQWGKDSLFNKWCWENWLAICRKLKLDPFLTSYTKINSRWIKDLNVRPKTIKTLEENLGITIQDIGMGKDFMSKTPKAMATKDKIDKWDLIKLKSFCTAKETTIRVNRQPTKWENIFATYSSDKGLISRIYNELKQIYKKKTNNPIKKWAKDMNRHFSKEDIYAAKKHMKTCSSSLAIREMQIKTTMRYHLTPVRMAIIKKSGNNRCWENWLAICRKLKLDPFLTSYTKINSRWIKDLNVRPKTIKTLEENLGITIQDIGMGKDFMSKTPKAMATKDKIDKWDLIKLKSFCTAKETTIRVNRQPTKWENIFATYSSDKGLISRIYNELKQIYKKKTNNPIKKWAKDMNRHFSKEDIYAAKKHMKTCSSSLAIREMQIKTTMRYHLTPVRMAIIKKSGNNRAGSQLTRQFQSTAVGCGVCIGARTDRTMSSNYHGSSGKGKVCSQVSRVKPPPRASLVPGGSATELTLKTGNGPGGQHDGGSDLLAINLSSIHVLQRLLSFIWILKLYARIAFGQMGMHPFHGHVNHFNFPIGGKYLHDVILCHIPGGLDLERERLLLSCLRREGLGEPEELLELELREVLELPERLEAEEELEPLLEPVLVLEPELEVELDRDLVLLLPLEALCLFRVLSRPRSFSLDSLVAPLSFERSLDFSSERSLRLDHLQQHCPVETV

SEQ ID NO: 36419 - protein, 1078 aa, Homo sapiens
  DOMAIN (479)..(524): kw TRANSCRIPTASE REVERSE II ORF2 domain identified by eMATRIX, accession number DM01354N, p-value=1.000e-40, raw score of 13.17
  DOMAIN (563)..(838): Reverse transcriptase domain identified by PFam, accession name rvt, E-value=4.7e-88, PFam score of 306.0
MELKTKARELREECRSLRSRRNQLEERVSAMEDEMNEMKREGKFREKRIKRNEQSLQEIWDYVKRPNLRLIGVPESDAENGTKLENTLQDIIQEDFPNLARQANVQIQEIQRTPQRYSSRRATPRHIIVRFTKVEMKQKMLRAAREKDFKPTKIKRDKEGHYIMVKGSIQQEELTILNIYAPNTGAPRFIKQVLSDLQRDLDSHTLIMGDFNTPLSTLDRSTRQKVNKDTQELNSALHQADLIDIYRTLHPKSTEYTFFSAPHHTYSKIDHIVGSKALLSKCKRTQIITNYLSDHSAIKLELRIKNLTQSRSTTWKLNNLLLNVYWVHNEMKAEIKMFFETNENKDTTYQNLWDTFKAVCRGKFIALNAHKRKQERSKIDTLTSQLKELEKQEQTHSKASRRQEITKIRAELKEIETQKTLQKLNESRSWFFERINKIDRPLARLIKKKREKNQIDTIKNDKGDITTDPTEIQTTIREYYKHLYAYKLENLEEMDTFLDTYTLPRLNQEEVESLNRPITGSEIVAIINSLPTKKSPGPDGFTAKFYQRYKEELVPFLLKLFQSIEKEGILPNSFYDASIILIPKPGRDTTKKENFRPISLMNIDAKILNKILANRIQQHIKKLIHHDQVGFIPGMQGWFNIRKSINVIQHINRAKDKNHMIISIDAEKAFDKIQQPFMLKTLNKLGIDGTYFKIIRAIYDKPTANIILNGQRLEAFPLKTGTRQGCPLSPLLFNIVLEVLARAIRQEKEIKGIQLGKEEVKLSLFADDMIVYLENPIVSAQNLLKLISNFSKVSGYKINVQKSQAFLYTNNRQTESQIMSELPFTIASKRIKYLGIQLTRDVKNLFKENYKPLLKEIKEDTNKWKNIPCSWVGRINIVKMAILPKVIYRFNAIPIKLPMTFFTELEKTTLKFIWNQKRARIAKSILSQKNKAGGITLPDFKLYYKATVTKTARPHDWYRTESKSSWTYEGFLSPFVDEFEWHWNKLWRKVASVFSENIINIVTLQHVSATGFPRAPSLGILLKLENYPPILGDLSDGLPRVALIGPVLGSTACNPLAFVNLRRVCMLSSESIPSREAV

SEQ ID NO: 36420 - protein, 1023 aa, Homo sapiens
  DOMAIN (402)..(427): 7 kw REVERSE TRANSCRIPTASE RNA POLYMERASE domain identified by eMATRIX, accession number DM00895E, p-value=8.556e-11, raw score of 15.72
  DOMAIN (373)..(648): Reverse transcriptase domain identified by PFam, accession name rvt, E-value=2.4e-81, PFam score of 283.7
  misc_feature (1)...(1023): Xaa = X or * as defined in Table 2
MATLIPLLFHKHPHLTQRYQFNVRGGCPTSTSAIATLDPRTAVFPLMSVFQTSAPWPFWGFTHQTPVPQPLKVKIHSSADTAADIQANRVWSGPPANSKRPAAEEGKLTNRKDIHTKNPSVRHHHQRPKVDKTTKTGKKQRRKTGNSKKQSACPPPKERSSSTATEQSWTENDFDKLREGFRRSNYSKLQDEIQTKGKEVENLEKSLDECITRITNTEKGLKKLENYVKNEETSGANAINWKKGINKIDRPLARLIKRKREKNQIDAIKIDKGDITTDPTEIQTTIREYYKHLYANKLENLEEMDKFLDTYTLPRLNQEEVESLNRPITGAEIVAIINSLPTKKSPGPDGFTAEFYQRYKEELVPFLLKLFQSIEKEGILPNSFYEASIILIPKLGRDTTKKENFRPISLRNIDAKILNKILANRIQQHIKKLIHHDRVGFIPGMQGWFNIRKSINVIQHINRTKDKNHMIISIDAEKAFDNIQQPFMLKTLNKLGMDGTYLKIRRAIYDKPTANIILNGQKLEAFPLITGTRQGCPLSPLLYNIVLEVLARAIRQKKEIKGIQLGKEEVKLSLFADDMTVYLENPIISAQNLLQLISNFSKVSGYKINVQKSQAFLYTNNRQTESQIKRELPFTIASKRIKYLGIQLTRDVKDLFKENYKPLLNEIKEDTNKWKNIPCSWVGRINIVKMAILPKVIYRFNAIPIKLPMTFFTELEKTTLTLIWNQKRAHIVKSILSQKNKAGGITLPDFKLYYKATVTKTAWYWYQNRDIDQWNRTEPSEIMPHIYNYLIFDKPEKNEQWGKDSLFNKWCWENWLAICRKLKLDPFLTPYTKINSRWIKGLNVRPETIKTLEENLGITIQDIGMGKDFMSKTPKTMATKAKIDRWDLIKLKNFCTAKETTIRVNRQTTKWEKIFTTYSSEKGLISRIYNELKQIYKKKTNNPNKKRYSKRKHYCNRRXQRPCMLMPLKAFQWDKIWRLKMVILIILILMAAPHQLWNKAGQRRTLMNXQKXASEEXTVWRRC

SEQ ID NO: 36421 - protein, 1099 aa, Homo sapiens; identical to SEQ ID NO: 34343
  DOMAIN (22)..(67): kw TRANSCRIPTASE REVERSE II ORF2 domain identified by eMATRIX, accession number DM01354N, p-value=1.000e-40, raw score of 13.17
  DOMAIN (71)..(341): Reverse transcriptase domain identified by PFam, accession name rvt, E-value=7.5e-70, PFam score of 245.5

SEQ ID NO: 36422 - protein, 854 aa, Homo sapiens
  DOMAIN (50)..(96): kw TRANSCRIPTASE REVERSE II ORF2 domain identified by eMATRIX, accession number DM01354O, p-value=1.000e-40, raw score of 8.73
  DOMAIN (83)..(358): Reverse transcriptase domain identified by PFam, accession name rvt, E-value=1.5e-87, PFam score of 304.3
MKAEIKMFFETNENKDTTNQNLWDAFKAEEVESLNRPITGAEIGAIINSLPTKKSPGPDGFTAEFYQRYKEELVPFLLKLFQSIEKEEILPNSFYEASIILIPKPGRDTTKKENFRPISLMNIDAKILNKILANRIQQHIKKLIHHDQVGFFPGMQGWFNIRKSINVIQHINRAKDKNHMIISIDAEKAFDKIQQPFMLKTLNKLGIDGTYFKIIRAIYDKPTANIILNGQKLEAFPLKTGTRQGCPLSPLLFNILLEVLARAIRQEKEIKGIQLGKEEVKLSLFADDMIVYLENPIVSAQNLLKLISNFSKVSGYKINVQKSQAFLYTSNRQTESQIMSELPFTIASKRIKYLGIQLTRDVKDLFKENYKPLLKEIKEDTNKWKNIPCSWVGRINIVKMAILPKVIYRFNAIPIKLPMTFFTELEKTTLKFIWNQKRAHITKSILSQKNKAGGITLPDFKLYYKATVTKTAWYCYQNRDIDQWNRTEPSEITPHTYNYLIFDKPEKNKQWGKDSLFNKWCWENWLAIWRKLKLDPFLTPYTKINSRWIKDLNVRPKTIKTLEENLGITIQDIGMGKDFMSRTPKAMATKAKIDKWDLIKLKSFCTAKETTIRVNRQPTTWEKIFATYSSDKGLISRIYNELKQIYKKKTNNPIKKWEKDMNRHFSKEDIYAAKKHMKKCSSSLAIREMQIKTTMRYHLTPVRMAIIKKSGNNRLLRKCPRISTVQIKLSWPWVSHCSPTCHGLQEEQSSVWRRPDSAQKPLSRCSIDSPAGAGSHLGGTVSTRRAAKQGYGISEPLRSRVSHFRASAVKGMAFPSLCGQGYGVSEPLQSRAQRWVVGAAVGASQMWVPTCVMT

SEQ ID NO: 36423 - protein, 1139 aa, Homo sapiens
  DOMAIN (336)..(377): kw TRANSCRIPTASE REVERSE II ORF2 domain identified by eMATRIX, accession number DM01354I, p-value=1.000e-40, raw score of 15.55
  DOMAIN (582)..(857): Reverse transcriptase domain identified by PFam, accession name rvt, E-value=2.2e-88, PFam score of 307.0
MGKKQNRKTGNSKTQSASPPPKERSSSPATEQSWMENDFDELREEGFRRSNYSELREDIQTKGKEVENFEKNLEECITRITNTEKCLKELMELKTKARKLREECRSLRSRCDQLEERVSAMEDEMNEMKREGKFREKRIKRNEQSLQEIWDYVKRPNLRLIGVPESDVENGTKLENTLQDIIQENFPNLARQANVQIQEIQRTPQRYSSRRATPRHIIVRFTKVEMKEKMLRAAREKDRSTRQKVNKDTQELNSALHQADLIDIYRTLHPKSTEYTFFSAPHHTYSKIDHIVGSKALLSKCKRTEIITNYLSDHSAIKLELRIKNLTQSRSTTWKLNNLLLNDYWVHNEMKAEIKMFFETNENKDTTYQNLWDALKAVCRGKFIALNAHKGKQERSEIDTLTSQLKELEKQEQTHSKASRRQEITKIRAELKEIETQKTLQKINESRSWFFERINKIDRPLARLIKKKREKNQIDTIKNDKGDITTDPTEIQTTIREYYKHLYANKLENLEEMDTFLDTYTLPRLNQEEVESLNRPITGSETVAIINSLPTKKSPGPDGFTAEFYQRYKEELVPFLLKLFQSIEKEGILPNSFYEASIILIPKPGRDTTKKENFRPISLMNIDAKILNKILANRIQQHIKKLIHHDQVGFIPGMQGWFNIRKSINVIQHINRAKDKNHMIISIDAEKAFDKIQQPFMLKTLNKLGIDGTYFKIIRAIYDKPTANIILNGQKLEAFPLKTGTRQGCPLSPLLFNIVLEVLARAIRQEKEIKAIQLGKEEVKLSLFADDMIVYLENPIVSAQNLLKLISNFSQLSGYKINVQKSQAFLYTNNRQTESQIMGELPFTIASKRIKYLGIQLTRDVKDLFKENYKPLLKEIKEETNKWKNIPCSWVGRINIVKMAILPKVIYRFNAIPIKLPMTFFTELEKTTLKFIWNQKRARIAKSILSQKNKAGGITLPDFKLYYKATVTKTACGYQKQGADTSEPAGAVRGNLPNFPSPQECRDARSTAMAWLAAAVPKKGKTHILLPNSTRLASDILGAGLEKRCWGFTIQYELCVQYSLSPSLCLVSQCQTAVVQAPKHRGHVQWCLIPSAQSLASQEAPQSRVNRVSDARPHQLTDVSESPFHSGHTYIHSSLLNIR

SEQ ID NO: 36424 - protein, 1192 aa, Homo sapiens
  DOMAIN (412)..(453): kw TRANSCRIPTASE REVERSE II ORF2 domain identified by eMATRIX, accession number DM01354I, p-value=1.000e-40, raw score of 15.55
  DOMAIN (660)..(933): Reverse transcriptase domain identified by PFam, accession name rvt, E-value=5.3e-84, PFam score of 292.5
MPGHNLKWKLNRGTVLIETGIQLSTSTILGSASEPPSAPIPKAQVSSTEKLRNCIDDLKPFPALASELSRRAKALQIAGFPPMKVPRDTISKVCLDKTVGKLCHSGEESRKCTLICNNKHYPIQDNLQGYKTQNKFLNKEILELSALRRNAERRERDLMAKYSSLEAKLCQIESKYLILLQEMKTPVCSEDQGPTREVIAQLLEDALQVESQEQPEQAFVKPHLVSEYDIYGFRTVPEDDEEEKLVAKVRALDLKTLYLTENQEVSTGVKWENYFASTVNREMMCSPELKNLIRAGIPHEHRSKVWKWCVDRHTRKFKDNTEPGHFQTLLQKALEKQNPASKQIELDLLRTLPNNKHYSCPTSEGIQKLRNVLLAFSWRNPDIGYCQGLNSAIKLELRIKKLTQNCSTTWKLNNLLLNDYWVHNETKAEIKMFFETNENKDTTYQNLWDTFKAVCRGKFIALNAHKRKQERSRIDTLTSQLKELEKQEQTHSKASRRQEITKIKAELNEIETQKTLQKINESRSWFFERINKIDRPLARLIKKKREKNQIDTIKNDKGDITTNPTEIQTTIREYYKHLYSNKLENLQEMDTFLDTYTLPRLNQEEVDSLNRPITGSEIVAIINSLPTKKSPGPDGFTAEFYQRYKEELIPFLLKLFQSTEKEGILPNSFYEASIILIPKPGRDTTKKENFRPISLMNIDAKILNKILANQIQQHIKKLIHHDQVGFIPGMQGWFNICKSINVIQHINRTKDKNHMIISIDAEKAFDKIQQPFMIKTLNKLGIDGMYLKIIRAIYDKPTANIMLNGQKLEAFPLKTGTRQGCPLSPLLFNIVLEVLARAIRQEKEIKGIQLGKEEVKLSLFADDMIVYLENPIVSAQNLLKLISNFSKVSGYKINVQKSQAFLYPNNRQTESQIMRELPFTIASKRIKYLGIQLTRDVKDLFKEKYKPLLKEIKEDTNKWKNIPCSWVGRINIMKMAILPKLPMTFFTELEKTTLKFIWNQKRACIAKSILSQKNKAGGITLPDFKLHYKATVTKTAWYWYQNRDIDQWNRTEPSEITPHIYNYLIFDKPEKNKQWGKDSLFNKWCWENWLAICRKLKLDPFLTPYTKINSRWIKDLNVRPKTIKTLEENLGITIQDIGMGKDFMSKTPKAMATKAKIDKWDLIKSFCTAKETTIRVNRQPTKWEKIFATYSS

SEQ ID NO: 36425 - protein, 1457 aa, Homo sapiens
  DOMAIN (154)..(195): kw TRANSCRIPTASE REVERSE II ORF2 domain identified by eMATRIX, accession number DM01354I, p-value=1.000e-40, raw score of 15.55
  DOMAIN (400)..(675): Reverse transcriptase domain identified by PFam, accession name rvt, E-value=1.2e-87, PFam score of 304.6
MVKGSIQQEELTILNIYAPNTGAPRFIKQVLSDLQRDLDSHTLIMGDFNTPLSTLDRSTRQKVNKDTQELNSALHQADLIDIYRTLHPKSTEYTFFSAPHHTYSKIDHILGSKALLSKCKRTEIITNYLSDHSAIKLELRIKNLTQSRSTTWKLNNLLLNDYWVHNEMKAEIKMFFETNENKDTTYQNLWDAFKAVCRGKFIALNAYKRKQERSKIDTLTSQLKELEKQEQTHSKASRRQEITKIRAELKEIETQKTLQKINESRSWFFERINKIDRPLARLIKKKREKNQIDTIKNDKGDITTDPTEIQTTIREYYKHLYANKLENLEEMDTFLDTYTLPRLNQEEVESLNRPITGSEIVAIINSLPTKKSPGPDGFTAEFYQRYMEELVPFLLKLFQSIEKEGILPNSFYEASIILMPKPGRDTTKKENFRPISLMNIDAKILNKILANRIQQHIKKLIHHDQVGFIPGMQGWFNIRKSINVIQHINRAKDKNHMIISIDAEKAFDKIQQPFMLKTLNKLGIDGTYFKIIRAIYDKPTANIILNGQKLEAFPLKTGTRQGCPLSPLLFNIVLEVLDRAIRQEKEIKGIQLGKEEVKLSLFADDMIVYLENPIVSAQNLLKLISNFSKVSGYKINVQKSQAFLYTNNRQTESQIMGELPFTIASKRIKYLGIQLTRDVKDLFKENYKPLLKEIKEETNKWKNIPCSWVGRINIVKMAILPKVIYRFNAIPIKLPMTFFTELEKTTLKFIWNQKRTRIAKSILSQKNKAGGITLPDFKLYYKATVTKTAWYWYQNRDIDQWNRTEPSEIMPHIYNYLIFDKPEKNKQWGKDSLFNKWCWENWLAICRKLKLDPFLTPYTKINSRWIKDLNVKPKTIKTLEENLGITIQDIGMGKDFMSKTPKAMATKAKIDKWDLIKLKSFCTAKETTIRVNRQPTTWEKIFATYSSDKGLISRIYNELKQIYKKKTNNPIKKWAKDMNRHFSKEDIYAAKKHMKKCSSSLAIREMQIKTTMRYHLTPVRMAIIKKSGNNRCWRGCGEIGTLLHCWWDCKLVQPLWKSVWRFLRDLELEIPFDPAIPLLDIYPNEYKSCCYKDTCTQNKIPRNPTYKGCEGPLQGELQTTAQQNKRGHKQMEEHSMLMGRKNQHRENGHTAQAIWKKLKLDPFLTPYTKIHSRWIKDFNVRPKTIKTLEENLGNTIQDVGLGKDFISKTPKAMATKAKTDKWDLIKLKSFCTAKETTIRVNRQPTKWEKIFAIYSSDKGLISRIYKELKQTYKEKTNNLIKKWVKDMNRHFSKEDFYAAKRDMKKCSSSLAIREMQIKTTTRYHLTAVRMAIIKKSGNNRYWRGCGEIGTLLHCWWDCKLVQSLWKTVWRFLRDLELEIPFDPAIPLLGIYPKDCKSCCYKDTCTRIFIVALFTIAKTWNQAKCPTMIDWIKEMWHIHTMEYYAAIKKDEFMSFVGT

SEQ ID NO: 36426 - protein, 607 aa, Homo sapiens
  DOMAIN (154)..(195): kw TRANSCRIPTASE REVERSE II ORF2 domain identified by eMATRIX, accession number DM01354I, p-value=1.000e-40, raw score of 15.55
  DOMAIN (400)..(585): Reverse transcriptase domain identified by PFam, accession name rvt, E-value=3.3e-11, PFam score of 50.7
MVKGSIQQEELTILNTYAAHTGAPRLIKQVLSDLQRDLDSHTIIMGDFNTPLSTLDRSTRQKVNKDTQELKSALHQADLTDIYRTLHHKSTEYTFFSAPHHIYSKIDHILGSKALLSKCKRTEIITNYLSDHSAIKLELWIKNLTQNHSTTWELNNLLLNDYWVHNEMKAEIKMFFETNENKDTTYHNLWDTFKAVCRGKFIPLNAHKRKQERSKIDTLTSQLKELEKQEQTHSKASRRQEITKIRAELKEIETQKTLQKINESRSWFFERINKIDRLLARLIKKKREKNQIDAIKNDKGDITTDPTEIQTTIREYCKHLYANKLENLEEMDKFLDTYTLPRLNQEEVESLNRPITGAEIVAIINSLPTKKSPGPDGFTAKFYQRYKEELVPFLLKLFQSIEKEGILPNSFYEASIILIPKPGRDTTKKENFRPISLMNIDAKILNKKLAKRIQQHIKKLIHHDQVGFIPGMQGWFNIRKSINVIQHINRAKDKNHMIISIDAEKAFDKIQQPFMLKTLNKLGIKYLGIHLTRDVKDLFKENYKPLLKEIKEDRNKWKNIPCSWVGRINIVKMAILPKNILITLQLLLVLPELSTLIPLWLPALAGQ

SEQ ID NO: 36427 - protein, 1483 aa, Homo sapiens
  DOMAIN (970)..(1011): kw TRANSCRIPTASE REVERSE II ORF2 domain identified by eMATRIX, accession number DM01354I, p-value=1.000e-40, raw score of 15.55
  DOMAIN (1218)..(1483): Reverse transcriptase domain identified by PFam, accession name rvt, E-value=1.8e-74, PFam score of 260.8
MGKEECLEKMPVKNQNKSSSQAEGTYRRGFSTKWTEGISIKSEIDTSLNRQMFSFYRYPSFSLLQSLPPPESTLINRSSPLSSTKPEVYSTDLAQKHKIISFFAWLLLPQTHFYLDTPSQVRSALVLYAGPAQGLRKEPKVGLAQSKYFMGMQLLSSIGFPSVETNIKSNNAAKVRPLEAFDPEWDMMKAASYGRGLVNPIWAAVAWNSCLSLFFEQSGDHSFGARMSFCKSTPVTPLVSERIPADVKFCPSCALVQGSQGLERLCHTGSINPIVCQPARPPHSWGEGKLCVLKKATTPCTNSHPVANQQDAGVQRNLLLWSSPGSLPGPEQDIGKGGERTWGANERFPAQMAPPLGAGHRQTKDSNNLCRLKCPCLTALKRIVVLPARSLRSENGQTASSSGSLTPKYPNWEAPPTRGQLTPHTARYSSETKLPEKRSGSSICGSPISTVLQPPLLIPRKTGSGVDLQQTPTDVQLRVLTVRRKTNKQKGHPHQKPLCTSPSSKTKEKSFKDLMELKTTAQELHDECTSLSNRCNQLEEIVSAMEDEMNEMKREEKFREKRMKRNKQSLQEIWDYVKRPNLRLIGVPESDGENETNLENTLQDIIQENFPNLARQANIQIQEIQRMPQRYSSRRATPRHIIVRFTKVEMKEKILRADREKGQVTHKGKPIRLPADLSAETLQARREWGPIFNILKEKNFQPRISYPAKLSFISEGEIKYFTDKQMLRDFVTTRPALRELLKHRLANWIKSQDPSVCCIQETHLTCRDTHRLKIKGWRKIYQANGKHKKAGVAILVSDKTDFKPTKIKRDKEGHYIMVKGSIQQEELTILNIYAPNTGARRFVKQVLSDLQRDLDSHTIIMGDFNTPLSTLHRSTRQNVNKDIQELNSALHQADLIDIYRTVHPKSTESTFFSAPHHTYSKIDHIIGSKALLSKCKRTEIITNCLSDHSAIKLELRIKKLTQNRSTTWKLNNLLLNDYWVPNEMKAEIKMFFETNENKDTTYQNLWDTIKAACRGKFIALSAHKRKQERSKIDILTSQLKELEKQEQTHSKASRRQEITKIRAELKETETQKTFQKINESRSWFFEKIIKIDRLLARLIKKKREKNQIDAIKNDKGDITTDPTEIQTTIREYYKHLYANKLENLEEMDKFLDTYTLPRLNKEETESLNRPITGSEIEAIINSLATKKSPGPDGFTAEFYQRYKEELVPFLLKLFQSIEKQGILPNSFYEASIILIPKPGRDTTKKENFRPISLMNIDAKILNKILASRIQQPIKKLIHHDQVGFIPGMHGWFNIRKSINVIQPINRTKDKNHMIISIDAEKAFNKIQQHFMLKTLNKLGIDGTYLKIIRAIYDKPTANIILNGQKLEAFPLKTGTRQGCPLSPLLFNIVLEVLARAIRQEKEIKGIQLEKEEVKLSLFADDMIVYLENPIVSAQNLLKLISNFSKVSGYKINVQKSQAFLYTNNRQTESQIMRELPFTIASKE

SEQ ID NO: 36428 - protein, 957 aa, Homo sapiens
  DOMAIN (267)..(312): kw TRANSCRIPTASE REVERSE II ORF2 domain identified by eMATRIX, accession number DM01354N, p-value=1.000e-40, raw score of 13.17
  DOMAIN (351)..(626): Reverse transcriptase domain identified by PFam, accession name rvt, E-value=1.7e-88, PFam score of 307.4
AWKGTTDRSTRQKVNKDTQELNSALHQADLIDIYRTLHPKSTEYTFFSAPHHTYSKIDHIVGSKALLSKCKRTEIITNYLSDHSAIKLELRIKNFTQSRSTTWKLNNLLLNDYWVHNEMNAEIKMFFETNENKDTTYQNLWDAFKAVCRGKFIALNAHKRKQERSKIDTLTSQLKELEKQEQTHSKASRRQEITKIRAELKEIETQKTLQKINESRSWFFERITKSDRPLARLIKKKREKNQIDTIKNDKGDITTDPTEIQTTIREYYKQLYANKLENLEEMNKFLDTYTLPRLNQEEVESLNRPITGSEIVAIINSLPTKKSPGPDGFTAEFYQRYKEELVPFLLKLFQSIEKEGILPNSFYEASIILIPKPGRDTTKKENFRPISLMNIDAKILNKILANRIQQHIKKLIHHDQVGFIPGMQGWFNIRKSINVIQHINRAKDKNHMIISIDAEKAFDKIQQPFMLKTLNKLGTDGTYLKIIRAIYDKPTANIILNGQKLEAFPLKTGTRQGCPLSPLLFNIVLEVLARAIRQEKEIKGIQLGKEEVKLSLFADDMIVYLENPIVSAQNLLKLISNFSKVSGYKINVQKSQAFLYTNNRQTESQIMSELPFTIASKRIKYLGIQLTRDVKDLFKENYKPLLTEIKEDTNKWKNIPCSWVGRINIVKTAILPKVIYRVNAIPIKLPMTVFTELEKTTLKFIWNQKRARIAKSILSQKNKAGGITLPDFKLYYKATVTKTAWYWYQNRDIDQWNRTEPSEITPHTYNYLIFDKPEKNKQWGKDSLFNKWCWENWLAICRKLKLDPFLTPYTKINSRWIKDLNVRPKTIKTLEENLGITIQDIGMGKDFMSKTPKAMATKAKIDKWDLIKLKSFCTAKETTIRVNRCSKGIPKSERRNYLATACEDILGQKLCNQGKERKEERKKERRREREGKERERERKKKKGRKEGEKEKERKVKK

SEQ ID NO: 36429 - protein, 1099 aa, Homo sapiens; identical to SEQ ID NO: 34349
  DOMAIN (110)..(151): kw TRANSCRIPTASE REVERSE II ORF2 domain identified by eMATRIX, accession number DM01354I, p-value=1.000e-40, raw score of 15.55
  DOMAIN (356)..(597): Reverse transcriptase domain identified by PFam, accession name rvt, E-value=6.8e-65, PFam score of 229.0

SEQ ID NO: 36430 - protein, 1063 aa, Homo sapiens
  DOMAIN (154)..(195): kw TRANSCRIPTASE REVERSE II ORF2 domain identified by eMATRIX, accession number DM01354I, p-value=1.000e-40, raw score of 15.55
  DOMAIN (400)..(625): Reverse transcriptase domain identified by PFam, accession name rvt, E-value=7e-52, PFam score of 185.8
MVKGSIQQEELTILNIYAPNTGAPTFIQQVLSDLQRDLDSHTLIIGDFNTPLSTSDRSTRQKVNKDTQELNSALHQADLIDIYRTLHPKSTEYTFFSAPHHTYSKIDHILGSKALLSKCKRTEIITNYLSDHSAIKLELMIKNLTQNHSTIWKLNNLLLNDYWVHKEMKAEIKMFFETNENKDTTYQNLWDTFKAVCRGKFIALNAHKRKQERSKIDTLTSQLKELEKQEQTLSKASRRQEITKIRAELKEIETQKTLQKINESRSRFFERINKIDSLLARLIKKKREKNQIDAIKNDKGDITTNPTEIQTTIREYYKHLYANKLENLEEMDKFLDTYTLPRLNQEEVESLNRPITGAEIVAIINSLPTKKSPGPDGFTAEFYQRYKEEQVPFLLKLFQSIEKEGILPNSFYVSSIILIPKPGRDTTKRENFRPISLMNIDAKILNKILANRIQQHIKKLIHHDQVGFIPGMQGWFNICKSINVIQHINRTKDKNHMIISIDAEKAFDKIQQPFMLKTLNKLVLEVLARAIRQEKEIKGIQLGKEEVKLSLFADDMIVYLENPIVSAQNLLKLISNFSKVSGYKINVQKSQAFLYTNNRQTESQIMSELPFTIASKRIKYLGIQLTRDVKDLFKENYKPLLKEIKEDTNKWKNIPCSWVGRINIVKMAILPKVIYRFNAIPIKLPMTFFTELGKTALKFIWNQKRARITKSILSQKNKAGGITLPDFQLYCKATVTKTAWFPSGDVGLEADFSPSHTLKTQFFSCLAEFAAASCFFQRMNGFGMAMTTTYSTGAAESPLPSCSIDQGDDTKLHRARSPGRTFPAAAGIPAAAAPDGPPLSLLHKLWFPVELGGRALPRAEESHGEVAALGVMVVAQGGKNQGEEARSTPWLRPTSHLPPCSSSSAWWTEQTDAHPLLFLLCLGIYLLNALSNLSMVALVRSDGALRSPMYYFLGHLSLVDVCFTTVTVPRLLAGLLHPGQAISFQACFAEMYFFVALGITESYLPAAMSYDRATAACRPLRYGALVTPWALRLAARYDRLASVVYAVITPTLNPFINSLRNKE

SEQ ID NO: 36431 - protein, 1104 aa, Homo sapiens
  DOMAIN (411)..(456): kw TRANSCRIPTASE REVERSE II ORF2 domain identified by eMATRIX, accession number DM01354N, p-value=1.000e-40, raw score of 13.17
  DOMAIN (5)..(235): AP endonuclease family 1 domain identified by PFam, accession name AP_endonucleas1, E-value=7e-83, PFam score of 288.8
SNSHITILTLNVNGLNAPIKRHRLANWIKSQDPSVCCIQETHLTCRDTHRIKIKGWREIYQANGKQKKAGVAILVSDKTDFKPTKIKRDKEGHYMMVKGSIQQEELTTLNIYAPNTGAPRFIKQVLRDLQRDLDSHTLIMGDFNTPLSTLDRSTRQKVNKDIQDLNSALHQVDLIDIYRTLHPKSTEYTFFSALHHIYSKIDHIVGSKALLSKYKTTEIITNCLSDHSAIKLELRIKKLTQNRSTTWKLNNLLLNDYWVHNKMKAEINTLFETNENKDTTYQNLWDTFKAVCRGKFIALNAHKRKQERSKIDTLTSQLKELEKQEQTHSKASRRQEITKIRAKLKEIETQKILQKINESRSWFFEKINKIDRPLARPIKKKREKNQIDAIKNDKGDITTDPTEIQTTIREYYKHLYANKLENLEEMDKFLNTYTLPRLNQEEVESLNKPITGSEIEAIINSLPIKKSPGPDGFIAKFHQRYKEELEASIILIPKPGRDTTKKENFRPIPLMNIDAKILNKILANRIQQHIKKLIHHDQVGFIPGMQGSFNICKSINVIQDINRTNDKNHMIISIDAEKAFDKIQQPFILKTLNKLGIDGTYLKIIRAIYDKPTANIILNGQKLEAFPLKTGTRQGCPLSPLLFNIVLEVLARAIRQEKEIKGIQLGQEEVKLSLFADDMIVYRENPIVSTQNLHKLISNFSKVSGYKINVQKSQAFLYTNNRQTESQIMSELPFTIASKRIKYLGIQLTRDVKDLFKENYKPLLKEIKEDTNKWKNIPCSWVGRINIVKMAILPKVIYRFNAIPIKLPMTFFTELEKTTLKFIWNQKRARIAKSILSQRNKAGGITLPDFKLYYKATVTKTAWYWYQNRDIDQWNRTEPSEIMPHIYNHLIFDKPDKNKKWGNDSLFNKWCWENWLAICRRKLKLDPFLTPYTKINSRWIKDLNVRPKTIKTLEENLGNTIQDIGMGKDFMSTTPKAMATKAKIDKWDLIKLKSFCTAKETTITVNRQPTEWEKIFTIYPSDKGLISRIYKELKQIYKKRTNNPINKWVKDMNRHFSKEDIYTAKRHMKKCSSSLAIREMQIKTTLRYHLIPVRMAIIKKSGNN

SEQ ID NO: 36432 - protein, 1152 aa, Homo sapiens
  DOMAIN (154)..(195): kw TRANSCRIPTASE REVERSE II ORF2 domain identified by eMATRIX, accession number DM01354I, p-value=1.000e-40, raw score of 15.55
  DOMAIN (400)..(675): Reverse transcriptase domain identified by PFam, accession name rvt, E-value=1.2e-87, PFam score of 304.6
MVKGSIQQEELTILNIYAPNTGAPRFIKQVLSDLQRDLDSHTLIMGDFNTPLSTLDRSTRQKVNKDTQELNSALHQADLIDIYRTLHPKSTEYTFFSAPHHTYSKIDHILGSKALLSKCKRTEIITNYLSDHSAIKLELRIKNLTQSRSTTWKLNNLLLNDYWVHNEMKAEIKMFFETNENKDTTYQNLWDAFKAVCRGKFIALNAYKRKQERSKIDTLTSQLKELEKQEQTHSKASRRQEITKIRAELKEIETQKTLQKINESRSWFFERINKIDRPLARLIKKKREKNQIDTIKNDKGDITTDPTEIQTTIREYYKHLYANKLENLEEMDTFLDTYTLPRLNQEEVESLNRPITGSEIVAIINSLPTKKSPGPDGFTAEFYQRYMEELVPFLLKLFQSIEKEGILPNSFYEASIILMPKPGRDTTKKENFRPISLMNIDAKILNKILANRIQQHIKKLIHHDQVGFIPGMQGWFNIRKSINVIQHINRAKDKNHMIISIDAEKAFDKIQQPFMLKTLNKLGIDGTYFKIIRAIYDKPTANIILNGQKLEAFPLKTGTRQGCPLSPLLFNIVLEVLDRAIRQEKEIKGIQLGKEEVKLSLFADDMIVYLENPIVSAQNLLKLISNFSKVSGYKINVQKSQAFLYTNNRQTESQIMGELPFTIASKRIKYLGIQLTRDVKDLFKENYKPLLKEIKEETNKWKNIPCSWVGRINIVKMAILPKVIYRFNAIPIKLPMTFFTELEKTTLKFIWNQKRTRIAKSILSQKNKAGGITLPDFKLYYKATVTKTAWYWYQNRDIDQWNRTEPSEIMPHIYNYLIFDKPEKNKQWGKDSLFNKWCWENWLAICRKLKLDPFLTPYTKINSRWIKDLNVKPKTIKTLEENLGITIQDIGMGKDFMSKTPKAMATKAKIDKWDLIKLKSFCTAKETTIRVNRQPTTWEKIFATYSSDKGLISRIYNELKQIYKKKTNNPIKKWAKDMNRHFSKEDIYAAKKHMKKCSSSLAIREMQIKTTMRYHLTPVRMAIIKKSGNNRCWRGCGEIGTLLHCWWDCKLVQPLWKSVWRFLRDLELEIPFDPAIPLLDIYPNEYKSCCYKDTCTQNKIPRNPTYKGCEGPLQGELQTTAQQNKRGHKQMEEHSMLMGRKNQHRENGHTAQ

SEQ ID NO: 36433 - protein, 1056 aa, Homo sapiens; identical to SEQ ID NO: 34350
  DOMAIN (316)..(361): kw TRANSCRIPTASE REVERSE II ORF2 domain identified by eMATRIX, accession number DM01354N, p-value=1.000e-40, raw score of 13.17
  DOMAIN (400)..(675): Reverse transcriptase domain identified by PFam, accession name rvt, E-value=2.4e-85, PFam score of 297.0
  misc_feature (1)...(1056): Xaa = X or * as defined in Table 2

SEQ ID NO: 36434 - protein, 1585 aa, Homo sapiens
  DOMAIN (154)..(195): kw TRANSCRIPTASE REVERSE II ORF2 domain identified by eMATRIX, accession number DM01354I, p-value=1.000e-40, raw score of 15.55
  DOMAIN (400)..(675): Reverse transcriptase domain identified by PFam, accession name rvt, E-value=3.6e-89, PFam score of 309.6
  misc_feature (1)...(1585): Xaa = X or * as defined in Table 2
MVKGSIQQEELTILNIYAPNTGAPRFIKQVLSDLQRDLDSHTLIMGDFNTPLSTLDRSTRQKVNKDTQELNSALHQADLIDIYRTLHPKSTEYTFFSAPHHTYSKIDHIVGSKALLSKCKRTEIITNYLSDHSAIKLELRIKNLTQSRSTTWKLNNLLLNDYWVHNEMKAEIKMFFETNENKDTTYQNLWDAFKAVCRGKFIALNAYQRKQERSKIDTLTSQLKELEKQEQTHSKASRRQEITKIRAELKEIETQKTLQKINESRSWFFERINKIDRPLARLIKKKREKNQIDTIKNDKGDITTDPTEIQTTIREYYKHLYANKLENLEEMDTFLDTYTLPRLNQEEVESLNRPITGSEIVAIINSLPTKKSPGPDGFTAEFYQRYKEELVPFLLKLFQSIEKEGILPNSFYETSIILIPKPGRDTTKKENFRPISLMNIDAKILNKILANRIQQHIKKLIHHDQVGFIPGMQGWFNIRKSINVIQHINRAKDKNHMIISIDAEKAFDKIQQPFMLKTLNKLGIDGTYFKIIRAIYDKPTANIILNGQKLEAFPLKTGTRQGCPLSPLLFNIVLEVLARAIRQEKEIKGIQLGKEEVKLSLFADDMIVYLENPIVSAQNLLKLISNFSKVSGYKINVQKSQAFLYTNNRQTESQIMSELPFTIASKRIKYLGIQLTRDVKDLFKENYKPLLKEIKEETNKWKNIPCSWVGRINIVKMAILPKVIYRFNAIPIKLPMTFFTELEKTTLKFIWNQKRARIAKSILSQKNKAGGITLPDFKLYYKATVTKTAWYWYQNRDIDQWNRTEPSEIMPHIYNYLIFDKPEKNKQWGKDSLFNKWCWENWLAICRKLKLDPFLTPYTKINSRWIKDLNVKPKTIKTLEENLGITIQDIGVGKDFMSKTPKAMATKDKIDKWDLIKLKSFCTAKETTIRVNRQPTTWEKIFATYSSDKGLISRIYNELKQIYKKKTNNPIKKWAKDMNRHFSKEDIYAAKKHMKKCSSSLAIREMQIKTTMRYHLTPVRMAIIKKSGNNRPEKTKSFLPPLPTQSSIHSGFLEHCVEQDSEALSGEAGKSLMFAMGVGSERAKHSLSDDGQLRGAKVATALTPSPTPHSDADDNTHLALRHDEQMSASEGMKFKFHSGEKVLCFEPDPTKARVLYDAKIVDVIVGKDEKGRKIPEYLIHFNGWNRSWDRWAAEDHVLRDTDENRRLQRKLARKAVARLRSTGRKKKRCRLPGVDSVLKGLPTEEKDENDENSLSSSSDCSENKDEEISEESDIEEKTEVKEEPELQTRREMEERTITIEIPEVLKKQLEDDCYYINRRKRLVKLPCQTNIITILESYVKHFAINAAFSANERPRHHHVMPHANMNVHYIPAEKNVDLCKEMVDGLRITFDYTLPLVLLYPYEQAQYKKVTSSKFFLPIKESATSTNRSQEELSPSPPLLNPSTPQSTESQPTTGEPATPKRRKAEPEALQSLRRSTRHSANCDRLSESSASPQPKRRQQDTSASMPKLFLHLEKTSPAVLTPSGVLLSIILLELPKVIPVPFCVQVPISLCTSCPCHIHKLLRERFLAEYHDDFFPESAYVAAX

SEQ ID NO: 36435 - protein, 1127 aa, Homo sapiens
  DOMAIN (154)..(195): kw TRANSCRIPTASE REVERSE II ORF2 domain identified by eMATRIX, accession number DM01354I, p-value=1.000e-40, raw score of 15.55
  DOMAIN (400)..(675): Reverse transcriptase domain identified by PFam, accession name rvt, E-value=5.1e-89, PFam score of 309.1
MVKGSIQQEELTILNIYAPNTGAPRFIKQVLSDLQRDLDSHTLIMGDFNTPLSTLDRSTRQKVNKDTQELNSALHQADLIDIYRTLHPKSTEYTFFSAPHHTYSKIDHILGSKALLSKCKRTETITNYLSDHSAIKLELRIKNLTQSRSTTWKLNNLLLNDYWVHNEMKAEIKMFFETNENKDTTYQNLWDAFKAACRGKFIALNAYKRKQERSKIDTLTSQLKELEKQEQTHSKASRRQEITKIRAELKEIETQKTLQKINESRSWFFERINKIDRPLARLIKKKREKNQIDTIKNDKGDITTDPTEIQTTIREYYKHLYANKLENLEEMDTFLDTYTLPRLNQEEVESLNRPITGSEIVAIINSLPTKKSPGPDGFTAEFYQRYKEELVPFLLKLFQSIEKEGILPNSFYEASIILIPKPGRDTTKKENFRPISLMNIDAKILNKILANRIQQHIKKLIHHDQVGFIPGMQGWFNIRKSINVIQHINRAKDKNHMIISIDAEKAFDKIQQPFMLKTLNKLGIDGTYFKIIRAIYDKPTANIILNGQKLEAFPLKTGTRQGCPLSPLLFNIVLEVLARAIRQEKEIKGIQLGKEEVKLSLFADDMIVYLENPIVSAQNLLKLISNFSKVSGYKINVQKSQAFLYTNNRQTESQIMGELPFTIASKRIKYLGIQLTRDVKDLFKENYKPLLKEIKEDTNKWKNIPCSWVGRINIVKMAILPKVIYRFNAIPIKLPMTFFTELEKTTLKFIWNQKRARIAKSILSQKNKAGGITLPDFKLYYKATVTKTAWYWYQNRDIDQWNRTEPSEIMPHIYNYLIFDKPEKNKQWGKDSLFNKWCWENWLAICRKLKLDPFLTPYTKINSRWIKDLNVKPKTIKTLEENLGITIQDIGVGKDFMSKTPKAMATKDKIDKWDLIKLKSFCTAKETTIRVNRQPTTWEKIFATYSSDKGLISRIYNELKQIYKKKTNNPIKKWAKDMNRHFSKEDIYAAKKHMKKCSSSLAIREMQIKTTMRYHLTPVRMAIIKKSGNNRLQNGSSIDSLYHEPGKAADTQCQPVKAARRGAVPCKATGAELPKAMGTHLLHQHDLDCLEWQRRSSVLLNSLVVHEPEALVASPTEFTPETEPLPA

SEQ ID NO: 36436 - protein, 1115 aa, Homo sapiens
  DOMAIN (154)..(195): kw TRANSCRIPTASE REVERSE II ORF2 domain identified by eMATRIX, accession number DM01354I, p-value=1.000e-40, raw score of 15.55
  DOMAIN (400)..(675): Reverse transcriptase domain identified by PFam, accession name rvt, E-value=2.8e-87, PFam score of 303.4
MVKGSIQQEELTILNIYAPNTGAPRFIKQVLSDLQRDLDSHTLIMGDFNIPLSTLDRSTRQKVNKDTQELNSALHQADLIDIYRTLHPKSTEYTFFSAPHHTYSKIDHIVGSKALLSKCKRTEIITNYLSDHSAIKLELRIKNLTQSRSTTWKLNNLLLNDYWVHNEMKAEIKMFFETNENKDTTYQNLWDAFKAVCRGKFIAVNAHKRKQERSKIDTLTSQLKELEKQEQTHSKASRRQEITKIRAELKEIETQKTLQKINESRSWFFERINKIDRPLARLIKKKREKNQIDTIKNGKGDITTDPTEIQTTIREYYKHLYANKLENLEEMDTFLDTYTLPRLNQEEVESLNRPITGSEIVAIINSLPTKKSPGPDGFTAEFYQRYKEELVPFLLKLFQSIEKEGILPNSFYEASIILIPKPGRDTTKKENFRPISLMNIDAKILNKILANQIQQHIKKLIHHDQVGFIPGMQGWFNIRKSINVIQHINRAKDKNHMIISIDAEKAFDKIQQPFMLKTLNKLGIDGTYFKIIRAIYDKPTANIILNGQKLEAFPLKNGTRQGCPLSPLLFNIVLEVLARAIRQEKEIKGIQLGKEEVKLSLFADDMIVYLENPIVSAQNLLKLISNFSKVSGYKINVQKSQAFLYTNNRQTERQITSELPFTIASKRIKYLGIQLTRDVKDLFKENYKPLLKEIKEDTNKWKNIPCSWVGRINIVKMAILPKVIYRFNAIPIKLPMTFFTELEKTTLKFIWNQKRARIAKSILSQKNKAGGITLPDFKLYYKATVTKTAWYWYQNRDIHQWNRTEPSEIMPHIYNYLIFDKPEKNKQWGKDSLFNKWCWENWLAICRKLKLDPFLTPYTKINSRWIKDLNVRPKTIKTLEENLGITIQDIGVGKDFMSKTPKAMATKAKIDKWDLIKLKSFCTAKETTIRVNRQPTTWEKIFATYSSDKGLISRIYNELKQIYKKKTNNPIKKWAKDMNRRFSKEDIYAAKKHMKKCSSSLAIREMQIKTTMRYHLTPVRMAIIKKSGNNRQTGSGVDLQHTPADLQQRGLTVRRKMNKHKGIASTSTKRTSTQKPHLKVTKIKDQRPTLQELLKEALNMERNNQYQPLQKHTKF

SEQ ID NO: 36437 - protein, 1260 aa, Homo sapiens
  DOMAIN (272)..(317): kw TRANSCRIPTASE REVERSE II ORF2 domain identified by eMATRIX, accession number DM01354N, p-value=1.000e-40, raw score of 13.17
  DOMAIN (356)..(631): Reverse transcriptase domain identified by PFam, accession name rvt, E-value=2.6e-81, PFam score of 283.5
MGDFNTPLSTLDRSTRQKVNKDTQELNLALHQADLIDIYRTLHPKSTEYTFFSAPHHTYSKIDRIVGSKALLSKCKRTEIITNYLSHHSAIKLELRIKNLTQNRSTTWKLNNLLLNDYWVHSEMKAEIKMFFETNENKDTTYQNLWDTFEAVCRGKFIALNGHKRKQERSKIDTLTSQLKELEKQEQTHSKASRRQEITKIRAELKEIEIQKTLQKINESRSWFFERINKIDRPLARLIKKKREKNLIDAIKTDKGDITTNPTEIQTTIREYYKHLYANKLENREEMDKFLDTYTLPRLNQEEVESLNRTITGSEIVARINSLPTKKSPGPDGFTAEFYQRYKEELVPFLLKLFQSIEKEGILPNSFYEASIILIPKPGRDTTKKENFRPISLMNIDAKILNKILAKGIQQHIKKLIHHDQVGFIPGMQGWFNIHKSINVIQHINRAKDKNHMIISIDAEKAFDKIQQPFMLKTLNKLGIDGTYFKIIRAIYDKPTASIILNGQKLEAFRLKTGTRQGCPLSPLLFNIVFEILARAIRQEKEIKGIQLGKEEVKLSLFAGDMIVYLENPIVSAQNLLKLISNFSKVSGYKINVQKSQAFLYTNNRQTESQIMSELPFTIASKRIKYLGIQLTRDVKDLFKENYKPLLKEIKEDTNKWKNIPCSWVGRINIVKMAILPKVIYRINAIPIKLPMPFFTELEKSTLKFIWNQKRARIAKSILSQKNKAGSITLPDFKLYYKATVTKTAWYWYQNRDIDQWNRTEPSEITPHIYNYLIFDKPEKNKQWGKDSLFNKWCWENWLAICRKLKLDPFLTPYTKINSRWIKDLNVRPKTIKTLEENLGITIQDIGIGDDFMSKTPKTMAAKDKIDKWDLIKLKSFCTAKETTIRVNRQPTKWEKIFATYSSDKGLISRIYNELKQIFKKKTNNPIKKWVKDMNRHFSKGDIYAAKKHMKKCSSSLAIREMQIKTTMRYHLTPVRMAIIKKSGNNRCWRGCGEIGTLLHCWWDCKLVQPLWKSVWRFLRDLELEIPFDPAIPLLGIYPKDYKSCCYKDTCTLTWMELEAIILSEVLRNGKTKNRMFSLISGNQDTGMQRHTEFYDGLWRLRRGRVEGACYDIIWPSFGTDVSFEKQIHLWLFLTPQPATIKIALLGYGLLGKILMAIRDAGFEISAMQMFNMDRVNVEEFYEVYKGVVTEYHDMVTEMYSGPCVAMEIQQNNATKTFREFCGPADPCIENSLKTRVEVIIQVQDDGELDQDGGNRHGEK

SEQ ID NO: 36438 - protein, 1240 aa, Homo sapiens
  DOMAIN (110)..(151): kw TRANSCRIPTASE REVERSE II ORF2 domain identified by eMATRIX, accession number DM01354I, p-value=1.000e-40, raw score of 15.55
  DOMAIN (356)..(631): Reverse transcriptase domain identified by PFam, accession name rvt, E-value=8.3e-88, PFam score of 305.1
MGDFNTPLSTLDRSTRQKVNKDTQELNSALHQADLIDIYRTLHPKSTEYTFFSAPHHTYSKIDHIVGSKALLSKCKRTEIITNYLSDHSAIKLELRIKNLTQSRSTTWKLNNLLLNDYWVHNEMKAEIKMFFETNENKDTTYQNLWDAFKAVCRGKFIALNAYKRKQERSKIDTLTSQLKELEKQEQTHSKASRRQEITKIRAELKEIETQKTLQKINESRSWFFERINKIDRPLARLIKKKREKNQIDTIKNDKGDITTDPTEIQTTIREYYKHLYANKLENLEEMDTFLDTYTLPRLNQEEVESLNRPITGSEIGAIINSLPTKKSPGPDGFTAEFYQRYKEELVPFLLKLFQSIEKEGILPNSFYEASIILIPKPGRDTTKKENFRPISLMNIDAKILNKILANQIQQHIKKLIHHDQVGFIPGMQGWFNIRKSINVIQHINRAKDKNHMIISIDAEKAFDKIQQPFMLKTLNKLGIDGTYFKIIRAIYDKPTANIILNGQKLEAFPLKTGTRQGCPLSPLLFNIVLEVLARAIRQEKEIKGIQLGKEEVKLSLFADDMIVYLENPIVSAQNLLKLISNFSKVSGYKINVQKSQAFLYTNNRQTESQIMGELPFTIASKRIKYLGIQLTRDVKDLFKENYKPLLKEIKEDTNKWKNIPCSWVGRINIVKMAILPKVIYRFNAIPIKLPMTFFTELEKTTLKFIWNQKRARIAKSILSQKNKAGGITLPDFKLYYKATVTKTAWYWYQNRDIDQWNRTEPSEIMPHIYNYLIFDKPEKNKQWGKDSLFNKWCWENWLAICRKLKLDPFLTPYTKINSKWIKDLNVRPKTIKTLEENLGITIQDIGVGKDFMSKTPKAMATKAKIDKWDLIKLKSFCTAKETTIRVNRQPTTWEKIFATYSSDKGLISRIYNELKQIYKKKTNNPIKKWAKDMNRHFSKEDIYAAKKHMKKCSSSLAIREMQIKTTMRYHLTPTACLETAEEQQLNNMECAGTEAINSLISIALLPKGGMSRILIETQGDRTLKWHKERAVCGAHMQARAGQTTHSAGGFLLPPGIHLQSLPCGCEELPRKQRMERNQPPGVRTGTTPFPKMKPEDTVIVTTGSAQKLACGLPHTHWEKANAASFKDTSGASKVIHDSLIWAFQLMTFTWDWFSFLSGTSSPVELSGDTSWKWQNGQWKFQAFITPSASSTPRKTRVPTLSPTSVGISRKVFDEPQLGLNLVLDESQGHYPATVAGPSS

SEQ ID NO: 36439 - protein, 1298 aa, Homo sapiens
  DOMAIN (154)..(195): kw TRANSCRIPTASE REVERSE II ORF2 domain identified by eMATRIX, accession number DM01354I, p-value=1.000e-40, raw score of 15.55
  DOMAIN (400)..(675): Reverse transcriptase domain identified by PFam, accession name rvt, E-value=5.1e-89, PFam score of 309.1
MVKGSIQREELTILNIYAPNTGAPRFIKQVLSDLKRDLDSHTLIMGDFNTPLSTLDRSTRQKVNKDTQELNSALHQADLIDIYRTLHPKSTEYTFFSAPHHTYSKIDHIVGSKALLSKCKRTEIITNYLSDHSAIKLELRIKNLTQSRSTTWKLNNLLLNDYWVHNEMKAEIKMFFETNENKDTTYQNLWDAFKAVCRGKFIALNAYKRKQERSKIDTLTSQLKELEKQEQTHSKASRRQEITKIRAELKEIVTQKTLQKINESRSWFFERINKIDRPLARLIKKKREKNQIDTIKNDKGDITTDPTEIQTTIREYYKHLYANKLENLEEMDTFLDTYTLPRLNQEEVESLNRPITGSEIVAIINSLPTKKSPGPDRFTAEFYQRYKEELVPFLLKLFQSIEKEGILPNSFYEASIILIPKPGRDTTKKENFRPISLMNIDAKILNKILANRIQQHIKKLIHHDQVGFIPGMQGWFNIRKSINVIQHINRAKDKNHMIISIDAEKAFDKIQQPFMLKTLNKLGIDGTYFKIIRAIYDKPTANIILNGQKLEAFPLKTGTRQGCPLSPLLFNIVLEVLARAIRQEKEIKGIQLGKEEVKLSLFADDMIVYLENPIVSAQNLLKLISNFSKVSGYKINVQKSQAFLYTNNRQTESQIMGELPFTIASKRIKYLGIQLTRDVKDLFKENYKPLLKEIKEDTNKWKNIPCSWVGRINIVKMAILPKVIYRFNAIPIKLPMTFFTELEKTTLKFIWNQKRARIAKSILSQKNKAGGITLPDFKLYYKATVTKTAWYWYQNRDIDQWNRTEPSEIMPHIYNYLIFDKPEKNKQWGKDSLFNKWCWENWLAICRKLKLDPFLTPYTKINSRWIKDLNIRPKTIKTLEENLGITIQDIGVGKDFMTAKETTIRVNRQPTTWEKIFATYSSDKGLISRIYNELKQIYKKKTNNPIKKWAKDMNRHFSKEDIYAAKKHMKKCSSSLAIREMQIKTTMRYHLTPVRMAIIKKSGNNSFLTFLGNPRLPSFQAAGPQVQVNFLPCQRPGFHGVQSCPIRTLHSLGHYDWLRDDHVTRSNLTLRILLERPRRKAPFYPLDFPRSYDAGLELLVPSCHHKGQPAWKWSQRRGESNTVADLTGGSAQAVTFAHPPLTSCHVAQFLTGYEPVLVHGLGVWDSCYIQYITTTEVRCGHVAEFHPMACGGSDLTLKEQLFFFHILSHSADRKKMMMRPRAYRHACWKRFGTFWMFQGSYPNAENGLQSSTGKSSYGENGEIYKGKTFYSYKSRHLWMSSYACMKTHMDGEDLDFFT

SEQ ID NO: 36440 - protein, 1111 aa, Homo sapiens
  DOMAIN (154)..(195): kw TRANSCRIPTASE REVERSE II ORF2 domain identified by eMATRIX, accession number DM01354I, p-value=1.000e-40, raw score of 15.55
  DOMAIN (400)..(675): Reverse transcriptase domain identified by PFam, accession name rvt, E-value=2.8e-88, PFam score of 306.7
MVKGSIQQEELTILNIYAPNTGAPRFIKQVLSDLQRDLDSHTLIMGDFNTPLSTLDRSTRQKVNKDTQELNSALHQADLIDIYRTLHPKSTEYTFFSAPHHTYSKIDHIVGSKALLSKCKRTEIITNYLSDHSAIKLELRIKNLTQSRSTTWKLNNLLLNDYWVHNEMKAEIKMFFETNENKDTTYQNLWDAFKAVCRGKFIALNVYKRKQERSKIDTLTSQLKELEKQEQTHSKASRRQEITKIRAELKEIETQKTLQKINESRSWFFERINKIDRPLARLIKKKREKNQIDTIKNDKGDITTDPTEIQTTIREYYKHLYANKLENLEEMDTFLDTYTLPRLNQEEVESLNRPITGSEIVAIINSLLTKKSPGPDGFTAEFYQRYKEELVPFLLKLFQSIEKEGILPNSFYEASIILIPKPGRDTTKKENFRPISLMNIDAKILNKILANRIQQHIKKLIHHDQVGFIPGMQGWFNIRKSINVIQHINRAKDKSHMIISIDAEKAFDKIQQPFMLKTLNKLGIDGTYFKIIRAIYDKPTANIILNGQKLEAFPLKTGTRQGCPLSPLLFNIVLEVLARAIRQEKEIKGIQLGKEEVKLSLFADDMIVYLENPIVSAQNLLKLISNFSKVSGYKINVQKSQAFLYTNNRQTESQIMGELPFIIASKRIKYLGIQLTRDVKDLFKENYKPLLKEIKEETNKWKNIPCSWVGRINIVKMAILPKVIYRFNAIPIKLPMTFFTELEKTTLKFIWNQKRARIAKSILSQKNKAGGITLPDFKLYYKATVTKTAWYWYQNRDIDQWNRTEPSEITPHIYNYLIFDKPEKNKQWGKDSLFNKWCWENWLAICRKLKLDPFLTPYTKINSRWIKDLNVRPKTIKTLEENLGITIQDIGVGKDFMSKTPKTMATKAKIDKWDLIKLKSFCTAKETTIRVNRQRTTWEKIFATYSSDKGLISRIYNELKQIYKKKTNNPIKKWVKDMNRHFSKEDIYAAKKHMKKCSSSLAIREMQIKTTMRYHLTPVRMAIIKKSGNNRCWRGCGEIGTLLHCWWDCKLVQPLWKSVWRFLRDLELEIPFDPDIPLLAAGPGCCRVAAQYGGCITTISDNWSRPFAPYA

SEQ ID NO: 36441 - protein, 1260 aa, Homo sapiens
  DOMAIN (154)..(195): kw TRANSCRIPTASE REVERSE II ORF2 domain identified by eMATRIX, accession number DM01354I, p-value=1.000e-40, raw score of 15.55
  DOMAIN (400)..(675): Reverse transcriptase domain identified by PFam, accession name rvt, E-value=1.8e-88, PFam score of 307.4
MVKGSIQQEELTILNIYAPNTGAPRFIKQVLSDIQRDLDSHTLIMGDFNTPLSTLDRSTRQKVNKDTQELNSALHQADLIDIYRTLHPKSTEYTFFSAPHHTYSKIDHIVGSKALLSKCKRTEIITNCLSDHGAIKLELRIKNLTQSRSTTWKLNNLLLNDYWVHNEMKAEIKMFFETNENKDTTYQNLWDAFKAVCRGKFIALNAYKRKQERSKIDTLTSQLKELEKQEQTHSNASRRQEITKIRAELKEIETQKTLQKINESRSWFFERINKIDRPLARLIKKKREKNQIDTIKNDKGDITTDPTEIQTTIREYYKHLYANKLENLEEMDTFLDTYTLPRLDQEEVESLNRPITGSEIVAIINSLPTKKSPGPDGFTAEFYQRYKEELVPFLLKLFQSIEKEGILPNSFYEASIILIPKPGRDTTKKENFRPISLMNIDAKILNKILAKRIQQHIKKLIHHDQVGFIPGMQGWFNICKSINVIQHINRAKDKNHMIISIDAEKAFDKIQQPFMLKTLNKLGIDGTYFKIIRAIYDKPTANIILNGQKLEAFPLKTGTRQGCPLSPLLFNIVLEVLARAIRQEKEIKGIQLGKEEVKLSLFADDMIVYLENPIVSAQNLLKLISNFSKVSGYKINVQKSQAFLYTNNRQTESQIMSELPFTIASKRIKYLGIQLTRDVKDLFKENYKPLLKEIKEDTNKWKNIPCSWVGRINIVKMAILPKVIYRFNAIPIKLPMTFFTELEKTTLKFIWNQKRARIAKSILSQKNKAGGITLPDFKLYYKATVTKTAWYWYQNRDIDEWNRTEPSEIMPHIYNYLIFDKPEKNKQWGKDSLFNKWCWENWLAICRKLKLDPFLTPYTKINSRWIKDLNVRPKTIKTLEENLDITIQDIGVGKDFMSKTPKAMATKDKIDKWDLIKLKSFCTAKETTIRVNRQPTTWEKIFATYSSDKGLISRIYNELKQIYKKKTNNPIKKWVKDMNRHFSREDIYAAKKHMKKCSSSLAIREMQIKTTMRFYWDLIMLIMMVGNLVIIPVGITFFTEQTTTPWIIFNVASDTVFLLDLIMNFRTGTVNEDSSEIILDPKVIKMNYLKSWFVVDFISSIPVDYIFLIVEKGMDSEVYKTARALRIVRFTKILSLLRLLRLSRLIRYIHQWEEERSSSPATEQSWTENDFDKLREGFRRSNYSELKEEVRTLGKEVKNLEKKLDEWLTRIINAEKSLKDLMELKTMARELHDQCTSLSSRFDELEERVSVMEDQMNEMK

SEQ ID NO: 36442 - protein, 1284 aa, Homo sapiens
  DOMAIN (627)..(652): 7 kw REVERSE TRANSCRIPTASE RNA POLYMERASE domain identified by eMATRIX, accession number DM00895E, p-value=3.333e-11, raw score of 15.72
  DOMAIN (598)..(873): Reverse transcriptase domain identified by PFam, accession name rvt, E-value=1.6e-88, PFam score of 307.5
MAAWNLLLKSYAYWGGLRKEDFHCLDRKTLRTVSFLAALLSYESIGGKGKLTTRKDIYTENPSVHHHHQRPKVDKTTKMGKKQNRKTGNSKMQSASPPPKERSSSPATEQSWMENDFEELREEGFRRSNYSELREDIQTKGKEVENFEKNLEECITRITNTEKCLKELMELKTKARELREECRSLRSRCDQLEERVSAMEDEMNEMKREGKFRDKRIKRNEQSLQEIWDYVKRPNLRLIGVPESDVENGTKLENTLQDIIQENFPSLARQANVQIQEIQRTPQRYSSRRATPRHIIVRFTKVEMKEKMLRAAREKGRVTLKGKPIRLTADLSAETLQARREWGPIFNILKEKNFQPRISYPAKLSFISEGEIKYFIDKQMLRDFVTTRPALKELLKEALNMERNNRRKQERSKIDTLTSQLKELEKQEQTHSKASRRQEITKIRAELKEIETQKTLQKINESRSWFFERINKIDRPLARLIKKKREKNQIDTIKNDKGDITTDPTEIQTTIREYYKHLYANKLENLEEMDTFLDTYTLPRLNQEEVESLNRPITGSEIVAIINSLPTKKSPGPDGFTAEFYQRYKEELVPFLLKLFQSIEKEGILPNSFYEASIILIPKPGRDTTKKENFRPISLMNIDAKILNKILANRIQQHIKKLIHHDQVGFIPGMQGWFNIRKSINVIQHINRAKDKNHMIISIDAEKAFDKIQQPFMLKTLNKLGIDGKYFKIIRAIYDKPTANIILNGQKLEAFPLKTGTRQGCPLSPLLFNIVLEVLARAIKQEKEIKGIQLGKEEVKLSVFADDMIVYLENPIVSAQNLLKLISNFSKVSGYKINVQKSQAFLYTNNRQTESQIMSELPFTIASKRIKYLGIQLTRDVKDLFKENYKPLLKEIKEDTNKWKNIPCSWVGRINIVKMAILPKVIYRFNAIPIKLPMTFFTELEKTTLKFIWNQKRARIAKSILSQKNKAGGITLPDFKLYYKATVTKTAWYWYQNRDIDQWNRTEPSEIMPHIYNYLIFDKPEKNKQWGKDSLFNKWCWENWLAICRKLKLDPFLTPYTKINSRWIKDLNVRLKTIKTLEENLGITIQDIGVGKDFMSKTPKAMATKAKIDKWDLIKLKSFCTAKETTIRVNRQPTTWEKIFATYSSDKGLISRIYNELKQIYKKKTNNPIKKWAKDMNRHFSKEDIYAAKKHMKKCSSSLAIREMQIKTTMRYHLTPVRMAIIKKSGNNSSQMPLTSSDNTAVNCKKLRSKPDEIAKESEAPPGLASFHLCSSYIYGAPLNSQMG

SEQ ID NO: 36443 - protein, 1115 aa, Homo sapiens
  DOMAIN (323)..(369): kw TRANSCRIPTASE REVERSE II ORF2 domain identified by eMATRIX, accession number DM01354O, p-value=1.000e-40, raw score of 8.73
  DOMAIN (356)..(631): Reverse transcriptase domain identified by PFam, accession name rvt, E-value=3.2e-86, PFam score of 299.8
MGDFNIPLSTLDRSTRQKVNKDTQELNSALHQADLIDSYRTLHPKSTEYTFFSAPHHTYSKIDHILGSKALLSKCKRTEIITNYLSDHSAIKLELRIKNLTQNCSTTWKLNNLLLNDYWVHNEMKAEIKMFFETNENKDTTYHNLWDAFKAVCRGKFIALNAHKRKQERSKIDTLTSQLKELEKQEQTHSKASRRQEITKIRAELKEIETQKTLQKINESRSWVFERINKIDRPLARLTKKKSEKNQIDAIKNDKGDITTDPTEIQTTIREYYKHLYANKLENLEETDKFLDTYTLPRRNQEEVESLNRPITGAEIVAIINNLPTKKSPGSDGFTAEFYQRYKEELVPFLLKLFQSIEKEGILPNSFYEASIILIPKPGRDTTKKENFRPISLMNIDAKILNKILANQIQQHIKKLIHHDQVGFIPGMQGWFNICKSINVIQHINRTKDKNHMIISIDAEKAFDKIQQPFMLKTLNKLGIDGTYLKIIRAIYDEPTANIILNGQKLEAFPLKTGTRQGCPLSPLLFNIVLEVLARAIRQEREIKGIQLGKEEVKLSLFADDMIVYLENPIVSAQNLLKLISNFGKVSGYKINVQKSQAFLNTNNRQTESQIMSELPFTIASKRIKYLGIQLTRDVKDLFKENYKPLLKEIKEDTNKWKNIPCSWVGRINIMKMAILPKVIYRFNAIPIKLPMTFFTELEKTTLKFIWNQNRACIAKSILSQKNKAGGITLPDLKLYYKATVTKTAWYWYQNRDIDQWNRTEPSEITLHIYNYLIFDKPEKNKQWGKDSLFNKWCWENWLAICRKLKLDPFLTPYTKINSRWIKDLNIRPKTIKTLEENLGITIQDIGMGKDFMSKTPKAMATKAKIDKWDLIKLKSFCTAKETTIRVNRQPTKWGKIFATYSSDKGLISRIYNELKQIYKKKTNNPIKKFAKDMNRHFSKKDIYAAKKHMKKCSPSLAIREMQIKTTMRYHLTPVRMAIIKKSGNNRTGRGLHPGRDWSVTCARSPGDPEPSGIKGGCGSGTPSPSPSKQTVRRPWTQIPEMKPLLLAVSLGLIAALQAHHLLASDEEIQDVSGTWYLKAMTVDREFPEMNLESVTPMTLTTLEGGNLEAKVTML

SEQ ID NO: 36444 - protein, 2009 aa, Homo sapiens
  DOMAIN (676)..(701): 7 kw REVERSE TRANSCRIPTASE RNA POLYMERASE domain identified by eMATRIX, accession number DM00895E, p-value=3.333e-11, raw score of 15.72
  DOMAIN (647)..(922): Reverse transcriptase domain identified by PFam, accession name rvt, E-value=2.6e-88, PFam score of 306.8
MGKKQNRKTGNSKTQSASPPPKERSSSPATEKSWMENDFDELREEGFRRSNYSELREDIQTKGKEVENFEKNLEECITRITNTEKCLKELMELKTKARELREECRSLRSRCDQLEERVSAMEDEMNEMKREGKFREKRIKRNEQSLQEIWDYVKRPNLRLTGVPESDGENGTKLENTLQDIIQENFPNLARQVNVQIQEIQRTPQRYSSRRATPRHIIVRFTKVEVKEKMLRAAREKGRVTLKGKPIRLTADLSAETLQARREWGPIFNILKEKNFQPRISYPAKLSFISEGEIKHFTDKQMLRDFVTTRPALKELLKEVLNMERNNQYQPLQNHAKIQINETETPHHTYSKIDHIVGSKALLSKCERTEIITNYLSDHSAMKLELRIKNLTQNCSTTWKLNNLLLNDYWVHNEMKAEIKMFFETNENKDTTNQNLWDAFKAVCRGKFIALNAHKRKQERSKIDTLTSQLKELEKQEQTHSKASRRQEITKIRAELKEIETQKTLQKINESRSWFFERINKIDRPLARLIKKKREKNQIDTIKNDKGDITTDPTEIQTTIREYYKHLYANKLENLEEINKLLDTYTLPRLNQEEVESLNRPITGAEIGAIINSLPTKKSPGPDGFTAEFYQRYKEELVPFLLKLFQSIEKEEILPNSFYEASIILIPKPGRDTTKKENFRPISLMNIDAKILNKILANRIQQHIKKLIHHDQVGFFPGMQGWFNIRKSINVIQHINRAKDKNHMIISIDAEKAFDKIQQPFMLKTLNKLGIDGTYFKIIRAIYDKPTANIILNGQKLEAFPLKTGTRQGCPLSPLLFNIVLEVLARAIRQEKEIKGIQLGKEEVKLSLFADDMIVYLENPIVSAQNLLKLISNFSKVSGYKINVQKSQAFLYTSNRQTESQIMSELPFTIASKRIKYLGIQLTRDVKDLFKENYKPLLKEIKEDTNKWKNIPCSWVGRINIVKMAILPKVIYRFNAIPIKLPMTFFTELEKTTLKFIWNQKRARIAKSILSQKNKAGGITLPDFKLYYKATVTKTAWYWYQNRAIDQWNRTEPSEITPHTYNYLIFDKPEKNKQWGKDSLFNKWCWENWLAICRKLKLDPFLTPYTKINSRWIKDLNVRPKTIKTLEENLGITIQDIGMGKDFMSRTPKAMATKAKIDKWDLIKLKSFCTAKETTIRVNRQPTTWEKIFATYSSDKGLISRIYNELKQIYKKKTNNPIKKWEKDMNRHFSKEDIYAAKKHMKKCSSSLAIREMQIKTTMRYHLTPVRMAIIKKSGNNRLLGSALESAGPNQTQLAVGQPLQPHLPRAPGRAVISMEKAGLCSEATEQVLHRLTSWSGVTSRRHRQHQEGSQARVWHFRASAVKGIAFPSLCGQGYGVSEPLRSRVWRFRASAVKSPEMGCRGSCGGIPDVGANMLDDLTPVHHDLTPARNDLTPVHDDLAPVRDDLTPVRHDLTPVRDDLAPVRDDLTPVCDDLAPVCDDVAPVCHDLAPVCDDLTPVCDDLAPVHNDLAAIQTYLQAASDVPVGHSLDPAANYNSPKFRSRNQRYMRAVSTLSQASCVSQVSEAEINGQFESVCESVFSEVESQAMDALDLPGCFRTRSHSYLRAIQAGYSQDDECIPMMTPSDITSTIRSTAEGERDADKSCICIRNCICKPELLGFSDIVEMEVLLNLPPIPLEPAGPHLCHPPTRRPSPVSPSTPPVLTCVTLQPAGPHLCHPRPRRPSPVSPSTPPALTCVTLDPAGPHLCHPRPRRSSPVSPSNPPALTCVTLDPAGPHLCHPPTRRPSPVSPSNPPALTCVTLDPAGPHLCHPPTRRSSPVSPSNPPALTCVTLQPAGPHLCHPPTRRPPPVSPSNPPALTCVTLDPAGPHLCHPPTRRSSPVSPSTPPVLTCVTLTTIRPSHVSPTTPPVLTCVTLDPAGPHLCHPPTRRPSPVSPSTPPALTCVTLQPAGPHLCHPPTRRPSPVSPSNPPALTCVTLDPAGPHLCHPRPRRSSPVSPSNPPVLTCVTPRG

SEQ ID NO: 36445 - protein, 1307 aa, Homo sapiens
  DOMAIN (294)..(335): kw TRANSCRIPTASE REVERSE II ORF2 domain identified by eMATRIX, accession number DM01354I, p-value=1.000e-40, raw score of 15.55
  DOMAIN (540)..(815): Reverse transcriptase domain identified by PFam, accession name rvt, E-value=7.7e-89, PFam score of 308.6
MGKKQNRKTGNSKTQSASPPPKERSSSPATEQSWMENDFDELREEGFRRSNYSELWEDIQTKGKEVENFEKNLEECITRITNTEKCLKELMELKTKARELHEECRSLRSRCDQLEERVSAMEDEMNEMKREGKFREKRIKRNEQSLQEIWDYVKRPNLRLIGVPESDVENGTKLENTLQDIIQENFPNLARQANVQIQEIQRMPQRYSSRRATPRHIIVRFTKVEMKEKMLRAARQKAPHHTYSKIDHIVGSKALLSKCKRTEIITNYLSDHSAIKLELRIKNLTQSRSTTWKLNNLLLNDYWVHNEMKAEIKMFFETNENKDTTYQNLWDTFKAVCRGKFIALNAYKRKQETSKIDTITSQLKELEKQEQTHSKASRRQEITKIRAELKEIETQKTLQKINESRSWFFERINKIDRPLARLIKKKREKNQIDTIKNDKGDITTDPTEIQTTIREYYKHLYANKLENLEEMDTFLDTYTLPRLNQEEVESLNRPITGSEIVAIINSLPTKKSPGPDGFTAEFYQRYKEELVPFLLQLFQSIEKEGILPNSFYEASIILIPKPGRDTTKKENFRPISLMNIDAKILNKILANRIQQHIKKLIHHDQVGFIPGTQGWFNIRKSINVIQHINRAKDKNHMIISIDAEKAFDKIQQPFMLKTLNKLGIDGTYFKIIRAIYDKPTANIILNGQKLEAFPLKTGTRQGCPLSPLLFNIVLEVLARAIRQEKEIKGIQLGKEEVKLSLFADDMIVYLENPIVSAQNLLKLISNFSKVSGYKINVQKSQAFLYTNNRQTESQIMSELPFTIASKRIKYLGIQLTRDVKDLFKENYKPLLKEIKEDTNKWKNIPCSWVGRINIVKMAILPKVIYRFNAIPIKLPMTFFTELEKTTLKFIWNQKRACISKSILSQKNKAGGITLPDFKLYYKATVTKTAWYWYQNRDIDQWNRTEPSEIMPHIYNYLIFDKPEKNKQWGKDSLFNKWCWENWLAICRKLKLDPFLTPYTKINSRWIKDLNVRPKTIKTLEENLGITIQDIGVGKDFMSKTPKAMATKAKIDKWDLIKLKSFCTAKETTIRVNRQPTTWEKIFTTYSSDKGLISRIYNELKQIYKKKTNNPIKKWAKDMNRHFSKEDIYAAKKHMKKCSSSLAIREMQIKTTMRYHLAPVRMAIIKKSGNNSKMVEADGPGNLFTGVLHLETNEKSLKAVFGKYGPILEDNFLDGKAMKVEQVNKPSFQSGGNVEITIFLEKQEPFRKSETGKKFFKLFLLTLANFFKFSDHDDYSGGLGRDHSEHPNGSSYRDAYQSYGTFYGAPPA

SEQ ID NO: 36446 - protein, 1087 aa, Homo sapiens
  DOMAIN (154)..(195): kw TRANSCRIPTASE REVERSE II ORF2 domain identified by eMATRIX, accession number DM01354I, p-value=1.000e-40, raw score of 15.55
  DOMAIN (400)..(675): Reverse transcriptase domain identified by PFam, accession name rvt, E-value=5.1e-89, PFam score of 309.1
MVKGSIQQEELTILNIYAPNTGAPRFIKQVLSDLQRDLDSHTLIMGDFNTPLSILDRSTRQKVNKDTQELNSALHQADLIDIYRTLHPKSTEYTFFSAPHHTYSKIDHIVGSKALLSKCKRTEIITNYLSDHSAIKLELRIKNLTQSRSTTWKLNNLLLNDYWVHNEMKAEIKMFFETNENKDTTYQNLWDAFKAVCRGKFIALNAYKRKQERSKIDTLTSQLKELEKQEQTHSKASRRQEITKIRAELKEIETQKTLQKINESRSWFFERINKIDRPLARLIKKKREKNQIDTIKNDKGDITTDPTEIQTTIREYYKHLYANKLENLEEMDTFLDTYTLPRLKQEEVESLNGPITGSEIVAIINSLPTKKSPGPDGFTAEFYQRYKEELVPFLLKLFQSIEKEGILPNSFYEASIILIPKPGRDTTKKENFRPISLMNIDAKILNKILANRIQQHIKKLIHHDQVGFIPGMQGWFNIRKSINVIQHINRAKDKNHMIISIDAEKAFDKIQQPFMLKTLNKLGIDGTYFKIIRAIYDKPTANIILNGQKLEAFPLKTGTRQGCPLSPLLFNIVLEVLARAIRQEKEIKGIQLGKEEVKLSLFADDMIVYLENPIVSAQNLLKLISNFSKVSGYKINVQKSQAFLYTNNRQTESQIMGELPFTIASKRIKYLGIQLTRDVKDLFKENYKPLLKEIKEDTNKWKNIPCSWVGRINIVKMAILPKVIYRFNAIPIKLPMTFFTELEKTTLKFIWNQKRARIAKSILSQKNKAGGITLPYFKLYYKATVTKTAWYWYQNRDIDQWNRTEPSEIMPHIYNYLIFDKPEKNKQWGKDSLFNKWCWENWLAICRKLKLDLFLTPYTKINSRWIKDLNVKPKTIKTLEENLGITIQDIGVGKDFMSKTPKAMATKDKIDKWDLIKLKSFCTAKETTIRVNRQPTTWEKIFATYSSDKGLISRIYNELKQIYKKKTNNPIKKWAKDMNRHFSKEDIYAAKKHMKKCSSSLAIREMQIKTTMRYHLTPVRMAIMKKVRKQQLEGSSPEASAAAAAAVADPLQAARKVRPAGGSRQLLSTSADPLGEATRFLRVSPRG

SEQ ID NO: 36447 - protein, 135 aa, Homo sapiens
MVVTTSARGGGGDRTPSRRLGCGLAPAGAAALLAGASCLCYGRSLQGEFVHDDVWAIVNNPDVRPGAPLRWGIFTNDFWGKGMAENTSHKSYRPLCVLTFKNVGEHAVGLQQHPGPQLLQCSPDLVFQLLGIMVQ

SEQ ID NO: 36448 - protein, 353 aa, Homo sapiens
MVVTTSARGGGGDRTPSRRRGCGLAPAGAAALLAGASCLCYGRSLQGEFVHDDVWAIVNNPDVRPGAPLRWGIFTNDFWGKGMAENTSHKSYRPLCVLTFKMCMALCSGIHCPANLGSRGGSGGAGWGVGIEFLNCLPSQRASLSRQGWERAGETASAPLRLPDRDQVGLARTQRVPEGNVGEHAVGLQQHPGPQLLQCSPDLVFQLLGIMVQRGPDDFPFFEALRITLVKEHLQLREALWWISSVGQVEYLPLPHVCTWLNIFLTGMNPFYFHAVNIILHCLVTLVLMYTCDKTVFKNRGLAFVTALLFAVHPIHTEAWVEAKDVAEETFCNAQDSPYNKELSGRKCQWGYD

SEQ ID NO: 36449 - protein, 172 aa, Homo sapiens
EKATCDENDSVSNIATEIKEGQQSVHVSPQKQSAWKVIFKKKVSLLNIATRITGGGKSGTVSSQKQPPSKATSDKTDSALNIATEIKDGLQCGTVSSQKQPALKATTDEEDSVSNIATEIKDGEKSGTVSSQKQPALKATTDEKDSVSNIATEIKDGEKSVTVSSQKQPASK

SEQ ID NO: 36450 - protein, 281 aa, Homo sapiens
MEQGYTSGARYGWIDRNQQRLHVQPPWCVRSTRLAQGTVDLTAAADSSTTGTIEASNQTMRGRPATAKGPTANRKTARASALKAPTGLSDERLTHSRETRRAATSDDKDSVSNIATEIKEGPISGTVIGQVKGHDECLKYNGVNPSDFLQERHEGSYTTCFDIDSQVLSSQKQPAEKVIFKKKVSLLNIATRIMGGGKSGTVSSQKQPASKATSDKTDSALNIATEIKDGLQCGTGPRFFICNKFSGDADAAGLGPDLRSKIIDFPTLKLGRRNIGEQIKT

SEQ ID NO: 36451 - protein, 144 aa, Homo sapiens
  DOMAIN (22)..(113): Eukaryotic protein kinase domain identified by PFam, accession name pkinase, E-value=6.9e-16, PFam score of 61.2
MAFCKSNLNERWFVPEPYREKITEYASLGSLYDYINSNRSEEMDMDHIMTWATDVAKVVIAADGVLKICDFGASRFHNHTTHMSLVGTFPWMAPEVIQSLPVSETCDTYSYGVNLSTPSCDVEYQFCIHARAFPYLVETEMPFQ

SEQ ID NO: 36452 - protein, 279 aa, Homo sapiens
  DOMAIN (4)..(31): MARCKS family proteins domain identified by eMATRIX, accession number BL00826C, p-value=6.063e-09, raw score of 7.63
  misc_feature (1)...(279): Xaa = X or * as defined in Table 2
CGSAQAAAAAAAEEATEKIPALRPASAVGAAGALAVLRDPRAWREAGSKSPETPFSXCQGAHGGGQFCPSGTAFPGKMKVMMRKRKKKGQCLPGICRSLKRRKSPRSPGMIGYSTLSIPPEMLASYQSYSSTFHSLEEQQVCMAGXHRQMPGADKPVRACQRVLAGVWAGFTMRHQSRLYXECSICGVIFRHRCVAHLLGRAIGAGLFVITPAGERGMCCKAIKLGNARVFPVTTLXNDGQCQACMHAGTTLEDPGKNYISSSPSSSSSSSPSSPRVPS

SEQ ID NO: 36453 - protein, 56 aa, Homo sapiens
MEMTSSTTPPPQMKLLWWKVLKSWALYSENTIFGHHRSNRALEPNPSDDPRASTVF

SEQ ID NO: 36454 - protein, 384 aa, Homo sapiens
MGGPRGKGRRHLWAGSVGVLELGWWSRSSGRHADCCAHWGWAHQEVGSAETRALTTGARFGFLRPLPAGPRPYRAWWVLPHLLLSPQRGCSFAQGLWGGPGHPEREVAGPSTHAGGPDVLGVPTRACGPHAGLWSPRLARAPAEGGRPLESAPSAALLPPPRLELCPHSEALPAGRLLPLLPQRCPTPGRVAEAAATAPSTVAAAATAQPTVPCIQEIIILLVLCHVIVTEEDGDDIIYHASSPGSGYVIASSVTPDRAGGIMINGLECAYNYIKLENPEFRGITSPKISDGPMQLCVLYLHFLEWLICRLVHSVAYAVLSEDDYEEWLKGYQEASNTLKNGAQWLEECGQIIEKLTTHDSLYRSKKDLSSYRTKSLNRHPSTI

SEQ ID NO: 36455 - protein, 213 aa, Homo sapiens; identical to SEQ ID NO: 32780
  DOMAIN (26)..(43): RNase H domain identified by eMATRIX, accession number PF00075A, p-value=9.429e-09, raw score of 14.44

SEQ ID NO: 36456 - protein, 474 aa, Homo sapiens
  DOMAIN (263)..(284): GAMMA-AMINOBUTYRIC ACID (GABA) RECEPTOR SIGNATURE domain identified by eMATRIX, accession number PR00253A, p-value=2.688e- 25, raw score of 9.15
  DOMAIN (54)..(468): Neurotransmitter-gated ion-channel domain identified by PFam, accession name neur_chan, E-value=6e-172, PFam score of 584.6
DGELHGTMAPKLLLLLCLFSGLHARSRKVEEDEYEDSSSNQKWVLAPKSQDTDVTLILNKLLREYDKKLRPDIGIKPTVIDVDIYVNSIGPVSSINMEYQIDIFFAQTWTDSRLRFNSTMKILTLNSNMVGLIWIPDTIFRNSKTAEAHWITTPNQLLRIWNDGKILYTLRLTINAECQLQLHNFPMDEHSCPLIFSSYGYPKEEMIYRWRKNSVEAADQKSWRLYQFDFMGLRNTTEIVTTSAGDYVVMTIYFELSRRMGYFTIQTYIPCILTVVLSWVSFWIKKDATPARTALGITTVLTMTTLSTIARKSLPRVSYVTAMDLFVTVCFLFVFAALMEYATLNYYSSCRKPTTTKKTTSLLHPDSSRWIPERISLQAPSNYSLLDMRPPPPAMITLNNSVYWQEFEDTCVYECLDGKDCQSFFCCYEECKSGSWRKGRIHIDILELDSYSRVFFPTSFLLFNLVYWVGYLYL

SEQ ID NO: 36457 - protein, 230 aa, Homo sapiens
  DOMAIN (84)..(106): GAMMA-AMINOBUTYRIC ACID (GABA) RECEPTOR SIGNATURE domain identified by eMATRIX, accession number PR00253B, p-value=3.535e- 09, raw score of 13.47
  DOMAIN (91)..(127): Neurotransmitter-gated ion-channel domain identified by PFam, accession name neur_chan, E-value=2.9e-12, PFam score of 44.5
TKDSEKSGADKGTTTAQPPTWSKQDKESGTEGKRRGETTPRDDHDVTLHEVCSIRDSCKAAVLGWSDVGDRLGFLLRVAPFYNMLPVPCSGITTVLTMTTLSTIARKSLPRVSYVTAMDLFVTVCFLSQFHPHSKGLHRGMKQRVDECLADHCQSTRVGNLYCNCSLIKADLSTGGCQKEADPFNAVGIVEEEEGGQPHREAPMVAEGDGHTCEEQATPCEHVVQAILLI

SEQ ID NO: 36458 - protein, 1421 aa, Homo sapiens
  DOMAIN (1095)..(1126): Protein kinases ATP-binding region proteins domain identified by eMATRIX, accession number BL00107A, p-value=9.400e-22, raw score of 18.39
  DOMAIN (910)..(1235): Eukaryotic protein kinase domain identified by PFam, accession name pkinase, E-value=4.1e-71, PFam score of 249.7
ADTPLGSSPAAAAARSGLRGSGAAASGPGGEDYPGKWLSPGWSRETGAQGAGPAAANERTDSGGRVVGRGSAGTGRAGRVALTMVSYWDTGVLLCALLSCLLLTGSSSGSKLKDPELSLKGTQHIMQAGQTLHLQCRGEAAHKWSLPEMVSKESERLSITKSACGRNGKQFCSTLTLNTAQANHTGFYSCKYLAVPTSKKKETESAIYIFISDTGRPFVEMYSEIPEIIHMTEGRELVIPCRVTSPNITVTLKKFPLDTLIPDGKRIIWDSRKGFIISNATYKEIGLLTCEATVNGHLYKTNYLTHRQTNTIIDVQISTPRPVKLLRGHTLVLNCTATTPLNTRVQMTWSYPDEKNKRASVRRRIDQSNSHANIFYSVLTIDKMQNKDKGLYTCRVRSGPSFKSVNTSVHIYDKAFITVKHRKQQVLETVAGKRSYRLSMKVKAFPSPEVVWLKDGLPATEKSARYLTRGYSLIIKDVTEEDAGNYTILLSIKQSNVFKNLTATLIVNVKPQIYEKAVSSFPDPALYPLGSRQILTCTAYGIPQPTIKWFWHPCNHNHSEARCDFCSNNEESFILDADSNMGNRIESITQRMAIIEGKNKMASTLVVADSRISGIYICIASNKVGTVGRNISFYITDVPNGFHVNLEKMPTEGEDLKLSCTVNKFLYRDVTWILLRTVNNRTMHYSISKQKMAITKEHSITLNLTIMNVSLQDSGTYACRARNVYTGEEILQKKEITIRDQEAPYLLRNLSDHTVAISSSTTLDCHANGVPEPQITWFKNNHKIQQEPGIILGPGSSTLFIERVTEEDEGVYHCKATNQKGSVESSAYLTVQGTSDKSNLELITLTCTCVAATLFWLLLTLLIRKMKRSSSEIKTDYLSIIMDPDEVPLDEQCERLPYDASKWEFARERLKLGKSLGRGAFGKVVQASAFGIKKSPTCRTVAVKMLKEGATASEYKALMTELKILTHIGHHLNVVNLLGACTKQGGPLMVIVEYCKYGNLSNYLKSKRDLFFLNKDAALHMEPKKEKMEPGLEQGKKPRLDSVTSSESFASSGFQEDKSLSDVEEEEDSDGFYKEPITMEDLISYSFQVARGMEFLSSRKCIHRDLAARNILLSENNVVKICDFGLARDIYKNPDYVRKGDTRLPLKWMAPESIFDKIYSTKSDVWSYGVLLWEIFSLGGSPYPGVQMDEDFCSRLREGMRMRAPEYSTPEIYQIMLDCWHRDPKERPRFAELVEKLGDLLQANVQQDGKDYIPINAILTGNSGFTYSTPAFSEDFFKESISAPKFNSGSSDDVRYVNAFKFMSLERIKTFEELLPNATSMFDDYQGDSSTLLASPMLKRFTWTDSKPKASLKIDLRVTSKSKESGLSDVSRPSFCHSSCGHVSEGKRRFTYDHAELERKIACCSPPPDYNSVVLYSTPPI

SEQ ID NO: 36459 - protein, 437 aa, Homo sapiens
  DOMAIN (56)..(94): Receptor tyrosine kinase class III proteins domain identified by eMATRIX, accession number BL00240E, p-value=2.859e-12, raw score of 11.56
MQYNQTEFPKELRKHPKQKTRAPCPRACLDLGTEHGFHRERADSDGFYKEPITMEDLISYSFQVARGMEFLSSRKGLGSWSECMELYFQISSAQLGLVVSPPHTVISATPESRPSLTKNYYITGVGVWKGSEEGVYRGALGTLTSRLTSNMEDAALHMEPKKEKMEPGLEQGKKPRLDSVTSSESFASSGFQEDKSLSDVEEKRVPYIRAGVMPPDHAAKAVFPNYHIYPPTAPHVAYMQPKANAPSFFMADELRQHKKDKANAAEERAKRFLSVLENGCAKQSEHCNQPLRVERLLVTVTPVLELLSSSSLPTTTETATWPSLASSVCAICLGACQRIYSRDRQTLLVKVQLVFPNYHIYPPTAPHVAYMQPKANAPSFFMADELRQESRQEINTILDLLWKNSSDTLLKQTPNYFDEHFHKNDNIQEPSTENNRT

SEQ ID NO: 36460 - protein, 88 aa, Homo sapiens
  DOMAIN (51)..(67): MUCIN GLYCOPROTEIN PRECURSOR MEM domain identified by eMATRIX, accession number PD01364B, p-value=6.182e-10, raw score of 13.94
  misc_feature (1)...(88): Xaa = X or * as defined in Table 2
MQKKPLTKFNNPSCXKLSINXVLMGRISKXVTTTATTTTITTTTTTTTTTTTTTTATTTTTTTTTTTTTTTTTTMGPTLPLIPIGLGS

SEQ ID NO: 36461 - protein, 233 aa, Homo sapiens
  DOMAIN (199)..(215): MUCIN GLYCOPROTEIN PRECURSOR MEM domain identified by eMATRIX, accession number PD01364B, p-value=6.182e-10, raw score of 13.94
MHHKCSAKAVERSHITYVMDLEKSHSAVCRQGSGQDFTSAECWFQCHVKVPPVTLLKKGDQWLPEKRVHGERQEGEITKEHKDTFWDDVYVHYIDRLHGYIPRPTAGVCRAQGSSRHRSPSSLRLNCHQNTPSLVTEHPQGPKGQLCSTIQGTCYCYTWPHRIWNTADSTITRSRVTTTATTTTITTTTTTTTTTTTTTTATTTTTTTTTTTTTTTTTTMGPTLPLIPIGLGS

SEQ ID NO: 36462 - protein, 163 aa, Homo sapiens
MSPADVQAACDFPGLLSTPESFPLSWYIFDFHRNLSVSLKRKDQNVLSPVNCWNLLLNQVKRESRDHTTLSDIYLNNIIPRFVQVSEDSGRLFKKPDQITDLESSIYLIASVKVLSLCLRDRILRVQSSDDEKKAEKDNSSQSSLAIISSPAVLWLGPHLILE

SEQ ID NO: 36463 - protein, 304 aa, Homo sapiens
  DOMAIN (73)..(111): Neurotransmitter-gated ion-channels proteins domain identified by eMATRIX, accession number BL00236A, p-value=6.500e- 27, raw score of 21.96
  DOMAIN (46)..(193): Neurotransmitter-gated ion-channel domain identified by PFam, accession name neur_chan, E-value=1.6e-60, PFam score of 210.7
  misc_feature (1)...(304): Xaa = X or * as defined in Table 2
ALGGTPMLGKLAMLLWVQQALLALLLPTLLAQGEARRSRNTTRPALLRLSDYLLTNYRKGVRPVRDWRKPTTVSIDVIVYAILNVDEKNQVLTTYIWYRQYWTDEFLQWNPEDFDNITKLSIPTDSIWVPDILINEFVDVGKSPNIPYVYIRHQGEVQNYKPLQVVTACSLDIYNFPFDVQNCSLTFTSWLHTSPGHQHLFVALARKGEIRQECLHEPGRVGVAGGAALLSGVQHGKQXLLCRNEVLCGHPPAAPLLCGQPATAQHLPHGHGHRGLLPAPQQWREGLFQNYTPPGLLGLPDHRF

SEQ ID NO: 36464 - protein, 250 aa, Homo sapiens
  DOMAIN (73)..(111): Neurotransmitter-gated ion-channels proteins domain identified by eMATRIX, accession number BL00236A, p-value=6.500e- 27, raw score of 21.96
  DOMAIN (46)..(193): Neurotransmitter-gated ion-channel domain identified by PFam, accession name neur_chan, E-value=1.6e-60, PFam score of 210.7
ALGGTPMLGKLAMLLWVQQALLALLLPTLLAQGEARRSRNTTRPALLRLSDYLLTNYRKGVRPVRDWRKPTTVSIDVIVYAILNVDEKNQVLTTYIWYRQYWTDEFLQWNPEDFDNITKLSIPTDSIWVPDILINEFVDVGKSPNIPYVYIRHQGEVQNYKPLQVVTACSLDIYNFPFDVQNCSLTFTSWLHTSGHPPAAPLLCGQPATAQHLPHGHGHRGLLPAPQQWREGLFQDYTPPGLLGLPDHRF

SEQ ID NO: 36465 - protein, 157 aa, Homo sapiens
MLLWVQQALLALLLPTLLAQGEGGFSPYRAGVEHTGAQLEEAIQGLDRREELWGFLLLGVVGEHRPRSPRPSVFLSFNEGDPVGLEKYAQVCYEHLPGMRVLLKGNLEVSGEWYLLWPSRVKKSNQEPGPDESQKNNYFPPYPVLIAHSRNNSHPER

SEQ ID NO: 36466 - protein, 304 aa, Homo sapiens
  DOMAIN (73)..(111): Neurotransmitter-gated ion-channels proteins domain identified by eMATRIX, accession number BL00236A, p-value=6.500e- 27, raw score of 21.96
  DOMAIN (46)..(193): Neurotransmitter-gated ion-channel domain identified by PFam, accession name neur_chan, E-value=1.6e-60, PFam score of 210.7
  misc_feature (1)...(304): Xaa = X or * as defined in Table 2
ALGGTPMLGKLAMLLWVQQALLALLLPTLLAQGEARRSRNTTRPALLRLSDYLLTNYRKGVRPVRDWRKPTTVSIDVIVYAILNVDEKNQVLTTYIWYRQYWTDEFLQWNPEDFDNITKLSIPTDSIWVPDILINEFVDVGKSPNIPYVYIRHQGEVQNYKPLQVVTACSLDIYNFPFDVQNCSLTFTSWLHTSPGHQHLFVALARKGEIRQECLHEPGRVGVAGGAALLSGVQHGKQXLLCRNEVLCGHPPAAPLLCGQPATAQHLPHGHGHRGLLPAPQQWREGLFQDYTPPGLLGLPDHRF

SEQ ID NO: 36467 - protein, 223 aa, Homo sapiens
LQTRANQQSKAAHQQEEAIHGHFQTHTARSRAVTNAGAGGRQPASQRGEKPPQQEQWDEKVPTAGFQLSHIPMKAERSEEVTEERVEASRGQFIRFKERSRLHSIKVQGEAASADGEAVASSPEDLAKITDEGGYSKQQIFHVDETAFYWKKTPSTTFMAREEESMPHFKASKDQLTLLLEANATATPTSATTTLISLQLSRRENTLRWEKDYNLLKAQMIIR

SEQ ID NO: 36468 - protein, 132 aa, Homo sapiens
  misc_feature (1)...(132): Xaa = X or * as defined in Table 2
LRKIKIDLGKFSDNPDGYIDVLQGLRQSFDLTWRDIMLLLDQSLTPNEKSAAKTAAREFGDLWFVSFQNXSCKTTNRSSNGAPDAVHDXDPTADPWTGPLAHALMLMTLKAPLTRKSQLHDPYYAPIQQEAV

SEQ ID NO: 36469 - protein, 140 aa, Homo sapiens
MPGPRGLLIKTPVIGYLKRIKIDLGKFSDNPDGYIDILQGLGKSFDLTWRDIMLLLDQTLTPNERSAAITAAREFDDLWYLGVKLQTFAVSVTAHKDTVDPNNEQQQDLLQRAKKQSFHPVFRTKQEDPSLQRAMRSKDS

SEQ ID NO: 36470 - protein, 292 aa, Homo sapiens
  DOMAIN (87)..(275): Gag P30 core shell protein domain identified by PFam, accession name Gag_p30, E-value=2.4e-17, PFam score of 64.2
  misc_feature (1)...(292): Xaa = X or * as defined in Table 2
TLLPPRPGVGSDYPNIPGCPMWGNKDPGEGTLERGKVEDASQRTSRTLKETSGKAEHRKKQDGKCSPQGKNALKMYSGEFDPVRVCVPFSLSDLKQLKIDLGRFSDNPDGYIDVLQGLGQSFDLTWRDIMLLLDQTLTPNERNATITAAREFGDLWCLSQVNDRMTTEERERFPTGQQAVPSADPHXDTESEHGDWCCRHLLTCVLEGLRKTRKKAVNFSVMSTVTQGKEENPTAFLERLREALRKHTSLSPDSIEGQLILKIKFITRSAADIRKQTSKVHLRPGAKLKTPY

SEQ ID NO: 36471 - protein, 139 aa, Homo sapiens
  DOMAIN (51)..(69): C-type lectin domain proteins domain identified by eMATRIX, accession number BL00615A, p-value=3.160e-11, raw score of 16.68
MAGDVVYADIKTVRTSPLELAFPLQRSVSFNFSTVHKSCPAKDWKVHKGKCYWIAETKKSWNKSQNDCAINNSYLMVIQDITAMLEQEEWDKFVAATSRQEMAEVDNQFPGYWEIQDQSIELSGDKLSGTVFIKLQCPV

SEQ ID NO: 36472 - protein, 138 aa, Homo sapiens
  DOMAIN (100)..(118): C-type lectin domain proteins domain identified by eMATRIX, accession number BL00615A, p-value=7.900e-09, raw score of 16.68
MEEVHHPLGEQKEICHLNLLNLSEVSLQKYDCPFRGTSFGGFSLFLIWAMAGDVIYADIKTVRTSPLELAFPLQRTGSFNFSTGHKSCPAQDWKVHKGKCYWIAETKKSWNKRQNDCAINNSYLMVIQDITAMVRFNI

SEQ ID NO: 36473 - protein, 78 aa, Homo sapiens [sequence omitted]

SEQ ID NO: 36474 - protein, 112 aa, Homo sapiens
  DOMAIN (55)..(69): PROTEIN SH3 DOMAIN REPEAT PRESYNA domain identified by eMATRIX, accession number PD00289, p-value=1.000e-14, raw score of 9.97
  DOMAIN (9)..(93): PDZ domain (Also known as DHR or GLGF) domain identified by PFam, accession name PDZ, E-value=1.8e-21, PFam score of 84.7
  misc_feature (1)...(112): Xaa = X or * as defined in Table 2
TCPIVPGQEMIIEISKGRSGLGLSIVXGKDTPLNAIVIHEVYEEGAAAVDGRLWAGDQILEVNGVDLRNSSHEEAITALMQTPQKVRLVVYRDEAHYRDEENLEIFPVDLQK

SEQ ID NO: 36475 - protein, 1526 aa, Homo sapiens
  DOMAIN (1124)..(1138): PROTEIN SH3 DOMAIN REPEAT PRESYNA domain identified by eMATRIX, accession number PD00289, p-value=8.650e-11, raw score of 9.97
  DOMAIN (136)..(1493): PDZ domain (Also known as DHR or GLGF) domain identified by PFam, accession name PDZ, E-value=1.2e-105, PFam score of 364.4
FKMPENPATDKLQVLQVLDRLKMKLQEKGDTSQNEKLSMFYETLKSPLFNQILTLQQSIKQLKGQLNHIPSDCSANFDFSRKGLLVFTDGSITNGNVHRPSNNSTVSGLFPWTPKLGNEDFNSVIQQMAQGRQIEYIDIERPSTGGLGFSVVALRSQNLGKVDIFVKDVQPGSVADRDQRLKENDQILAINHTPLDQNISHQQAIALLQQTTGSLRLIVAREPVHTKSSTSSSLNDTTLPETVCWGHVEEVELINDGSGLGFGIVGGKTSGVVVRTIVPGGLADRDGRLQTGDHILKIGGTNVQGMTSEQVAQVLRNCGNSVRMLVARDPAGDISVTPPAPAALPVALPTVASKGPGSDSSLFETYNVELVRKDGQSLGIRIVGYVGTSHTGEASGIYVKSIIPGSAAYHNGHIQVNDKIVAVDGVNIQGFANHDVVEVLRNAGQVVHLTLVRRKTSSSTSPLEPPSDRGTVVEPLKPPALFLTGAVETETNVDGEDEEIKERIDTLKNDNIQALEKLEKVPDSPENELKSRWENLLGPDYEVMVATLDTQIADDAELQKYSKLLPIHTLRLGVEVDSFDGHHYISSIVSGGPVDTLGLLQPEDELLEVNGMQLYGKSRREAVSFLKEVPPPFTLVCCRRLFDDEASVDEPRRTETSLPETEVDHNMDVNTEEDDDGELALWSPEVKIVELVKDCKGLGFSILDYQDPLDPTRSVIVIRSLVADGVAERSGGLLPGDRLVSVNEYRLDNTSLAEAVEILKAVPPGLVHLGICKPLVEDNEEESCYILHSSSNEDKTEFSGTIHDINSSLILEAPKGFRDEPYFKEELVDEPFLDLGKSFHSQQKEIEQSKEAWEMHEFLTPRLQEMDEEREMLVDEEYELYQDPSPSMELYPLSHIQEATPVPSVNELHFGTQWLHDNEPSESQEARTGRTVYSQEAQPYGYCPENVMKENFVMESLPSVPSTEGNSQQGRFDDLENLNSLAKTSLDLGMIPNDVQGPSLLIDLPVVAQRREQEDLPLYQHQATRVISKASAYTGMLSSRYATDTCELPEREEGEGEETPNFSHWGPPRIVEIFREPNVSLGISIVGGQTVIKRLKNGEELKGIFIKQVLEDSPAGKTNALKTGDKILEVSGVDLQNASHSEAVEAIKNAGNPVVFIVQSLSSTPRVIPNVHNKANKITGNQNQDTQEKKEKRQGTAPPPMKLPPPYKALTDDSDENEEEDAFTDQKIRQRYADLPGELHIIELEKDKNGLGLSLAGNKDRSRMSIFVVGINPEGPAAADGRMHIGDELLEINNQILYGRSHQNASAIIKTAPSKVKLVFIRNEDAVNQMAVTPFPVPSSSPSSIEDQSGTEPISSEEDGSLEVGIKQLPESESFKLAVSQMKQQKYPTKVSFSSQEIPLAPASSYHSTDADFTGYGGFQAPLSVDPATCPIVPGQEMIIEISKRRSGLGLSIVGGKDTPLVNGVDLRNSSHEEAITALRQTPQKVRLVVYRDEAHYRDEENLEIFPVDLQKKAGRGLGLSIVGKR

SEQ ID NO: 36476 - protein, 1627 aa, Homo sapiens
  DOMAIN (1514)..(1528): PROTEIN SH3 DOMAIN REPEAT PRESYNA domain identified by eMATRIX, accession number PD00289, p-value=1.000e-14, raw score of 9.97
  DOMAIN (136)..(1627): PDZ domain (Also known as DHR or GLGF) domain identified by PFam, accession name PDZ, E-value=6.7e-134, PFam score of 458.2
FKMPENPATDKLQVLQVLDRLKMKLQEKGDTSQNEKLSMFYETLKSPLFNQILTLQQSIKQLKGQLNHIPSDCSANFDFSRKGLLVFTDGSITNGNVHRPSNNSTVSGLFPWTPKLGNEDFNSVIQQMAQGRQIEYIDIERPSTGGLGFSVVALRSQNLGKVDIFVKDVQPGSVADRDQRLKENDQILAINHTPLDQNISHQQAIALLQQTTGSLRLIVAREPVHTKSSTSSSLNDTTLPETVCWGHVEEVELINDGSGLGFGIVGGKTSGVVVRTIVPGGLADRDGRLQTGDHILKIGGTNVQGMTSEQVAQVLRNCGNSVRMLVARDPAGDISVTPPAPAALPVALPTVASKGPGSDSSLFETYNVELVRKDGQSLGIRIVGYVGTSHTGEASGIYVKSIIPGSAAYHNGHIQVNDKIVAVDGVNIQGFANHDVVEVLRNAGQVVHLTLVRRKTSSSTSPLEPPSDRGTVVEPLKPPALFLTGAVETETNVDGEDEEIKERIDTLKNDNIQALEKLEKVPDSPENELKSRWENLLGPDYEVMVATLDTQIADDAELQKYSKLLPIHTLRLGVEVDSFDGHHYISSIVSGGPVDTLGLLQPEDELLEVNGMQLYGKSRREAVSFLKEVPPPFTLVCCRRLFDDEASVDEPRRTETSLPETEVDHNMDVNTEEDDDGELALWSPEVKIVELVKDCKGLGFSILDYQDPLDPTRSVIVIRSLVADGVAERSGGLLPGDRLVSVNEYRLDNTSLAEAVEILKAVPPGLVHLGICKPLVEDNEEESCYILHSSSNEDKTEFSGTIHDINSSLILEAPKGFRDEPYFKEELVDEPFLDLGKSFHSQQKEIEQSKEAWEMHEFLTPRLQEMDEEREMLVDEEYELYQDPSPSMELYPLSHIQEATPVPSVNELHFGTQWLHDNEPSESQEARTGRTVYSQEAQPYGYCPENVMKENFVMESLPSVPSTEGNSQQGRFDDLENLNSLAKTSLDLGMIPNDVQGPSLLIDLPVVAQRREQEDLPLYQHQATRVISKASAYTGMLSSRYATDTCELPEREEGEGEETPNFSHWGPPRIVEIFREPNVSLGISIVGGQTVIKRLKNGEELKGIFIKQVLEDSPAGKTNALKTGDKILEVSGVDLQNASHSEAVEAIKNAGNPVVFIVQSLSSTPRVIPNVHNKANKITGNQNQDTQEKKEKRQGTAPPPMKLPPPYKALTDDSDENEEEDAFTDQKIRQRYADLPGELHIIELEKDKNGLGLSLAGNKDRSRMSIFVVGINPEGPAAADGRMRIGDELLEINNQILYGRSHQNASAIIKTAPSKVKLVFIRNEDAVNQMAVTPFPVPSSSPSSIEDQSGTEPISSEEDGSLEVGIKQLPESESFKLAVSQMKQQKYPTKVSFSSQEIPLAPASSYHSTDADFTGYGGFQAPLSVDPATCPIVPGQEMIIEISKGRSGLGLSIVGGKDTPLFWRLGSPRAWSQHLVRAFMLHHPVTEVEGQNAIVIHEVYEEGAAARDGRLWAGDQILEVNGVDLRNSSHEEAITALRQTPQKVRLVVYRDEAHYRDEENLEIFPVDLQKKAGRGLGLSIVGKRNGSGVFISDIVKGGAADLDGRLIQGDQILSVNGEDMRNASQET

SEQ ID NO: 36477 - protein, 286 aa, Homo sapiens
  DOMAIN (152)..(166): PROTEIN SH3 DOMAIN REPEAT PRESYNA domain identified by eMATRIX, accession number PD00289, p-value=9.357e-13, raw score of 9.97
  DOMAIN (108)..(189): PDZ domain (Also known as DHR or GLGF) domain identified by PFam, accession name PDZ, E-value=6.9e-14, PFam score of 59.6
YFKGHLLYIQSSSYCLWSLPVCLEIGWKFLEILYWLDQGDSADREGRDLCHQQPSSGCPLFQVNGVDLRNSSHEEAITALRQTPQKVRLVVYRDEAHYRDEENLEIFPVDLQKKAGRGLGLSIVGKRNGSGVFISDIVKGGAADLDGRLIQGDQILSVNGEDMRNASQETVATILKGSQQSAHSSCHPSFAPVITGLQNLVGTKRVSDPSQKNSGTDMEPRTVEINRKKAKSFFCSSSEQYFQGHLLKSGTAPYAVLLKEDTLKICEHLLLSQNPKETALLVTPPL

SEQ ID NO: 36478 - protein, 619 aa, Homo sapiens
  DOMAIN (484)..(553): Integrase core domain identified by PFam, accession name rve, E-value=0.0018, PFam score of 16.0
MWPQHGLWYLVVAMLQGWALAETWVVVDGSPMSVENALKQLEAQSTEKERTFASRVGWAFFTVLREVHTQSLRDKAQVRDLQAQAGCMESPLQSLEKKLESDMNASLGPPSWLEVRTQSDTEEEEPLLQAHPVVCQKVDHEQPVGSQGRAQGPPIVTKHTSYIAYTPTELRKLGKQCRQRLGEPLPAWMLCLWDEGVDSISCSASEMEKLASIMTHSSLSQRLQVSRQLAAGQGDHILIQAAMSSHMDCVEQCQGNTQNYLEAVAPLLQQHLAACSWAVNKSKVQEIQGPRSKGLDYLPNSWELSGQTKAIAEAIIVKIQAYPHPTTVNKLQMSVGLLGYWRAFVPHLAQMTKPLYRLTKKGTTWDWDDATETTFLTAKWAIQLAQTLRVVDQGHLFELDVHVATDGFCWGLWQCTGHLRMSVGFWSPLCKAAELWYSLIEKQLAAVYAALQACENVTGQASVIMRTTYPIVGWLPSVTQQVTIGSVSLTRWQVDYIGLLLKLQGYTHALTAVDMATGLFFTYPWRMADQQHTIWALQHLCALYGCPLAVESDSVETFHCITGTTMGITNGHKVGILFAIQPASCAYDWALEERVTLACHTPIFARLEFKSGPDAPNLE

SEQ ID NO: 36479 - protein, 32 aa, Homo sapiens
SSSVAGAVGMTTSGESESDDSEMGRLQGKNSY

SEQ ID NO: 36480 - protein, 179 aa, Homo sapiens
  DOMAIN (128)..(160): Eukaryotic protein kinase domain identified by PFam, accession name pkinase, E-value=0.0036, PFam score of 15.4
MGEGVWRTINDAFLILNLPTHTPPKVINPTRRTNKNRQLIPSRALRDSNKPVIAKSDTGEADRGLRSCEKQYRGVEDLIKSQAKLFQKDKTGMLCSSFTALDAIKEAESDWNWQLLESIASRGESNGASLLKGLKHANIVLLHDIIHTKETLTLVFEYVGRLSFRTKYRMRTDVNIVDD

SEQ ID NO: 36481 - protein, 353 aa, Homo sapiens
  DOMAIN (191)..(220): E-CLASS P450 GROUP II SIGNATURE domain identified by eMATRIX, accession number PR00464C, p-value=7.261e-24, raw score of 18.84
  DOMAIN (139)..(291): Cytochrome P450 domain identified by PFam, accession name p450, E-value=9.9e-49, PFam score of 175.1
KLGKDGHVYDHDIHPLPQNKMGGTHCPKTSRSGALSTCLPLDGPWDSIMEGGPFSHQGSHPSWTGQVVKGKVIGLPINWGHPTNMVFHLPLIPVPWTHYLKAVFNLSKISNQRMNNFLHHNDLVFKFSSQGQIFSKFNQELHQFTEKVIQDRKESLKDKLKQDTTQKRRWDFLDILLSAKSENTKDFSEADLQAEVKTFMFAGHDTTSSAISWILYCLAKYPEHQQRCRDEIRELLGDGSSITWEHLSQMPYTTMCIKECLRLYAPVVNISRLLDKPITFPDGRSLPADSVEPRAILISQRGRKRIELSGLSKQAQDYQGAKLLRVTFWASDNAVEIRMDVGGRAGSTRLTQF

SEQ ID NO: 36482 - protein, 211 aa, Homo sapiens
  misc_feature (1)...(211): Xaa = X or * as defined in Table 2
LSIYLVTQKAASSEWGPEQEKALQEVQAAVQAALILEPYDPAGPVVLEVSLADRDAVWSLWQAPIGESQQRPLGFWSKALPSSADHKACHAQQHSIIKWKWYIHDRARAGPEGTNSSARYAATMXKWTASALQPLSRKSLKDSSEGKSSQWAELRAVHLAVHVAWKEKWPDVRLDTDSWAVANGLARWSGTWKEHDRKIGDKEVWGRGTRI

SEQ ID NO: 36483 - protein, 522 aa, Homo sapiens
KRKISFSEEKWKQAAEIRLSNEKPNVNPQDNGENVSRVSVNSFGLLRKHLLREIIINKNLQCLASSLQVARVIPAEHESGQVLPSSEFHKDLAYLEQNPPPPNCSPFFTDIRIGSLPSDASVCGDNCVFESWIGDIILDMDNEFSDSIHNTFGHMWRTKEHNEAGWLLLSSVDKVMKENDELRDSISWLQKQILSLKSAKIALSESLISCRERAEIVEKQTQAVIMRMADPQGKVHAQPQQVSTVKGRTLIGKEWDPATWNGDVWEDPDEAGDTEFVNSDEPFLPEVTASPSPRDLWPFTRVTLHWGKGNDQTFWGLLDTGSELVMIPGDPKCHCGPPVKIGVYGGQKTHGSWGMTVDYQKFNQVVTPIVAAVPDVVSLLEHINTSPGICLHRWPHGEFPMIQLTEEEKTRAWFTDGSARYAGTTRKGREEYVRNTANPLGRLLVLPCPVIKVNGKLQQPNPGRTTNGPDPSGMKVWVTPPGKKPQPAEVLAEGKGKTEWVAEEGSQQYQLRLHDQLQKQRL

SEQ ID NO: 36484 - protein, 366 aa, Homo sapiens; identical to SEQ ID NO: 36016

SEQ ID NO: 36485 - protein, 179 aa, Homo sapiens
GFWSWLLNMIRPKNAKDSTSNSMENTDSTWSKLFGELCKINEFDTPDSPLLRGKEFNDSILNTFDHMWRTREHNEAVWLLLSSVDKVMKENDELRDSVSQLQRQIPAQKIDGSWRMTVNYCNLNQVVTPISAAVPDAVSLLEQMNTSPRIWYAAIDLANAFYSIPVHKAHQKQFAFSWQ

SEQ ID NO: 36486 - protein, 71 aa, Homo sapiens
  misc_feature (1)...(71): Xaa = X or * as defined in Table 2
LTLVPFSFSVVLTPLPKGNTIRYXTGILXGWNLSWKGTLGFSVTAQPSSGTPRTALGSRTTKPLLVSLLQV

SEQ ID NO: 36487 - protein, 203 aa, Homo sapiens
  misc_feature (1)...(203): Xaa = X or * as defined in Table 2
QVTDVQDFPLKCKIQWRRTVRGDLQPFTRVTVHWGKGNDQTFQGLLDTGSELTLIPGDPKRHCGPPVKIGAYGGQIINGVLAQVQLTVDAVGPWTHPVVISPVPECIIGIDILSSWQNSHIGSLTGRVRATMVGKAKWKPLELPLPRKIVNQKQYHIPGGIAEIGATIKDLKDTGVIPTSPFNSPIXPMQKTDGSWRMTVDYL

SEQ ID NO: 36488 - protein, 217 aa, Homo sapiens
DVEHVGKMRRRWRRRVVVADGNVVKPMSCAGDLQPFTRVTVHWGKGNDQTFQDLLDTGSELTLIPGDPKRHCGPPVKIGAYGGQIINGVLAQVQLTVDAVGPWTHPVVISPVPECIIGIDILSSWQNSHIGSLTVHLSSDPKGCHSEWGPEQEKALQEVQAAVQAALILEPYDPAGPVVLEVSLADRDAVWSLWQAPIGESQQRPLGFWSKALPSSA

SEQ ID NO: 36489 - protein, 288 aa, Homo sapiens
FSTRDGSLTVWSTRNHEKEAQQSLLSMEPALGVVLLQLLFAIDDRSLLSGDMENTESPWHELFRDLCKINAFDTPDSSLMRGKEFSDSIHNTFDHMWRTKEHNEAGWLFLSSVDKVMTENDELRNSIFRLQKQILSLKSAKIALSESFISYRERTEIVEKQTEALIMRMADPQGKVHAQPQQVSTVKGRTLIGKEWDPATWNGDVWEDPDEAGDTEFVNSDEPFLPEVTASPSPRDLWPFTRVTLHWGKGNDQTFWGLLDTGSELVMIPGDPKCHCGPPVKIGVYGGQ

SEQ ID NO: 36490 - protein, 68 aa, Homo sapiens
  misc_feature (1)...(68): Xaa = X or * as defined in Table 2
VPDFPAKPIQGPHFNSRYLREAVHGEAVHAPFIAGQPLTXXELMSIFPQFQFFLYRRLDSHSGQSWQI

SEQ ID NO: 36491 - protein, 1013 aa, Homo sapiens
  DOMAIN (628)..(645): RNase H domain identified by eMATRIX, accession number PF00075A, p-value=4.000e-09, raw score of 14.44
  DOMAIN (874)..(920): Integrase core domain identified by PFam, accession name rve, E-value=0.0097, PFam score of 13.5
MFPTTDNHATGHYAVSYLRDTTATESIRLVSYYGTTTLLESTTSCFPYYGTHHATESLRLVILLRTHHGYWSHYGCFPTTGHTTAYMRATYRRGVTEVNQGDHDGLHEHHYRSGYSRTGTHHLATWGNYGQDKSRNGDSNHRDNLEYTSRGKLRTANSYGIQGVSTSLVFCYTIIERNNRQMLPVIRSTTGGDSVQTCTNPLDTFFPFDPCVLKRTQGDFNTENTPPTNKTHPINQEPHSKTTNMYTKKGDKPPFRQRSQITSHSTGHPNTFMSRQSTTAAPSREGAHRHSCQTSKGVLDTAQMLTPSSKQTLDTAQVPTPPSKQTLPCPLPPPSKKTPSPERFACAQHCVEERHVFVGTETALKQILSLRSAKIALSESLISCRERVEIVEKQTQALIMRVADLQQKVHAQPHQVSTVKMRALIGKEWDPATWNADVWGDPDEAGDTEFVNSDESFLPEEKASPSPVVTTSTPQPMLPSAFPPLSEEINPALPEATVMASPEAVARQDNVDSPQEPPPTPLFASRPTTRLKSWQAPRGPECIIGIDILSSGQNPHIGSLTGRVRAIMVGKAKRKPLELPLPRKILNQKQYRIAGGIEEISATIKDLKDAGVVIPTTSLFDSPIWPVQKTDGSWRMTVDYRQINQVATPIAAAIPDVASLLKQINTSPDTWPYDPPYPMVIEVSVADRHAVWSLWQAPIGESHQRPLGFWNKALPSSADNYSPFERQLLACYWALVEIERLIIPNGLAGWSGTWKKHDWKIGDKEIWGRGVWMKLSEWSTTVKIFVFHVSAHQWVTSAEEDFNNQVDRMTCSVDTIQPLSPATPVIAQWAHEQRGHSGTDGGYGWAQQHGLPLTKADLAMATAKCPICQHLWGNGLLKSQLQRKQGNNSLQGWGKVLQTAVNALNQHAIYGTLSPIARIHGSRHQGLDVEVAPLTIIPSDPLAKFLLPVPATLRSVDLEVLVPETGMLPPGDTTMIPLNWKLRLLPGHFGLLLPLTQQAKKGVTVLAGVIDPD

SEQ ID NO: 36492 - protein, 454 aa, Homo sapiens
  DOMAIN (6)..(36): kw TRANSCRIPTASE REVERSE II ORF2 domain identified by eMATRIX, accession number DM01354R, p-value=8.948e-17, raw score of 8.50
MIISIDAEKAFDKIQQPFMLKTLSKLEETASPSPVVATYTPQPMLPSAFPPLSEEINPVLPETTVMASPEAVTRQDNVDSPQKPPPTPMFASRPITRLKPRRAPSEEGIQRLKKIGMVEWISHFRPTPLSMEGPEHILLTNTLLNRYVKAAPASLKSPLTALLFMSDLTVGTTFSQLQNLNTMGIFGSSCDRSQVAALNHQRQVPELIIGIDILSSWQNPHIGSLNGRGYINSLALCHNLIRRDLDRFLLPQDITLVHYIDHIMRLDSVKDKWLHLAPPTTKKEAQCLVGLFGFWRQHISLWRQPLACYWALVETEHLTMGHQVTMQPELPIMNWLLSDPSSYKPAPMASWGVPYGQLTEEEKTRAWFTDGSARYTETTRKWTAVAIQPLSRTSLKDSNEGKSSHQQAKNGITVLAGVIDPDYQDEISLLTPQWRCHPGSSVWRASSLGISHPP

SEQ ID NO: 36493 - protein, 627 aa, Homo sapiens
  DOMAIN (515)..(567): ELEMENT TRANSPOSABLE INSERTION PROTEIN TRANSPOSITION DNA domain identified by eMATRIX, accession number PD02455C, p-value= 8.781e-10, raw score of 29.23
  DOMAIN (494)..(561): Integrase core domain identified by PFam, accession name rve, E-value=1.1e-08, PFam score of 34.0
SWLLNMIRPQNAKDSTFNSMENTDSPWCELFRELCKINAFDTPDSSLLRGKEFSDSIYNTFDHVWRTKEHNEAGCLLLSSVDKVMKENDELRDSVSQLQKQILTLKYSKIALSESLISCRERAEIVEKQTQARIMQVADLQGKVHAQPHQVSTVKVRALIGKEWDPATWNGDVWEDPDEAGDTEFVNSDELFLPEETASPSPVVATSPPQPMLPSAFQPLSEEINPTLPEATVMASPEAVARQDNVDSPQEPPLTPMFASRSITRLKFLQTPRGVVESVTHEVGNDQTFGGLLDTGSELTLIPADPKRYCGPPVKVEAYGGQGRPLGFWNKALPSSADNYSPFERQLLACYWALVETEHLTTGHQVTMRPELPTTNWVFSDPSNHKVGHAQQYSIIEWKWYIHGWARAGPEGTTSWGVPYEQLTEEEKTTALYTDGSAQYAGTTRKWTATAVQPLSRTSLKAAVKRNLPRQRFVLIGINTYYGYWFTYPECSASAKSAIRGLMECLIRHHGIPHSIASDKGPHFKAKEVQQWAHAHGIHWSYHVSHHPEAAELIEQWNGLLGSELQCQVNGNLQQPNPGRTTSYPVPSGMKFWVTPPGKIPQPVEVLAEGKGNTEWVGEEVSHQYQL

SEQ ID NO: 36494 - protein, 158 aa, Homo sapiens
  misc_feature (1)...(158): Xaa = X or * as defined in Table 2
MGRNQNRKAENSKNWNASSPPKEHNSSPAREQNWREDEFNELTEVGFRRSVITNFSDLKEHVLTHCKEAKILEKRLDKWLTKITSVEKSCKXPDGDXKPQYENFMKHTQASIADLIKRKKRYQXLKIKLMKXSKKTRXEKKKYKLPSENTTNTSMQIY

SEQ ID NO: 36495 - protein, 71 aa, Homo sapiens
  misc_feature (1)...(71): Xaa = X or * as defined in Table 2
NKRGYKQMEEHSMLMDKKNQYYENGHTAQGNXAGEGNKGYSIRKTGSQIVPLCRXHDCISRKPDCLSPKSP

SEQ ID NO: 36496 - protein, 673 aa, Homo sapiens
  DOMAIN (137)..(182): kw TRANSCRIPTASE REVERSE II ORF2 domain identified by eMATRIX, accession number DM01354N, p-value=1.000e-40, raw score of 13.17
  DOMAIN (221)..(452): Reverse transcriptase domain identified by PFam, accession name rvt, E-value=1.2e-09, PFam score of 45.4
  misc_feature (1)...(673): Xaa = X or * as defined in Table 2
MARELRDECTSFSSQFHQLEERVSVIEDQMNEMKQEEKFREKGIKRSEQSLQEIWDYMERPNLCLIGVPESDGENGIKLEDTLQDIIQKDFPNLGRQANIQIQEIQRMPQRYSSRRATPRHIIVRFTKEIQTTIREYYKHLYANKLENLEEMDKFLDTYTLPRLNQEEVESLNRPITGSEIEAIINSLPTKKSPRPDGFTAEFYQRYKEELVPFLLKLFQSIEKEGILPNSFYEASIILIPKLGRDTTKKENFRPISLMNIDAKILNKILANQMQQNIKNLIRHDQAGFIPGMQCWFNIRKSINVIQHINRTKDKNHMIISIDAEKAFYKIQQPFILKTLNKLENKIPRNPTYKGCEGPLFKENYKLMLKEIKEDTSKWKNIPWSWIGRINIVKMAILPKVIYRLSAIPIKLPMIFFTELEKTTLKFIWNQKRACIAKSILSQKNKAGGIMLPDFKLYYKATVTKAAWYWYQNRDIDQWNRTEPSETIPHIYSHLIFDKPDKNKKWGKDFLFNKWCWENWLAICRKLKLDPFLTPYTKINSRWIKDLNVRPKTIKTLEENLGNTIQDIGMGKDFMCKTPKAMVTKAKIDKWDLIKLKSFCTAKETTVRVNRQPTEWEKIFAIYSSDKRLISRIYKELKLXPCSIVXSQVAXCLQLCSFGLGLTWQCRLFFGSI

SEQ ID NO: 36497 - protein, 43 aa, Homo sapiens
  misc_feature (1)...(43): Xaa = X or * as defined in Table 2
IGEVLLDNILQRVFQLGSILPITFRYTNQTXIWSWTLFWLVSY

SEQ ID NO: 36498 - protein, 674 aa, Homo sapiens
  DOMAIN (410)..(455): kw TRANSCRIPTASE REVERSE II ORF2 domain identified by eMATRIX, accession number DM01354N, p-value=1.000e-40, raw score of 13.17
MTNTYHYPQQTSIREVGPGQLCQVALGLTHGGSIGGNHSGACVTQPSAPDGSAKTQRRLSYFGRRKSDMGLISNMLMGEAEAEGPKYRPGHADVCQQPPMAPPNQPDTLSPSLTPDTILHTRDKNDLQLRVLLEGKLTNRKDIHTKNPSVHHHHQRPKVDKTTKMGKKQSRKTGNSKNQSASPPPKECNSSPATKQSWTENDFEELREEGFRRSNYSELWEDIQTNGKEVKNFEKNLEEWITRITKAEKCLKDLMELKAKAPELRDKCRSLRSRCDQLEERVSAMEDKMNEMKREEKFREKRIKRNEQSLQEIWDYVKRPNLRLIGVPESDGENGTKLENTLQDIIQENFPNLARQANVQIQEIQRTPQRSSSRRATPRHIIVRFTKVEMKEKMLRAAREKEIQTTIREYYKHLYTNKLENLEEMDKFLDTYTLPRLNQEEVESLNRPITGSEIVAIINSLPTKKSPGPDGFTAEFYQRYKEELKTFMQCLQAFQLPTPPLGQVTQAPTAAGNDCGQWIWAVMMSSLCGALTVSKVATSMPLLHAFDLIIILSHHVGSLAPCPQCRSAVQQSFLYCFRGETAVAVSRNPSWCLEGEGESQALELWAEQAHTDVVRNRKYKISSKLHVKYMKDKNNSKPLGRWGVPMGALLDQKRSRHRSGGVEVNGVSAMAANS

SEQ ID NO: 36499 - protein, 294 aa, Homo sapiens
MRNLRNIQKAKATINLGISFDEGLKGFMWSRIEAAPLPNTRWCLPHGYSGPANSGGCYYITTGMSCWLSDLYPRHDGVHVGLQGKDLEHDIPVDLGSRPTSVDPVSRSAPGPQGPKAPVDSGSRTTPANPGAGPSPVDPSSRPAPVASGFRLIMIDQNTKLIPVPGWPLRLRLKIYLSSRSASLDSGSRFAPVDTNFIPVPTDRGHSHAPEDPVDRLTSVDPTKEKNWMENEFDKLTEVGFRRSVITNFSELKEHVLTHRKEAKNLEKRLDEWLSRITCAEKSLNDLMELKTTV

SEQ ID NO: 36500 - protein, 644 aa, Homo sapiens
MSPVTLWVRTSSRGEDRCGMCTPGRDTGFAPISGMCSKYRSCTINEDTGLGLAFTMPMSLDTKHIPNFGKVHGYIMRHHKNEDTIPWRRNTKKEEARGTQPLEADDQNPGWEDGKPGSLENEGRRSHRGNPAPDMPQPPKEDLFILPDEYKSCLRHKRSLLRSHRNEELNVETLVVVDKKMMQNHGHENITTYVLTILNMERILKKTSFTIIHPSAMERCPVLNLQIRDSLWNHCFSLATTVHRFHPVGRHALKKMYKLPSAYINVSITKYTQRFALTYISCVFHRNAAFVAVPGEGRCCAGVDVPAPMSLRSPGPHWPQEHGALWISCTVRGMASCLGQLCRVSMRVRANIGKVQKPRLRISNGKGLHTQSELSGSAYLEKGWRGAAPGLDSRNEKGTEGARDSGTPGRQSQTLQRGPPGPVPGSSKIAPQTLTRQGSMTASRKLVLLLPEFCERTGEQSGQLYPPSPLLVEWVMPAGTSSTVDPLLPELCRRWERQALSLCRLYRQRTSVSIKALCDHTETRSVALSTCQGLECNSSPARKQNWMENEFEELTEVGFRKSVITKFSKLKEHILTHRKEAKNLEKRLDEWLTRITSVEKSLNDLMELKTTLRELHEAYTSFNSRFDQVEERILVIEHQINEIK

SEQ ID NO: 36501 - protein, 224 aa, Homo sapiens
  DOMAIN (115)..(146): Protein kinases ATP-binding region proteins domain identified by eMATRIX, accession number BL00107A, p-value=8.500e-27, raw score of 18.39
  DOMAIN (4)..(180): Eukaryotic protein kinase domain identified by PFam, accession name pkinase, E-value=3.5e-65, PFam score of 230.0
MEMYETLGKVGEGSYGTVMKCKHKNTGQIVAIKIFYERPEQSVNKIAMREIKFLKQFHHENLVNLIEVFRQKKKIHLVFEFIDHTVLDELQHYCHGLESKRLRKYLFQILRAIDYLHSNNIIHRDIKPENILVSQSGITKLCDFGFARTLAAPGDIYTDYVATRWYRAPELVLKDTSYGKLGLRRGTPLKEHNSSPAREQNWMENEFDKLTEVGSQKVGNNKLL

SEQ ID NO: 36502 - protein, 484 aa, Homo sapiens
  DOMAIN (424)..(465): kw TRANSCRIPTASE REVERSE II ORF2 domain identified by eMATRIX, accession number DM01354I, p-value=3.700e-39, raw score of 15.55
  DOMAIN (195)..(410): AP endonuclease family 1 domain identified by PFam, accession name AP_endonucleas1, E-value=7.3e-45, PFam score of 162.5
YLGDFLLEKEIQNDEDSQTNSVWTEHSNEETNKDFRKDAGFLEMKGALRETMYRTQKEMKNSIFAEYAKESKAMAIKTDVDVVEIKNTLRKHIYRAQAVRYNCIRIDKQPVYNVEVKNAEFPRGVLNLIESLIEGHFFKEAIEELSTLQAHYIPPVCVLHALLENVLQEHNSSPAKEQNWMENEFEELTEVGFRRLVITNFSEVKEESRTQPKEAKNLARRDTHRLKIKGWRKIYEENGKQKKAGVPILVSDKTDFKPTKIKRDKEGHYTMVKGSIQQEELTILNIYAPNTGAPRFIKQVLRDLQRDLDSHTIIMEDFNTPLSTLDRSTRQKVNKDIQELNSALQQVDLIDICRMLHPKSTEYTFFSAPHHTYSKIDHRVGSKALLSKCKRTEIITNCLSDHSAIKLELRIKKLTENRSTAYNLNNLLLNDYGVHNEMKSEIKMFFETNENKDTTYQNLWDTFKAVEIQTTHPENTTNTSIQIN

SEQ ID NO: 36503 - protein, 109 aa, Homo sapiens
  DOMAIN (69)..(87): Eukaryotic initiation factor 4E proteins domain identified by eMATRIX, accession number BL00813A, p-value=4.736e-11, raw score of 15.06
SPSTHASGGDSGGERMNNKFDALKDDDSGDHDQNEENSTQKDGEKEKTERDKNQSSSKRKAVVPGPAEHPLQYNYTFWYSRRTPGRPTSSQSYEQNIKQIGTFASVSSW

SEQ ID NO: 36504 - protein, 217 aa, Homo sapiens
  DOMAIN (88)..(132): Eukaryotic initiation factor 4E proteins domain identified by eMATRIX, accession number BL00813B, p-value=6.143e-29, raw score of 24.44
  DOMAIN (18)..(217): Eukaryotic initiation factor 4E domain identified by PFam, accession name IF4E, E-value=4.3e-75, PFam score of 262.9
SLEDAMSLKDDDSGDHDQNEENSTQKDGEKEKTERDKNQSSSKRKAVVPGPAEHPLQYNYTFWYSRRTPGRPTSSQSYEQNIKQIGTFASVEQFWRFYSHMVRPGDLTGHSDFHLFKEGIKPMWEDDANKNGGKWIIRLRKGFGSRCWENLILAMLGEQFMVGEEICGGCGVCPAFQEDIISIWNKTASDQATTARIRDTLRRVLNLPANTIMEYKN

SEQ ID NO: 36505 - protein, 34 aa, Homo sapiens
PPSMPYWLHAPGEPNCQNVNPIFIFCSFASENSR

SEQ ID NO: 36506 - protein, 139 aa, Homo sapiens
EVLDFIQQIDEVWREMRWIMDALQYARYKQPVSGLPITKLIDPSDEQSLKKINSTSSSHIHCLPSPPPSPEMHRRKTVSDSQPCSDEEACSEVFLPTNSDYDSSDALSPRDLDLVYLSSHDIAQQTLSGLSGSAPDVLQ

SEQ ID NO: 36507 - protein, 238 aa, Homo sapiens
DILSYHKRSHQRLFPGLYLGYLKLCSSVDQIKVLVTQKLPNILCHVKIRENNNISRLTVTWLECGLFLRLTVVFFNEQGSPSEYGGGRQLGFETSSKCVSISGGDSRALNEAQAPSKCGVKCTVPMPVKQALAKTIFFLTSVSGFADSQPCSDEEACSEVFLPTNSDYDSSDALSPRDLDLVYLSSHDIAQQTLNGPKRERPRRPASARRENPSGGRPRIPKARAQIPITHVPRFSLT

SEQ ID NO: 36508 - protein, 127 aa, Homo sapiens
  DOMAIN (11)..(44): LacY family proton/sugar symporters proteins domain identified by eMATRIX, accession number BL00896A, p-value=1.114e- 11, raw score of 14.92
  misc_feature (1)...(127): Xaa = X or * as defined in Table 2
AVFFFFFFFFFFFFFFFFFFFFFFFFFFFFFFFFFFSSSSSSFFFFSFFLFFFFKLKELRLVIXPLNPENXESCPLFSPVNLDMPXTFKDKRWKVNWARSTSRQQLLESARTKSWAEREGGTRWRAW

SEQ ID NO: 36509 - protein, 65 aa, Homo sapiens
  DOMAIN (13)..(37): RHODOPSIN-LIKE GPCR SUPERFAMILY SIGNATURE domain identified by eMATRIX, accession number PR00237E, p-value=7.088e-09, raw score of 13.03
  misc_feature (1)...(65): Xaa = X or * as defined in Table 2
KNFLPNCSAKELFFFFFFFFFFFLLLLLLLLYFKFMIXWFYKHLAFPLLAFILSPTALXRGVFHH

SEQ ID NO: 36510 - protein, 68 aa, Homo sapiens
  DOMAIN (10)..(56): TRANSFERASE CHITIN SYNTHASE CHIT domain identified by eMATRIX, accession number PD01446H, p-value=6.170e-09, raw score of 20.90
VLVSFGVLLLLLFIFFTSFSFLFFFFLLFFFFFFFFFFFFFFFFFFFFFFFFFFFFFLLLLLLLLLCH

SEQ ID NO: 36511 - protein, 158 aa, Homo sapiens
  DOMAIN (108)..(132): RHODOPSIN-LIKE GPCR SUPERFAMILY SIGNATURE domain identified by eMATRIX, accession number PR00237E, p-value=6.029e-09, raw score of 13.03
SSLIFLLSSLISSMNRSISSPSPSIISMLSTSLLGTSSPKPGAGGAQTPLTFPPGSWYSPPPKAGASFCTGAFSTTLFSLGTFSMLSFFPVFFFFFFIFIFFFFFFFFFFFFFFFFFFLLLLLLLLYFKFGARGGLPRACATLPLALQGVTSMAVLMV

SEQ ID NO: 36512 - protein, 35 aa, Homo sapiens
  misc_feature (1)...(35): Xaa = X or * as defined in Table 2
FTFWHDFAAAGTGCSFPCLVLPSWWXQNLSAFACL

SEQ ID NO: 36513 - protein, 75 aa, Homo sapiens
  misc_feature (1)...(75): Xaa = X or * as defined in Table 2
QWISRQKPYKPEKRGDQYSTFLXECXILVPPLFWLVGFLPRDPLLVXWAYGCPXHFFLHFNLGESNNYVSWGCSS

SEQ ID NO: 36514 - protein, 127 aa, Homo sapiens
QRYSSRRATPRHIIVRFTKVERKETMLRAAREKGRVTHKGKPIRLTVDLLAETLQARREWGPIFNILNEKNFQPRISYPAKLSFISEGEIKSSNAERFVTTRPTLRDLLKEALNMERNNRYLPGRPL

SEQ ID NO: 36515 - protein, 253 aa, Homo sapiens
MDKLLRAKGGSSSHRKEVKNLEKRLDEWLTRITNVEKALNDLMELKTMAGELCDECTSFSSQFGQLEERVSVIEDQMNEMNDEENGTKLENTLQDIIQENFPNLARQANIQIQEIQRMPQRYSSRRATPRHIIVRFTKVEMKEKMLRAAREKGWVTHKGKPIRLTADLSAEILQARREWGPIFNILKEKNFQSRISYPAKLSFISEGEIKSFTDKQMLRDFVTTRPALQELLKEALNMERNNRYQPLQKHAKL

SEQ ID NO: 36516 - protein, 203 aa, Homo sapiens
MAEYEQLQSTAASVSDAEDGPNLHLIGVPESDGENGTKLENTLQDIIQENFPSLARQANIQIQEIQRMPQRYSSRRATPRHIIVRFTEVEMKEKMLRAAREKGRVTHKGKPIRLTADLLAETLQARSEWGPIFNILKEKNFQPRISYPAKLSFIREGEIKYFTDKQMLRDFVTNRPPLKQLLKEALNMERNNRYQPLQKHAKL

SEQ ID NO: 36517 - protein, 392 aa, Homo sapiens
AVYECHRNVDNLSLEERNPLGYAEPSENDFLTSIYKYLNFKITLLKDSCGLLLLLVQSITGKSVARRSVPEPPCQGQSTGFKPRLHLWGQGTDEQKDSSNLCRLKCPCLTALKRVVFLPARSWRSENGQTASSSGSLTPEQPKWEAPPSSARLTPHMAGSLKSQCDQLEEWVSAMEDEMNEMKREGKFREIRIKRNGQSLQEIWDYVKRPNLHLIGVPESDGENGTKLENTLQDIIQENFPNLARQANTQIQEIQRTPQRYSSRRATPRHVIIRFTKVEMKEKMLRAAREKGRVTHKGKPIRLTADLSAETLQARREWGSIFNILKEKNFQPRISYPAKLSFISEGEIKYFTDKQMLRDFVTTRPALKELLKEALNMERNKRYQPLQKHAKM

SEQ ID NO: 36518 - protein, 45 aa, Homo sapiens
  misc_feature (1)...(45): Xaa = X or * as defined in Table 2
XETSPSRGQQTPHTGELQLASDRVTRDQNWIENEFDKLTEVGFRS

SEQ ID NO: 36519 - protein, 94 aa, Homo sapiens
  misc_feature (1)...(94): Xaa = X or * as defined in Table 2
SMPASTHLILVGSCSWKMVIVLPLVTHFLFTALTVPWNLPWVELYWNMXTMXLRSMKESLMATIFTLPELKAVLHEKLQXLQSTEDLXHGLLGG

SEQ ID NO: 36520 - protein, 66 aa, Homo sapiens
  DOMAIN (18)..(46): kw TRANSCRIPTASE REVERSE II ORF2 domain identified by eMATRIX, accession number DM01354A, p-value=5.582e-22, raw score of 11.77
  misc_feature (1)...(66): Xaa = X or * as defined in Table 2
TANIIMTGSNSHITILTLNVNRLNARIKRHRLENCIKSQDPSVCCIXETHLMCRDTYRLKIKGWSN

SEQ ID NO: 36521 - protein, 324 aa, Homo sapiens
  DOMAIN (110)..(151): kw TRANSCRIPTASE REVERSE II ORF2 domain identified by eMATRIX, accession number DM01354I, p-value=5.500e-39, raw score of 15.55
MGDFNTPLSTLDRSTTQKVNKDTQELNSALQQADLIDIYKTLHPKSTEYTFFSAPHHTYSKIDHIIGSKALLSKCKRTEITTNYLSDHRAIELEIRIKKLTQNHTTTWKLNNLLRNDYWVNNEMKAEIKMFFETNENKDTTYQNLWDTFKAVCRGKCTALNAHKRKQERSKINTLTSQLKELEKQEETNSKASRRQEITKIRAELKEIKTQKTLQKISESGRRSQDGRIGTAPVYSSQRERRRRQVISAFPSEGTDKQKDSSNLCRLTCPCLTALKRAVVLPARSWRSENGQTASSKGKLTTRKGHLHRKPFCTFTIIQRPKSK

SEQ ID NO: 36522 - protein, 200 aa, Homo sapiens
FRADVAGPSRPSAVAFWSRDFSDEEQSVVYVPGISAEGNVRSRHKLMSPKADVKLKTSRVTDASISMESLKGTGDSVDEQNSCRGEIKSASLKDLCLEDKRRIANLIKELARVSEEKEVTEERLKAEQESFEKKIRQLEEQNELIIKEREALQLQYRECQELLSLYQKYLSEEQEKLTMSLSELGAARMQEQQLYNNPYI

SEQ ID NO: 36523 - protein, 125 aa, Homo sapiens
  misc_feature (1)...(125): Xaa = X or * as defined in Table 2
MAPKQDPKPKFQEGERVLCFHGPLLYEAKRVKVAIKDITREIHSYITVVGIKIGMNGFRRAKYSNTWTPICRNSENFKKPISKFVLXTEYXGEMPVDXFWTWNEQWRSCWLPCLYNDTSDLSAGV

SEQ ID NO: 36524 - protein, 1275 aa, Homo sapiens
  DOMAIN (1127)..(1151): Guanine-nucleotide dissociation stimulators CDC25 family sign domain identified by eMATRIX, accession number BL00720B, p-value= 9.419e-17, raw score of 16.57
  DOMAIN (1038)..(1223): RasGEF domain identified by PFam, accession name RasGEF, E- value=1.4e-96, PFam score of 334.3
MQKAIRLNDGHVAPLGLLARKDGTRKGYLSKRSSDNTKWQTKWFALLQNLLFYFESDSSSRPSGLYLLEGCVCDRAPSPKPALSAKEPLEKQHYFTVNFSHENQKALELRTEDAKDCDEWVAAIAHASYRTLATEHEALMQKYLHLLQIVETEKTVAKQLRQQIEDGEIEIERLKAEITSLLKDNERIQSTQTVAPNDEDSDIKKIKKVQSFLRGWLCRRKWKTIIQDYIRSPHADSMRKRNQVVFSMLEAEAEYVQQLHILVNNFLRPLRMAASSKKPPITHDDVSSIFLNSETIMFLHQIFYQGLKARISSWPTLVLADLLDILLPMLNIYQEFVRNHQYSLQILAHCKQNRDFDKLLKHYEAKPDCEERTLETFLTYPMFQIPRYILTLHDVLAHTPHEHVERNILDYSKDILEELCTIMHDEVSEKENIRKNLAIERMIIEGCEILLDTSQTFVRQGSLIQVPMSEKGKITRGRLGSLSLKKEGERQCFLFSKHLIICTRGSGGKLHLTKNGVISLIDCTLLEEPESTEEEAKGSGQDIYHLDFKIGVEPKDSPPFTVILVASARQEKAAWTSDISQCVDNIRCNGLMMNAFEENSKVTVPQMIKRTREGTREAEMSRSDASLYCDDVDIRFSKTMNSCKVLQIRYASVERLLERLTDLRFLSIDFLNTFLHSYRVFTTAIVVLDKLITIYKKPISAIPARWLRSLELLFASGQNNKLLYGEPPKSPRATRKFSSPPPLSITKTSSPSRRRKLISLNIPIITGGKALDLAGSLSCNSNGYTSMYSAMSPFSKATLDTSKLYVSSSFTNKIPDEGDTTPEKPEDPSALSKQSSEVSMREESDIDQNQSDDGDTETSPTKSPTTPKSVKNKNSSEFPLFSYNNGVVMTSCRELDNNRSALSAASAFAIATAGANEGTPNKEKYRRMSLASAGFPPDQRNGDKEFVIRRAATNRVLNVLRHWVSKHSQDFETNDELKCKVIGFLEEVMHDPELLTQERKAAANIIRTLTQEDPGDNQITLEEITQMAEGVKAEPFENHSALEIAEQLTLLDHLVFKKIPYEEFFGQGWMKLEKNERTPYIMKTTKHFNDISNLIASEIIRNEDINARVSAIEKWVAVADICRCLHNYNAVLEITSSMNRSAIFRLKKTWLKVSKQTKALIDKLQKLVSSEGRFKNLREALKNCDPPCVPYLGMYLTDLAFIEEGTPNYTEDGLVNFSKMRMISHIIREIRQFQQTAYKIEHQAKVTQYLLDQSFVMDEESLYESSLRIEPKLPT

SEQ ID NO: 36525 - protein, 300 aa, Homo sapiens
MWATLPLLCAGAWLLGVPVCGAAELCVNSLVWHVDMESPWNQVSRSRQRPGAACPEGAHQASALLAAVVDASEGVKCVDNIRCNGLMMNAFEENSKVTVPQMINHLALQRGLKEYPRGTFATGKQNGLVPLLLPQHLNLQGWVRGKGSLIQVPMSEKGKITRGRLGSLSLKKEGERQCFLFSKHLIICTRASGGKLHLTKSKPTKVNNYRQKKADHNFTQVKMPLINAQIGMNGFRRAEYSNKWTPICRNSENFKKPISTLKPNQEVSTAPPNVFIPGPEALQTSPSMPQAFYHLTQNKQ

SEQ ID NO: 36526 - protein, 109 aa, Homo sapiens
MAPKQDPKPKFQEGERVLCFHGPLLYEAKCVKVAIKDKQVKYFIHYSGWNKNWDEWVPESRVLKYRGHQFAETARNFKKPIREQYAEGKMRGAAPGKEDIWVCNRKMLK

SEQ ID NO: 36527 - protein, 116 aa, Homo sapiens
  misc_feature (1)...(116): Xaa = X or * as defined in Table 2
KIRVPAAVAGLSPPLGPWSLRSPSQPERCCPWRNSSWWTAPRTSIITAAKGVSPARLSSISCTTRGSWVKTPTPTRARMVIASSNLERPSALSRMXPTSQSMTRKRWWRLWPSTTL

SEQ ID NO: 36528 - protein, 164 aa, Homo sapiens
  DOMAIN (102)..(115): PROTEIN ZINC-FINGER METAL-BINDI domain identified by eMATRIX, accession number PD00066, p-value=4.130e-11, raw score of 13.92
  DOMAIN (1)..(134): Zinc finger, C2H2 type domain identified by PFam, accession name zf-C2H2, E-value=9.6e-10, PFam score of 45.8
SCAQTFPKLDTFLEHIKSHQEELSYRCHLCGKDFPSLYDLGVHQYSHSLLPQHSPKKDNACLQVFPCERYLRRHLPTHGSGGRFKCQVCKKFFRREHYLKLHAHIHSGEKPYKCSVCESAFNRKDKLKRHMLIQYDEVRQGLGMVPGTQKVLNKCFCHNVKKKK

SEQ ID NO: 36529 - protein, 492 aa, Homo sapiens
  DOMAIN (169)..(183): C2H2-TYPE ZINC FINGER SIGNATURE domain identified by eMATRIX, accession number PR00048A, p-value=7.632e-11, raw score of 10.52
  DOMAIN (128)..(475): Zinc finger, C2H2 type domain identified by PFam, accession name zf-C2H2, E-value=6.5e-31, PFam score of 116.1
PLSTSIPEPGPPWASQPWWERGGGGVQCCCAPGWEWNGGDPGTGDATLPTPRGAKPVGGASSISHPHSVQPWQTGDSNPKGPNPAAPMTSATGGTVATFDSPATLKTRRAKGARGLPEAAGKPKAQKLKCSYCDKSFTKNFDLQQHIRRYTCVEGTDKLVFHSHTGEKPFQCIACGRAFAQKSNVKKHMQTHKVWPPGHSGGTVSRNSVTVQVMALNPSRQEDEESTGLGQPLPGAPQPQALSTAGEEEGDKPESKQVVLIDSSYLCQFCPSKFSTYFQLKSHMTQHKNEQVYKCVVKSCAQTFPKLDTFLEHIKSHQEELSYRCHLCGKDFPSLYDLGVHQYSHSLLPQHSPKKDNAVYKCVKCVNKYSTPEALEHHLQTATHNFPCPHCQKDTQAGLRGCSTDDTVSLPGHLIHHIPDVAMSGLLLEPGWVFPCERYLRRHLPTHGSGGRFKCQVCKKFFRREHYLKLHAHIHSGPYGHLNVYPFLAHIL

SEQ ID NO: 36530 - protein, 132 aa, Homo sapiens
  DOMAIN (34)..(49): WW DOMAIN SIGNATURE domain identified by eMATRIX, accession number PR00403B, p-value=2.703e-14, raw score of 12.19
  DOMAIN (19)..(48): WW domain identified by PFam, accession name WW, E-value=6.9e -12, PFam score of 52.9
MGFHHVAQAGLEFLTSGPLPDGWEQAMTQDGEIYYINHKNKTTSWLDPRLDPRFALAHVEPRSQEFTRNKARPSVSKTDDYRSRESLAAIREVKSLHTSPMDTDFLALLEALRPHTESRKLDPDGGDFLLYT

SEQ ID NO: 36531 - protein, 77 aa, Homo sapiens
ILLQRSLGVGGHRAWGIQEPSKVLVSGRRTEAPSMLQMGRQMWGRTSWRWTRTWRCGWPWGGPLAARHVSSCTKQGH

SEQ ID NO: 36532 - protein, 159 aa, Homo sapiens
VAGVGSLPRSMEDDAPVIYGLEFQARALTPQTAETDAIRFLVGTQSLKYDNQIHIIDFDDENNIINKNVLLHQSAGEIWHISASPADRGVLTTCYNRTSDSKVLTCAAVWRMPKELESGSHESPDDSSSTAQTLELLCHLDNTAHGNMACVVWEPMGDG

SEQ ID NO: 36533 - protein, 311 aa, Homo sapiens
MVCALMELWRAEQAGADNSVASGTAIEVCAPESAPGRRLSGCCGGHSFTGRFSAPVEPATRLERGEVMEPRVSSRDSAFRAGSTLEDPRAAVWRMPMKLESGSHESPDDSSSTAQTLELLCHLDNTAHGNMAWSAARGDLPEGKGSGTATALERCEPVQLGQHALIHTHMAIIHHFRLLDSQFSPARPMLQRRLRGKWVTNDPALCSWTRAEGVCAQTTEHNQECIATIDYYGSLGTLIRHECTSGEDSGSDRKEERRRGILRPDCAPRTVCWTESNDCEGSSMERCPGSQEQSMPCKSTDKLCSGDMLLV

SEQ ID NO: 36534 - protein, 134 aa, Homo sapiens; identical to SEQ ID NO: 36237
  DOMAIN (10)..(40): Electron transfer flavoprotein beta-subunit proteins domain identified by eMATRIX, accession number BL01065C, p-value=8.125e- 25, raw score of 16.45
  DOMAIN (1)..(134): Electron transfer flavoprotein beta subunit domain identified by PFam, accession name ETF_beta, E-value=3e-08, PFam score of 4.0

SEQ ID NO: 36535 - protein, 136 aa, Homo sapiens
MGWGPGLLGLRKTGLGPGLLGQREKEDGSLDPWETIRTALAMGADRGIHVEVPPAEAERLGPLQVARVLAKLAEKEKVDLVLLGKQGHKKSKTHPNHITDVQLPPISMSPRTNHYVELKITQRLQDHGPNMTCQEE

SEQ ID NO: 36536 - protein, 257 aa, Homo sapiens
  DOMAIN (165)..(216): Electron transfer flavoprotein beta-subunit proteins domain identified by eMATRIX, accession number BL01065E, p-value=6.400e- 38, raw score of 31.58
  DOMAIN (4)..(257): Electron transfer flavoprotein beta subunit domain identified by PFam, accession name ETF_beta, E-value=1.3e-87, PFam score of 304.5
MADVRVLVAVKRVIDYAVKIRVKPDRTGVVTDGVKHSMNPFCEIAVEEAVRLKEKKLVKEVIAVSCGPAQCQETIRTALAMGADRGIHVEVPPAEAERFGVPLQVARVLGQLAKKEKVDLVLLGKQAIACTDCNQTGQMTAGFLDWPQGTFASQVTLEGDKLKVEREIDGGLETLRLKLPAVVTADLRLNEPRYATLPNIMKAKKKKIEVIKPGDLGVDLTSKLSVISVEDPPQRTAGVKVETTEDLVAKLKEIGRI

SEQ ID NO: 36537 - protein, 341 aa, Homo sapiens
  DOMAIN (152)..(262): Ank repeat domain identified by PFam, accession name ank, E- value=1.8e-08, PFam score of 41.6
MVLNRSSLLPQEDTRQLLLWVGSGCRVRAPYGRDCVIIISVFLALRMENSTFSTDKPSEQRYNSHNHFGKSSHKQHNYVWSTTDCRYDDGPDDLRKEDFSSMSAQLLYKMIKSKTEYPLHKAIKVEREDVVFLYLIEMDSQLPGKLNEADHNGDLALDLALSRRLESIATTLVSHKADVDMVDKSGWSLLHKGIQRGDLFAATFLIKNGAFVNAATLGAQETPLHLVALYSSKKHSADVMSEMAQIAEALLQAGANPNMQDSKGSFIHSLESEEVAKLEKHLMLLRQEYVKLQKKLAETEKRCALLAAQANKESSSESFISRLLAIVADLYEQEQYRWESS

SEQ ID NO: 36538 - protein, 244 aa, Homo sapiens
FPHLPPLFIRFYGRKMVNILMANTKFDAFLKQSLPSYDLQKVMAAIKQQGIEDNDELPSAKGCKVLRSLVVCENGLPIKEGLSCNGPRLVGLRSTLQGRGEMVEQLRELTRLLEAKDFRSRMEGVGQLLELCKAKTELVTAHLVQGFDAFTPRFRVSNKKVNQWALESFANMIPLLRESLHPMLLSIIITVADNLNSKNSGIYAAAVAVLDAMVESLGDWVIAAESASNRTEEKGYEVFPNHPS

SEQ ID NO: 36539 - protein, 40 aa, Homo sapiens
VTNTQIFQLQFHTGFIPLDTTVLKFTKSYPVITTGMGWRN

SEQ ID NO: 36540 - protein, 243 aa, Homo sapiens
  DOMAIN (90)..(209): Molydopterin dinucleotide binding dom domain identified by PFam, accession name Molydop_binding, E-value=8.7e-43, PFam score of 155.6
  misc_feature (1)...(243): Xaa = X or * as defined in Table 2
MNDATAVQEGSQMYSWQKLTPTGPFIMQPEGMGRLFAINKMAEGPFPEHYEPIETPLGTNPLHPNVVSNPVVRLYEQDALRMGKKEQFPYVGTTYRLTEHFHTWTKHALLNAIAQPEQFVEISETLAAAKGINNGDRVTVSSKRGFIRAVAVVTRRLKPLNVNGQQVETVGIPIHWGFEGVARKGYIANTLTPNVGDANSQTPEYKAFLGQHREGVRNXLHHAAFSGAXLQCFQYAHNSRKNN

SEQ ID NO: 36541 - protein, 68 aa, Homo sapiens
  misc_feature (1)...(68): Xaa = X or * as defined in Table 2
WLRMMEHRILFPLWKRESKKAHYVQSSVLLCLGMLRXKYKGKKGKKERKKKDEKRKGNGKKRIKIHSI

SEQ ID NO: 36542 - protein, 357 aa, Homo sapiens
MGKQLSLTPDHDFDFAVGIKVGWLEGCVSLLRNGAKHNIPDKNGRLSLDAGTGEAELKSGNRILCSIILSHHQGPSIINYDDESGKTCVHIAAAAGFSDIIHELARVPECNLQALDVDDSERRKNYCYGEEDCDCTVLSDFPLFAKCSLCSQKTFCISASCYVPSLFLKALPTTSRLIWNIQNHTNDPGHVETQAQGSMFHLSFCRILALLAANKTLTLTVHRAQSLCFYSVSNMHIIPGRTTEEKAGPGICQGETELDTVYGAKDRFYSVLVATRERRFQYGAELRSKYKTSDVDRQETRLRKPRLPVRPAPPSPSHRQTRKPNTQPPQTKPGTPEPATTRAKPHHPRTQRHAATM

SEQ ID NO: 36543 - protein, 195 aa, Homo sapiens
  DOMAIN (80)..(132): Regulator of chromosome condensation (RCC1) domain identified by PFam, accession name RCC1, E-value=1.7e-06, PFam score of 27.9
MGAEWELGAEAGGSLLLCAALLAAGCALGLRLGRGQGAADRGALIWLCYDALVHFALRGGGNGREMKVGEGAVRSSGEENGVVYAWGHNGYSQLGNGTTNQGIAPVQVCTNLLIKQVVEVACGSHHSMALAADGEHLEGVMVGPDNAAASRTMLALSGPHPSEAENQAKKHCIVSDLVQPVKNTNRTIHRQKSEE

SEQ ID NO: 36544 - protein, 310 aa, Homo sapiens
DHNSSPAMEQNWMENAFDELTEVGFRRWVITNFSKLKEHVLTQCKEAKKLEKRLEELLTRITSLEKNINDLMELKNTSQELREAYTTEERISEIEDQLNEIKHEDRIREKNEKERTKPPRNMGLREKTKPTFDCVPESDGENGTKLENTLQDIIQENFPNLARQANIQIQEIQRTPQRYSSRRATPRHIIIRFTKVEMKEKMLRAAREKGQVTHKGKPIRLTADPLAETLQARREWGPIFNILKEKNFQHRMSYPAKLSFISVGEIKYFTDKQMLRDFVTTRPALQELLKDALNMERNNQNQSLQKHAKL

SEQ ID NO: 36545 - protein, 121 aa, Homo sapiens
  misc_feature (1)...(121): Xaa = X or * as defined in Table 2
AGEVPLQLPPAAVCSACLQRPALWWNSSFFLXSCLHALFHXVDLQSLIAFLLLDXSSYXYLCMLHEVLVLCFSAPSGHLCSSLSXLFXLAIHLTFFQGSXLPCIGLEHASLAQRSLLLPTF

SEQ ID NO: 36546 - protein, 89 aa, Homo sapiens
SAIVTFVCFMKFSCCVFQLHQVFHVLFKLVILVSSSCNLFSRFLASLHWVTTCSFSSEEFVITHLLKPAPVNSSNSFSVQFCSLAGKEL

SEQ ID NO: 36547 - protein, 363 aa, Homo sapiens
MGWRPRWLPYLYWGFQSDLCPHCKRKAQEEDSLAAQAASHPRLSANSKNNSWGKQYSYALFKAMRHMLCIGYGRQAPAAVSDVWLTMLSMIVGATCYAMFIGHATALIQVLDCSRRQYQEKVVLPREHPNIGSSQEGGTWHQTVGLQQTSDKFDANDPILKDQTQEWSGSATFTSDGKIRLFYTDYSGKHYGKQSLTTSAANTGTENGYQGEESLFNKAYYGGGTNFFRKESQKLQQSATTRDAELANGALGIIELDNDSPLKKRGATQRSSEENITLKAYKRDVRSLLMLTRNEDVADSLNSSKKRQNYQLPSIRSVTRCKKIGVCAKGIGCGQGTHYLSVSILNTADRDRRKLGFTRTSMY

SEQ ID NO: 36548 - protein, 379 aa, Homo sapiens
MSTDVIRLVQSLTKQSFDHTFPISKLLYIFFQQFTTPLASKSDNKFGKWHHPKKLSCKFPLAEKTSAGDTQANRVCSVPPTNHSRPAADRPVRRKINKQKTATSTSTKRTSTQRPHPKVTNVKDQRITAPHQQGNKTGWRIEFDELTEVGFRRWVITNSSELKKHVLTQCKEAKNLEKRLGELLTRITSLEKNINDLMELKNTARELHEAYTSINSWINQAEERLSEIEDQLNEIKREDKITEKMKNSTTVLVSTWGSQLEQNNLPHIISPLFHSTHDLNISFYGGCLLQACSSKLLQGLAEGGPLRLTRSASFFAAKLCLTKHFLPTEMILIKSRKTTPDTQPRRLYLLQGVVDQTSRKGPTALNIRQKTFAAAPPHR

SEQ ID NO: 36549 - protein, 66 aa, Homo sapiens
  misc_feature (1)...(66): Xaa = X or * as defined in Table 2
GSDYELGLWXPWLTSEATDLHGECYSSXSGASGVVRSSLWARGLAGFRSEAADLRGRESVAVTNAF

SEQ ID NO: 36550 - protein, 432 aa, Homo sapiens
  DOMAIN (131)..(303): Transmembrane region cyclic Nucleotide G domain identified by PFam, accession name CNG_membrane, E-value=6.8e-06, PFam score of -51.9
MLRDIKASLEMLRPAGLEMKRGQQAEDASVEAVATFPWLNPLNGAGRFYWDLTMLLLMVGNLIIIPVGITFFKDENTTPWIVFNVVSDTFFLIDLGVYKSLQTKNVLNTTMQAGSQLKTQNEMHRHGLASLKSLNITLLKPDERPKRSARLSRMIFHMTYDLASAVVRIVNLIGMMLLLCHWDGCLQFLVPMLQDFPDDCWVSINNMVNNSWGKQYSYSLFKAMSHMLCIGYGRQAPVGMSDVWLTMLSMIVGATCYAMFIGHATALIQSLDSSRRQYQEKKENKQTERNSININKKDVYSETPPKGHQHQRPKIDKSTKMRRNQCKKAENSKNQKTSSPPKDHNASPAREQNWMDNEFDELTEAGFRRWVITNSSELKEHVLTQCKEAKNFEKRLDELLTRITCLEKNRNDLMELKNTARELHEAYTSISS

SEQ ID NO: 36551 - protein, 561 aa, Homo sapiens
  DOMAIN (526)..(557): kw TRANSCRIPTASE REVERSE II ORF2 domain identified by eMATRIX, accession number DM01354G, p-value=3.717e-30, raw score of 11.57
MNTARARGYRRQAVEEAKSTVIDDAWDMGEERKRGLKMVVRLPAGATGCASEIQSSGESCAMVLPPTTTDRRVKPLHRRRTYPVPLWANQAPGFVLTRWIISVLLEKIQCGGAGLSFLPPASFPPLLPLVTSEEECEAALFLQRHSWGVITSQFFHDTLTSRGERDNWHLHQTQCRNGSQCETELTTTGLELLLSHGQQVSSSTKSNTKADAGNCTQSCLVQPWSGPGVWAGNCQCLLQPSHLSGTQPSSCQLSNPFSVMLAASETASQVERLQEGKLSAVASFMAMKLGNNDSLPDDFNLMRKEGGRKEGRRERREDHNSSPAREQNCMENEFDELTEVGFRRWVITNSSEQKEHVLTQCKEAKNHDKRLQELLTRITSLEKNINDLMELKNTARELCGAYTSISSQINQVEERISEIVDQLNERNDRENGTKLENTLQDITQDNFPYLARQVNIQIQETQRMPQRYYSRRVTPRHIIVRFAKVEMKEKMLRAAREKDTSVKQKVNKDIQELNSALHQVDLIAIYRTLHPKSTEYTFFSAPHHTYSKTDHIVHSILCDSG

SEQ ID NO: 36552 - protein, 209 aa, Homo sapiens
  DOMAIN (87)..(135): T-box domain proteins domain identified by eMATRIX, accession number BL01283A, p-value=8.600e-31, raw score of 24.15
  DOMAIN (79)..(139): T-box domain identified by PFam, accession name T-box, E- value=6.1e-29, PFam score of 103.4
MASCLLTFFSWDLSRAGAALLILSFTRHGLLPLVQLALSMGEHCPCITYDKNAWCALLGPKLCRAHWQGPKNPRVSRVTVQLEMKPLWEEFNQLGTEMIVTKAGRRMFPPFQVKILGMDSLADYALLMDFIPLDDKRYRGSRMYGAGIHGDAPPGTRGRSSVCETVLMDFDALVQAQTGLGTAAVIVMDRSDRELRPEEIEGLGSCELK

SEQ ID NO: 36553 - protein, 55 aa, Homo sapiens
SATFGRSSRSGCSGFPAASRRGRLPLSPPPWPAVRVYPCGMLDNKASAAHPPKKK

SEQ ID NO: 36554 - protein, 34 aa, Homo sapiens
LQARAATPDWFSYFFGGDGVSLCWPGWSPAPNRE

SEQ ID NO: 36555 - protein, 62 aa, Homo sapiens
  misc_feature (1)...(62): Xaa = X or * as defined in Table 2
GLQPPAPRETRPLYXTLAWNLHFLFVSPLDSCDLVRSVLTCLSPPGNSPSFDMHRYQLPCVH

SEQ ID NO: 36556 - protein, 267 aa, Homo sapiens
NLKTALPGSHRGKARKTEVSGRRDFPSPSPSERRWLRSGDGNRVGTPRPSRIGTFQSKKSSARSSVSPSAKITHHGDPDSPRNLPAFVSMPPPVLGWERPASFSLLNEIEPEEQTPPNTSCINVHKAADTCAYRNLGNSQVERGKSAHCGQGHMNPKVIRKENEVRSVSARLPIVWDVRKPYAWLPSLESEERLFPATIPSRKVWAALECIWFPTDLNVRDLPSTLVQLTIHWLIMGYSMTAFCLFTWGKWLKVAYSRTGAEITHHS

SEQ ID NO: 36557 - protein, 424 aa, Homo sapiens
YKETYLIHLFHTFTGLSIAYFNFGNQLYHSLLCIVLQFLILRLMGRTITAVLTTFCFQMAYLLAGYYYTATGNYDIKWTMPHCVLTLKLIGLAVDYFDGGKDQNSLSSEQQKYAIRGVPSLLEVAGFSYFYGAFLVGPQFSMNHYMKLVQGELIDIPGKIPNSIIPALKRLSLGLFYLVGYTLLSPHITEDYLLTEDYDNHPFWFRCMYMLIWGKFVLYKYVTCWLVTEGVCILTGLGFNGFEEKGKAKWDACANMKVWLFETNPRFTGTIASFNINTNAWVARYIFKRLKFLGNKELSQGLSMLFLFLWHGLHSGYLVCFQMEFLIVIVERQAARLIQESPTLSKLAAITVLQPFYYLVQQTIHWLFMGYSMTAFCLFTWDKWLKVYKSIYFLGHIFFLSLLFILPYIHKAMVPRKEKLKKME

SEQ ID NO: 36558 - protein, 89 aa, Homo sapiens
MELPASPALFARTPQPLGGRWDWAPWSRGWRSSRRLGPHRSPRRGSEAQAWRAAGPEPCPAGRQLRPVNIEWLFALILTHTFGTFQVLA

SEQ ID NO: 36559 - protein, 139 aa, Homo sapiens
  DOMAIN (59)..(77): Troponin domain identified by eMATRIX, accession number PF00992C, p-value=5.426e-09, raw score of 16.35
LDPGLAAPAPAELPPTSRCRPREGNPLIRRRCPTGGASQGACSPFYILPMGHCSPQFTGQKGKKREKKRGKEGRKKERKERRKEKKKEGREGRPARASPTSAAPCPRRPVPSTTQGLRNASAQRGTGRQLHLQSRCGIH

SEQ ID NO: 36560 - protein, 135 aa, Homo sapiens
SGFSGVPSDRHTLHMSGLQVELPASPAPCAGTPQPLGGRWDWAPWSRGWCSSGRLGPHRSPWSGWEAQAWRAAGPEPCPAGRQLRPGKKSSTAPVGRHCWGTQYTLCSRWPGCQVSHCLGRQGRPAAPSAGPPSP

SEQ ID NO: 36561 - protein, 177 aa, Homo sapiens
  misc_feature (1)...(177): Xaa = X or * as defined in Table 2
SLEVXKWPGVACRLQLXPMVPAPKSXESKSAGSLNTPSAICRDASGRGLARPWLRKSKCLACHLVDTRSKTAGGLAPVPSAHLISVREREPGLCAVLVSQLEFRVGVGLVGPTLGARREPCWPQAMGDLAPEPVAALRLISRRALPAFPWGRARDLQPAMPEPPTHSMGSCAPEPPR

SEQ ID NO: 36562 - protein, 77 aa, Homo sapiens
RHKDSPPPHQTQEPSWLHPVDPAPGLQVELPASHAPCARTPQPLGGRWDWAPWSRGWCSLGRLGPHRSPWSGWEAQA

SEQ ID NO: 36563 - protein, 535 aa, Homo sapiens
MEDEMNEMKHEEKFREKRIKRNEQSLQEIWDYVKRQNLRLIGVPESDGENGTKLENTLQDIIQENFPNLARQANIQIQEIQRTPQRYPLRRATPRHIIVRFTKIEMKKKMLRAAREKASPTSTTPCSRAPSPIDHPRAEECERTAWDWQAAPPAAPVRDPLGEASWAPESGLGESQSLGKLAFQWQPASRTSFLRTMDKLLALSVALLFLLGDESWKLLPEQGFNSGGPRMVWEDGTRSCALSSEVVRASQHKLERPSGARVGFTSLQEGIVHAEWTSGLGLRRSGKDFCYINCERLMEWELLSEACPDFSEFQSKEHQHHILREQGPKCLIMGTSSQAASHTAQTRPAHTYKYPNLYEAVGTGIKLVPHLYHQTSVQQLPGEFFSLENPSDAEALYETSSGLNTLSEHGSSEHGSSKHTVAEHTSGEHAESEHASGEPAATEHAEGEHTVGEQPSGEQPSGEHLSGEQPLSELESGEQPSDEQPSGEHGSGEQPSGEQASGEQPSGEHASGEQASGAPISSTSTGTSVQYVENY

SEQ ID NO: 36564 - protein, 360 aa, Homo sapiens
MEKQLNLEDSQQINQMKWIKTRCVEKAGQPTQKGGRQVDRGGGRAVMECEHLDKKLQSASQKSGKIITGNNKVECKNKPAILRGPTDPLKEADCYCRTRETPQIYSGRRKASASFQARLALCLETDSGLFWWGTVGEGAGVSWENNNNNNIISQAPAMETTCQNKNHPIRSVVALLPSGAATLGVKLQTFAVSVAALKVSPLELFVPPGGLVVSLASRVKLQTFAVSVTAHKSSVDPKSGAACQSRAMRSHSSALGWSMGLGAVEQGAALVGEARAAQEPTEINSKGQKKSQIHCELVPKGSRKLAKVDKVLTVGGTPKGQHTPDYILQEPCDLSSEALKDILLLEEEGTKTRLSQRVPP

SEQ ID NO: 36565 - protein, 77 aa, Homo sapiens
  misc_feature (1)...(77): Xaa = X or * as defined in Table 2
KQKDGTGAPWSRGRRSSGRLGTHRSPRRGWEAQAWRAAGPETCPAGRQLRPGEKSSAAPGXRSRRKDAYEMDTAKKK

SEQ ID NO: 36566 - protein, 129 aa, Homo sapiens
MAPTSAAGEGFRKLPLMVEDSGAQLASPSGSHNGAAGGAACQSCTVRSHTSALGWSMGLGAVEQGVVLVGEARAAQEPMEWVTSDDVSCTIKKSKYDSDLPPRPGITVATLLVIKYIVQADVKRDSYQF

SEQ ID NO: 36567 - protein, 112 aa, Homo sapiens
AQSQEPSWLHPVDPAPGLQVELPASPAPCARVPQPLGGRWDWVPWSRGWCSSGRLGPHRSPWSEWETQAWRASGPEPWAGCLFYPRSYMSSSCPLHTIHSDLFAVLQGRTKS

SEQ ID NO: 36568 - protein, 398 aa, Homo sapiens
MGERVSGEAPQLDSTSSPWMWTGSRTGAAGGAARQSCTVRSHSSALGWSMGLGAVEQGVALVGEARAAQEPMEWVGGSGIAGCRSRALPRGKAAKARFESCWPALMKDAHGVVIVFNADIPSHRKEMEMWYSCFVQQPSLQDTQCMLIAHHKPGSGDDKGSLSLSGGGGNRRQGRSCPRGWTLGVAGAAAAAAQGKEARGLHVGSTWAPATPLGNLSPAAPYSGDLDSNHCPEEVVEASPVLMSPEGPSKDLYLHSFSQSGKTVLANFLTESSDITEYSPTQGVRILEFENPHVTSNNKGTGCEFELWDCGGDAKYVSFKESHFIKWFKNQLPKPGAVAHTCNSSTLGGQGGAMATPGTLRAAAPEPAFEFPQKTISMQVKVAKRLVCITRLNLAFLI

SEQ ID NO: 36569 - protein, 159 aa, Homo sapiens
EVTACWQSSQPPLPLGASSAWAPTLAALEEPFSPPLHCGSPFLGWPRPEPTPSAALRSISRRALAAFPWGKARDLQPAMREPPTRSVGSCAARASSTSATPCSTAPSPIDHPRAEECGRTARDWQATPPAAARVRGFILEVSETKNPPIPDTLASAFQK

SEQ ID NO: 36570 - protein, 94 aa, Homo sapiens
CPWLQVRQGLSSWQLSVQLRRKGERALRGLGTCSLPCLSLPPTPWAPVWPEPPRRAPPPAPRRPVPSTTQGLRNASAWRRTGRQLHLQPRCGIH

SEQ ID NO: 36571 - protein, 169 aa, Homo sapiens
MPQRQLLDQWIEMDVSLYDKSPLNVPGDLTVSKDHVRALKYFFGFFKTQARDLRPAVPEPPTPSVGSCAARASRMSAAPCSTVPSPIDHPRAEECECMARDWQAAPPAAPNSYDAYVGTLDGVLQIPGTLFIFFILFFVLLLRLNNFDGLKFKFTDPFFFLLKSAVEYL

SEQ ID NO: 36572 - protein, 85 aa, Homo sapiens
LHPVDPAPGLQVELPASPVPCARTPQPLGGRWDWAPWSRGWCSLGRLGPHRSPWSGWEAQAWRATGPEPCPAGRQLRPGQHPLVT

SEQ ID NO: 36573 - protein, 82 aa, Homo sapiens
  misc_feature (1)...(82): Xaa = X or * as defined in Table 2
XKVLKSSNKMLILPHLPIARGSPTNAAPCSTAPSPIDHPRAEECERKAQHWQAAPPAAPVRDPLGEASWAPESGGDVESLYI

SEQ ID NO: 36574 - protein, 723 aa, Homo sapiens
  DOMAIN (425)..(472): kw TRANSCRIPTASE REVERSE II ORF2 domain identified by eMATRIX, accession number DM01354V, p-value=1.000e-40, raw score of 12.97
  DOMAIN (201)..(438): Reverse transcriptase domain identified by PFam, accession name rvt, E-value=0.0047, PFam score of -26.3
MPEPPTPSIGLLCCRSLPERAPPPAPRRPVPSTGKEQTTQGLRNASARHRDWQAATPAVPVRDPLGEASWAPESGTNISITPGNATFVTRVQGQAWFASCITGHDMSSLKTSSVVVLRRQSEALLPANLTCNWQDSSALATLESALSQVRHKRFTFTLMVFTGSAIDIMATVSIAVVSITESVQTTAFVDNLAKNICDELLLQDMDEAGNQHSQQNNTRTENQTPHVLTHKWELNNENIRIQGGEHYILGPVGGRLPTSKLAVDCQLLLLAAAQHALCWCQNTLPPNPANFWNCPRGFPTLASELAYVSPNLALVIQLSQRKKFELFWGGLQRTIFFPFSVLRILTVDEQANDVSVAAARTLQIFRDDMIVYLENPIVSAQNLLKLISNFSKISGYKINVQKSQAFLYTNNRQTESQIMSELPFTTASKRIKYLGIQLTRDVKDLFKENYKSLLKEIKEDTNKWKNIPCSWVGKINIVKMAILPKVIYRFSAIPIKLPMTFFTELEKTTLKFIWNQKRAHTAKSILSQKNKAGGITLPDFKLYYKATVTKTAWYWYQNRDIDQWNRTEPSEITLLIYNYLIFDKPEKNKQWGKDSLFNKWCWENWLAICRKLKLDPFLIPYTKINSRWIKDLNVRPKTIKTLEENLGITIQDIGMGKDFLSKTPKAMATKDKIDKWDLIKLKSFCTAKETTIRVNRQPTKWEKIFATYSCEKGLISRIYNELK

SEQ ID NO: 36575 - protein, 200 aa, Homo sapiens
  DOMAIN (83)..(107): PI3 KINASE P85 REGULATORY SUBUNIT SIGNATURE domain identified by eMATRIX, accession number PR00678C, p-value=1.321e-30, raw score of 11.40
  DOMAIN (1)..(67): Src homology domain 2 domain identified by PFam, accession name SH2, E-value=2.3e-15, PFam score of 47.9
EEVNEQLRDTADGTFLVRDASTKMHGDYTLTLRKGGNVKLIKIFHRDGKYGFSDPLTFSSVVELINHDRNESLAQYNPKLDVKLLYPVSKYQQDQVVKEDNIEAVGKKLHEYNTQFQEKSREYDRLYILQQRIKVKDVTFLLSVFSCIYLRTIIIDIFQSSLSHIQAATGRFQRKGRQRLTSNSNCRDCSINTTRKRGAK

SEQ ID NO: 36576 - protein, 173 aa, Homo sapiens
MDRASFVDKLIECHHVGLGPPDAVVPSLSHTRLKQRVVSQGGPEGVSFCLLSFLYSINQTICLRLDSIEAKLQALEATCKSLEEKLDLVTNKQHSPIQVPMVAGSPLRTTQMCNKVRWFPGLAVAFCPWCLFELSGMPEVLETLPGRLPSSAAGGGVGISVRMRELGIVHVLL

SEQ ID NO: 36577 - protein, 75 aa, Homo sapiens
STGVPVSQRTCLLEKASVLFNTGALYTQIGTRCDRQTQAGLESAIDAFQRAADMSPPGLTRRSLGPTRWHQGTPH

SEQ ID NO: 36578 - protein, 321 aa, Homo sapiens
  DOMAIN (199)..(247): Anion exchangers family proteins domain identified by eMATRIX, accession number BL00219H, p-value=7.460e-10, raw score of 10.06
MAALWNTCGAWKNMLIPECHSQLLRVAANPKVREQVRLELSFVNSDLQMLKEELEGLNISVGVYQNTDEDGYLYEDEITDLMDLRQACRTPSRDEARVELLMTYFIQLGFVENRLFPPTWQMGFLFTWYDSLTGVLVSQQNLLLEKASVLFNTGVLYTQIGTRRYRHTQAGLQSAIDAFQRAAGVLNYLKETFTHNPSYDMIPAMLSVLVKMMLAQTQESVFEKISLPGIWNEFFMLVKVAQEAAKVGEVCRQLHAAMSQVLVKENIPYSWASLACVKAHHYAALAHYFTAILLIDHQGKACGVRGFGQGCGPAAPGAILS

SEQ ID NO: 36579 - protein, 308 aa, Homo sapiens
MDFILEHYSEDGYLYEDEIADLMDLRQACRTPSRDEAGVELLMTYFIQLGFVESRFFPPTRQMGLLFTWYDSLTGVPVSQQNLLLEKASVLFNTGALYTQIGTRCDRQTQAGLESAIDAFQRAAEPHARRASIYLRNDSCGLSEIPGASLQREENGPGPGLISRSIHSQGPLPKARRRPSPHAFSSQWTLQQPRRPLAQLGPRPIRAKVTSTPVVLGNQWHNKSATYSVGMQKTYSMICLAIDDDDKTDKTKKISKKLSFLSWGTNKNRQKSASTLCLPSVGAARPQVKKKLPSPFQLSQLRQFLVLM

SEQ ID NO: 36580 - protein, 132 aa, Homo sapiens
LDGVSKGWPPCLRALAATVLLGQEADKLTLGQNLNIKAPPCCVSESPVEHNCVEVLDSVYSSRPDFRDHPWMSLDWELYVDGSNFVNSQGERCVGYAVVTLDAVIEAKSLPQGTSAQKAELIALIRASELSE

SEQ ID NO: 36581 - protein, 875 aa, Homo sapiens
  DOMAIN (146)..(157): RNase H domain identified by eMATRIX, accession number PF00075B, p-value=1.878e-10, raw score of 12.56
  DOMAIN (89)..(278): Reverse transcriptase domain identified by PFam, accession name rvt, E-value=1.8e-18, PFam score of 74.8
MEQANHPVRLINVVCKDTLKKIVQQETSCPLTHVHYAEAITGRCTAPEDKGSLDQKPPTDDPTGCPWQVPAHVITLTETWVCLTIEGQEIDFLLDTGVQKPNGQWRLVQDLIPIKEAVIPLYPVVPNPYTLISQIPEKAEWFMALDLKDAFFCISLHSDSQFLFAFEDPTNHTSKITRTVLPQGFRDSPPLFGQALAQDLGHFSSPGTLVFQYVDDLILATSSEASCQQATLDLLNFLANQGKVVPNLWGKLPLNTTRKSWSYCTQCKNPRRWQSYTAKAIKKQLAEAGPVTAILLLLIFGPCIFNLLIKFVSSRIEAIMLQMVLQMEPQMSSTNNFYQGPLDRCTDPLSGLESSPRCSEAPCLMSQWTGDIEYDLLLPPIPHQTTLCDLQNLKGIFSRYHRKWYGEILALLTPTANVCGHSQVPHACSIYHDPVTWNPQGLLPKSLYGVTKWGDKEHFEWGSQQQRAFYELKGKLISAPALGLPDLTKPFTLYVSEREKMAVAVLTQTVGPWPRPVAYFSKQLDGVSKGWPPCLRALAATALLAREVDKLTLGQNLNIKAPHAVVTLMNTKGHHWLMNARITRYQSLLCDKPHITIEVCNTLNPTTLLLVSESPVEHNCVEVLDSVYSSRPNLRDHPWTSVDWELYVDGSSFINPQGESVWGIIQGKRPIKLWGKRRKVSARDLAIIGGSVEAPKLVQQCVTYWQHNARQGPNVLPGIQSYGAAPFEDLQVALTEMPKCGGNKYLLVLVCAYAGWVEVYPTQTEKAHEVTCVLLRDLLPRFGLPLQISSDNGLGFVADLVQKTAKNLTDTGQLPLDYTGYVGIEPTPNYLTNGITLDVVLRTECKEVELSQGELLVGHCNNKVKGNGDLEQEDG

SEQ ID NO: 36582 - protein, 76 aa, Homo sapiens
  misc_feature (1)...(76): Xaa = X or * as defined in Table 2
SLQHLNPATFLPVSKSPVKHNCVEVLDSVYSSGPNHRDHPXTSVDWELYMDGSSFTNPCKVTLKKTTSPAPVTPGS

SEQ ID NO: 36583 - protein, 554 aa, Homo sapiens; identical to SEQ ID NO: 34926
  DOMAIN (56)..(68): RNase H domain identified by eMATRIX, accession number PF00075C, p-value=9.022e-10, raw score of 11.58
  DOMAIN (401)..(487): Integrase core domain identified by PFam, accession name rve, E-value=3.5e-10, PFam score of 39.2

SEQ ID NO: 36584 - protein, 298 aa, Homo sapiens
  DOMAIN (129)..(209): Integrase core domain identified by PFam, accession name rve, E-value=1.8e-07, PFam score of 29.9
MGFHRVGQAGLELLTAAALAADWMVPTHNEESPVEHNCVEVLDSVYSSRPDLRDHLWTSVDWELYVDGSSFINPQGERCAGYAVVILDAVIEAKSLPQGTSAQKAELIALIWALELSEGPTVLSGIQAYGEAPFEDLNIDFTKMPKCGSNKYLLVPVCTYSGWVEAYPTRTKKARVLLRDLIARFGLPLWIGSENGPAFVADLVQKTAKVMSVDQRLERSPLAATVERTPDCHLDHSHSCEGRGNPSLGPPQLRKTCSTGDLVGETKPRQPLQSDSEEVDKPCSSHTRKPTGPLMAEA

SEQ ID NO: 36585 - protein, 85 aa, Homo sapiens
EAGLHETQILHGRGGSYAGPKSYGGRGSVHGQGCRGGRAESGSDTRWGPRPSPAPGGKRSHRRHRNRSLRARAPHSPHPCRRVAL

SEQ ID NO: 36586 - protein, 93 aa, Homo sapiens
MVTGGALESHPTGLSSLNLENKGPVAAFAILVHFENVMFQRGNAEEEAGAARQSSGYGGPEGPSRCDEAGLGACRCAPQRDIAQAQRVKAGPT

SEQ ID NO: 36587 - protein, 86 aa, Homo sapiens
ACTGCFSTLHSRLLSDQTRLKDDVDMLRRENGQLLRERNLLQQSWEDMKRLHEEDQKEIGDLRAQQQQVGPAPGDWPFLPSSPHSF

SEQ ID NO: 36588 - protein, 213 aa, Homo sapiens
MLEEPAREVEILRKQCKALCQELKEALQKADVAKGRRDWAFQERDKIVAERDSIRQGLEVARKFTWTSLWLLEAQAYRAWKQSISDQLAKERPYHRLNPDYERLKIQCVRAMSDLQSLQNQHTNALKRCEEVAKETDFYQPQYLEALGLYQRGLSPFPGDTCALFGVRFVSGDLDVSGIGLLAGFGLPLSATDLPAIGSCPLYLREVWNLRLE

SEQ ID NO: 36589 - protein, 644 aa, Homo sapiens
  DOMAIN (8)..(63): Eukaryotic RNA polymerase II heptapeptide repeat proteins domain identified by eMATRIX, accession number BL00115I, p-value= 1.000e-40, raw score of 8.33
  DOMAIN (1)..(86): RNA polymerase alpha subunit domain identified by PFam, accession name RNA_pol_A, E-value=1.4e-74, PFam score of 210.2
MAQELKYGDIVERHLIDGDVVLFNRQPSLHKLSIMAHLARVKPHRTFRFNECVCTPYNADFDGDEMNLHLPQTEEAKAEALVLMGVCFSYLAVLTVAIQTCLEMQLSPASTRCSWFGCWRPSRTNLIPSDSRIERQDTYPFPSHSLQPMLNAFRFFRVSENVIMRLLVIAGSTYSVLSTMPSDSESSSSLSSVGGATQAFAKENNQKAYKETYGVSHITRHDMLQIPKQQQNEKYQVPQFDQSTIKNIESAKGLDVWDSWPLQNADGTVAEYNGYHVVFALAGSPKDADDTSIYMFYQKVGDNSIDSWKNAGRVFKDSDKFDANDPILKDQTQEWSGSATFTSDGKIRLFYTDYSGKHYGKQSLTTAQVNVSKSDDTLKINGVEDHKTIFDGDGKTYQNVQQFIDEGNYTSGDNHTLRDPHYVEDKGHKYLVFEANTGTENGYQGEESLFNKAYYGGGTNFFRKESQKLQQSAKKRDAELANGALGIIELNNDYTLKKVMKPLITSNTVTDEIERANVFKMNGKWYLFTDSRGSKMTIDGINSNDIYMLGYVSNSLTGPYKPLNKTGLVLQMGLDPNDVTFTYSHFAVPQAKGNNVVITSYMTNRGFFEDKKATFAPSFLMNIKGNKTSVVKNSILEQGQLTVN

SEQ ID NO: 36590 - protein, 315 aa, Homo sapiens
VLQTYLPLAPVRCIYGKCCGPEAGDALGTLHSRLLSDQTRLKDDVDMLRRENGQLLRERNLLQQSWEDMKRLHEEDQKEIGDLRAQQQQVLKHNGSSEILNKLYDTAMDKLEVVKKDYDALRKRYSEKVAIHNADLSRLEQLGEENQRLLKQTEMLTQQRDTAIQLQHQCALSLRSWREAAAQPATDRAGPPPFPHLATSLAKNEAINHELNKATAQNKDLQWEMELLQSELTELRTTPAKESEKYREERDAVYSEYKLIMSERDQVISELDKLQTEVELAESKLKSSTSEKKAANEEMEALRQLPGERYPRELP

SEQ ID NO: 36591 - protein, 97 aa, Homo sapiens
IFDFLFLLYVSGCNSIAEPQHFTTTVTRCSPTVAFVEFPSSPQLKNDVSEEKDQKKPENEMSGKGGSWVLFTKGEVQEWRESGLNPTKFNMGPLIYS

SEQ ID NO: 36592 - protein, 846 aa, Homo sapiens
  DOMAIN (755)..(793): GATA-type zinc finger domain proteins domain identified by eMATRIX, accession number BL00344, p-value=7.000e-12, raw score of 17.99
  DOMAIN (776)..(839): LIM domain containing proteins domain identified by PFam, accession name LIM, E-value=0.00021, PFam score of 20.7
RSRQTPSPDVVLRGSSDGRGSDSESDLPHRKLPDVKKDDMSARRTSHGEPKSAVPFNQYLPNKSNQTAYVPAPLRKKKAEREEYRKSWSTATSPLGGERPFRYGPRTPVSDDAESTSMFDMRCEEEAAVQPHSRARQEQLQLINNQLREEDDKWQDDLARWKSRRRSVSQDLIKKEEERKKMEKLLAGEDGTSERRKSIKTYREIVQEKERRERELHEAYKNARSQEEAEGILQQYIERFTISEAVLERLEMPKILERSHSTEPNLSSFLNDPNPMKYLRQQSLPPPKFTATVETTIARASVLDTSMSAGSGSPSKTVTPKAVPMLTPKPYSQPKNSQDVLKTFKVDGKVSVNGETVHREEEKERECPTVAPAHSLTKSQMFEGVARVHGSPLELKQDNGSIEINIKKPNSVPQELAATTEKTEPNSQEDKNDGGKSRKGNIELASSEPQHFTTTVTRCSPTVAFVEFPSSPQLKNDVSEEKDQKKPENEMSGKVELVLSQKVVKPKSPEPEATLTFPFLDKMPEANQLHLPNLNSQVDSPSSEKSPVTTPFKFWAWDPEEERRRQEKWQQEQERLLQERYQKEQDKLKEEWEKAQKEVEEEERRYYEEERKIIEDTVVPFTVSSSSADQLSTSSSMTEGSGTMNKIDLGNCQDEKQDRRWKKSFQGDDSDLLLKTRESDRLEEKGSLTEGALAHSGNPVSKGVHEDHQLDTEAGAPHCGTNPQLAQDPSQNQQTSNPTHSSEDVKPKTLPLDKSINHQIESPSERRKSISGKKLCSSCGLPLGKGAAMIIETLNLYFHIQCFRCGICKGQLGDAVSGTDVRIRNGLLNCNDCYMRSRSAGQPTTL

SEQ ID NO: 36593 - protein, 157 aa, Homo sapiens
SRLIGRKWQQQQHNRRHGPGKRQAHLNEASVRAKDVVKPKSPEPEATLTFPFLDKMPEANQLHLPNLNSQGILLIISGFLAELQHPVQCPAMDWNQTSRAKPEPQHFTTTVTRCSPTVAFVEFPSSPQLKNDVSEEKDQKKPENEMGSSRVALQVAT

SEQ ID NO: 36594 - protein, 89 aa, Homo sapiens
  misc_feature (1)...(89): Xaa = X or * as defined in Table 2
CPLTLLLPSRGAGLGTCSPPCLSLPPTPWAPVRPEPPRRAPPPAPRRPVPSTGKEQTTQGLRNASARRGTGRQLHLSPGVGSTGXSQGL

SEQ ID NO: 36595 - protein, 207 aa, Homo sapiens
  DOMAIN (32)..(65): PROLINE-RICH PROTEIN 3 domain identified by eMATRIX, accession number DM00215, p-value=6.186e-09, raw score of 19.43
  misc_feature (1)...(207): Xaa = X or * as defined in Table 2
HPGQWLRRVCWVSSGAGPLALCSISCPALAAFPRVGLGTCSPPCLSLPPTPWAPVRPEPPRRAPPPAPRPPSPIDHPRAEEYEPHGAGLAGSSTCSPSAESTGXSQLGSXVVRVRGFILEVSETKNPPIPDTFGLPPGSSSAASTLVQVTRLXISAISLPHLLSRPCSNTARGPVPAPVPGAAVRAPAAGGRWCGGARGRGRRGGGH

SEQ ID NO: 36596 - protein, 141 aa, Homo sapiens [sequence omitted]

SEQ ID NO: 36597 - protein, 177 aa, Homo sapiens
  misc_feature (1)...(177): Xaa = X or * as defined in Table 2
MKHSGAQLASPSGSPLGPQVELPASPVPCACTSQPLGGRWDWAPWSRGWCSSGRLGPHRSPWSGWELRHGGLQVPSPAPREGSXGPARNPGTAPGRPAAPSGGPPSPRPPRTPAGPQALRAAPVPLAPLPPHLPASXGSGLQPWPAXKEAPTVQCQAEGLLKCRQSGSPGRGGAESE

SEQ ID NO: 36598 - protein, 580 aa, Homo sapiens
MRSHFSALGWSMGLSALEQGVVLVGEARAAQEPMEWVGGSGIAGCRSRALPRGKAAKARFESCWPALMKDAHGVVIVFNADIPSHRKEMEMWYSCFVQQPSLQDTQCMLIAHHKPGSGDDKGSLSLSGGGGNRRQGRSCPRGWTLGVAGAAAAAAQGKEARGLHVGSTWAPATPLGNLSPAAPYSGDLDSNHCPEEVVEASPVLMSPEGPSKDLYLHSFSQSGKTVLANFLTESSDITEYSPTQGVRILEFENPHVTSNNKGTGCEFELWDCGGDAKYVSFKESHFIKWFKNQLPKPGAVAHTCNSSTLGGRGVKLQTFTVSITAPKAARLELFVPPGGLVVLLASGVKLQIFAVSVTAHKSSVDPKTLGWSMGLGAVEQEVVLVGEAPAAQEPMEWVGGSGMGAAGPGALPRGKAAKARREIEHSAGLYKLLPHSEYSRPNRVPFNSQGSNPVRVSFVNLNDQSGNGDRLCFNVGRELYFYIYKGVRKPGPSGSDMARERACESPEERQDLILLPRLECGGVLIVHYSLKLLGSNDLPTSAFLVAGTTDTATIRFLNLFPTFPRFLFHKTTIVIMARSQ

SEQ ID NO: 36599 - protein, 141 aa, Homo sapiens
  DOMAIN (65)..(82): GTPase-activator protein for Rho-like GTPases domain identified by eMATRIX, accession number PF00620B, p-value=9.217e- 13, raw score of 14.20
  DOMAIN (15)..(141): RhoGAP domain identified by PFam, accession name RhoGAP, E- value=7.5e-20, PFam score of 79.4
GTREEHLKRSGREIALPIEACVMLLLETGMKEEGLFRIGAGASKLKKLKAALDCSILTWDEFYSDPHAVAGALKSYLRELPEPLMTFNLYEEWAQVASVQDQGQKTFKDLWRTCQKLPPQNFVNFRYLIKFLAKLAQTSDV

SEQ ID NO: 36600 - protein, 126 aa, Homo sapiens
  misc_feature (1)...(126): Xaa = X or * as defined in Table 2
LPFRGAGLETCSPPCLSLPPPPWAPVRPKPPRXAPPPAPRRPVPSTTQGSLGPHCFYELXHSPXRSAASLLKPARPXAHREERTTPGRSALTSCNTHREGLQPSLRKKETPNTSEHQKEQTPDAPP

SEQ ID NO: 36601 - protein, 511 aa, Homo sapiens
  DOMAIN (168)..(179): RNase H domain identified by eMATRIX, accession number PF00075B, p-value=1.346e-09, raw score of 12.56
  DOMAIN (341)..(474): RNase H domain identified by PFam, accession name rnaseH, E- value=1.3e-10, PFam score of 48.6
  misc_feature (1)...(511): Xaa = X or * as defined in Table 2
IQAAMQAAPQFGPSTEDXCCPITSEAPWAIMDAKLRLKPPSHPPLVSPHLNPQVWDTSSPSLATEHASLTISLKPNHPYPAQSQYSIPQHALKGSKPVITRLLEHGLLKPINSPYNSPILPVQKLDKSYRLVQHLCLIYQIVLPIHPMVPNPYTLLSSIPFTTHYSVLDLKHAFFTIPLYPSSQPLFAFTWTDPDTHQAQQITLAVLPQCFIDSPHYFSQAQISSSSVTYLGIILMKTHIGLGAVEQGVVLVGEARAAQEPMEWVGGSGMVGCRSRALPRGKAAKARREIERSAVTIVPVLDFNPAFHIIPDTTPDHHDCISLIHLTFTPFPHISFFPVPHLEHTWFIDGSSTRPNCHSPAKAGYAIVSSTSIIEATALPRSTTSQQAKLIAYTDSKCAFHILHHHAVIWEERNFLTMQGASIINAFLIKTLLKDILLPKEAGVIHCKGHQKASDPITQDNAYADKVAKKQLAFQLLSLTAVFLLLIRPLSPTSPLKLPLINLFPHKANDS

SEQ ID NO: 36602 - protein, 413 aa, Homo sapiens
  DOMAIN (201)..(242): PROTEIN GTPASE DOMAIN ACTIVATION domain identified by eMATRIX, accession number PD00930B, p-value=7.660e-16, raw score of 33.72
  DOMAIN (127)..(251): RhoGAP domain identified by PFam, accession name RhoGAP, E- value=4.2e-36, PFam score of 133.4
MQEEAKEHGQTQEAGKGKHALLPVHLPPWDDAARRPSPDVGPLTLDFPALRTDQLAADMYNFMAKEGEYGKFFVTLLEAQADYHRKALAVLEKTLPEMRAHQDKWAEKPAFGTPLEEHLKRSGREIALPIEACVMLLLETGMKEEGLFRIGAGASKLKKLKAALDCSTSHLDEFYSDPHAVAGALKSYLRELPEPLMTFNLYEEWTQVARYLIKFLAKLAQTSDVNKMTPSNIAIVLGPNLLWARNEGARDLQPTMPEPPTPSVGSCAARASLTSTTPCSTAPSPIDHPKAEKCGRTARDRQEIDSGDQVEDRLERKLQTGNVAQEVTTTVQGGTETVKNGECNSTQINAMERAFNLPRAWKKQLSHSIKKNYWGQLPRQFPSKENTENCCKEKVQVATAGRWQNEQQDRLEG

SEQ ID NO: 36603 - protein, 159 aa, Homo sapiens
  misc_feature (1)...(159): Xaa = X or * as defined in Table 2
QRPPHGVFVLGVAGRVHGPELASHKAGPQLGDVGVCAGQGGQVGPLVLQPVVEHIQQLPGAGHCAHQXQGSPSXSSLPRPERSLQCRRPQGATATIRSTWWGPRGPVCTAALVPLCWPGWPVQKDELQAVRSHSALASAMQTCSLAGPGLGSSHARLTA

SEQ ID NO: 36604 - protein, 378 aa, Homo sapiens
  DOMAIN (56)..(83): Renal dipeptidase proteins domain identified by eMATRIX, accession number BL00869A, p-value=7.300e-33, raw score of 14.49
MKKKSFRQLKENDLYGHKRRQSGSSQPEAHPSARASQASTEAPGQQCTQVPGDPTMWSGWWLWPLVAVCTADFFRDEAERIMRDSPVIDGRNWNSARFCGLVTWDLFSKSDPFLELYRVNDDQGLQLVYRTEGFGGCGYGQNPTGSRRRRALGAVAVARIQQACVVVAVIIFRPTFHFLQVVKNNLNPVWEAFKVSLSSLCSCEETRPLKVGDGMDQGGNSSAEEDWAPQCLVWDYDSRGKHDFIGEFSTTFEEMHKAFFEGQGYLVPGRLWFQMGCQRPCFLEVLVARATWYKGVCGSRWVARGPVSSRCWWPGPPGTRASVVPDGLPEALFPQGAGGQGYLFTAKQLEKLAKKAGKDSKAEQSKVKKVRPLGAVGS

SEQ ID NO: 36605 - protein, 54 aa, Homo sapiens
PRRRSRWTASSCRSPRRMAWRCWTSSASCPRAPLPWARALCAARRTSCHGGWPP

SEQ ID NO: 36606 - protein, 75 aa, Homo sapiens
MGKDFMSKTPKAMATKAKIDKWDLIKLKSFCTAKETTIRVGYQFQFKPRYPNPGTRTEASEKVPYIYKYLIFDKP

SEQ ID NO: 36607 - protein, 156 aa, Homo sapiens
MAEMTETGFRMWIKMNFSELKEHVATEGKEAKNHDKTMQELTAKIARIERNITDLIELKNTLQELHNAITSINSRIDQVEKRISELEDCLSEMTARQAKIQIQEIQRTPVRYSMRRSSPRWNERLGKEKDTETKYRERNKGAQGTSVQHMEDTASL

SEQ ID NO: 36608 - protein, 103 aa, Homo sapiens
  misc_feature (1)...(103): Xaa = X or * as defined in Table 2
ESQVLSNVSPHVKVXNMASWEGKDLTVPQPDTRKGSVLRRISKRGRNASCSXDKRKASVSCLSLGNGMSRYKTRLYAPSTEIGKNRLRAGGGTCGQQYCFVKH

SEQ ID NO: 36609 - protein, 169 aa, Homo sapiens
  DOMAIN (47)..(92): Carboxyl transferase domain identified by PFam, accession name Carboxyl_trans, E-value=1.2e-18, PFam score of 71.4
MEARSVTPAGVQWRILASLEHPPSGFKQFCCLSPPGETCDPRSSVFQIIQQAGQVWFPDSAYKTAQAIKDFNREKLPLMIFANWRLFSGGMKGGSCGTTGGDQTSSGGDAPPWVPGSHLGLREPASPKEPVKMQSWGPTSDPEAPPLDFHYALGEGQPTGDTGKAQALT

SEQ ID NO: 36610 - protein, 58 aa, Homo sapiens
KGAGVLQTFGSSESVFCIDVDRELLIFAYQNILLFLKNKRALILETTCFGWVGTVKRT

SEQ ID NO: 36611 - protein, 85 aa, Homo sapiens
MFWYANISNSLSTSMQNTDSDEPKGPPNANEDYREASSCAVNLVLRLRAQLEATQQSWKASSRTETLRPPASPTPTPPAAGQRQS

SEQ ID NO: 36612 - protein, 328 aa, Homo sapiens
  DOMAIN (37)..(83): kw TRANSCRIPTASE REVERSE II ORF2 domain identified by eMATRIX, accession number DM01354O, p-value=1.000e-40, raw score of 8.73
  DOMAIN (70)..(289): Reverse transcriptase domain identified by PFam, accession name rvt, E-value=1.6e-39, PFam score of 144.7
MDKFLDTYTLPRLKQEEVESLNRPIMGSEIEAIINSLPTKKSPGPDGFTAKFYERYKEELVSFLLKLFQSIEKEGILPNSFYEASIILIPKPGRDTTKKENFRPISLKNIDAKILNKILANRIRQPIEKLIHHDQVGFIPEMKGWFKKCKSINVIHHINQTNDKNHMIISIDAEKAFDKTQQPFMLKTLNKLGTIRQKKEIKGIQLGKEEVKLSLFADDMIVYLENSIVSAQNLLKLISNFSKVSRYKINLQKSQAFLYTNNRHMESQITSELPFTIDTKRIKYLGIQFTRDVKDLFKENYKLLLNEIKEDTNKWKNIPCSWIEESIS

SEQ ID NO: 36613 - protein, 525 aa, Homo sapiens
  DOMAIN (93)..(138): kw TRANSCRIPTASE REVERSE II ORF2 domain identified by eMATRIX, accession number DM01354N, p-value=1.000e-40, raw score of 13.17
  DOMAIN (177)..(452): Reverse transcriptase domain identified by PFam, accession name rvt, E-value=2.9e-75, PFam score of 263.5
IKPQRWGETRAEMLKILKTREPFLLQRIASPRQQWNKAGQRRSWFFERLNKIDRLLARLIKKKREKNQIDAIKNDKGDITTDPTEIQTTIREYYKHLYANKLENLEEMDKFLDTYTLPRLNQEELESLNRPITGSEIEAIISSLRTKKSPGPDGFTAEFYQRYKEELVLFLLKLFQSIEKEGILPNSFYEASIILIPKPGRDTTKKENFRLISLMNIDVKILNKILANRIQQHIKKLVHHDQVGFIPGMPDWFNICKSINIIHHINRTNGKNHMIISIDAEKAFEKIQQCFMLKTLNKLGIDGMYLKIIRAIFDKPTANVILNGQKLEAFPLKTGTTQGCPLSPLLFKIVLEVLARAIRQEKEIKRIQLGKEEAKLSLFADDMIVYLENPIVSAQNLLQLRSNFSKVLGYKINMQKSQAFLYTKNKQTESQIMSELPFTIATKRIKYLGIQLTRDVKSLFKENYKPLLSKIKEDTNKWKNIPSSWIGRISIAKMAILPKVIYTFNAIPIKLPMTFFTELEKTTLK

SEQ ID NO: 36614 - protein, 496 aa, Homo sapiens
  DOMAIN (361)..(406): kw TRANSCRIPTASE REVERSE II ORF2 domain identified by eMATRIX, accession number DM01354N, p-value=1.000e-40, raw score of 13.17
MAREIRDECTSFSSRFDQPEERVSVIEDQMNEMKREEKFREKRVKRNEQSLQEIWDYVKRPKLHLIGVPESDGENGTKLENTLQDIIQENFPNLAGQANVQIREIQRMPQRYSWRRATPRHIIVRFTKVEMKEKMLRTAREKAPHRTYSKIDHIVGSKALLSECERTEIITNCLSDHSAIKLELRMKKPTQNCSTTWKLNNLLLNDYWVHNKMKAEIKMFFETNENKDTTYQNLWYTFKAVCRGKFIALNAHKRKQERSKIDTLTSQLKELEKQEETHSKASRRQEITKIRAELKEIETQKTLQKINESRSWFFEKINKIDRLLARLIKKKREKNQTNAIKNDKGDIATDPTEIQTTIREYYKHLYANKLENLEEMDKFLDTYTLPRLNQEEVESLNRPITGSEIEAIINSLPTKKRPGPDRFAAEFYQRYKEELVPFLLKLFQSIEKEGILPNSFYEASIILIPKPGRDTTKKENFRPISLMNIDAKILNKILTN

SEQ ID NO: 36615 - protein, 467 aa, Homo sapiens
  DOMAIN (180)..(226): kw TRANSCRIPTASE REVERSE II ORF2 domain identified by eMATRIX, accession number DM01354O, p-value=1.000e-40, raw score of 8.73
  DOMAIN (215)..(466): Reverse transcriptase domain identified by PFam, accession name rvt, E-value=5.6e-55, PFam score of 196.1
MGRNQSGKAENSKNQNTSSPPKEHNSSPAREQNWMENEFDELTEVGFRSDGENGTKLENTLQDIIQENFPNLARQVNIQIQEIQRTPQRYSLRRATPRHITVRFIKVEMKEKMLRAVREKEIQTTIREYYKHLYTNKLENLEETEKFMDTYTLPKLNQEEVESLNRLKIASEIEAIINSLPTKKNPGPDGFAAEFYQRYKEELVPFLLKLFQSIEKQGILPNSFYEASIILIPKPGRDTTKKGNFRPISLMNIDVKILNKILANQIQQQIKKLIHHNQVGFIPGMQDCFNVPKSIDIIYHINRTNDKNHMIMSIDAEKAFNKNQQPFVLKTLNKLGIDGMYLKIIRAIYDKPTANIILNGQKLEAFPLKTGIRQGCPLSPLPFNIVMEVLAKAIRQEKEIKCIQLGKEEVKLSLFVDHMIVYLENPIISAQNLLKLISNFSKVSGYKINVQKSQAFQYTNNRQRAKS

SEQ ID NO: 36616 - protein, 418 aa, Homo sapiens
  DOMAIN (131)..(177): kw TRANSCRIPTASE REVERSE II ORF2 domain identified by eMATRIX, accession number DM01354O, p-value=1.000e-40, raw score of 8.73
  DOMAIN (166)..(417): Reverse transcriptase domain identified by PFam, accession name rvt, E-value=5.6e-55, PFam score of 196.1
DGENGTKLENTLQDIIQENFPNLARQVNIQIQEIQRTPQRYSLRRATPRHITVRFIKVEMKEKMLRAVREKEIQTTIREYYKHLYTNKLENLEETEKFMDTYTLPKLNQEEVESLNRLKIASEIEAIINSLPTKKNPGPDGFAAEFYQRYKEELVPFLLKLFQSIEKQGILPNSFYEASIILIPKPGRDTTKKGNFRPISLMNIDVKILNKILANQIQQQIKKLIHHNQVGFIPGMQDCFNVPKSIDIIYHINRTNDKNHMIMSIDAEKAFNKNQQPFVLKTLNKLGIDGMYLKIIRAIYDKPTANIILNGQKLEAFPLKTGIRQGCPLSPLPFNIVMEVLAKAIRQEKEIKCIQLGKEEVKLSLFVDHMIVYLENPIISAQNLLKLISNFSKVSGYKINVQKSQAFQYTNNRQRAKS

SEQ ID NO: 36617 - protein, 290 aa, Homo sapiens
  DOMAIN (155)..(200): kw TRANSCRIPTASE REVERSE II ORF2 domain identified by eMATRIX, accession number DM01354N, p-value=1.000e-40, raw score of 13.17
  misc_feature (1)...(290): Xaa = X or * as defined in Table 2
XALHLTNYEILQTSFAVGEKDLSPKIMEHSSSPATEQSWTENDFDELREEGFRRSNYSELKEEVRTHGKEVKNLEKRLDEWLIRITNVEMSLKDLMELKNMARGTTSWFFEKINKIDRPLARIIKKKRRIKDTIKNDKGDITTDPTEIQTTIREYYKHLYGNKLENLEEMDKFLDTYTLPRLNQEEVESLNRPITGSEIEAIINSLPTKKSPGPDRFTAEFYQRYKEELVPILLKLLESIEKEGILPNSVYEASIILIPKPGRDTTKKENFRPIPLMNIDAKILNKILAN

SEQ ID NO: 36618 - protein, 661 aa, Homo sapiens
  DOMAIN (128)..(173): kw TRANSCRIPTASE REVERSE II ORF2 domain identified by eMATRIX, accession number DM01354N, p-value=1.000e-40, raw score of 13.17
  DOMAIN (215)..(488): Reverse transcriptase domain identified by PFam, accession name rvt, E-value=4.5e-83, PFam score of 289.4
  misc_feature (1)...(661): Xaa = X or * as defined in Table 2
RSFPRSRPSPFLLLSRYLRIHMVFSVLPFGLQNPKYLLSGSLQEKFRTPGINSHKTLDPNRVIIKVRRRLEKEKALRAYVGKSEVRNMHLRERCKLXKKREKNQIDTIKNDKGDITTDATEIQTTIREYYKHLYANKLENLEEMDKFLDTYILPRLNQEEVESLNRPITGSEIEAIINSLPTKRSPGPDGFTAEFYQTYKEELVPFPLKLFQSTEKEGILPNSFYEASIILIPKPGRDTTKKENFRPISLMNIDAKILNKILANRIQQHIKKLIHYDQVGFIPGMQGWFNKRKSINVIQHINRTNDKNHMIISIDAEKAFDKIQQPFMLKTLNKLGIDGTYLKVIRAIYDKPTANIILNGQKLEAFPLKTDTRQGCPLSPLLFNIVLEVLARAVRQEKEIEGIQLGKEEVKLSLFADDMIVYLENPIVSAQNLLKLISNFSKVSGYKINIQKSQAFLYTNNRQTESQIMSELPFTTASKKIKYLGIQLTRDVKDLFKENYKPLLNEIKEDTNKWKNIPCSWVGRINIMKMAILPKVICRFNAIPIKLPMPFFTELETTTLKFIWNQKRARKSILSQKNKAGGITLPDFKLYYKATVTKTAWYWYQNRDIDQWNRTEPSEIMPHIYNYLIFDKPEKNKQWGKDSLFNKXCWENWLAIWRKLK

SEQ ID NO: 36619 - protein, 968 aa, Homo sapiens
  DOMAIN (272)..(317): kw TRANSCRIPTASE REVERSE II ORF2 domain identified by eMATRIX, accession number DM01354N, p-value=1.000e-40, raw score of 13.17
  DOMAIN (356)..(634): Reverse transcriptase domain identified by PFam, accession name rvt, E-value=5.8e-38, PFam score of 139.6
MGDFNTPLSTLDRTTRQKVNQDTQELNSALHQADLIDIYRTLHSKSTEYTFFSAPHHTYSKIDHILGSKALLSKCKRTEIITNYLSDHSEIKLELRIKNLTQNCSTTWKLNNLLLNDYWVPNEMKAEIKMFFETNENKDTTYPNLWDAFKAACRGKFIALNAHKRKQERSKIDTLVSQLKELEKQEQTHSKASRRQEITKIRAELKEIETQKTLQKINESRSWFFERIKKIDRPLARLIKEKREKNQIDAIKNDKGDITTNPTEIQTTIREYYKHLYTNKLENLEEMDKFLDTYTLPRLNQEEVESLNRPITGSEIVAIINCLPTKKSPGPDGFTAEFYQRYKEELVPFLLKLFQSIEKEGILPNSFYEASIILIPKPDRDTSKKENFRPISLMNIDAKILNKILANRIQQHIKKLIHHDQVGFIPGMQGWFNIRKSINVIQHINRAKDKNHLIISIDAEKPFDKIQQCFMLKTLNKLVIDGTYFKIIRAIYDKPTANIILNGQKLEAFPLKTGTRHGCPFSPLLFNIVLEVLARAIRQEKEIKENKIPRNLTYKGCEGPLQGELQTTDQGNKREYKQMEKHSMLMGRKNQYRENGHTAQELEKTTLKFIWNQKRAHIAKSILSQKNKAGGITLPDFKLYYKATVSKTAWYWYQNRDIDQWNRTVPSEITPHIYDYLIFDNPEKNKQWGKDSLFNKWCWENWLAICRKLKLDPFLTPYTKINSRWIKDLNIRPKTIKTLEENLGITIQDIGMGKDFMSKTPKAMATKAKIDKWDLIKLKSFCTAKETTIRVNRQPTEWEKIFAIYSSDKGLISRIYNELKQIYKKKTNNPIKKWAKDMNRHFSKEDIYAAKKHMKKFSSSLAIREMQIKTTMRYHLTPVRMAIIKKSGKNRAGSALAPCSRRTVGAGGAVSSSCTQLPARQRGRQAKQSAQSGSASGDTGSTGSPGCLNSLRNNLSDSGCSADCELWR

SEQ ID NO: 36620 - protein, 786 aa, Homo sapiens
  DOMAIN (686)..(741): kw TRANSCRIPTASE REVERSE II ORF2 domain identified by eMATRIX, accession number DM01354Q, p-value=1.000e-40, raw score of 9.23
  DOMAIN (641)..(784): Reverse transcriptase domain identified by PFam, accession name rvt, E-value=5.5e-05, PFam score of 1.2
MKKGIQVPSFKHISSANVVIPDKVQLEGSGPTGADAIQEGVGANVGVEKGHHAAQLGEAEPHVNEVRLIAHQQSHRVPLFQRGMVQEDMGHSAAPFVYILIGVDVSLIDDERHSSPRRPQILTTQGLHLKFLSAFPGRSGMGRNPEKQNRRFAPKRSPQVVLKIKLGSLGGWKAGSLRLLRETNTATLRGLGIYNPSAAPSPPNRDSGPCPASSPGLSRPLLSGTAWAPPPAPPWARVRPPREVWRADLLTPQGGGPATGVSGGEECDSPVGGNPGIWKAWGHRRTRVAGIGRRGGPGEADKQPLLVILRQTGSGVDLQQTPTDLQLRVLTVRRNTNKRKGHPHQNPICTSPSSKTEGRSMRQKVNKDIQELNSALHQVDLIDIYRTLHPKSTEYTFFSAPHHTYSNIDHIVGSKALLNKCKRTEIVANCLSDHSAIKPELRIKKLTQNCSTTWKLNNLLLNDYWRSKRKTHSKASRRQEITKIRAELKEIETQNTLQKINESRSWFFENINKIDRLLERLIKKEREKNQIDAIKNDKGDITTDPTKIQTTIREYYKHLYKNKLLNLEEMDKFLDTYTLPRLNQEEIESLNRPITGYEIEAIINSLPTKKSPGSDGFTAEFYQRYKQELVTFLLKLFQSTEKEGILPNSFHEASIILIPKPGRDTTKKENFRPISLMNIDAKILNKILANQIQQHIKKLIHHDQLGFIPGMQGLFSTCKSINVIHHINKTKDKNHMIISIDAEMASDKIQQPFMLKTLNKLGIDGMYLKIIRAIYDKPTANIILNG

SEQ ID NO: 36621 - protein, 622 aa, Homo sapiens
  DOMAIN (333)..(388): kw TRANSCRIPTASE REVERSE II ORF2 domain identified by eMATRIX, accession number DM01354Q, p-value=1.000e-40, raw score of 9.23
  DOMAIN (288)..(511): Reverse transcriptase domain identified by PFam, accession name rvt, E-value=1.7e-25, PFam score of 98.2
MGDFNTPLSTLDRSTRQKVYKDIQELNTALHQADLIDIYRTLYPKSTEYTFSEYTFFSAPHHTYSKIDHLVGSKALLSKCKRTEIITNCLSDHSAIKLELRIKKFTQNHSTTWKLNNLLLNNYWVHNEMKADIKMFFEMNENKDTTYQNLWDTFKAACKGKFIALNAHKRKQERSKIDTLTSQLKELEKQEQTQIQTTIREYYKHVYANKLENLEEMDKFLDTYTLTRLNQEEVESLHRPITGSEIEAIINSLRTQKSPGTDGFTAKFYQSYKEELVPFLLKLFQSIEKDGILPNSFYEASIILIPKPGRDTTKKEDFRPISLKNIDTKILSKILANQIQQHIKKLIHHDEVGFIPVMQGWFNICKSINIIHHINRTKDKNHMIISTDAEKTFEKIQQCFMLKTLHKLVLEFLARAIRQEKEIKGIQLGKEEIKLFLLADDTIVCLENPLISAQNLLKLISNFSKVSRHKISVQKPQAFLYTNNRQIESQIMSELPFTIASKKIKYLGIQLTRDVKDLFKENYKPLLNEIKEYSNKWKNIPCSWIGRINIMKMAIWPKVTYRFSAIPIKLPMTFFTELEKTTLKFIWNQKRAHITKTILSQKNKAAGITLPDFKLYYKSTVS

SEQ ID NO: 36622 - protein, 295 aa, Homo sapiens
  DOMAIN (211)..(257): kw TRANSCRIPTASE REVERSE II ORF2 domain identified by eMATRIX, accession number DM01354O, p-value=1.000e-40, raw score of 8.73
MQLEIRECTDCLLKWPPLLILRQTGSGVDLQQTPTDLQLRVLTVRRKTNKQKRHPHQNPICTSPSSKTKELEKQEQTHSKASRRQEITKIRAELKDIETQKTLQKIHESRSWFSEKINKIDRPLARLIKKKEKNQIDAIQNDKGDITTDPTEIQTTIREYYKHLYANKLENLEEMDTFFDTYTLPSLNQEEVESLNRPTTGSEIEAIINSLPTKKSPGPDGFTAEFYQRYKEELVPFLLKLFQSIEKEGILPNTFYEASIILILKPGRDTTKKENFRPISLMNIDAKILNKILAN

SEQ ID NO: 36623 - protein, 353 aa, Homo sapiens
  DOMAIN (191)..(236): kw TRANSCRIPTASE REVERSE II ORF2 domain identified by eMATRIX, accession number DM01354N, p-value=1.000e-40, raw score of 13.17
MKNNSESFEPLLLIPRQRGSGVDLQQTPTDLQLRVLTVRRKTNKQDIHTKTPTVRHHHQRPKNPWDTFKAVCRGKFIALNAHKRKQERSKIDTLTSQLKEVEKQEQTQSKASRRQEITKIRGELKEIETQKTLQKINESRSWFFEKINKIDRLLARLIKKKREKNQIDTIKNDKEDITTDSTEIQTTIREYYKHLYANKLENLEEMDKFLNIYTLPRLNQEEVESLNRPITGSEIEAIINSLPTKKSPGPDGFTAEFYQSYQEELVPFLLKLFQSIEKEGILSNSFYKANIILIPKPGRDTTKKENFRPISLMNIDAKILNKILANRIQQHIKKLIHHDQVGFIPGMQGWFNI

SEQ ID NO: 36624 - protein, 564 aa, Homo sapiens
  DOMAIN (309)..(355): kw TRANSCRIPTASE REVERSE II ORF2 domain identified by eMATRIX, accession number DM01354O, p-value=1.000e-40, raw score of 8.73
  DOMAIN (344)..(562): Reverse transcriptase domain identified by PFam, accession name rvt, E-value=2.3e-42, PFam score of 154.2
MRPPFQTPAPEHILGWKETCCFQGKNPFLAAFITCYLKSPWTLINHQQDPGTTLKSSPGSGGHRGASFTPPEALGGLEQRETVHLGERKKDNKCICLVIQRILPELVQDHQGGTSMSLQNHRVTGFGEPPKADTVQIITANSFKISEKPPQRKRDSSPGIYWPLMRKSLATIDLQGAIAVLILSLTLTAGLPSGITQTNQTHLEYDYLEVFCPPPIQDDGSFSGRGNREEKLETNYKKENQLNEALTPFEIQTTIRQYYKHLYANKLENLEEMDKLLKTYTLSRQNQEEVESLNRPIAGSEIEAIINSLPTKKSPGPDRFTAEFYQRYKKELVPFLLKLFQSIEKEGLLPNSFYEASIILIPKPGRDTTKKENFRPISLMNIDAKILNKILAKQIQQHIKKLIHHDQVGFIPGMQGWINILKSINVIQHINRTSDKNHVIISIDAEKAFDKIQQPFMLKTLNKLSIDGMYFKIIRAIYDKPTANIILNGQKLEAFPLKTGTRQGCPFSPLLFNIVLEVLARAIRQEKEIKGILLGKEEVKLSLFAHDMIVYLENPIISAQNLLS

SEQ ID NO: 36625 - protein, 956 aa, Homo sapiens
  DOMAIN (338)..(379): kw TRANSCRIPTASE REVERSE II ORF2 domain identified by eMATRIX, accession number DM01354I, p-value=1.000e-40, raw score of 15.55
  DOMAIN (556)..(831): Reverse transcriptase domain identified by PFam, accession name rvt, E-value=9.2e-85, PFam score of 295.0
MAGAGRRKREQGGATHFRQPELMGTHYHESTKRDSAKMFMRNHPYHPVTSHQAPPPTLGITIWYEISAGTQIQTTAIHVLKFIELECYLVINKVMYSCVAKAAYFYVLRCVPPPYGRFDGHVLKPPKAQNYLLSCELKGDKGCHFQMDNDTNERQLSLRTTSSGAGAKDELHVVEAEIMNNEGSPIKLLVTIVLLSVSMSSVVLILVPTNKLTLKIPWKNLYGEAVVATLEGLYLLVVPGASIKYDAVKEEKSLQDVKQKELSRIEEALQKAAEKDKPKEAKKDTFVEKLATQVIKNVQVKITDIHLNMKMILSDHSAIKLELRIKKLTQNHSTTWKLNNLLLNDYWVHNEMKAEIKMFFETNENKDTTYQNLWDTLKAVCRGKFAALNAHKRKQEGSKIDTLTSQLKELEQQEQTHSKASRRQEITKIRAELKEIETQKTLQKINESRSWFFEKINKIDRLLKYKTTIREYYKHLYANKLENLEEMDKFLDTYTLPRLNQEEVESLNRSITGSEIEAIINSLPTKKSPGPDGFTAEFYQRYKEELVPFLLKLFQSIEKEGILPNSFYESSSILIPKPGRDTTKKENFRPISLMNIDAKILNKILANRIQQHIKKLIHHGQEGFIPGMQGWFNIRKSINVIQHINRTKDKNHMIISIDAEKAFDKIQQPFMLKTLNRLGIDGMYLKIIRAIYEKPTANIIVNGQKLEAFPLKTGTRQGCPLSPLLFHIVLEVLARAVKQEKEIKGIQLGKEEVKLSVFADDMIVYLENPIVSAPNLLKLISNFSKVSGYKINVQKSQAFLYTNNRQTESQIMSELPFTIDSKRIKYLGIQLTRDVKDLFKENYKPLLNEIKEDTNKWKNIPCSWIGRINIVKMAILPKIIYRFSAIPIKLPMTFFTELEKTTLKFVWNQKRAHIAKSILSQKNKAGGITLPDFKLYSKATVTKTAWYWYQNRDTDQ

SEQ ID NO: 36626 - protein, 771 aa, Homo sapiens
  DOMAIN (553)..(598): kw TRANSCRIPTASE REVERSE II ORF2 domain identified by eMATRIX, accession number DM01354N, p-value=1.000e-40, raw score of 13.17
  DOMAIN (146)..(379): AP endonuclease family 1 domain identified by PFam, accession name AP_endonucleas1, E-value=2.8e-05, PFam score of -36.5
SSENILTVHEQANVESLKETKQNCKDLDEDANGITDEGKEINEKSSQLKNLSELQDTSLQHDDEEESTVISVSEDMNSEGNVDFECDTKLYTFLSSDESQQSENSENEEDTLCFVENSGQRESLSGDTGSLSCDNALFVIDTTPGMSADKNFYLEEEDKASEVAIEEEKEEEEDEKSEEDSSDHDENEDEFSDEEDFLNSTKAKLGRLTPHMAGYSSETKLPEERPGSNICCSPISAVLQPPLLIPRQTGSGVDLQQTPTDLQLRVLTVIKKTNKQKGHPHQNPICTSPSSKTKDRSTRQKVNKDIQELNSALHQADLIDIYRTLHPKSTEYTFFAAPHCTYSKIDHIVGSKALLSKCKRTEIITNCLLDHSAIKLELRIKKFTQNCSTTWKLNNLLLNDYWAHNEIKAEIKMFFETNENKDTTYQNFWDTFKAVCRGKFIALNAHKRKQERSKIDTLTSQLKELEKQEQTHSKASRRQEITKITAELKEIETQKTLQKINESRSWFFEKINKIETASKTNKKREKNPIDAIKNDKGDITTNPTEIQTTIREYYKHLYANKLENLEEMNKFLDTNTIPRLNQEEVESLNRPITGSEIEAIINSLPTKKSPGPHGFTARFYQEYKEELVPFLLKLFQSIEKEGILPNSFYEASIILTPKPGRDTTKKESFRPISLMIINAKILNKILANRIQQHIKKLIHHDQVGFIPGMQDWFKICKSINVIQHINRTKDKNHMIISIDAEKAFDKIQQLFMLKTLSKLGIDGTYLNKSYL

SEQ ID NO: 36627 - protein, 402 aa, Homo sapiens
  DOMAIN (240)..(265): 7 kw REVERSE TRANSCRIPTASE RNA POLYMERASE domain identified by eMATRIX, accession number DM00895E, p-value=1.444e-11, raw score of 15.72
  DOMAIN (211)..(382): Reverse transcriptase domain identified by PFam, accession name rvt, E-value=1.3e-08, PFam score of 42.1
MMSFHELSVHTAIDGHSHSSCSAWCSPIDRDYFEQENNSSSSCCCCCYHCHRKHCGGKGLSFPGEMPLSPGHFNKMMYSVSELMQGSGSGTFIPLPAELSLWLLVTNTKGQRMIKNDAEIQTTIREYYKHLYANKLENLEEMDKFLDTYTLPRLNQEEVESLNRPITSSEIVAIINSLPTKKSPGPHGFTAEFYQRYKEELVPFLLKLFQSIEKEGILPNSFYEASIILIPKPGRDTTKKENFRPISLMNSDAKILNKILANRIQQHIKKLIHHDQVGFIPGMQGWFNICKSINVIQHINRTKDKNHMIISIDAEKAFDKIQQPFMLKTLNKLGIKYLGIQLTWDVKDLFKENYKPLLKEIKEDTNKWKNIPCSWVGKINIMKMAIPPKATSPLESYKREKR

SEQ ID NO: 36628 - protein, 915 aa, Homo sapiens
  DOMAIN (216)..(257): kw TRANSCRIPTASE REVERSE II ORF2 domain identified by eMATRIX, accession number DM01354I, p-value=1.000e-40, raw score of 15.55
  DOMAIN (462)..(647): Reverse transcriptase domain identified by PFam, accession name rvt, E-value=1.6e-12, PFam score of 55.0
  misc_feature (1)...(915): Xaa = X or * as defined in Table 2
MEGEMNEMKREGKFREKRIKRNEQSLQEIWDYVKRPNLRLIGVPESDGENGTKLENTLQDIIQENFPNLARQANVQIQEIQRTPQRYSSRRATPRHIIVRFTKVEMKEKMLRAAREKDRSTRQKVNKDTQELNSALHQADLIDIYRTLHLKSTEYTFFSAPHHTYSKIDHILGSKALLSKCKRTEIITNYLSDHSAIKLELRIKNLTQNRSTTWKLNNLLLNDYWVHNKMKAEIKMFFETNENKDTTYQNLWDTFKAVCRGKFIALNAHKRKQERSKIDTLTSQLKELEKQEQTHSKASRRQEITKIRAELKEIETQKTLQKINESRSWFFERINKIDRPLARLIKKKREKNLIDAIKNDKGDITTDPTEIQTTIREYYKHLYTNKLENLEEMDKFLDTYTLPRLNEEEVESLNRPITGAEIVAIINSLPTKKSPGPDGFTAEFYQRYKEELVPFLLKLFQSIEKEGILPNSCYEASIILIPKPGRDTTKKENFRPISLMNIDAKILNKILAKRIQQHIKKLIHHDQVGFIPGMQGWFNIRKSINVIQHINRAKDKNHMIISIDAEKAFDKIQQPFMLKTLNKLDIGRNYCKVHMEPKKSPHRQVNPKPKEQSWRHHTTXLQTILQGYSNQNSMVLVPKQRYRSMEQNRALRNNAAYLQLSDLXQTXEKQAMGNGFPIXXMVLGKLASHMXKAETGSLPYTLYKNQFKMDXRLKRXTXNHKNPRRKPRHYHSGHRHGQGLHVXNTKSNGNKSQNXQMGSNXTKELLHSKRNYHQSEQATYKMGENFHNLLIXQRANIQNLQXTQTNLQEKNKQPHQKVGKGHEQTLLRRRHLCSQKTHEKMLIITGHQRNANQNHNEIPSHTSXNGNHXKVRKQQACTLFHTHPHYVRLSISTDTEGLEHPWILVSTGHPGTNLL

SEQ ID NO: 36629 - protein, 684 aa, Homo sapiens
  DOMAIN (259)..(304): kw TRANSCRIPTASE REVERSE II ORF2 domain identified by eMATRIX, accession number DM01354N, p-value=1.000e-40, raw score of 13.17
  DOMAIN (346)..(569): Reverse transcriptase domain identified by PFam, accession name rvt, E-value=2.8e-46, PFam score of 167.2
MGDFNTPLSTLDRSMRQKVNKDTQELNSALHQADLIDIYRTLHPKSTEYTFFSAPHHTYSKIDHIVGSKALLSKCKRTEIITNYLSDHSAIKLELRIKNLTQNRSTTWKLNNLLLNDYWVHNEMKAEIKMFFETNENKDKTYQNLWDAFNAVCRGKFVALNAHKRKQEGSKIDTLTSQLKELEKQEQTHSKASRRQEITKVRAELKEIETQKTLQKINESRSARLIKKKREKNQIDAIKNDKRDITIDPTEIQTTIREYYKHLYANKLENLEEMDKFLDTYTLPRLNQEEVESLNRPITGSEIVAIINSLPTKKSPGPEGFTAEFYQRYKEELVPFLLKLFQSTEKEGILPNSFYEASIILIPKPGRDTTKKENFRPISLMNIDAKILNKILAKRIQQHIQKLIHHDQVGFIPGMQGWFNICKSINVIQHINRTKDKNHMIISIDAEKVFDKIQQRFMLKTLNKLVLEVLARAVRQEKKIKGIQLGKEELKLSLFADDMIVYLENPIVSAQNLLKLISNFSKVSEYKINVQKSQAFLYTNNRQTESQIMSELPFTIASKRIKYLGIQLTRDVKDLFKENYKPLLKEIKEDVNKWKNIPCSWVGRINIVKMAILPKVIYRFNAIPIKLPMTSFTELEKTTFKFIWNHKGARIAKSILSQKNKAGGITLPDFKLYYKATVTKTAWY

SEQ ID NO: 36630 - protein, 714 aa, Homo sapiens
  DOMAIN (205)..(250): kw TRANSCRIPTASE REVERSE II ORF2 domain identified by eMATRIX, accession number DM01354N, p-value=1.000e-40, raw score of 13.17
  DOMAIN (289)..(567): Reverse transcriptase domain identified by PFam, accession name rvt, E-value=1.5e-78, PFam score of 274.3
  misc_feature (1)...(714): Xaa = X or * as defined in Table 2
SSDGSWWTGFQWREWRQAGRSVNSWDNPKQEVRASSKDKSRGSIQEAMRMQSSAKLLCSAWTLAYSIAVRTLSSDSEGQPPLVIHRQTGSGEDLQQTPTDLQLRVLTIRRKTNKQKGHPHQNPISSRRQEITKIRAELKKIETQKPFKKINESRSWFFEKINKIDRLLARLIKKKIEKNQIDAIKNDKGNITTNPTEIQTTIREYYKHLYANKLEHLEEMDKFLDIYTLPRLNQEEVESVNRPITGSEIEAIINSLPTKKSPGPDRFTAELYQRYKEELVPFLLKLFQSIEKEGILPNSFYEASIILISKPGRDTTKKENFRPISLMNIDAKILNKILANQIQQHIKKLIHHHQVGFIPGMQGWFNILKSINVIHHINRTKDKNHMIISIEAEKAFDKIQQPFMLKTLNKLGIDGTYLTYLKIIRAIYDKPTANIILNGQKLEAFPFKTGTRQGCPLSPLLFNIVLEALARAIRQEKEIKGIQLGKEDVKLSLFADDMIVYLENPIVSAQNLLKLISNFSEVSGYKINVQKSQAFLYTNNRQTESQIMSELPFTIASKRIKYLGIQLTRDVKDLFKENYKPLLNEIKEDTNKWKNIPCSWIGRINIVKMAILPKTLNQKFSYWFRVNKHYIHQRTFPLKETEFNTIATLYNGASPCTAPKSTGTNGHQASGLPRFXRIAFCSALVKSKRKLYQGYLPGQTDRREEGVSWCPGGP

SEQ ID NO: 36631 - protein, 1006 aa, Homo sapiens
  DOMAIN (173)..(219): kw TRANSCRIPTASE REVERSE II ORF2 domain identified by eMATRIX, accession number DM01354O, p-value=1.000e-40, raw score of 8.73
  DOMAIN (206)..(470): Reverse transcriptase domain identified by PFam, accession name rvt, E-value=3.1e-37, PFam score of 137.1
MDGPGSHYPQQSNAGTENQTPNVLTYKWELNNENTWTQGGEQYTLGPFGGWQGKESIKISSYYTLGLIPRWSWFFEKIIKIDRPLARLIKKKREKNQIDAIKNDKGDITTDPTEIQTTIREYYKHLYTNKLGNLEEMDQFLETYTLPRLNQEEVESLKRPITGSEIEAIINSLPTKKSPGPDGFTAEFYQRYEEELVPFLLKLFQSIEKEGILPNSFYEANIILISKAGRDTIKKENFRPISLMNINAKILNKILANRIQQHIKKLIHHDQVGCIPGMQGWFNICKSINVIHHINRTKDKNHMIISTDAEKASDKIQQPFMLKPLNKLGIDGMYLKIRRAIYDKPTANIILNGQKLEAFPLKTGTRQGCPLSPLLFNIVLEVLVRAIRQEKDKTTLKFIWNQKRARIAKIILSQKNKAGGIKLPDFKLYYKATVTKTAWYWYQNRDIDQWNRIEPSEIIPHIYNHLVFDKPDKNKKWGKDSLFNKWCWENWLAIRRKLKLDPFLTPYTKINSRWIKDLNVRPKAIKTLEENLGKTIQAIGMGKGFMSKTPKAMAAKAQIDKWVLIKLKSFFTAKETTIRVNRQPTEWEKIFAIYSSDKGLVSRIYKKLKQIYKKKSNNPIKKWVMDMNRQFSKEDVYAANRHMKKCSSSRAIREMQTKTTMRYHLTPVRMAIIKKSGDNRLLSGGAEPLIQCRTPAPPCIAHSCACSCSVSTPPLGWDGSPFGLIQQNTLGWVIYKQQKFIAHSFEGWKVQDAGTHRFGVWWKPIGSACHEGERDLSRLFYKESTLSYVRQLEARVRQLEEENRMLPQDRYTFYVMVAATVMCLEWRRSNEHRADVNLVLDVQETIDRQQGKEYEHDLSETEKAIVREMCNVVWRKLGDAAGSCPGIRQHLSGNQYKGPMIRVDSGDNRQRELEEDEVFQLDGPGFNTQFDGQLFGPSTNVLYWCQWQMVLFMTDKVSMNWGGSRESEGRRFHALLVLTSSMKSNSVLTFLDPEIRGISLRVERGF

SEQ ID NO: 36632 - protein, 672 aa, Homo sapiens
  DOMAIN (283)..(329): kw TRANSCRIPTASE REVERSE II ORF2 domain identified by eMATRIX, accession number DM01354O, p-value=1.000e-40, raw score of 8.73
  DOMAIN (316)..(563): Reverse transcriptase domain identified by PFam, accession name rvt, E-value=1.6e-68, PFam score of 241.0
MGDFNTPLSTLDRSKRQKVNKDIQELNSALHQVDLIDIYRTLHPKSTEYTFFSAPHRTYSKMDHTVGSKPLLSKCKRTEIITNCLSDHSAIKLELRIKKLTQNCSTTWKLNNLLLNDYWLHNEMKAVIKMFFETNENKDTTYQNLWDTFKAVCRGKFIALNAQKRKQERPKIDTLTSQLKELEKQEQTHSKASRRQEITKTRAELKEIETQKNPSKKSMNPGAEIQATIREYYKHLYANKLENLEEIDKFLDTYTLPRLNQEEAESLNRQITGSEIEAIINSLPTKKSPGPDGFTAEFYQRDKEELVPFLLKLFQSIEKEGILPNSFYEASIILIPKPGRETTKKENFRPISLMNIDAKILNKILANRIQQHIKKLIHHDQVDFIPGMQGWFNICKTINIIQHINRTKDKNHTIISLDAEKAFDKIQQPFMLKTLNKLGIDGTYLKIIRTIYDKPTANIIPNGQKLEAFPLKTGTRQGCPLSTLLFNIVLEVLARAIRQEKEIKAQNLLKLIGNFSKVSGYKINVQKSQAFLYTNNRQTESQIMSELPFTIASKRIKYLGIQLTRDVKDLFKENYKPLLKEIKEDTNKWKNIPCSWVGRINIVKMATLSKVIYRFNAIPIKLPMTFFAELEKTTLKFIWNQKRARIAKSILSQKNKAGGIELPDFKLYYKAM

SEQ ID NO: 36633 - protein, 404 aa, Homo sapiens
  DOMAIN (43)..(88): kw TRANSCRIPTASE REVERSE II ORF2 domain identified by eMATRIX, accession number DM01354N, p-value=1.000e-40, raw score of 13.17
  DOMAIN (127)..(379): Reverse transcriptase domain identified by PFam, accession name rvt, E-value=9.2e-07, PFam score of 26.4
MPNFAPSTGGVEGVSLVYIQRDYQIHQSSNRWLVEIQTTIREYYKQLYANKLENLEEMDKFLDTHILPRLNQEEVESLNRPITGSEIEAIINSLSTKKIPGPDGFTAEFYQRYKQELVPFLLKLFQSIEKEGILPNSFYEASIILIPKPGRDTTKKENFRPISFMNIDAKILNKILANRIQQHIKKLIHHDQVGFIPGMQGWVNIRKSINGIQHINRTKDQNHMIISTDAEKAFDIILYSALFAEVYATVIVGTEAVQKEVDYPSPTYVGRGRLWVIKRIKIEFAHPVLYLTLDKSSELCKAETGEAALIRYGDRKHIVPESAVTSGVTDGHYKRLVGVNTGLNLIFDEEEGAVSTRGTSVQSIELVLPPHANHHGNTFGGQIMAWMETVATISARFLVLTFGL

SEQ ID NO: 36634 - protein, 756 aa, Homo sapiens
  DOMAIN (253)..(294): kw TRANSCRIPTASE REVERSE II ORF2 domain identified by eMATRIX, accession number DM01354I, p-value=1.000e-40, raw score of 15.55
  DOMAIN (42)..(239): AP endonuclease family 1 domain identified by PFam, accession name AP_endonucleas1, E-value=1.1e-31, PFam score of 118.7
  misc_feature (1)...(756): Xaa = X or * as defined in Table 2
MAGYPSETKPPEERSDSNICSSAIFTVLHPPLLIPRQTAFGMDLQQMPTDLQLRVLTVKRKTNKQKGHPHQNPIRTSPSSKTEDFQPTKIKRDKEGHYIMVKGSIQQEELTILNIYAPNTGAPRFIKEVLRDLQRDLDSHTIIMGEFNTRLSTLDRSMRQKVNKDIQELNSALHQADLIDISRNLHPKSTEYTFFSAPHRTYSKIDHIVGSKALLSKCKRTEIITKCLSDHSAIKLELRIKNLTQNCSTTWKLNNLLLNDYWVHNEMKAEIKMFFETSENKDTTYQNLWDTFKAVCRGKFIALNAHKRKQERSKTDTLTSQLKELEKQEQTHSKASRRQEITKIRAELQEIETQRTLQKISESRSWFFEKINKIDRSLARLIKKKREKNQIEAIKNDKGDITTNPTETQTTIKEYYKHLYKNKLENLEEMDKFLNTYTLPRLNQEEVESLNRPITGSEIVAIINSLPTKKSPGPDGFTAEFYQRCKEELVTFLLKLFQSIEKEGILPNSFYEASINLIPKPGRDTTKKENFRPISLMNIDAKILNKILANRIWGNXAEERNKEYSIRKRGSQIVPVCRXHDCVSRKPHHLSPQSPXADKQLQQSLRIQNQCTKITSILIHQXQTNREPNHEXTPIHNCFKENKIPRNPTYKGCEGPLQGELQTTAQXNKRGHKQMEEHSMLMDRKNQHRENRHTAQGNLXIQCHSHQATNDFLHRIGKNYLKFHMEPKKCPHCQVNPKSKEQSWRHQATXLQTILL

SEQ ID NO: 36635 - protein, 599 aa, Homo sapiens
  DOMAIN (112)..(153): kw TRANSCRIPTASE REVERSE II ORF2 domain identified by eMATRIX, accession number DM01354I, p-value=1.000e-40, raw score of 15.55
  DOMAIN (318)..(499): Reverse transcriptase domain identified by PFam, accession name rvt, E-value=7.3e-26, PFam score of 99.3
MIMGDFNTPLSTLDRSTRQKVNKDIQELNSALHQADLIDIYRTLHPKSTEYTFFSASHLTYSKIDHIVGSKALLSNCKRTEIITNYLSDHSAIKLELKIKKLTPNRSTTWKLNNLLLNDYWVHNEMKAEIKMFFETNENKDTTYQNLWDTFKAECRGKFIALNAHKRKQERSKIDTLTSQLKELEKQEQTHSKASRRQEITKIRAELKEMETQKNPSKKSMNPGAEIQTTIREYYKHLYANKLENLEEMDTFLDTYTLPRLNQEEVESPNRPITGSEIEAIINSLPTKKSPGPDGFTAKFYQRYKEELVPFLLKLFQSIEKEGILPNSFYEASIILIPKPGRDTTKKENFRPISLMNIDAKILNKILANRIQQHIKKLIHHDQVGFIPGMQGWFNIRKSINIIQHINRTNNKNHMIISIDAEKAFDKIQQPLMLKTLNELAQNLLKLIGNFSKVSGYKINVQKSQAFLYTNNRQTESQIMSELPFTTASKRIKYLGIQLTRLAKELFKENYKPLLNETKGDTNKWKNIPCSWVGRINIVKMAILPKVLRKGQTPVPSGIRLAKQLSYNKKHLCCSSENDTLKYAALKLKLRAPGKQQMQ

SEQ ID NO: 36636 - protein, 687 aa, Homo sapiens
  DOMAIN (94)..(141): Sec1 family domain identified by eMATRIX, accession number PF00995A, p-value=1.158e-19, raw score of 20.59
  DOMAIN (300)..(509): Reverse transcriptase domain identified by PFam, accession name rvt, E-value=4e-42, PFam score of 153.4
IKTLSIRLTLRATELTCTGSPSSTESGGLPGGAGQWLVGAKMAAAAAATAAAAASIRERQTVALKRMLNFNVPHIKNSTGEPVWKVLIYDRFGQDIISPLLSVKELRDMGITLHLLLHSDRDPIPDVPAVYFVMPTEENIDRMCQVFDQYLNFITLEDDMFVLCNQNKELVSYRAINRPDITDTEMETVMDTIVDSLFCFFVTLEIQTTIREYYKHLYANKLENLEEMDKFLDTYTLPRLNWEEFELLNRPITGSEIEAVINSLPTQKKSPGPGEFTAEFYQRYKEKLVPFLLKLFQSIEEEGILPNSFYEASIILIPKPGRDTTKNENFRPISLMNINAKILNKILAKQIQQYIKKLIHHKQVGFIPGMPGWFNICESININHHINRTKDKNHMIISIDAEEAFDKIQQPFMLKPLNKLGIDGTYLKIIRPIYDKPTANIILNGQKLEAFPLKTGTRQGCPLSPLLFNIVLEVLARAVRQEKEIKGIQLGKEEVKLSLLRIKYLGIQLTRDVKDLFKENYKPLLNEIKEDTNKWKNIPCSWIGRINIVKTAILPKDFHLNRVNLEESSGVENSPAGARPKRKNKKSYDLTPVDKFWQKHKGSPFPEVAESVQQELESYRAQEDEVKRLKSIMVHTGIETELQSVGDSADVFTSICSVSVKWQKAVQICLPEVIVSCGGDTDTDIDV

SEQ ID NO: 36637 - protein, 404 aa, Homo sapiens
  DOMAIN (313)..(359): kw TRANSCRIPTASE REVERSE II ORF2 domain identified by eMATRIX, accession number DM01354O, p-value=1.000e-40, raw score of 8.73
  DOMAIN (134)..(186): DnaJ domain identified by PFam, accession name DnaJ, E-value= 0.089, PFam score of -5.1
MKVMTWKAPNTTWGQLKKLDQQASIWLAAVEALATAWNRFLKYLVVTGETSEKEYLYYQPQRDTKFANLTFMSAVSTNLTEVSNEATQVPDLPICCLSTDWRYKCICRRLCAATQRIYDQGRTIEVYLALDDQHVLRIKEEGDIGGAWQYIQPYNNPNAHGDFLKINRAYEVLKDEDLRKKYDKYGEKGLEDNQGGQYESWNYYRYDFGKGIAEQKAADNFCRLKRSCLTALKTVVVLPERHLSSEKGQTASSKIQTTIREYYKHLYTNKLEKLEEMDKFLDTNTLPRLNQEEDEFLNRPIAGSEIEAIINSLSTKKSPGPEGFTAEFYQSYKEELVPFLLKLFQSIETEGILPNSFYEANIILIPKPGRDTTKKGNFRPISLMNIDVKILNIDVKILNKILAN

SEQ ID NO: 36638 - protein, 906 aa, Homo sapiens
  DOMAIN (396)..(421): 7 kw REVERSE TRANSCRIPTASE RNA POLYMERASE domain identified by eMATRIX, accession number DM00895E, p-value=3.586e-10, raw score of 15.72
  DOMAIN (367)..(525): Reverse transcriptase domain identified by PFam, accession name rvt, E-value=1.5e-05, PFam score of 9.2
MALFRVGMTTRRLGHANKFTRDLLVKRLLLYEFVVEIIPGLRTKTTLVGPLETGYTSSDSVNSPHFMLDIALSHNVKSTQLLLRPWRNIDCSRNHKNAKKEEQMGDDEINRQQECSSSPAMEQSWTENDFDELREEVFRRSNYSELQEEIRTNGKEVKSFEKKLDEWITRITNAEKSLKHLTELKTKARELQLEKQELTHSKASRRQEITKIRAELKEIETQKTLQKINESRSWFFEKINKIDRPLARLIKKKREKNQTDTIKNDKGDIITDPTEIQTTIREYYKHLYTNKLENLEEMDKFLDTYVLPRLNQEEVESLNRPITGSEIEAIINSLPTKKSPGPDGFTAEFYQRYKEELVPFLLKLSQSIEKERILPNSSYEASIILIPKPGRDTTKKENFRPISLMNIDAKILNKILANRTQQHIKKLIHHEQVGCIPGMQGWFNIRKSINVIQHINRTKDKNHMIISIDAEKLISKFSKVSGHKINVQKSQAFLYTDNRQTESQIMSELPFTIASKRIKYLGIQLTRDVKDLFKENYKPLLNEIKEDTNKWKNIPCSWVGRINIVKMALLPRFSAIPIKLPMTFFTELEKTTLKFIWNQKEPCIAKSFLSQKNKAGGITLPDFKLYYKATVPKTAWYCYQNRDIDQWNRTEPSEIMLLIYNYLIFDKPDKKKEWGKDSLFNKWCWENWLAICRKLKLDPFLTPYTKMNSRWIKDLHVRPKTIKTLEENLGNTIQDVGMGKDFMSKTPKAMGTKVKIDKWDLIKLKSFCTAKETTIRVNRQPTEWEKIFATYSSDKGLISRIYIELKQIYKKETNNPIKKWAKDMNRHFSKEDIYAAKKHMKKCSSSLAIREIQIKTTMRKHLIPVRMVIIKMSGNNRCWRGCGETGTLLRCWWNCKLVQPLWKSVW

SEQ ID NO: 36639 - protein, 769 aa, Homo sapiens
  DOMAIN (173)..(218): kw TRANSCRIPTASE REVERSE II ORF2 domain identified by eMATRIX, accession number DM01354N, p-value=1.000e-40, raw score of 13.17
  DOMAIN (257)..(438): Reverse transcriptase domain identified by PFam, accession name rvt, E-value=7.3e-21, PFam score of 82.7
MGKVNLLMESHECQSENFRIDSVTISKRTFCLQYTVRHSMSSNTRSGLVHKQPEKWQESPHNVEENLSWALQGGEGLTRRRKEQNEQSYMELKIGYGVEKLFGISEAISVASADDTQTNTVWSGPPANSNKPAAEVLTVRRKTNKQKGHPHQNPICMSPSSKTKEIQTTIREYYKHLYENKLQNLEEMDKLLDTYTLPRLNQEEVESLNRPITGSEIEAIMNSLPNKKSPGPDGFTAEFYQRYKEELVPFLLKLFQSIEKEGILPNSFYEASIILIPKPGIKTTKKESFRPISLMNIDAKILNKILANRIQQPIKKLIHHDQVGLIPGLQGWFNIHISIDIIHHINRTNDKNHIIISIDAEKGFDKIQQPFMLKTLNKLAQNLLKLISNFSKVSGYKINVQKSQAFLYTNNRQTESQIMSELPFTIASKRIKYLGIQLTRDVKDLFKENYKPLLIGIKEDTNKWKNIPCSWIGRINIVKMVILPKVIYRFNAIPIKLPMTFFTELEKITLKFIWNQKRAHIAKTILSQKNKAGGITLPDFKLYYKATVTKTARYWYQNRDIDQWNRTEPSEIIPYIYNHLIFDKPDKNKKWGKDSPFNKWCWENWLALCRKLKLDPFLIPYTKINSRWIKDLNVRPKTIKTLEENLGNTIQDIGMGKDFRTKTPKAMATKAKIDKWDLIKLTSFCTAKETIIRVNTQPTEWEKIFAIYASDKGLISRIYKELKQIYKKKSNNPIKKWAKDMNRHFSKEDVYAAKRHMKKCSSSLAIRKM

SEQ ID NO: 36640 - protein, 663 aa, Homo sapiens
  DOMAIN (223)..(268): kw TRANSCRIPTASE REVERSE II ORF2 domain identified by eMATRIX, accession number DM01354N, p-value=1.000e-40, raw score of 13.17
  DOMAIN (307)..(532): Reverse transcriptase domain identified by PFam, accession name rvt, E-value=6.7e-51, PFam score of 182.5
ERSSAPATESWMENDFDELREEGFRRSNYSELKEEVRTHGKEVKNLEKRLDKWLTRIINAEKSLKDLMELKTMARELRDECTSLSSQFNQLEERVSVMEDQMNEMKKEEKFRRKRIKRKEQSLQEIWDYVKRPNLRLIGVPESDGENRTKLENTLQDIIQENFPNLARQANIQIQEIQRTPQRYSSRRATPRHIIVRFTKVEMKEKMLRAAREKEIQTTIREYYKHLYANKLENLEEMDKFLDTYTLPRLNQEEVETLNRPITGSEIEAIINSLPTKKSPGPDGFTAEFYQRYKEDLVPFFLKLFQSIEKEGILPNSFYEASIILIPKPGRDTTKKENFRPISLMNSDTKILNKILANRIQQHIKKLIHHDQVGFIPGMQGWFNIRKSINIIQHINRTNDKTHMIISIDAEKAFNKIQQPFMLKTLNKLVLEVLARAIRQEKEIKGIQLGKEEVKLSLFADDMIVYLENPIVSAQNLLKLINNFSKVSGYKINVQKSQIFLYTNNRQTESQIMSELPFTIASKTIKYLGIQLTRDVKDLFKENYKPLLNEIKEDTNKWNNIPCSWVGRINIMKMAILPKVIYRFSAIAIKLPMTFFTELEKTTLKFIWNQKRARIAKSILSQKNKAGGIMLPDFKLYYKATVTKTAWYWYQNRDIDQWSRTEP

SEQ ID NO: 36641 - protein, 1095 aa, Homo sapiens
  DOMAIN (122)..(162): G-protein coupled receptors proteins domain identified by eMATRIX, accession number BL00237A, p-value=7.097e-15, raw score of 27.68
  DOMAIN (328)..(603): Reverse transcriptase domain identified by PFam, accession name rvt, E-value=1.8e-85, PFam score of 297.4
MKVASQSSLLSDSVDQVNDSLVTAEAISWNESTSETNNSMVTEFIFLGLSDSQELQTFLFMLFFVFYGGIVFGNLLIVITVVSDSHLHSPMYFLLANLSLIDLSLSSVTAPKMITDFFSQRKVISFKGCLVQIFLLHFFGGSEMVILIAMGFDRYIAICKPLHYTTIMCGNACVGIMAVAWGIGFLHSVSQLAFAVHLPFCGPNEVDSFYCDLPRVIKLACTDTYRLDIMVIANSEIQTTIREYYKHLYANKLENLEEMDKFLDTYTLPRLNQEEVESLNRPITEAEIVAIINSLPTKKSPGPDGFTAEFYQRYKEELVPFLLKLFQSIEKEGILPNSFYEASIILIPKPGRDTTKKENFRPISLMNIDAKILNKILAKRIQQHIKKLIHQDQVGFIPGMQGWFNICKSINVIQHINRAKDKNHMIISIDAEKAFDKIQQRFMLKTLNKLGIDGTYFKIIRPIYDKPTANIILNGQKLEAFPLKTGTRQGCPLSPLLFNIVLEVLPRATRQEKEIKGIQLGKEEVKLSLFADDMIVYLENPIVSAQNLLKLISNFSKVSGYKINVQKSQAFLYTNNRQTESQIMSELPFTIASKRIKYLGIQLTRDVKDLFKENYKSLLKEIKEDTNKWKNIPCSWVGRINIVKMAILPKVIYRFNAIPIKLPMTFFTELEKTTLKFIWNQKRACIAKSILSQKNKAGGITLPDFKLYDKATVTKTAWYWYQNRDIDQWNRTEPSEIMPHIYNYLIFDKPEKNKQWGKDSLFNKWCWENWLAICRKLKLDPFLTPYTKINSRWIKDLNVRPKTIKTLEENLGFTIQDIGMGKDFMSKTPREALLCIVGENTKWSKDPSALSTPPTSCSRPQRRNKSVSHGSYPHPLLFTMNDRVNSVKTTILPKATYKFNAIPIKIPPSFFTELEKTRLKFTWNQKRAHIAKARLSKKNKSRGITLLDFKLYYKAIVTKTAWYWYKNRHIDQWNRIENPEIKPNTFSQLIFDKASKNIKWGKDTLFNKWCWYNWQATCRRMQLDPHLSPYKQINSRWFTDLNLRPETIKILEDKIGKTLLDIGLGKDFTIKNPKANTTKINRWDLIKLKAFCTSK

SEQ ID NO: 36642 - protein, 1576 aa, Homo sapiens
  DOMAIN (700)..(745): kw TRANSCRIPTASE REVERSE II ORF2 domain identified by eMATRIX, accession number DM01354N, p-value=1.000e-40, raw score of 13.17
  DOMAIN (430)..(511): C2 domain identified by PFam, accession name C2, E-value=1.2e -14, PFam score of 62.1
CADLQTLDTMQPIERKRQGYIHELIQTEERYMADLQLVVEVFQKRMAESGFLTEGEMALIFVNWKELIMSNTKLLKALRVRKKTGGEKMPVQMIGDILAAELSHMQAYIRFCSCQLNGAALLQQKTDEDTDFKEFLKKLASDPRCKGMPLSSFLLKPMQRITRYPLLIRSQRYLSLCPQELVGVRVSQGRKVSSCSPPRFQGMEAVHNMGLEERSCEGPGGQILENTPESHADHSSLKLALERAEELCSQVNEGVREKENSDRLEWIQAHVQCEGLAEQLIFNSLTNCLGPRKLLHSGKLYKTKSNKELHGFLFNDFLLLTYMVKQFAVSSGSEKLFSSKSNAQFKMYKTPIFLNEVLVKLPTDPSSDEPVFHISHIDRVYTLRTDNINERTAWVQKIKAASEQYIDTEKKKREKAYQARSQKTSGIGRLMVHVIEATELKACKPNGKSNPYCEISMGSQSYTTRTIQDTLNPKWNFNCQFFIKDLYQDVLCLTLFDRDQFSPDDFLGRTEIPVAKIRTEQESKGPMTRRLLLHEVPTGEVWERSSSPATEQSWTENDFDELREEGFRRSNYSELQEEIQTNGKEVKNFEKKLDEWLPRISNAEKSLKELMELKAKAQELREECRSLRSRCDQLEERVSVMEDEMNEMKSWFFEKINKIDRPLARLIKKKREKNQIDAIKNDKGGITTDPTEIQTTIREYYKHLYANKLENLEEMDKFLDTYTLPRLNQEEVESMNRPITGSEIVAIINCLPTKKSPGPDEFTAEFYQRYKEELVPFLLKLFQSIEKERILPNSFYEASIILIPKPDRDTTKKENFRPISLMNIDAKILNKILANRIQQHIKKLIHHDQVGFIPGMQGWFNIRKSINVIQHINRTKHKNHMIISIDAEKASDKIQQPFMLKTLRKLGIDETQTESQIMSELPFTIASKRIKYLGIQLTRDVKDLFKENYKPLLNEIKEDTNKWKNFPCSWVGRINIVKMAIVPKVIYRFNASPIKLPMTFFTELEKTTLKFIWNQKRACIAKSILSQKNKAGGIMLPDFKLYYKATVTKTAWYWYQNRDIDQWNRTEPSEITPHIYNYLFFDKPDKNKQWGKDSLFNKWCWENWLAICRKLKLDPVLTPYTKINSRWIKDLHVRPKTIKTLEENLGITIQDIGMGKDFMSKTPKAMATKAKIDKWDLIKLKSFCTAKETTIRVNRQPTEWEKIFATYSSDKGLISRIYNELKQIYKKKTNNPIKKWAKDMNRHFSKEDIYADKKHMKKCSSSLIIREMQVKTTMRYHLTPVRMAIIKKSGNNSLFRGHGAKESYVDKDKRGHLHSGVPFQKSPAGFAKAERGSRRSVVAAGLLPSLTSNMSRQTNDNTCTAATVPSYRMHRQYDAVLSCARCLLWPTLTGIMQKREFWEAQFSLAMVTCNNVAGQTPPHTTEPRKKKGVMAKLSGAFTGKSVFSGESSMGEESPAGMRNGTGARVGQEERVGVGKERQLRKKELEVGLPELESPGSEARVVSSCMSPSDAQAYLGHHSPPPAVGHLGTCLATSRYTDSCTFQWFCLLSGYIWSLPTQCEDGEDEDLYDGPLPFNEW

SEQ ID NO: 36643 - protein, 742 aa, Homo sapiens
  DOMAIN (573)..(616): kw TRANSCRIPTASE REVERSE II ORF2 domain identified by eMATRIX, accession number DM01354T, p-value=1.000e-40, raw score of 9.48
  DOMAIN (420)..(695): Reverse transcriptase domain identified by PFam, accession name rvt, E-value=2.3e-46, PFam score of 167.5
MGKKQNRKTGNSKKQSASPPPKERSSSPATEQSWMENDFDEMREEGFRRSNYSELREDIQTKGKEVENFEKNLEECITRITNTEKCLKELMELKTKARELREECRSLRSRCDQLEERVSVMEDEMNEMNDGENGTKLENTLQDIIQENFPNLARQANVQIQEIQRTPQRYSSRRATPRHIIVRFTKVEMKEKMLRAAREKDFKPTKIKREKEGHYIMVKGSIQQEELTILKIYAPNTGAPRFTKQVLSDLQRDLDSHTLIMGDFNTPLSTLDTSTRQKVKKDTQELNSALHQADLIDIYRALHPKSTEYTFFSAPHHTYSKIDHIVGSKALLSKCKRTEIITNYLSDHSAIKLELRIKNLTQNHSTTWKLNNLLLNDYWVHNEVKAEIKVFFETKENKDTTYQNLWDAFKAVCRGKFIALNAHKRKQERSKIDTLTSQLKELEKQEQTHSKASRRQEITNIRAELKEIETKKPFKKISESRSMIKWASSLGCKAGSTYTNQINVIQHINRTKDKNHMIISIDAEKAFDKTQQPFMLKTLNKLGIDGMYLKIIRAIYDKLTANIILNGQKLEAFPLKTATRQGCPLSPLLFNIVLEILTRAIRQEKEIKGIQLGEEEVKLSLFADDMIVYLENPIISAQNLLKLISNFSKVSGYKINVQKSQAFLHTNNRQTESQMMSELPFTIASKRTKYLGIQLTRDVKDLFKENYKPLLNEIKEDTNKWKNIPCSWIGRINIVKMAILPK

SEQ ID NO: 36644 - protein, 791 aa, Homo sapiens
  DOMAIN (136)..(182): kw TRANSCRIPTASE REVERSE II ORF2 domain identified by eMATRIX, accession number DM01354O, p-value=1.000e-40, raw score of 8.73
  DOMAIN (170)..(445): Reverse transcriptase domain identified by PFam, accession name rvt, E-value=6.4e-82, PFam score of 285.6
DNTARGTIRQQHLLFTNIRCSAASAADTQANRVWSGPPANSNRPAARVLTVRRKTNKQKGHPHQNPICTSPSSKTKETQTTIREYYKHLYANRLENLEEMDKFLDTYTLPRLNQEEVESLNRRITESDIEAIINSLPTKKSPGPDGFTAEFYQRYKEELVPFLLKLFQSIEKEGILPNSFYEASIILIPKLGRDTTKKENFRPISLMNIDAKILNKILANRIQQHIKKLIHHDQVGFIPGMQGWFNICKSINVIHHMKRTKDKNHMIISIDAEKAFDKIQQPFMLKTLNKLGIDGTYLKIIRAIYDKPTANIILNGQKLEAFPLKTGTRQGCPLSPLLFNIVLEVLARAIRQEKEIKGFQLGKEEVKLSLFVDEMILSLENPMVSAKNLLKLISNFSKVSGYKINVQKSQAFLYTSNRQTESQIMSELPFTIASKRIKYLGIQLTGDVKDFFKENYKPLLNEIKEDTDKWKNIPCSRVGRINIMKMAILPKVIYRFNAIPIKLPMTFFTELEKTTLKFIWNQKRARIAKSILSQKNKAGGITLPDFKLYYKATVTKTACHRVGRAQQHSISKWKWYIHDWSQVGPEGTNDSARYPDTTQKWTAAALQPLSRTSLKDSHEGKSSQWAELRAVHLVLRFAWKEKWPDVQLYTDSWAVASGLAGWSGTWKKHDWKIGDKEIWGRATPVIAQWAHEQRGHGGRDGDYAWAQQHGLPLTRDDLATATAECPICQQQRPTLSPQYGTIPQARIHGSRNQRVEVEAAPLTITPSDPLANFLLPPPTTLHSAGLDSLLA

SEQ ID NO: 36645 - protein, 971 aa, Homo sapiens
  DOMAIN (492)..(537): kw TRANSCRIPTASE REVERSE II ORF2 domain identified by eMATRIX, accession number DM01354N, p-value=1.000e-40, raw score of 13.17
  DOMAIN (576)..(812): Reverse transcriptase domain identified by PFam, accession name rvt, E-value=2.4e-47, PFam score of 170.7
  misc_feature (1)...(971): Xaa = X or * as defined in Table 2
SMKTGLEKKMKRNEQSLQEIWDYVKRPNLPLIGVPESDGDNATKLENTLQDIIQENCPNLARQANIQIQEIQRTPQRYSSRRATPRHIIVRFTKVEMKEKMLRAAREKGRVTHKGKPIRLTAALSAETLQARRDRRPIFNILKEKNFQPRISYPAKLSFVSEGEIEYFTDKQMLRDFLMTRPALKELLKEALNMETTGAPRFIKQVLRELQRDLDTHTIITGDFNTPLSTSDRSTRQKVNKDIQELNSALHQADLIDICRTLHPKSIEYTFFSAPHHTYSKIDHIVGSKALLSKCKRTEIITNCLSDHSAIKLELRIKKLTQNRSTTWKLDNLLLNDYWVHNEMKTEIKMFFETNENKDTTYQNLWDTFKAVCRGKFIALNAHKRKKTRSKIDTLTSQLKELEKQEQTHSKASRRQEITKIREELKEIETQKTLQKINESRSWFFEKINKIDRPLARLVKKKREKNQIDVIKNDKGDITTDPTEILTTIREYHKHLYTNKLENLEEMDKFLNTYTLPRLNQEEVESLNSPITGSEIEAIINSLSMKKSTGPDGFTAEFYQRYKEELVPFLLKLFQSIEKEGILPNSFYEASIILIPKPGRDTTKKENFGPIFLMNINAKILNKILANRIQQHIKKLIHHDQVGSIPGMKGWFNICKSINVMQHINRTKYKNHMIISIDEEKAFQKIQKRFMLKTLNKLSIDGTYLKIIRAIYDKPTANIILNGQKLEAFPLKNGTRQGCPLSPVLFNIVLEVLARAIRLISCFSKVSGYKINVQKSQAFLYTNNRQTESQIMSELPFTIASKRIKYLGIQLTRDVKDLFKENYKPLFNEIKEDTNKWKSIPCSRVGRINIVKTAILPKVIYRFNAIPIKLPMTFFTELEKTTLKFIWNQKRACIVKTILSKKNKAGGITLPDFKRYYKATVTKTAWSFHELGKTQLATRTTVSTFQQIPGIXVQLRFDFSRDITLLSLLCR

SEQ ID NO: 36646 - protein, 602 aa, Homo sapiens
  DOMAIN (286)..(332): kw TRANSCRIPTASE REVERSE II ORF2 domain identified by eMATRIX, accession number DM01354O, p-value=1.000e-40, raw score of 8.73
  DOMAIN (319)..(544): Reverse transcriptase domain identified by PFam, accession name rvt, E-value=2.8e-43, PFam score of 157.2
MPDELILITVRFWKRAEDSGATRGCSVIKSLGPHDWPTVQPLQVSCLVLEGLQDLRLHGSSILPTRNFHITHMRPPPEIYQECVHFPNLYNGKNSEDSGGNYWQRKNLWDTAKAVFRGKFIALDAHRRKLERPKIDPLSSKLKELEKKEQTNSKARRRQEITKIRAELKEIETQKALQKINESRSWFFEKINIIDRPLAGLIKNKREKNKIDAIKNDKGDITTDPTEIQTTIREYCKYLYAKKLENLEEMDKFLDTYTPPRLNQKEFESLYRPIIGSEIEAIINSLPTKKSPGPDGVTAEFYQRYKEELVPFLLKLFQSIEKEGILPNSFYEASIILIPKPGRDTTKKENFRPISLMSIDAKILNKILANQIQQHIKKLIHQDQVGFIPRMPGWFNICTSINVIHHIKRTSDKNHMIISIDAEKAFDRIPQCFLLKTLNKLVLEVLARAIRQDKEIKGIKLGKEEVKLSLFADDMIVYLEIPIDSAQNLLKLISNFSKVSGYKINVQKSQAFPYTNNRKTEIQATCELPFTIVTKRIKYLGIQLTEHCKPLLNEIKEDTNKWKNIQCSWIGRINMKMAILPKTASQTNKNEKREESNKCNKK

SEQ ID NO: 36647 - protein, 1565 aa, Homo sapiens
  DOMAIN (154)..(195): kw TRANSCRIPTASE REVERSE II ORF2 domain identified by eMATRIX, accession number DM01354I, p-value=1.000e-40, raw score of 15.55
  DOMAIN (384)..(659): Reverse transcriptase domain identified by PFam, accession name rvt, E-value=1.3e-83, PFam score of 291.2
MVKGSIQQEELTILNIYAPNTGAPRFIKQVLSDLQRDLDSHKLIMGDFNTPLSTLDRSTRQKVNKDTQELNSALHQADLIDIYRTLHPKSTEYIFFSAPHHTYSKIDHILGSKALLSKCKRTEIITNYLSDHSAIKLELRIKNLTQSRSTTWKLNNLLLNDYWVHNEMKAEIKMFFETNENKDTTYQNLWDAFKAVCRGKFIALNAYKRKQERSKIDTLTSQLKELEKQEQTHSKASRRQEITKIRAELKEIETEKTLQKINESRSWFFERINKIDRPLARLIKKKREKNQKIQTTIREYYKHLYANKLENLEEMDTFLDTYTLPRLNQEEVESLNRPITGSEIVAIINSLPTKKSPGPDGFTAEFYQRYKEELVPFLLKLFQSIEKEGILPNSFYEASIILIPKPGRDTTKKENFRPISLMNIDAKILNKILANRIQQHIKKLIHHDQVGFIPGMQGWFNIRKSINVIQHINRAKDKNHMIISIDAEKACDKNQQPFMLKTLNKLGIDGTYFKIIRAIYDKPTANIILNGQKLEAFPLKTGTRQGCPLSPLLFNIVLEVLARAIRQEKEIKGIQLGKEEVKFSLFADDMIVYLENPIVSAQNLLQLISNFSKVSGYKINVQKSQAFLYTNNRQTESQIMGELPFTIASKRIKYLGIQLTRDVKDLFKENYKPLLKEIKEDTNKWKNIPCSWVGRINIVKMAILPKVIYRFNAIPIKLPMTFFTELEKTTLKFIWNQKRARIAKSILSQKNKAGGITLLDFKLYYKATVTKTAWYWYQNRDIDQWNRTEPSEIMPHIYNYLIFDKPEKNKQWGKDSLFNKWCWENWLAICRKLKLDPFLTPYTKINSRWIKDLNVKPKTIKTLEENLGITIQDIGVGKDFMSKTPKAMATKDKIDKWDLIKLKSFCTAKETTIRVNRQPTTWEKIFATYSSDKGLISRIYNELKQIYKKKTNNPIKKWVKDMNRNFSKEDIYAAKKHMKKCSSSLAIREMQIKTTMRYHLTPVRKAIIKKSGNNRNMDGAGGHYPKQTNEGTENQIPDVLTCKWELNDKNIWTQRGEQHTLEPVGGEGELRKDNHSTKNDQYDNRHFQLAVGNGLMAKTFMVSFFYKASAYVVPTGELPDLDIIQLKQFGNALSHLTVGTSVTQIQNLNTMGIIGSQDSRDQLATLKCQGKGDPKYQCDPPVKVGANGGQIINEVLAQVQLTVGPKTNGYWRMTVDYHKLNQDVTPIVAAVPDVVSLLEVISTLQKDFYCFFLLQNITLVHYIDGIMLTESSEQEVADTLDLLTSIRGLMECLIHHHGIPHSIASDQGPHFMAKELWEWAHAHGIHWSYHIPHHPEAAGLIEWRNDLLKSQLQHQLGDNALQGWGKVLQKAMYALNQHPIYVTVFPIARIHKSWNQGVEVEVASLTITPSDPLAKFLLSVPTTLHSPGLEVLVPAGGMLPPGDTTIPLNWKLILPPGHFGLLLPLSQQAKKAVTVLARVIDPDYQDEISLLLHNGGKEEYAWNSGDPLGVSWYYHALSLRSMRTTTVQSRQDYKWPRYLRNEDLGHVTREKKHNLLRCLLKAKGI

SEQ ID NO: 36648 - protein, 971 aa, Homo sapiens
  DOMAIN (112)..(153): kw TRANSCRIPTASE REVERSE II ORF2 domain identified by eMATRIX, accession number DM01354I, p-value=1.000e-40, raw score of 15.55
  DOMAIN (332)..(571): Reverse transcriptase domain identified by PFam, accession name rvt, E-value=6.3e-55, PFam score of 195.9
MIMGDFNTPLSTLDRSTRQKVNKDTWELNSALHQADLIDIYRTPHPKSTEYTFFLAPHHTYSKIDHIAGNKALLSKCERTEIITNCLSDHSAIKLQLRIKKLTQNHSTTWKLNNLLLNDYWVHNEMKAEIKIFFETNKNKDTTYQNLWDTFKAVCRGKFIALNAHKRKQERSKTDTRTSQLKHLENQEQTHSKASRRSWFFEKINKIHRPLARLIKKKREKNQIDAIKNDKGDITTNPTEIQTTIREYYKHLYTNKLENLEEMDKFLDTYTLPRLNQEEVESLNRPITGSEIEAIISSLPTKKSPGPDGFTAEFYQKYKEELLPFLLKLFQSIEKEGILPNSFYEASIILIPKPGRDTTKKENFRPISLMNINAKILNKILANQIQQHIKKLINHDQVGFIPGMQGWFNIHKSINVIHHIKRTNDKNHMIISIDAGKAFNKIQQCFMLKTLNKLNIHGVYLKIIRAIYDKPTANIILNGQKLEAFPLKTGIRQGCPLSPLLFNRVLEILARAIRQEKEIKRIQLGKEEVKLSLFADDMIVYLENPIVSAQNLLKLICNFSKRIKYLGIQLTRDVKDLFKKNYKPLLNEIKEDTNKWKNIPCSWVGRINIVKMAILPKVIYRFNAIPIKLPMTFFTELEKTTLKFIWNQKRACIAKSILNQKNKAGGIMLPDFKLYYKATGTKTAWYWYQNRDIDQWNRTQPSEIMPHIYNYLIFDKPDKNKKWGKDSLFNKWCWENWLAICRKLKLDPFLTPYTKINSRWIKDLNVSPKTIKTLEENLGNTIQDIGMGKDVMSKTPKAMATKAKIDKWDLIKLKSFCTAKETTIRVNRQPTEWEKIFATYSSDKGLIFRIYNELKQIYKKKTNNLIKKWAKNMNRHFSKEDIYAAKKHMKKCSSSLAIREMQIKTTMRYHLTPVGMAIIKKSGNNSLSNQMYRIQKMQVQAQIQAYNVITNNNYNNNGIQLRDLTLKIPTE

SEQ ID NO: 36649 - protein, 1642 aa, Homo sapiens
  DOMAIN (1572)..(1617): kw TRANSCRIPTASE REVERSE II ORF2 domain identified by eMATRIX, accession number DM01354N, p-value=1.000e-40, raw score of 13.17
  DOMAIN (201)..(405): AP endonuclease family 1 domain identified by PFam, accession name AP_endonucleas1, E-value=6.1e-52, PFam score of 186.0
MRRRGEGDAGGGEKEKEEERRGIDEAVSHHSQQTNTGGENQMPHVLTHKWQLNRNSACDKLHKPHSVPGGVAAGDVGGKTISNPGVCAIEYQVDGSPHIWEDVNKGVYIEEDRAPLMERSSSPAMEQSWMENDFDELREEGFRRSNYSELREDIQTKGKEVENFEKSSEEYITRIANTQKCLKELMELKTKAPELREECRSLRSQCDQLEERASVIDTHSLKIKGWRKIYQANGKQKKAGVAILVSDKTDFKPTKIKRDKEGHYIMVKGSNQQEELTILNKYAPNTGAPRFIKQVLSDLQRDLDSHTLIMGDFNTPLSTLDRSTRQKVNKDTQELNSALHQADLIDIYRTLHPKSTEYTFFSAPHHTYFKTDHIVGSKVLLSKCKRTEIITNCLSDHSAIKLELRIKKLTQNHSTTWKLNNLLLNDYCVHNEMKAEIKMFFETNENKDTTYQNLWDAFKAVCRGKFIALNAHKRKQERSKIDTLTSQLKKLEKQEQTHSKASRRQEITKIRAELKEIETQKNPSKQSVNPGADAEKAFDKIQQPFMLKTLNKLGIDGTYFKLIRAIYDKPTANVILNGQKLEAFPLKTGTRQRCPLSPLLFNIVLEVLARAIRQEKEIKGIQLGKEEVKLSVFAHDMIVYPENPIVSAQNLLKLISNFSKVSAYKINVQKSQAFLYTNNRQTESQIMSELPFTIASKRIKYLGIQLTRDVKDLFKENYKPLLKEIKEDTNKWKNIPCSWVGRINIVKMAILPKVIYRFNAIPIKLPMPFFTELEKTTLKFIWNQKRALIAKSILSQKNKAGGITLPDFKLYYKATVTKTAWHWYQNSMVLVPKQRYRSMEQNRALRNNAAYLQLSDLMSKTPKAMATKAKIDKWDLIKLKSFCTAKETTIRVNRQPTKWEKIFATYSSDKGLISRIYNELKQIYKKKTNNPIKKWAKDMNRHFSKEDIYAAKKHMKKCSSSLAIREMQIKTTMRYHLTPVRMAIIKKSGNNSCFHCGSIAYNIPLLVFHSPPVRHLDSRKNPLCFPKLELFQDMNGARSHYRHQQTNAGTENQTPHVFTYNWELNDQSTCTHGGEKHTLEPVSGGKTSLLPILSPEIYPLHGAAKPLSLGSAKGSSPEKRWHRVVVRDTASQQPPFLPLTMGTAGKALNPPVSSWCYPEFREEKKIERFQVLSVVLNAFHTLCNFISTKLSEVDARFIDDAKRLLEELKYRHFLRTVQGDRETDGKDILFKELMSWRENVQMQFRMLCAGYPPLANRTVCHFCHEADLQAEQHQGSLSFSSQMDQSMPLAEDPRQEEKEVGVSAPLTPDFSTEFLAVSASFYGYSSCQPTTSLSTHGSTGTRLRVLYESACKEECLGGRQDAEAKLAASRRGQPSSLMSSREGGWGEGSQSRNSSHGALKEAQFIITNAEKSLKDLMELKTMAQELRDECTSLSSRFDQLEEKVSVMEDEINEMKQEEKVREKRIKRNEQSLQEIWDYVKRPNLHLIGVPESDRENGTKLENTLQDIIQENFPNLARQANIQIQEIQRMPQRYSSRRATPRHIIVRFTKVEMKEKMLRAAREKEIQTTIREYYKHLYTNKLENLEEMDKFLDTYSLPRLNQEEVESLKRPITGSEIGAIINSLRTKKKSRTRQIHSRILPEV

SEQ ID NO: 36650 - protein, 126 aa, Homo sapiens
MQSESGIVPDFEVGEEFHEEPKTYYELKSQPLKSSAPLGSSDGAHFAGAARVAGYEASRRGDPRPRMPAAETDWGLGSDLARCGGGGAPCLYAVPRSPSGAIASGGPPAAVADRWLRFIRCLAGAG

SEQ ID NO: 36651 - protein, 565 aa, Homo sapiens
  DOMAIN (384)..(405): Myc-type 'helix-loop-helix' dimerization domain proteins. domain identified by eMATRIX, accession number BL00038B, p-value= 6.276e-12, raw score of 16.97
  DOMAIN (351)..(404): Helix-loop-helix DNA-binding domain identified by PFam, accession name HLH, E-value=5.2e-09, PFam score of 43.4
REPASGQSFALRRGARLGGPRPSYLPSGPGLCSHFPAVEGREAGAMQSESGIVPDFEGGEEFHEEPKTYYELKSQPLKSSSSAEHPGASKPPISSSSMTSRILLRQQLMREQMHEQERTEQQQKLQAAQFMQQRVPVSQTPAINVSVPTTLPSATQVPMEVLKVQTHLENPTKYHIQQAQRQQVKQYLSTTLANKHANQVLSLPCPNQPGDHVMPPVPGSSAPNSPMAMLTLNSNCEKEGFYKFEEQNRAESECPGMNTHSRASCMQMDDVIDDIISLESSYNEEILGLMDPALQMANTLPVSGNLIDLYGNQGLPPPGLTISNSCPANLPNIKRELTESEARALAKERQKKDNHNLIERRRRFNINDRIKELGTLIPKSNDPDMRWNKGTILKASVDYIRKLQREQQRAKELENRQKKLEHANRHLLLRIQELEMQARAHGLSLIPSTGLCSPDLVNRIIKQEPVLENCSQDLLQHHADLTCTTTLDLTDGTITFNNNLGTGTEANQAYSVPTKMGSKLEDILMDDTLSPVGVTDPLLSSVSPGASKTSSRRSSMSMEETEHTC

SEQ ID NO: 36652 - protein, 586 aa, Homo sapiens
  DOMAIN (188)..(210): FOS TRANSFORMING PROTEIN SIGNATURE domain identified by eMATRIX, accession number PR00042D, p-value=6.185e-09, raw score of 8.97
MRANLEELRSQHNEKVEENSTLQQRLEESEGELRKNLEELFQVKMEREQHQTEIRDLQDQLSEMHDELDSAKRSEDREKGALIEELLQAKQDLQDLLIAKEEQEDLLRKRERELTALKGALKEEVSSHDQEMDKLKEQYDAELQALRESVEEATKNVEVLASRSNTSEQDQAGTEMRVKLLQEENEKLQGRSEELERRVAQLQRQIEDLKGDEAKAKETLKKYETIPTSDPQVYRECLSHSSQRDTEGTRKMEVPTNVRKKCLPIQRLGFFPAGLLQAAARFSTDSPVHQKKSDSIRPRYPLDFGHRQLLYFVPVSLCHTSSICLKLNTVRFNMHKMEVLIPLTTPRHGPPLFLLNASNIHQSPNESGETGTGMQILAQPIAAPPSALPAGKTAQAMGDKMRTMIPDTRLYAPFGPGDVLMGTCRPFRYSEKLDGKKMYSFPSTAALADGIIASWLGANSNPARQGSDGGCRWPTGIALDWSESTSSSAKWGYKGGPRTLILPGRNAGVQPATDRRCGMLRSTSTVTLLSGGAARTPGAPSRRLLDLSNGEPTTETSSGVLFMVWCEDQIKISRKKWGCMGGPPVH

SEQ ID NO: 36653 - protein, 136 aa, Homo sapiens
LIIHHAPLVNSLAEVILNGDLSEMYAKTEQDIQRSSAKPSIRCFIKPTETLERSLEMNKHKGKRRVQKRPNYKNVGEEEDEEKGPTEDAQEDAEKAKEIEMVIMERSKLSELAASTSVQEQNTTDEEKSAAATCSE

SEQ ID NO: 36654 - protein, 683 aa, Homo sapiens
  DOMAIN (451)..(494): Histone H2B proteins domain identified by eMATRIX, accession number BL00357, p-value=2.598e-10, raw score of 7.74
MFGRSRSWVGGGHGKTSRNIHSLDHLKYLYHVLTKNTTVTEQNRNLLVETIRSITEILIWGDQNDSSVFDFFLEKNMFVFFLNILRQKSGRYVCVQLLQTLNILFENISHETSLYYLLSNNYVNSIIVHKFDFSDEEIMAYYISFLKTLSLKLNNHTVHFFYNEHTNDFALYTEAIKFFNHPESMVRIAVRTITLNVYKVDNQAMLHYIRDKTAVPYFSNLVWFIGSHVIELDDCVQTDEEHRNRGKLSDLVAEHLDHLHYLNDILIINCEFLNDVLTDHLLNRLFLPLYVYSLENQDKVFLIIHHAPLVNSLAEVILNGDLSEMYAKTEQDIQRSSVLPTLSSLWQGSHLSLNQLQSGLHKCSSHLCGAQAAADSVTGEIPAIRSLEWLISAGSKARTFFFLKMLIGFWEKVDCEYQRRQVLSTRLQEALPSNRLTDVAAVHSSCMLGFGSTAPRGSWIGDPAAVHLPLPGELAEHLGSKGTTTVTKHQPQAKPSIRCFIKPTETLERSLEMNKHKGKRRVQKRPNYKNVGEEEDEEKGPTEDAQEDAEKAKGTEGGSKGIKTSGESEEIEMVIMERSKLSELAASTSVQEQNTTDEEKSAAATCSESTQWSRPFLDMVYHALDSPDDDYHALFVLCLLYAMSHNKGKSPEKEEGLSGTQSHPGKAGTFGKEGAEERKRAQV

SEQ ID NO: 36655 - protein, 917 aa, Homo sapiens
RNLLVETIRSITEILIWGDQNDSSVFDFFLEKNMFVFFLNILRQKSGRYVCVQLLQTLNILFENISHETSLYYLLSNNYVNSIIVHKFDFSDEEIMAYYISFLKTLSLKLNNHTVHFFYNEHTNDFALYTEAIKFFNHPESMVRIAVRTITLNVYKVSLDNQAMLHYIRDKTAVPYFSNLVWFIGSHVIELDDCVQTDEEHRNRGKLSDLVAEHLDHLHYLNDILIINCEFLNDVLTDHLLNRLFLPLYVYSLENQDKGGERPKISLPVSLYLLSQVFLIIHHAPLVNSLAEVILNGDLSEMYAKTEQDIQRSSAKPSIRCFIKPTETLERSLEMNKHKGKRRVQKRPNYKNVGEEEDEEKGPTEDAQEDAEKAKGTEGGSKGIKTSGESEEIEMVIMERSKLSELAASTSVQEQNTTDEEKSAAATCSESTQWSRPFLDMVYHALDSPDDDYHALFVLCLLYAMSHNKGMDPEKLERIQLPVPNAAEKTTYNHPLAERLIRIMNNAAQPDGKIRLATLELSCLLLKQQVLMSAGCIMKDVHLACLEGAREESVHLVRHFYKGEDIFLDMFEDEYRSMTMKPMNVEYLMMDASILLPPTGTPLTGIDFVKRLPCGDVEKTRRAIRVFFMLRSLSLQLRGEPETQLPLTREEDLIKTDDVLDLNNSDLIACTVITKDGGMVQRSLAVDIYQMSLVEPDVSRLGWGVVKFAGLLQDMQVTGVEDDSRALNITIHKPASSPHSKPFPILQATFIFSDHIRCIIAKQRLAKGRIQARRMKMQRIAALLDLPIQPTTEVLGFGLGSSTSTQHLPFRFYDQGRRGSSDPTVQRSVFASVDKVPGFAVAQCINQHSSPSLSSQSPPSASGSPSGSGSTSHCDSGGTSSSSTPSTAQSPAVRSGRKGRRRVFSLSEADSHGGHWV

SEQ ID NO: 36656 - protein, 192 aa, Homo sapiens
MAVLIYIPTNSTQEFPFSTSSSTLVFLIIAILTVHKHSVSTYKGPPEQSNQFLPVDTHSAHFPGSEPKKEGGSYVEVAADEVELQAKPSIRCFIKPTETLERSLEMNKHKGKRRVQKRPNYKNVGEEEDEEKGPTEDAQEDAEKAKGTEGGSKGIKTSGESEGECPHERRPVPAPPASPPARLPPVPSPPRL

SEQ ID NO: 36657 - protein, 283 aa, Homo sapiens
  DOMAIN (204)..(247): kw TRANSCRIPTASE REVERSE II ORF2 domain identified by eMATRIX, accession number DM01354T, p-value=6.471e-39, raw score of 9.48
  DOMAIN (93)..(283): Reverse transcriptase domain identified by PFam, accession name rvt, E-value=0.00013, PFam score of -4.1
MGKDFMSKTPKAMATKDKTDKWDLIKLKTFCTAKETTIRVNRQPTEWEKIFAIYTSDKGLISRIYNELQQIYKKKPNNPIKKWVKDMNRHFSKEDIYAAKRHMKKCSSSLAIREMQIKTTCYLNSLGLLLVIAVSCVKLFIRVTITTPKYQLDAEKAFDKIQHTFIITTISKIGVERTYLKVVEAISDKPTANIILNREKLKAFLLRTGTRQECPLLPLLFNIVLEVLARAIRQEKEIKGIQISKEEVKLSLFADNMIVYLENPKDSSKKLLDLINEFSKVSG

SEQ ID NO: 36658 - protein, 431 aa, Homo sapiens
  DOMAIN (46)..(98): Sulfate transporters proteins domain identified by eMATRIX, accession number BL01130B, p-value=4.145e-12, raw score of 23.34
  DOMAIN (58)..(318): Sulfate transporter family domain identified by PFam, accession name Sulfate_transp, E-value=8.2e-06, PFam score of -22.9
MVLGKLASHMQANETTPLLPSYTKINSRWINDLNIRRETIKILEENLGKTLLDIGVAMFVLQLGSATFVVTEPVISAMTTGAATHVVTSQVKYLLGMKMPYISGPLGFFYIYAYVFENIKSVRLEALLLSLLSIVVLVLVKELNEQFKRKIKVVLPVDLVLAPNTSPLHHHYDCLFANFLEPPWEDGLPEGAFNQAEGHLRRNIIPSPRAPPMNILSAVITEAFGVALVGYVASLALAQGSAKKFKYSIDDNQEFLAHGLSNIVSSFFFCIPSAAAMGRTAGLYSTGAKTQPFAAPDFNSELGEAGADAKLEGGKLNEKKKERKEERKGKEVGEEEEEREGKGERREEEKKENGRRRLKREQGRGRSKEKKEEKNKERKEEKIEKKRRKEEERGGRERRLEVKERGRRQEKKWEKEREGRRSQMAKSVFCR

SEQ ID NO: 36659 - protein, 287 aa, Homo sapiens
MENASHQASVQVESLQEQLNVVSKQRDETALLSASQQQVKQYALSLANLQMVLQHFQKEEKSMYSAELQKQKQLIAEWKKKAESLERKVISLQERLDEADAALDSASRLTEQLDLKEEQIEELKKQNEFQQEMLDDVQKKLVNLANSLEGKVDKVLMRNLFISHFHMPKNQRHEVLRLMGSILGVRREEMEQLFHDNQGSVTRRLTPGDCIPWAPLTSGFLLGTVRGKHQQRPEETKATGFVHSASIRAVPGTVSGVRGVVGGNRCRVYTEKLTGVRKRHSYVKGML

SEQ ID NO: 36660 - protein, 2017 aa, Homo sapiens
  DOMAIN (874)..(928): Kinesin light chain repeat proteins domain identified by eMATRIX, accession number BL01160B, p-value=2.865e-10, raw score of 19.54
  misc_feature (1)...(2017): Xaa = X or * as defined in Table 2
RRAPGKIPGQASAFLGRTWSRPCLRTQLCVIVSCLAKAGVQGYLVGSPGGAKRFLFSERTGSFSKLAAMSSWLGGLGSGLGQSLGQVGGSLASLTGQISNFTKDMLMEGTEEVEAELPDSRTKEIEAIHAILRSENERLKKLCTDLEEKHEASEIQIKQQSTSYRNQLQQKEVEISHLKARQIALQDQFLKLQSAAQSVPSGAGVPATTASSSFAYGISHHPSAFHDDDMDFGDIISSQQEINRLSNEVSRLESEVGHWRHIAQTSKAQGTDNSDQSEICKLQNIIKELKQNRSQEIDDHQHEMSVLQNAHQQKLTEISRRHREELSDYEERIEELENLLQQGGSGVIETDLSKIYEMQKTIQVLQIEKVESTKKMEQLEDKIKDINKKLSSAENDRDILRREQEQLNVEKRQIMEECENLKLECSKLQPSAVKQSDTMTEKERILAQSGSVEEVFRLRQALSDAENEIMRLSSLNQDNSLAEDNLKLKMRIEVLEKEKSLLSQEKEELQMSLLKLNNEYEVIKSTATRDISLDSELHDLRLNLEAKEQELNQSISEKETLIAEIEELDRQNQEATKHMILIKAQLSKQQNEGDSIISKLKQDLNDEKKRVHQLEDDKMDITKELDVQFVLLIQSEVALNDLHLTKQKLEDKVENLVDQLNKSQESNVSIQKENLELKEHIRQNEEELSRIRNELMQSLNQDSNSNFKDTLLKEREAEVRNLKQNLSELEQLNENLKKVAFDVKMENEKLVLACEDVRHQLEECLAGNNQLSLEKNTIVETLKMEKGEIEAELCWAKKRLLEEANKYEKTIEELSNARNLNTSALQLEHEHLIKLNQKKDMEIAELKKNIEQMDTDHKETKDVLSSSLEEQKQLTQLINKKEIFIEKLKERSSKLQEELDKYSQALRKNEILRQTIEEKDRSLGSMKEENNHLQEELERLREEQSRTAPVADPKTLDSVTELASEVSQLNTIKEHLEEEIKHHQKIIEDQNQSKMQLLQSLQEQKKEMDEFRYQHEQMNATHTQLFLEKDEEIKSLQKTIEQIKTQLHEERQDIQTDNSDIFQETKVQSLNIENGSEKHDLSKAETERLVKGIKERELEIKLLNEKNISLTKQIDQLSKDEVGKLTQIIQQKDLEIQALHARISSTSHTQDVVYLQQQLQAYAMEREKVFAVLNEKTRENSHLKTEYHKMMDIVAAKEAALIKLQDENKKLSTRFESSGQDMFRETIQNLSRIIREKDIEIDALSQKCQTLLAVLQTSSTGNEAGGVNSNQFEELLQERDKLKQQVKKMEEWKQQVMTTVQNMQHESAQLQEELHQLQAQVLVDSDNNSKLQVDYTGLIQSYEQNETKLKNFGQELAQVQHSIGQLCNTKDLLLGKLDIISPQLSSASLLTPQSAECLRASKSEVLSESSELLQQELEELRKSLQEKDATIRTLQENNHRLSDSIAATSELERKEHEQTDSEIKQLKEKQDVLQKLLKEKDLLIKAKSDQLLSSNENFTNKVNENELLRQAVTNLKERILILEMDIGKLKGENEKIVETYRGKETEYQALQETNMKFSMMLREKEFECHSMKEKALAFEQLLKEKEQGKTGELNQLLNAVKSMQEKTVVFQQERDQVMLALKQKQMENTALQNEVQRLRDKEFRSNQELERLRNHLLESEDSYTREALAAEDREAKLRKKVTVLEEKLVSSSNAMENASHQASVQVESLQEQLNVVSKQRDETALQLSVSQEQVKQYALSLANLQMVLEHFQQEEKAMYSAELEKQKQLIAEWKKXTQKILEGKVISLQECLDEANAALDSASRLTEQLDVKEEQIEELKRQNELRQEMLDDVQKKLMSLANSSEGKVDKVLMRNLFIGHFHTPKNQRHEVLRLMGSILGVRREEMEQLFHDDQGGVTRWMTGWLGGGSKSVPNTPLRPNQQSVVNSSFSELFVKFLETESHPSIPPPKLSVHDMKPLDSPGRRKRDTNAPESFKDTAESRSGRRTDVNPFLAPRSAAVPSLLTQLDLDLVGPGIFF

SEQ ID NO: 36661 - protein, 500 aa, Homo sapiens
  DOMAIN (220)..(234): C2 DOMAIN SIGNATURE domain identified by eMATRIX, accession number PR00360B, p-value=6.455e-11, raw score of 13.61
  DOMAIN (184)..(273): C2 domain identified by PFam, accession name C2, E-value= 0.00047, PFam score of 26.9
  misc_feature (1)...(500): Xaa = X or * as defined in Table 2
SQGTCVPDRPCNVSGXRISIEEIEAGRIPNPHLGPVEERLALHVLQQQGLVPEHVESRPLYSPLQPDIEQAFPSFGRKSRWIRVIPFPRFFLRCIIWNTRDVILDDLSLTGEKMSDIYVKGWMIGFEEHKQKTDVHYRSLGGEGNFNWRFIFPFDYLPAEQVCTIAKKDAFWRLDKTESKIPARVVFQIWDNDKFSFDDFLDPYAIVSFLHQSQKTVVVKNTLNPTWDQTLIFYEIEIFGEPATVAEQPPSIVVELYDHDTYGADEFMGRCICQPSLERMPRLAWFPLTRGSQPSGELLASFELIQREKPAIHHIPGFESEDTDLPYPPPQREANIYMVPQNIKPALQRTAIEILAWGLRNMKSYQLANISSPSLVVECGGQTVQSCVIRNLRKNPNFDICTLFMEVMLPREELYCPPITVKVIDNRQFGRRPVVGQCTIRSLESFLCDPYSAESPSPQGGPDDVSLLSPGEDVLIDIDDKEPLIPIQNYAAMKLVKPFS

SEQ ID NO: 36662 - protein, 175 aa, Homo sapiens
MKLMETLNQCINAGHEMTKAIAIAQFNDDSPEARKITRRWRIGEAADLVGVSSQAIRDAEKAGRLPHPDMEIRGRVEQQAGRIPNPHLGPVEERLALHVLQQQGLVPEHVESRPLYSPLQPDIEQAFPSFGRKSRWIRVIPFPRFFLRCIIWNTRDVILDDLSLTGEKMSDIYVK

SEQ ID NO: 36663 - protein, 153 aa, Homo sapiens
  misc_feature (1)...(153): Xaa = X or * as defined in Table 2
PPQRGPPSSSCYSRSQRSVSRCPSRHRPSAASPRPGRPSGRSGLLAGLRLWAGAGCFQCPPCLQRGLFSPEALRPQAPAHKGLFSGSLWPQQRSHQGLRAAATSXDRRAGALCKWCPRPSGTPRGEHLSXENESLPPXXRWAHQTAPQESQTS

SEQ ID NO: 36664 - protein, 308 aa, Homo sapiens
  DOMAIN (60)..(86): PROTEIN GTPASE DOMAIN ACTIVATION domain identified by eMATRIX, accession number PD00930A, p-value=5.645e-17, raw score of 25.62
  DOMAIN (60)..(154): RhoGAP domain identified by PFam, accession name RhoGAP, E- value=0.035, PFam score of -26.5
MPEDRNSGGCPAGALASTPFIPKTTYRRIKRCFSFRKGIFGQKLEDTVRYEKRYGNRLAPMLVEQCVDFIRQRGLKEEGLFRLPGQANLVKELQDAFDCGEKPSFDRNGMPRADAAADCCSLQTHRAMDMTFPETACSRVIVNSLIGRIGEKARCLAAGGCRGAVTPRAPGPGPAAEAHAEPDAPPLGPGNGSKTGATGGEKTWGIPDPEKPGQPSNNMNLEPTMSKALALGADGGHTHLYMYPGNGKPHSSYEREFNGFTEMKHPDDWFQVKADPAPQCEIIESLCSQGWLQFKAGSIHRAGLEAAL

SEQ ID NO: 36665 - protein, 298 aa, Homo sapiens
MPGPMSLWLLLLVLPLSLEHSDLRICFPGQVVSMESSSTGFIWTDVRAWQTSNRHVSSWREPRHSRMPPGAGLMERIQAIAQNVSDIAVKVDQILRHSLLLHSKVSEGRRDQCEAPSDPKFPDCSGKVEWMRARWTSDPCYAFFGVDGTECSFLIYLSEVEWFCPPLPWRNQTAAQRAPKPLPKVQAVFRSNLSHLLDLMGSGKESLIFMKKRTKRLTAQWALAAQRLAQKLGATQRDQKQILVHIGFLTEESGDVFSPRVLKGGPLGEMVQWADILTALYVLGHGLRVTVSLKELQR

SEQ ID NO: 36666 - protein, 175 aa, Homo sapiens
  DOMAIN (118)..(166): Cadherins extracellular repeat proteins domain proteins domain identified by eMATRIX, accession number BL00232B, p-value= 7.557e-16, raw score of 32.79
  DOMAIN (40)..(126): Cadherin domain identified by PFam, accession name cadherin, E-value=9e-06, PFam score of 32.6
MRRCRWAALALGLLRLCLAQANFAPHFFDNGVGSTNGNMALFSLPEDTPVGSHVYTLNGTDPEGDPISYHISFDPSTRSVFSVDPTFGNITLVEELDREREDEIEAIISISDGLNLVAEKVVILVTDANDEAPRFIQEPYVALVPEDIPAGSIIFKVHAADRDTGSGGSVTYFLQ

SEQ ID NO: 36667 - protein, 112 aa, Homo sapiens
WPLTSKLSMGGTPLPTEGAPREPRGPVRPSHHGSPPLPLPAAPTMTIHPMSAGWAQARVLSSVPKQPCRNHISWARRMQELPPLDTAVALTSLPSWQDECICCEKAAPTAGP

SEQ ID NO: 36668 - protein, 897 aa, Homo sapiens
  DOMAIN (132)..(143): TYPE II EGF-LIKE SIGNATURE domain identified by eMATRIX, accession number PR00010C, p-value=2.636e-10, raw score of 11.16
  DOMAIN (33)..(404): EGF-like domain identified by PFam, accession name EGF, E- value=3.2e-53, PFam score of 190.2
MGSGRVPGLCLLVLLVHARAAQYSKAAQDVDECVEGTDNCHIDAICQNTPRSYKCICKSGYTGDGKHCKDVDECEREDNAGCVHDCVNIPGNYRCTCYDGFHLAHDGHNCLDVDECAEGNGGCQQSCVNMMGSYECHCREGFFLSDNQHTCIQRPEEGMNCMNKNHGCAHICRETPKGGIACECRPGFELTKNQRDCKCEIIGMAVTCNYGNGGCQHTCDDTEQGPRCGCHIKFVLHTDGKTCIETCAVNNGGCDSKCHDAATGVHCTCPVGFMLQPDRKTCKDIDECRLNNGGCDHICRNTVGSFECSCKKGYKLLINERNCQDIDECSFDRTCDHICVNTPGSFQCLCHRGYLLYGITHCGDVDECSINRGGCRFGCINTPGSYQCTCPAGQGRLHWNGKDCTEPLKCQGSPGASKAMLSCNRSGKKDTCALTCPSRARFLPESENGFTVSCGTPSPRAAPARAGHNGNSTNSNHCHEAAVLSIKQRASFKIKDAKCRLHLRNKGKTEEAGRITGPGGAPCSECQVTFIHLKCDSSRKGKGRRARTPPGKEVTRLTLELEAEQLFLLPDTHGHPPPASCGLPCLRQRMERRLKGSLKMLRKSINQDRFLLRLAGLDYELAHKPGLVAGERAEPMESCRPGQHRAGTKCVQCSPGHYYNTSIHRCIRCAMGSYQPDFRQNFCSRCPGNTSTDFDGSTSVAQCKNRQCGGELGEFTGYIESPNYPGNYPAGVECIWNINPPPKRKILIVVPEIFLPSEDECGDVLVMRKNSSPSSITTYETCQTYERPIAFTARSRKLWINFKTSEANSARGFQIPYVTYDEDYEQLVEDIVRDGRLYASENHQEILKDKKLIKAFFEVLAHPQNYFKYTEKHKEMLPKSFIKLLRSKVSSFLRPYK

SEQ ID NO: 36669 - protein, 109 aa, Homo sapiens
  DOMAIN (85)..(107): G-protein coupled receptors family 2 proteins domain identified by eMATRIX, accession number BL00649F, p-value=7.882e- 18, raw score of 14.99
SSSAPFAPVAATATAAPSLSSFFFSFSFFLFFFFLLLLLLFLVSSSPSPSSCSSFSSSSSSSLIPLPTPPSSSNFLLLQAESNLYMKAVRATLILVPLLGIEFVLIPWR

SEQ ID NO: 36670 - protein, 3060 aa, Homo sapiens
  DOMAIN (2868)..(2899): Protein kinases ATP-binding region proteins domain identified by eMATRIX, accession number BL00107A, p-value=2.174e-14, raw score of 18.39
  DOMAIN (1259)..(2107): RhoGEF domain identified by PFam, accession name RhoGEF, E- value=2.9e-73, PFam score of 256.8
EAAKDLADIAAFFRSGFRKNDEMKAMDVLPILKEKVAYLSGGRDKRGGPILTFPARSNHDRIRQEDLRRLISYLACIPSEEVCKRGFTVIVDMRGSKWDSIKPLLKILQESFPCCIHVALIIKPDNFWQKQRTNFGSSKFEFETNMVSLEGLTKVVDPSQLTPEFDGCLEYNHEEWIEIRVAFEDYISNATHMLSRLEELQDILAKKELPQDLEGARNMIEEHSQLKKKVIKAPIEDLDLEGQKLLQRIQSSESFPKKNSGSGNADLQNLLPKVSTMLDRLHSTRQHLHQMWHVRKLKLDQCFQLRLFEQDAEKMFDWITHNKGLFLNSYTEIGTSHPHAMELQTQHNHFAMNCMNVYVNINRIMSVANRLVESGHYASQQIRQIASQLEQEWKAFAAALDERSTLLDMSSIFHQKAEKYMSNVDSWCKACGEVDLPSELQDLEDAIHHHQGIYEHITLAYSEVSQDGKSLLDKLQRPLTPGSSDSLTASANYSKAVHHVLDVIHEVLHHQRHVRTIWQHRKVRLHQRLQLCVFQQEVQQVLDWIENHGEAFLSKHTGVGKSLHRARALQKRHEDFEEVAQNTYTNADKLLEAAEQLAQTGECDPEEIYQAAHQLEDRIQDFVRRVEQRKILLDMSVSFHTHVKELWTWLEELQKELLDDVYAESVEAVQDLIKRFGQQQQTTLQVTVNVIKEGEDLIQQLRDSAISSNKTPHNSSINHIETVLQQLDEAQSQMEELFQERKIKLELFLHVRIFERDAIDIISDLESWNDELSQQMNDFDTEDLTIAEQRLQHHADKALTMNNLTFDVIHQGQDLLQYVNEVQASGVELLCDRDVDMATRVQDLLEFLHEKQQELDLAAEQHRKHLEQCVQLRHLQAEVKQVLGWIRNGESMLNAGLITASSLQEAEQLQREHEQFQHAIEKTHQSALQVQQKAEAMLQANHYDMDMIRDCAEKVASHWQQLMLKMEDRLKLVNASVAFYKTSEQVCSVLESLEQEYKREEDWCGGADKLGPNSETDHVTPMISKHLEQKEAFLKACTLARRNADVFLKYLHRNSVNMPGMVTHIKAPEQQVKNILNELFQRENRVLHYWTMRKRRLDQCQQYVVFERSAKQALEWIHDNGEFYLSTHTSTGSSIQHTQELLKEHEEFQITAKQTKERVKLLIQLADGFCEKGHAHAAEIKKCVTAVDKRYRDFSLRMEKYRTSLEKALGISSDSNKSSKSLQLDIIPASIPGSEVKLRDAAHELNEEKRKSARRKEFIMAELIQTEKAYVRDLRECMDTYLWEMTSGVEEIPPGIVNKELIIFGNMQEIYEFHNNIFLKELEKYEQLPEDVGHCFVTWADKFQMYVTYCKNKPDSTQLILEHAGSYFDEIQQRHGLANSISSYLIKPVQRITKYQLLLKELLTCCEEGKGEIKDGLEVMLSVPKRANDAMHLSMLEGFDENIESQGELILQESFQVWDPKTLIRKGRERHLFLFEMSLVFSKEVKDSSGRSKYLYKSKLFTSELGVTEHVEGDPCKFALWVGRTPTSDNKIVLKASSIENKQDWIKHIREVIQERTIHLKGALKEPIHIPKTAPATRQKGRRDGEDLDSQGDGSSQPDTISIASRTSQNTLDSDKLSGGCELTVVIHDFTACNSNELTIRRGQTVEVLERPHDKPDWCLVRTTDRSPAAEGLVPCGSLCIAHSRSSMEMEGIFNHKDSLSVSSNDASPPASVASLQPHMIGAQSSPGPKRPGNTLRKWLTSPVRRLSSGKADGHVKKLAHKHKKSREVRKSADAGSQKDSDDSAATPQDETVEERGRNEGLSSGTLSKSSSSGMQSCGEEEGEEGADAVPLPPPMAIQQHSLLQPDSQDDKASSRLLVRPTSSETPSAAELVSAIEELVKSKMALEDRPSSLLVDQGDSSSPSFNPSDNSLLSSSSPIDEMEERKSSSLKRRHYVLQELVETERDYVRDLGYVVEGYMALMKEDGVPDDMKGKDKIVFGNIHQIYDWHRDFFLGELEKCLEDPEKLGSLFVKHERRLHMYIAYCQNKPKSEHIVSEYIDTFFEDLKQRLGHRLQLTDLLIKPVQRIMKYQLLLKDFLKYSKKASLDTSELERAVEVMCIVPRRCNDMMNVGRLQGFDGKIVAQGKLLLQDTFLVTDQDAGLLPRCRERRIFLFEQIVIFSEPLDKKKGFSMPGFLFKNSIKVSCLCLEENVENDPCKFALTSRTGDVVETFILHSSSPSVRQTWIHEINQILENQRNFLNALTSPIEYQRNHSGGGGGGGSGGSGGGGGSGGGGAPSGGSGHSGGPSSCGGAPSTSRSRPSRIPQPVRHHPPVLVSSAASSQAEADKMSGTSTPGPSLPPPGAAPEAGPSAPSRRPPGADAEGSEREAEPIPKMKVLESPRKGAANASGSSPDAPAKDARASLGTLPLGKPRAGAASPLNSPLSSAVPSLGKEPFPPSSPLQKGGSFWSSIPASPASRPGSFTFPGDSDSLQRQTPRHAAPGKDTDRMSTCSSASEQSVQSTQSNGSESSSSSNISTMLVTHDYTAVKEDEINVYQGEVVQILASNQQNMFLVFRAATDQCPAAEGWIPGFVLGHTSAVIVENPDGTLKKSTSWHTALRLRKKSEKKDKDGKREGKLENGYRKSREGLSNKVSVKLLNPNYIYDVPPEFVIPLSEVTCETGETVVLRCRVCGRPKASITWKGPEHNTLNNDGHYSISYSDLGEATLKIVGVTTEDDGIYTCIAVNDMGSASSSASLRVLGPGMDGIMVTWKDNFDSFYSEVAELGRGRFSVVKKCDQKGTKRAVATKFVNKKLMKRDQVTHELGILQSLQHPLLVGLLDTFETPTSYILVLEMADQGRLLDCVVRWGSLTEGKIRAHLGEVLEAVRYLHNCRIAHLDLKPENILVDESLAKPTIKLADFGDAVQLNTTYYIHQLLGNPEFAAPEIILGNPVSLTSDTWSVGVLTYVLLSGVSPFLDDSVEETCLNICRLDFSFPDDYFKGVSQKAKEFVCFLLQEDPAKRPSAALALQEQWLQAGNGRSTGVLDTSRLTSFIERRKHQNDVRPIRSIKNFLQSRLLPRV

SEQ ID NO: 36671 - protein, 2883 aa, Homo sapiens
  DOMAIN (2691)..(2722): Protein kinases ATP-binding region proteins domain identified by eMATRIX, accession number BL00107A, p-value=2.174e-14, raw score of 18.39
  DOMAIN (1259)..(2109): RhoGEF domain identified by PFam, accession name RhoGEF, E- value=2.9e-73, PFam score of 256.8
EAAKDLADIAAFFRSGFRKNDEMKAMDVLPILKEKVAYLSGGRDKRGGPILTFPARSNHDRIRQEDLRRLISYLACIPSEEVCKRGFTVIVDMRGSKWDSIKPLLKILQESFPCCIHVALIIKPDNFWQKQRTNFGSSKFEFETNMVSLEGLTKVVDPSQLTPEFDGCLEYNHEEWIEIRVAFEDYISNATHMLSRLEELQDILAKKELPQDLEGARNMIEEHSQLKKKVIKAPIEDLDLEGQKLLQRIQSSESFPKKNSGSGNADLQNLLPKVSTMLDRLHSTRQHLHQMWHVRKLKLDQCFQLRLFEQDAEKMFDWITHNKGLFLNSYTEIGTSHPHAMELQTQHNHFAMNCMNVYVNINRIMSVANRLVESGHYASQQIRQIASQLEQEWKAFAAALDERSTLLDMSSIFHQKAEKYMSNVDSWCKACGEVDLPSELQDLEDAIHHHQGIYEHITLAYSEVSQDGKSLLDKLQRPLTPGSSDSLTASANYSKAVHHVLDVIHEVLHHQRHVRTIWQHRKVRLHQRLQLCVFQQEVQQVLDWIENHGEAFLSKHTGVGKSLHRARALQKRHEDFEEVAQNTYTNADKLLEAAEQLAQTGECDPEEIYQAAHQLEDRIQDFVRRVEQRKILLDMSVSFHTHVKELWTWLEELQKELLDDVYAESVEAVQDLIKRFGQQQQTTLQVTVNVIKEGEDLIQQLRDSAISSNKTPHNSSINHIETVLQQLDEAQSQMEELFQERKIKLELFLHVRIFERDAIDIISDLESWNDELSQQMNDFDTEDLTIAEQRLQHHADKALTMNNLTFDVIHQGQDLLQYVNEVQASGVELLCDRDVDMATRVQDLLEFLHEKQQELDLAAEQHRKHLEQCVQLRHLQAEVKQVLGWIRNGESMLNAGLITASSLQEAEQLQREHEQFQHAIEKTHQSALQVQQKAEAMLQANHYDMDMIRDCAEKVASHWQQLMLKMEDRLKLVNASVAFYKTSEQVCSVLESLEQEYKREEDWCGGADKLGPNSETDHVTPMISKHLEQKEAFLKACTLARRNADVFLKYLHRNSVNMPGMVTHIKAPEQQVKNILNELFQRENRVLHYWTMRKRRLDQCQQYVVFERSAKQALEWIHDNGEFYLSTHTSTGSSIQHTQELLKEHEEFQITAKQTKERVKLLIQLADGFCEKGHAHAAEIKKCVTAVDKRYRDFSLRMEKYRTSLEKALGISSDSNKSSKSLQLDIIPASIPGSEVKLRDAAHELNEEKRKSARRKEFIMAELIQTEKAYVRDLRECMDTYLWEMTSGVEEIPPGIVNKELIIFGNMQEIYEFHNNIFLKELEKYEQLPEDVGHCFVTWADKFQMYVTYCKNKPDSTQLILEHAGSYFDEIQQRHGLANSISSYLIKPVQRITKYQLLLKELLTCCEEGKGEIKDGLEVMLSVPKRANDAMHLSMLEGFDENIESQGELILQESFQVWDPKTLIRKGRERHLFLFEMSLVFSKEVKDSSGRSKYLYKSKLFTSELGVTEHVEGDPCKFALWVGRTPTSDNKIVLKASSIENKQDWIKHIREVIQERTIHLKGALKEPIHIPKTAPATRQKGRRDGEDLDSQGDGSSQPDTISIASRTSQNTLDSDKLSGGCELTVVIHDFTACNSNELTIRRGQTVEVLERPHDKPDWCLVRTTDRSPAAEGLVPCGSLCIAHSRSSMEMEGIFNHKDSLSVSSNDASPPASVASLQPHMIGAQSSPGPKRPGNTLRKWLTSPVRRLSSGKADGHVKKLAHKHKKSREVRKSADAGSQKDSDDSAATPQDETVEERGRNEGLSSGTLSKSSSSGMQSCGEEEGEEGADAVPLPPPMAIQQHSLLQPDSQDDKASSRLLVRPTSSETPSAAELVSAIEELVKSKMALEDRPSSLLVDQGDSSSPSFKPSDNSLLSSSSPIDEMEERKSSSLKRRHYVLQELVETERDYVRDLGYVVEGYMALMKEDGVPDDMKGKDKIVFGNIHQIYDWHRDFFLGELEKCLEDPEKLGSLFVKHERRLHMYIAYCQNKPKSEHIVSEYIDTFFEDLKQRLGHRLQLTDLLIKPVQRIMKYQLLLKDFLKYSKKASLDTSELERAVEVMCIVPRRCNDMMNVGRLQGFDGKIVAQGKLLLQDTFLVTDQDAGLLPRCRERRIFLFEQIVIFSEPLDKKKGFSMPGFLFKNSIKVSCLCLEENVENDPCKFALTSRTGDVVETFILHSSSPSVRQTWIHEINQILENQRNFLNALTSPIEYQRNHSGGGGGGGSGGSGGGGGSGGGGAPSGGSGHSGGPSSCGGAPSTSRSRPSRIPQPVRHHPPVLVSSAASSQAEADKMSDESSSSSNISTMLVTHDYTAVKEDEINVYQGEVVQILASNQQNMFLVFRAATDQCPAAEGWIPGFVLGHTSAVIVENPDGTLKKSTSWHTALRLRKKSEKKDKDGKREGKLENGYRKSREGLSNKVSVKLLNPNYIYDVPPEFVIPLSEVTCETGETVVLRCRVCGRPKASITWKGPEHNTLNNDGHYSISYSDLGEATLKIVGVTTEDDGIYTCIAVNDMGSASSSASLRVLGPGMDGIMVTWKDNFDSFYSEVAELGRGRFSVVKKCDQKGTKRAVATKFVNKKLMKRDQVTHELGILQSLQHPLLVGLLDTFETPTSYILVLEMADQGRLLDCVVRWGSLTEGKIRAHLGEVLEAVRYLHNCRIAHLDLKPENILVDESLAKPTIKLADFGDAVQLNTTYYIHQLLGNPEFAAPEIILGNPVSLTSDTWSVGVLTYVLLSGVSPFLDDSVEETCLNICRLDFSFPDDYFKGVSQKAKEFVCFLLQEDPAKRPSAALALQEQWLQAGNGRSTGVLDTSRLTSFIERRKHQNDVRPIRSIKNFLQSRLLPRV

SEQ ID NO: 36672 - protein, 446 aa, Homo sapiens
MALMKEDGVPDDMKGKDKIVFGNIHQIYDWHREYVNMHCARWSPVSTTGTRGAALVGVPAPPLRRTFCGEPLGPKEPTDVYLPHLELNAGHGVSLPWKRPVRKQESNKTGQLIFVSFSEIRMFEERWDELMEKVNGRIIHFTLLSPLHVIPCLPRHPAPPVLDPTASLSFDVPYPQMSLETRGYRARFRPREWQWGLAAIKMLLMIVGTGRRYRPEFSELTISSHTEGSQLFPAVTLRPKEKLKAYERGWCSLVGGCEGLAVTEVGMAAAPSTDTCSRLSQAPPNLLQLQPRNLLVGSYQLAPVEFEDTPIPTDYQSHNRHQANRRGTGPHASNGNEHGAQGEKRGQRTTAKSTQPAPPTPKPSRPPGNKSATTRPPRNRTDPKNATGTRGEEQDRRPGQAANNPHAPQRPKTEKTGRTKHASDDTKPGTCARRQCNHWASIKSNQ

SEQ ID NO: 36673 - protein, 84 aa, Homo sapiens
  misc_feature (1)...(84): Xaa = X or * as defined in Table 2
MDEAGNHHSQQTIARTKNQTPHVLTHRWDLNNENTQTQEREHRTPRPVVGWGGGGRGXXXXXXCLMXSYWVPXTNMAHVYINNL

SEQ ID NO: 36674 - protein, 382 aa, Homo sapiens
  misc_feature (1)...(382): Xaa = X or * as defined in Table 2
MDSQPNSTRGQSGRRMEIKGIQLGKEEVKLSLFADDMIVYLENATSQPKISLSXXATSAKSQDTKSMCKNHKHSYTPITDKQRAKSXVNSHSQLLQREXNTXESNLXGTXRTSSRKTTNHCSMKXKRIQTNGRTFHAHGXEESISXKWPYCPRXFIDSMPSPSSYQXLSSQNWKKRLSSSYGTKKEPASPSQSXAKRTKLEASLLPDFKLYYKATVTKTAWDMDEAGNHHSQQTITRTKNQTPHVLTHRWELNNENTWTQEGEHHTPGLVVRRSPDPEQNFKAVRCLDLPDPSSSFLAVLTFHFKPAFLQSLRXDKPRSSPALGTWHKPXKITPKKQHQAITKPNTEYRTAVKPSVVGALPDINSFLKLGGLHRITNGCLLD

SEQ ID NO: 36675 - protein, 856 aa, Homo sapiens
  DOMAIN (138)..(183): kw TRANSCRIPTASE REVERSE II ORF2 domain identified by eMATRIX, accession number DM01354N, p-value=1.000e-40, raw score of 13.17
  DOMAIN (222)..(469): Reverse transcriptase domain identified by PFam, accession name rvt, E-value=1.1e-68, PFam score of 241.7
  misc_feature (1)...(856): Xaa = X or * as defined in Table 2
MRTKTQHTRISWDAFKAVCRGKFIALNAHKRKQERSKIDTLTSQLKELEKQEQTHSKASRRQEITKIRAELKEIETQKSLQKINESRSWFFERINNIDRPLARLIKKKREKNQIDTIKNDKGDITTDPTEIQTTIREYYKHLYANKLKNLEEMDKFLDTYTLPRLNQEEVESLNRPITGSEIVTIINSLPTKKSPGPDGFTAEFYQRYKEELVPFLLKLFQSIEKEGILPNSFYEASIILIPKPGRDTTKKENFRPISLMNIDAKILNKILANRIQQHIKKLIHHDQVGFIPGMQGWFNIRKSINVIQHVNRAKDKNHMIISIDAEKDFDKIQQPFMLKTLNKLGIDGTYLKIIRAIYDKPTANIILNGQKLEAFPLKTGTRQGCPLSPLLFNIVVEVLASAIRQEKEIKAQNLLKLISNFSKVSGYKINVQKSQAFLYTNNRQTESQIMSELPFIIASKRIKYLGIQLTRDVKDLFKENYKPLIKEIKEDTNKRKNIPCSRVGRINIVKMAILPKVIYRFNAIPIKLPMTFFTELEKTTLKFIWNQKRAHIAKSILSQKNKAGGITLPDFKLYYKATVTKTAWYSYQNRDIDQWNRTEPSEITPHIYNYLIFDKPEKNKQWGKDSLFNKWGWENWLAIWRKLKLDPFLTPYTKINSRWIKDLNVRPKTIKTLEENLGITIQDIGMGKDFMSKTPTSNGNKRQNXQMGSNETKELLHSKRNYHQSEQATYRMVRKFLQPTHLTKGXYPESTMNSNKFTRKKQTTPTKRGRRTXTDTSQKKTFMQPKNTXKNAHHHWPSEKCKSKPQXDTISHQLEWQSLKSQETTGTWMKLETIILSKLSQGQKTKHRIFSLIRGN

SEQ ID NO: 36676 - protein, 413 aa, Homo sapiens
  misc_feature (1)...(413): Xaa = X or * as defined in Table 2
FLSLFFFISLASSLSILLIHIMNSWIPHSPIFTDLNVESSRLCPLGDIMMXIPLTWYLIVTCTHLSREITTVPRGLARLWSFTRICPRTHCKPIPAVLLRAGCPPSCWWDQDTHSQLPSKRSSYTLFFCTVTEYPFLDXWPXNHGTPCXTAPLWSMFPCSCWYPVTGPGVSCSPSCVQVFSLFISHLXVRTCGVWFFVLAIVCXEXWFPASSMSQAVLVTVALXYSLKSGSVMPPAFSFGLGLTWRCRLFFGSIRTLKXIFPILXRKSLVAXWGWHXIYKLRWAVWPFSRYXFFLPMSMVMFFHLFVSSFISLSSGLXFSLKRSFMSLVSWIPKYFILFEAIVNGSSLMIWLSVCLLLLHKNACDFCTLILYPETFLKLLISLRRFWAETMGFSRYTIMSSANRDNLTSSFPN

SEQ ID NO: 36677 - protein, 335 aa, Homo sapiens
  DOMAIN (32)..(78): kw TRANSCRIPTASE REVERSE II ORF2 domain identified by eMATRIX, accession number DM01354O, p-value=4.462e-09, raw score of 8.73
  misc_feature (1)...(335): Xaa = X or * as defined in Table 2
IPRHIHPPKTKPGRSXTPXIDQXQALKLRQCINSLPTKKSPGPDGFTAKFYQSPSLTGKNDKEPEILPYFHADFLVVPGTHQASPVLMVLGHKSFPHRNSPPSVCMANFFTQKPPSQSIHNAVNTHTDPPLFLVLLKDRGLLVIWCHESQGDELWHLVLLDSKCCFGSMTHRMEWSGPSAAGLLEFAGGPLQTLFAWVSAVEAAEQRILLNSKCCCLIIPLEALSQRGIWPWQGSPVPRPWTTTTLWPVRNQATQQETSLMPCQLEGKEPLALPTKEAEIEGRRTGEIKKVERDSNTNKEELLLDLAFKVSSLFDKLEEVVELLVIGELQLYPSK

SEQ ID NO: 36678 - protein, 45 aa, Homo sapiens
  misc_feature (1)...(45): Xaa = X or * as defined in Table 2
AFFHVSFGCINVFFXEVSVHMLCPLFDGVVFFLVNLFEFFVDSGY

SEQ ID NO: 36679 - protein, 29 aa, Homo sapiens
  misc_feature (1)...(29): Xaa = X or * as defined in Table 2
VRTSGVWFFVLAIVCXEXWFPASSMSLIY

SEQ ID NO: 36680 - protein, 85 aa, Homo sapiens
  DOMAIN (2)..(53): Neuromodulin (GAP-43) proteins domain identified by eMATRIX, accession number BL00412D, p-value=9.386e-11, raw score of 16.54
  misc_feature (1)...(85): Xaa = X or * as defined in Table 2
ATKQDSVSKKKEEEEEEEEEEEEEEEEEEEEEEEEEEEKEKGNKERKKDKGKARQVQARQIYLLSLHLGRIRKVPNNNKAXSSCP

SEQ ID NO: 36681 - protein, 200 aa, Homo sapiens
  DOMAIN (164)..(199): Troponin domain identified by eMATRIX, accession number PF00992A, p-value=9.645e-09, raw score of 16.67
MRVIIQELGTRTPMEGGVDTCAAVSWVLVDTPGPYISQEDDVKTRRSRYWKRWYKNQLTTNNINNNNKTKIELTHTPLEAHSDTVVDFITTFNIVLKGGLPCYLCLGMQDSTTRFQNKSQSAKVWQRKQTIFDLNVSDVCNGFEEKIPTKSTDQLQRRQLPLWTQGRNKGLGMIKSEEEEEEEEEEEEEEEEEEEEEEEE

SEQ ID NO: 36682 - protein, 339 aa, Homo sapiens
  DOMAIN (281)..(324): Domain of Unknown Function 2 domain identified by eMATRIX, accession number PF00563C, p-value=7.457e-25, raw score of 26.21
  DOMAIN (58)..(326): Domain of unknown function 2 domain identified by PFam, accession name DUF2, E-value=4.3e-09, PFam score of 42.9
MVANVGGKEFQVSKTETKRRKEEEEEEEEEEEEEEEEEEEEEEEEEEEEEEEEEEEEVEEEEEEEIEEVKRRQYSLAFSSAGAQAQTYHVSFETLADYHRWQRQASKVTRPRELRVPGGVAAPSPAELYLAGLDGACAELTTQNRARRELWAHAAATVSVAVGHRGVGTGGEPKRSGSDGGRSGLADAGINAWTHAWGIDGHQLTVEITESMMMEHDTEIFKRIQILRDMGVGLSVDDFGTGFSGLSRLVSLPVTEIKIDKSFVDRCLTEKRILALLEAITSIGQSLNLTVVAEGVETKEQFEMLRKIHCRVIQGYFFSRPLPAEEIPGWMSSVLPLKI

SEQ ID NO: 36683 - protein, 147 aa, Homo sapiens
  DOMAIN (41)..(69): Dehydrins proteins domain identified by eMATRIX, accession number BL00315A, p-value=3.821e-09, raw score of 9.35
MEKVDLQTGSQMLDDEVKSYNFQDFKKCQKKKKKEEGEEEEGEEEEGEEEEGEEEEGEEEEEEEEEEEEEEEEEEEEEEEETLHIFQKCIRTGFLEEDYVKQSCQRHLNQSNSILNRSRLELPACNPPSGPVGIETGKESTTDFTRE

SEQ ID NO: 36684 - protein, 66 aa, Homo sapiens
  misc_feature (1)...(66): Xaa = X or * as defined in Table 2
RTSISSPVSSTCSPLVMPTLLPQPTVPWRMWRPCTQXRNAGTFSPAVAMGLPVEAVICLSVXDSPA

SEQ ID NO: 36685 - protein, 82 aa, Homo sapiens
WFPASSMSLFSRFLASLQWFRTCFFSSEKFVITDLLKATSVNLSNSFSTQFCSLAGKELCSFGGKEAFWFLEFSAFLLWFLP

SEQ ID NO: 36686 - protein, 209 aa, Homo sapiens
  misc_feature (1)...(209): Xaa = X or * as defined in Table 2
VHVLCGDTDETGNHHSQQTIARTKNQTPHVLTHRERLSLRRGLHSCAYSLHRWLGARHAQKGSRNTKGCGGQGPRTSERGPASGEFSENCTSLLGQRGVFSPGRRALLHSPSDGSVPLGAVDSSPPASTRRDWSHWAVGKPSPEREPAGKVTXTTRQLQPASPXREHPLLNSQHGHCLKISLPLLPTVLSPSPPLSLCSNVTFSTRPLT

SEQ ID NO: 36687 - protein, 438 aa, Homo sapiens
  DOMAIN (381)..(432): Neuromodulin (GAP-43) proteins domain identified by eMATRIX, accession number BL00412D, p-value=1.614e-11, raw score of 16.54
MVSRIWSWISEAQCPLCRPSGTYGPGEAALLLWLCIEAAAAAAAARSTTTPIITNHQSNTIAEQNPPRHENGDPKTYIIHVLAEQVLERLPHGVALRHDPLAPVVSRAGGVGHQRCAADDALQPLLQGRPEPGLAERHGVQDNLILKVSHTHTQKSAEKRAVSDPSSTVHRPQPLPPSTVHQSTIPSNPDSSSAYCLPSTRHGFSSYTDSFVPPSGPSNPMNPTIGNGLSPQRVHYQHLPTHAGGKRNAALEYGVPRKYYHMLKITASDYEKTKPFQVGDKVMGSGWRKVGMQTVKQHRVTLIKILGNLRHQVLFYHALHLVPPSLSAHDLVLALSSNCCREVDLAQFTFHLLSLKVYGISRLTGEKSGQDSQFSGFNGYITKRSSFSLKKKKRKKEKKKKEEEEEEEEEEEEEEEEEEEEEEEEEEEEEENSLSLTE

SEQ ID NO: 36688 - protein, 112 aa, Homo sapiens
  DOMAIN (58)..(77): BINDIN PRECURSOR SIGNATURE domain identified by eMATRIX, accession number PR00761E, p-value=6.684e-09, raw score of 14.32
LSHNGHCFLQEEEGEGEGGGGGGGEEEEEEEEEEEEEEEEEEEEEEEEEEEEEEEEEEEEEEEEEEEEEEEGAAAGNIWNRQYEPNLPGRRLGTGEDSTGAGRKRWGRKVQS

SEQ ID NO: 36689 - protein, 199 aa, Homo sapiens
  DOMAIN (43)..(78): Matrix protein (MA) p15. domain identified by eMATRIX, accession number PF01140D, p-value=7.488e-09, raw score of 15.54
MAGKQGRSEGASSWRLSSVLQLNSQYFLQGAQQCTFLAATAWKKRKEEEEEEEEEEEEEEEEEEEEEEEEEEEEEEEEEEEEEEEEEEEEEEEEEEEEEEEEEEEEEEEEEEEEEEEEEEEEEEEEEEEEEEEEGEPFLLLLVNGVLIPGVRSCLDSTSQFSLTGMLLQEKSEIFGLAVCSPLIKRKGGHIPVLNTVPG

SEQ ID NO: 36690 - protein, 319 aa, Homo sapiens
  DOMAIN (22)..(56): Amyloidogenic glycoprotein extracellular domain proteins domain identified by eMATRIX, accession number BL00319C, p-value= 2.776e-09, raw score of 17.12
EEVPRSMSKKKKRKRRKSRKREEEEEEEEEEEEEEEEEEEEEEEEERREGEGEEEEEEEEGKEKIDPSHLELKMVRNKNTMYEVCLMPIGIKPQVNVGAMQCILVAPYISPIVGVINFNDQVNSQGGGSKMEDGIHFRGKVMLHVGKRKQRVKKGLGYAFISSMKTNEYTKLVPVEWGLAEKIPKNVEATLELGNRRSKKTGGILPLLLWNFELERDELGYLVEEISKQPSIQQMTWVLLKAFRFIQEAEPKSSENLNPDNVIEKKNPFSEGKFMLAAEICISNEEWNGNVNPQDYGGKWLQGMAEVFTATPSITGLEA

SEQ ID NO: 36691 - protein, 264 aa, Homo sapiens
MGKDFMSNTPQAMATKAKIDKWDLIELKSFCTAKETTIRVNRQPTEWEKIFTIHQSDKGLIPRICKEPKQIYKEKANNPIKKWVKNMNRHFSEEDIYAANRHMRKCSSSLVIREMQIKTTMRYHLMPVRRDMDEAGNHHSQQTITRTESQTPHVLTQRWELNNENTWTQGREHHTLGPVKGRRLGKNSSSLSLAMGRSFKFQEKKTKTEIKTAFSASRTEAQVTAGKQLYRELPSLPLSSGRNLCQAIGSVPPMVSLLLAQNYI

SEQ ID NO: 36692 - protein, 178 aa, Homo sapiens
  DOMAIN (112)..(146): IMMUNOGLOBULIN V REGION domain identified by eMATRIX, accession number DM00031B, p-value=2.595e-09, raw score of 15.41
  DOMAIN (69)..(145): Immunoglobulin domain identified by PFam, accession name ig, E-value=3e-08, PFam score of 31.6
MDEAGNHHSQQTVTRTKNQTPHVLTHRWELNNENTWTQEGEHHTPETVVGGNGKNQVEQSPQSLIILEGKNCTLQCNYTVSPFSNLRWYKQDTGRGPVSLTIMTFSENTKSNGRYTATLDADTKQSSLHITASQLSDSASYICVRTLEGQGILADTVTLRQQNNCARLFNHQCSRKET

SEQ ID NO: 36693 - protein, 196 aa, Homo sapiens
  DOMAIN (64)..(92): Granins proteins domain identified by eMATRIX, accession number BL00422C, p-value=2.029e-14, raw score of 16.18
MIIIKTQKLTDAAKVVEKKKHLYTVVGRPNGYKYQEEEGEEEEEEEEEEEEEEEEEEEEEEEEEEEEEEEEEEEKEEEEEEEEAEEKKKKKEEEEERKKKEEEEGEGEETGNKELQSRDRDDLGGEEKVQPVWPYGGQFSYENLKPCSLQIVCTFVIAHILPLPILFLPILFTGVDPDKYLKTHILYYFLLPEYPS

SEQ ID NO: 36694 - protein, 1635 aa, Homo sapiens
  DOMAIN (10)..(65): kw TRANSCRIPTASE REVERSE II ORF2 domain identified by eMATRIX, accession number DM01354Q, p-value=1.000e-40, raw score of 9.23
MNIDAKILNKILANPIQQHIKKLIHHDQVGFIPGMQGCFNICKSINVIQHINRTKDKNHMIISIDAEKAFDKIQQRFMLKTLDKLENKIPRNPTYKGRKGPLQGELQTTAQGNKRGYKQMEEHSMLMGRKNQYRENGHTAQASTTSTLRHIRLYRTLLPLGKPDIIRTITMLVNSSKPTGTQLWVVSSQYVQRQMASDSKGMNTCSMVKARKYSKPLLVTPRQTASGVDLQQTPTDLQLRVPTVRRKTDKQKGNPHQNPIHMSPSSKTKGHSSSPATEQSWMDNDFDELREEGFRRSNYSELWEDIQTKGKVENFEKNLEECITRITNTEKCLKELMELKTKARELREECRSLRSRCNQLEERVSVMEDEMNKMKDMDEAGNHHSQQTITRTKNQTLHVLTYRWELNNENTWTQEGEHHTLGPVVGWEDVGGIALGETPKGTGRVLLGAGHTEFQCKVPEWLSSPSPKHTDSLSAPCGHCLEMREGWCWHFKTVFAILFSASVSDMKLKPVVESDTLTIESGPLASEDKPLSCGTNSGKEQEINETLPITTVAQSSVLLHPQEAAARIRMSARQKQIMEIEEQKQKQLELLEQIEQQKLRLETDCFRAQLEEEKRKKTQPTGVGCRKSHHYINHLHSFSSLPVKVESGKIQEPFSAMSKSTVSTSHSIISQMHDRPLLPSENITAQQGNMKALQEQLDLQKKVLQATQEAQEQLLLCKQKEVEQQTGLSVFLPLVTPDSSALLPSAKADLGRIQESSPTKNNIAVSSDHHVISQLQDKRLSLSQPILSQQNNFKFLQEQLNIQKDSLQARREAQEVLYVHKQSELDRRVCSEQAEPSFPFQVAQHTFTSLPSADTKSGKIQEQHSSKSEKGLVSCQSDIPISQDGSLSFLQQFLPLHDSLKLLQEQLTKQRDTLQARHEAQVELLLHRQRDLGDSKSGLVSSSSSPVVVQHSVASQASAKAEPRRIQELYLSEKENVDESERFQECISIKSDSTIPLSHPKIPRCQERLLRVSQHMLPLQDNLEEHQAWLDTEKEAFHFSQKTQENTSSEQTGSSSFIPQLVQLSFTSLASAESGTILEPLFTESESKIFSSHLQIPQLQDRLLRISQLIQPQQDNLKALQEQLATQREAIILARQEAREELLLHQSEWEGRISPEQVDTSSLPLVPQHSFASLPLNESERNQEPCSINSDNIVSSGHSEIPTLPDGLLGLSHLVLPQQDNLIALEEHLHAQTDFLPSIEKTQKELVLSKPCKFEEKVSSEHFIQSHHGDLQALQQQLDTQKKAIRSIQEVQEELLLQRLSELEKRVSSEQVCSSSFVSQQDNLGLQKQLDLQREVLHYSQKAQEKLLVQRQTALQQQIQKHEETLKDFFKDSQISKPTVENDLKTQKMGQLRDWFPNTQDLAGNDQENIRHADRNNSDDNHLASEDTSAKQSGRHETSINTCTISIGLVRKSFLFVAKLNSGLSRLPYGQCAFRVCRRSCTLHYVKTAHILYKLIAEVTRGFGHLLNFFPQHMASTTPQLDSGHKGKDWEGSRGRCDTDKKEGKVATEAETRVTQLQVKECQQPPGLKRQGTGSPLEPLEGGWPCQHLDLQLLSSFQNCERRSSVVLSHQLVVIWYSSHRKPYANSELNNERYL

SEQ ID NO: 36695 - protein, 715 aa, Homo sapiens
  DOMAIN (103)..(150): kw TRANSCRIPTASE REVERSE II ORF2 domain identified by eMATRIX, accession number DM01354V, p-value=1.000e-40, raw score of 12.97
MSRLQKSPLLFNIVLEVLAKAIKQEKEIKGIQLGKEEVKLSLFADDMIVYLENPIVSVQNLLKLISNFSKVSGYKINVQKSQAFLYTNNRQTESQIMSELPFTIASKRIKYLGIQLTRDVKDLFKENYKLLLNEIKEDTKKWKNIPCSWVGGRINLVKMAILPKVIYRFNAIPIKLPMTFFTELEKTTLKFIWNQKRALIAKSSLSQKNKTGGITLPDFKLYYKATVTKTSWYWYQNRDIDQWNRTEPSEIMPHIYNYLIFDKPDKNKQWGKDSLFNKWCWENWLAICRKLKLDTCLTPYTKINSRWIKDLRVRPKTIKTLEENLGNTIQDIGIGKDFMSKTPKAMATKAKIDKWDLIKLKSFCTAKETTIRVNRQPTKWEKIFATYSSDQGVISRIYNELKQIYKKKTNNPIKKWAKDMNRHFSKEDIYAAKKHMRKCSSSLAIRETQIKTTMRYHLTPVRMAIIKKSGNNRCWRGCGDIGTLLHCWWDCKLVQPLRKSVWRFLRDLELEIPFDPATPITGYILGVYPKDYKSCCYKDTYTRGQLPHTTESSNGAEPGLQPQAKLGQGAERVVNTPPSIPDGEVEYTVTVAVGSMTNCRPGMNWQAKCGASPVMNPGPAKPGQGCYQPEVSDWQSDQEKSCVTMVTVSLYYGTRPSDASSKLERVNFPALTLVGLGLASGKGNPKTQHASKRAIKLQTIMQPEPLTMAPSAGNP

SEQ ID NO: 36696 - protein, 681 aa, Homo sapiens
  DOMAIN (413)..(464): Octicosapeptide repeat proteins domain identified by eMATRIX, accession number PF00564B, p-value=6.604e-20, raw score of 24.74
  DOMAIN (348)..(606): Eukaryotic protein kinase domain identified by PFam, accession name pkinase, E-value=2.6e-77, PFam score of 270.2
GARGGWGGTMADVFPGNDSTASQDVANRFARKGALRQKNVHEVKDHKFIARFFKQPTFCSHCTDFIWGFGKQGFQCQVCCFVVHKRCHEFVTFSCPGADKGPDTDDPRSKHKFKIHTYGSPTFCDHCGSLLYGLIHQGMKCDTCDMNVHKQCVINVPSLCGMDHTEKRGRIYLKAEVADEKLHVTVRDAKNLIPMDPNGLSDPYVKLKLIPDPKNESKQKTKTIRSTLNPQWNESFTFKLKPSDKDRRLSVEIWDWDRTTRNDFMGSLSFGVSELMKMPASGWYKLLNQEEGEYYNVPIPEGDEEGNMELRQKFEKAKLGPAGNKVISPSEDRKQPSNNLDRVKLTDFNFLMVLGKGSFGKVMLADRKGTEELYAIKILKKDVVIQDDDVECTMVEKRVLALLDKPPFLTQLHSCFQTVDRLYFVMEYVNGGDLMYHIQQVGKFKEPQAVFYAAEISIGLFFLHKRGIIYRDLKLDNVMLDSEGHIKIADFGMCKEHMMDGVTTRTFCGTPDYIAPEIIAYQPYGKSVDWWAYGVLLYEMLAGQPPFDGEDEDELFQSIMEHNVSYPKSLSKEAVSICKGLMTKHPAKRLGCGPEGERDVREHAFFRRIDWEKLENREIQPPFKPKVCGKGAENFDKFFTRGQPVLTPPDQLVIANIDQSDFEGFSYVNPQFVHPILQSAV

SEQ ID NO: 36697 - protein, 195 aa, Homo sapiens
  DOMAIN (165)..(185): Protein kinase C terminal domain identified by PFam, accession name pkinase_C, E-value=1.8e-10, PFam score of 38.1
MAELLLQPLLQQDCDGSCSIPVGPRMQPAEASLTLNVQMKATRPPDGTERNISRLNKRILYKRWSLLCLSDAKLKVTQPKGEHYGISHERFPPVPSRQSDREPPFDGEDEDELFQSIMEHNVSYPKSLSKEAVSVCKGLMTKHPAKRLGCGPEGERDVREHAFFRRIDWEKLENREIQPPFKPKVLDSCRAPPHD

SEQ ID NO: 36698 - protein, 811 aa, Homo sapiens
  DOMAIN (188)..(207): THROMBIN RECEPTOR SIGNATURE domain identified by eMATRIX, accession number PR00908G, p-value=7.852e-09, raw score of 13.24
MDNHLNPSSSVLESYVREKHSDTRSSVLESYVRDKHSEPSCSVLEHYVRDKHSDHSRIVLEFYVRDTHSENSRSVLESNLEDKYSDPRSSVLESYVRSKHSHNRSSVLESYVRDKHSELHNSVLKSNVRDKHSDCRSGVLESYVRDKPSEHSKSVLESYVRDKYSDPHSSVLESYVRDKHSDYRSSVLESYCFGILCEHKHSDPSSSVLESYLRHKHSDPRSSVLECYVMEIHSYYSSRVLESCVRDRHSDHSRSVMESYIRDKHSDTCSSFLKPYVREKHSDLSSSVLESYMRHIHSDPRCSDLESYVRDKHSEHSRSVLESPVRNKHSDPHNNVLESYARDQHSDNRRSVLESYVRDKHSENRSSVLESYVRDKHSNKSGSVLESYVRNDIHIDSSSIVLESYVRDKHSHPSSSVLESYMRDNHSDACSSVLEFCVRDKLSDARSSVLELCVRDKLSDPRSSVLESCVRDKLSDARSSVLEFCVRNKPSDPLSSVLESYVSDKHLDLSSTVLESYVRSNHSDTRSGVQESDVRDKHSEPSSSVLEPYLRDKQSDHSCIVLKSYVRNKHSDIRNGVLESYVRDKHSDASSIVLESYRAREGPELEPAIHGNRSPTQGLMGRHFCPWGTQAPVLRGAFFFYFLPRGLSAHFEVSLVGPRRSLCSTSDARVPRPRAEADGKAHSSLGDPVSASRRLGYTQESKWKWHIQDQAKPEPKQVSFLNEDVQNLPAQQTTEQVLQIRKETSPAQWGKSFKEPSPDDQRHAWFADDSTKYIDGTRCWEAVAYNPVKNISISEEGRGVSSQLAELESVL

SEQ ID NO: 36699 - protein, 130 aa, Homo sapiens
  DOMAIN (22)..(96): Immunoglobulin domain identified by PFam, accession name ig, E-value=2.9e-09, PFam score of 34.9
  misc_feature (1)...(130): Xaa = X or * as defined in Table 2
XVAGEDELQVIQPEKSVSVAAGESATLRCAMTSLIPLGPIMWFRGAGAGRELIYNQKEGHFPRVTTVSELTKRNNLDFSISISNITPADAGTYYCVKFRKGSPDDVEFKSGAGTELSVREAALAPTAPLL

SEQ ID NO: 36700 - protein, 141 aa, Homo sapiens
  DOMAIN (44)..(118): Immunoglobulin domain identified by PFam, accession name ig, E-value=3.1e-11, PFam score of 41.3
LLLVCIQSMNVIDKHLRKHRGSRVAGEEELQVIQPDKSVLVAAGETATLRCTATSLIPVGPIQWFRGAGPGRELIYNQKEGHFPRVTTVSDLTKRNNMDFSIRIGNITPADAGTYYCVKFRKGSPDDVEFKSGAGTELSVR

SEQ ID NO: 36701 - protein, 394 aa, Homo sapiens
  DOMAIN (162)..(185): Immunoglobulins and major histocompatibility complex proteins domain identified by eMATRIX, accession number BL00290A, p-value= 9.591e-11, raw score of 20.89
  DOMAIN (43)..(338): Immunoglobulin domain identified by PFam, accession name ig, E-value=9.1e-16, PFam score of 55.9
FLRKHRESGKDEEMTALCSFPGVAGEDELQVIQPEKSVSVAAGESATLRCAMTSLIPVGPIMWFRGAGAGRELIYNQKEGHFPRVTTVSELTKRNNLDFSISISNITPADAGTYYCVKFRKGSPDDVEFKSGAGTELSVRAKPSAPVVSGPAVRATPEHTVSFTCESHGFSPRDITLKWFKNGNELSDFQTNVDPAGDSVSYSIHSTARVVLTRGDVHSQVICEIAHITLQGDPLRGTANLSEAIRVPPTLEVTSQPIRAENQANVTWQVSNFYPRGLQLTWLENGNVSRTETASTLIENKDGTYNWMSWLLVNTCAHRDDVVLTCQVEHDGQQAVSKSYALEISAHQKEHGSDITHEPALAPTAPLLVALLLGPKLLLVVGVSAIYICWKQKA

SEQ ID NO: 36702 - protein, 816 aa, Homo sapiens
  DOMAIN (479)..(502): Immunoglobulins and major histocompatibility complex proteins domain identified by eMATRIX, accession number BL00290A, p-value= 9.591e-11, raw score of 20.89
  DOMAIN (360)..(657): Immunoglobulin domain identified by PFam, accession name ig, E-value=5.9e-23, PFam score of 79.0
  misc_feature (1)...(816): Xaa = X or * as defined in Table 2
MEPAGPAPGRLGPVLCLLLAASCAWSASRQLPAVQVLRGDVTCGSDHVFLLAYIKHLAVAGRRALKATVHVHQRTLLRPGGCGSVPGKRAVTLISKCSDGQPAFPGAPAGNTNTFLVCSCGFPDLQSSRGPERALCAFIQCLMVRPEEQREKNWPGPRGRSMARPGWNAKPPVVQAKAFKNWAVLELSTVSARNLTGSRIPRENTKVILIGTIWVLCFLGSALGVCDPGGTHSHLAMHVVIFGPVGSNNPSIVIIIIIIRPILQIKSQRSRVGETFPGVSWVAELESKSKHTFSQCQALLQPWGRKLSSCSQRTYNLLLVCIQSMNVIDKHLRKHRGSRVAGEEELQVIQPDKSVLVAAGETATLRCTATSLIPVGPIQWFRGAGPGRELIYNQKEGHFPRVTTVSDLTKRNNMDFSIRIGNITPADAGTYYCVKFRKGSPDDVEFKSGAGTELSVRAKPSAPVVSGPAARATPQHTVSFTCESHGFSPRDITLKWFKNGNELSDFQTNVDPVGESVSYSIHSTAKVVLTREDVNSQSFWXGPTVTLQGDPLRGTANLSETIRVPPTLEVIQQPVRAENQVNVTCQVRKFYPQRLQLTWLENGNVSRTETASTVTENKDGTYNWMSWLLVNVSAHRDDVKLTCQVEHDGQPAVSKSHDLKVSAHPKEQGSNTAAENTGSNERNIYIVVGVVCTLLVALLMAALYLVRIRQKKAQGSTSSTRLHEPEKNAREITQDTNDITYADLNLPKGKKPAPQAAEPNNHTEYASIQTSPQPASEDTLTYADLDMVHLNRTPKQPAPKPEPSFSEYASVQVPKK

SEQ ID NO: 36703 - protein, 135 aa, Homo sapiens
MVMLEPEWGTLEEEEDSGEQLQSLKLHQPGEISEYQESDKGVEWYSIEWMEVRCNACFTGGVRGPSLLDSKPSIECPRGARNLPGLVQEGEPFSEEATLFTKELVLQREAASILPTVHDSAGTLLELSHRWDGRS

SEQ ID NO: 36704 - protein, 944 aa, Homo sapiens
  DOMAIN (187)..(203): Thermonuclease family proteins domain identified by eMATRIX, accession number BL01123D, p-value=6.651e-11, raw score of 9.68
  DOMAIN (52)..(698): Staphylococcal nuclease homologues domain identified by PFam, accession name SNase, E-value=4e-51, PFam score of 183.3
PACPSPRLPFTNTDTHIDTSSPASRSTRCLCISTHGVLAQSGGSSGGPAVPTVQRGIIKMVLSGCAIIVRGQPRGGPPPERQINLSNIRAGNLARRAAATQPDAKDTPDEPWAFPAREFLRKKLIGKEVCFTIENKTPQGREYGMIYLGKDTNGENIAESLVAEGLATRREGMRANNPEQNRLSECEEQAKAAKKGMWSEGNGSHTIRDLKYTIENPRHFVDSHHQKPVNAIIEHVRDGSVVRALLLPDYYLVTVMLSGIKCPTFRREADGSETPEPFAAEAKFFTESRLLQRDVQIILESCHNQNIVGTILHPNGNITELLLKEGFARCVDWSIAVYTRGAEKLRAAERFAKERRLRIWRDYVAPTANLDQKDKQFVAKVMQVLNADAIVVKLNSGDYKTIHLSSIRPPRLEGENTQDKNKKLRPLYDIPYMFEAREFLRKKLIGKKVNVTVDYIRPASPATETVPAFSERTCATVTIGGINIAEALVSKGLATVIRYRQDDDQRSSHYDELLAAEARAIKNGKGLHSKKEVPIHRVADISGDTQKSKQFLPSLQRTGRSEAVVEYVFSGSRLKLYLPKETCLITFLLAGIECPRGARNLPGLVQEGEPFSEEASLFTKELVLQREVEVEVESMDKAGNFIGWLHIDGANLSVLLVEHALSKVHFTAERSSYYKSLLSAEEAAKQKKEKVWAHYEEQPVEEVMPVLEEKERSASYKPVFVTEITDDLHFYVQDVETGTQFQKLMENMRNDIASHPPVEGSYAPRRGEFCIAKFVDGEWYRARVEKVESPAKIHVFYIDYGNREVLPSTRLGTLSPAFSTRVLPAQATEYAFAFIQVPQDDDARTDAVDSVVRDIQNTQCLLNVEHLSAGCPHVTLQFADSKGDVGLGLVKEGLVMVEVRKEKQFQKVITEYLNAQESAKSARLNLWRYGDFRADDADEFGYSR

SEQ ID NO: 36705 - protein, 149 aa, Homo sapiens
  DOMAIN (46)..(74): PRECURSOR GLYCOPROTEIN SIGNAL RE domain identified by eMATRIX, accession number PD01719A, p-value=1.955e-13, raw score of 12.89
  DOMAIN (47)..(87): Thrombospondin type 1 domain identified by PFam, accession name tsp_1, E-value=9.8e-06, PFam score of 32.5
DQDYKYDSTSDDSNFLNPPRGWDHTAPGHRTFETKDQPEYDSTDGEGDWSLWSVCSVTCGNGNQKRTRSCGYACTATESRTCDRPNCPGIEDTFRTAATEVSLLAGSEEFNATKLFEVDTDSCERWMSCKSEFLKKYMHKVMNDLPSCP

SEQ ID NO: 36706 - protein, 215 aa, Homo sapiens
  DOMAIN (27)..(55): PRECURSOR GLYCOPROTEIN SIGNAL RE domain identified by eMATRIX, accession number PD01719A, p-value=1.955e-13, raw score of 12.89
  DOMAIN (28)..(68): Thrombospondin type 1 domain identified by PFam, accession name tsp_1, E-value=9.8e-06, PFam score of 32.5
MFNLTIFSLQRKAKLDTVEEENSTDGEGDWSLWSVCSVTCGNGNQKRTRSCGYACTATESRTCDRPNCPEVLKSCQSHTQSLTEALTFPFLLASGYRKHLLKIAVPLKNCQRVTRKHPPHKICPQPTPLREVDDVDKHLGTKPPKIDQTTADLQIYDPRTAKEALKSRMGMSLAGLSLQNGQRSCWGEKEGRTIGDEDEETGIAKEKVTKRHSEI

SEQ ID NO: 36707 - protein, 98 aa, Homo sapiens
MPKAIETKAKFDKWDLIKLKSFCKAKETINRVNRQPTGWEKNFANYASDKAQASGSPFTPTANYNWLALSPQLPEKRALSTRLAFNDPSNLPLREKAM

SEQ ID NO: 36708 - protein, 99 aa, Homo sapiens
  misc_feature (1)...(99): Xaa = X or * as defined in Table 2
RGREHTQGIPGAGKRWHXFKVLLTQCWXSEFSVIRQFKAGPGGLDQFRDRSKRWLRDLRGRLLGSLNASLVLRALFSGNWGLTANQLXLAVGAKGDPEA

SEQ ID NO: 36709 - protein, 533 aa, Homo sapiens
MANAARLGPAPSRSFLTPEVTLTRKQYPEQLSGVEGGLVEGRKEGEFATQTCLQGKFGEEIGSDQFGGCVMFHAPVPGANMVTGRIEYVEVFHAGQAFRLGRYPIHWHLLGDLQFKSYVRGCAIHQAYNRAVTIHNTHHLLVERNIIYDIKGGAFFIEDGIEHGNILQYNLAVFVQQSTSLLNDDVTPAAFWVTNPNNTIRHNAVAGGTHFGFWYRMNNHPDGPSYDRNICQKRVPLGEFFNNTVHSQGWFGMWIFEEYFPMQTGSCTSTVPAPAIFNSLTTWNCQKGAEWVNGGALQFHNFVMVNNYEAGIETKRILAPYVGGWGETNGAVIKNAKIVGHLDELGMGSAFCTAKGLVLPFSEGLTVSSVHFMNFDRPNCVALGVTSISGVCNDRCGGWSAKFVDVQYSHTPNKAGFRWEHEMVMIDVDGSLTGHKGHTVIPHSSLLDPSHCTQEAEWSIGFPGSVCDASVSFHRLAFNQPSPVSLLEKDVVLSDSFVKAILGYMRPTGSRLDKVAREIINKYRVTENISSAL

SEQ ID NO: 36710 - protein, 187 aa, Homo sapiens
MPTSEDALLQVQVQQWSIFNVQPGSGLQECGSAGILPVPCALKNTQKSQNYGGQPPGLVGVGQVEGDVWNLLVSRQLCSAPVVLRGYTAQPRVAPAMCPQHQPLGLLYVSGMLPVFQCHQERLGELGLTGRHTPPAGTVQFEEPRVIDLWDLAQSANLTDKELEAFRVKKHLQDLSGRISRARHNEL

SEQ ID NO: 36711 - protein, 610 aa, Homo sapiens
  misc_feature (1)...(610): Xaa = X or * as defined in Table 2
STLASSEGQGGFWRGPRALILLLLFLGPCHARSHDGKYSREKNQPKPSPKRESGEEFRMEKLNQLWEKAQRQERYPCRRRRRVKQVAAGTPRVFLKTPEMGVFELCRPSGPHYLISNAGVRLDLLNSPVLSIPESLRGKVNDLQNKKELLERKGRGETGLARPMHDLTAAQGGYGCALVHGAQVEGAGAQGWAGTVHATCRGETGTACQEALVTATACSSCQRGQTRAPQGQHTLESMGLNCLPQGAASGSDHHCGPRISDLPGSAARTSRWPASSELHLPPVRLAELHADLKIQERDELAWKKLKLDGLDEDGEKEARLIRNLNGHWRAEDAHQDGGVNKWDIPTVVGVGVAAIALVAVKLFFLPINIRCVLSESPATLHSLQVASVLWSLEFLPYGSRSPVVIQETVILAKYGLDGKKDARQVTSNSLSGTQEDGLDDPRLEKLWHKAKTSGKFSGEELDKLWREFLHHKEKVHEYNVLLETLSRTEVHPGPQDGVASTGREHSPMETLFQEELKHFEAKIEKHNHYQKQLEIAHEKLRHAESVGDRRSVXSASPRESTPCLEGRTKGAGLPRXKKHLQDLSGRISRARHKRTLKALGSPARQGSRPA

SEQ ID NO: 36712 - protein, 61 aa, Homo sapiens
  misc_feature (1)...(61): Xaa = X or * as defined in Table 2
DFFDNSAQVTIAGIPCDIRHVSPRKIECTTRAPGKVXGSPPLSQAIEGFFLKLEMLLRDWN

SEQ ID NO: 36713 - protein, 504 aa, Homo sapiens
  DOMAIN (364)..(448): IPT/TIG domain identified by PFam, accession name TIG, E- value=0.0042, PFam score of 22.5
MSKLDRRRGKNEIKLNSEDYVSYYCRKALSFIQVLSDIALLAPASCMASGVQKRPWSRKHNCPQDIVIATGRNPQTARLHSMGNRGLLFEVGDAVEGLELTEATPGYRWQIVPNASSPFGFWSQEGQPFRYVVGKVGAHIKSTFANLDVPVQISAHHLHQLLQNNADDFTSRYLNASDFTVKEDLYTCYEHVWTLSWSTQIGDLPNFIRVSDENLTGVNPAAATRVVYDGGVFLGPIFGDMLATANQHTQVVVRVNDVPAHCPGSCSFQYLQGSTPCVHSVWYSIDGDINLMIYITGTGFSGDSQFLQVTVNKTSCKVIFSNQTNVVCQTDLLPVGMHRILMLVRPSGLAISATGEDLFLNVKPRLDMVEPSRAADIGGLWATIRGSSLEGVSLILFGSYSCAINVATSNSSRIQCKVPPRGKDGRIVNVTVIRGDYSAVLPRAFTYVSSLNPVIVTLSRNISNIAASGAVNTIHDLPGSNSTSRDLVIQDFQLGNFSQMVVAI

SEQ ID NO: 36714 - protein, 50 aa, Homo sapiens
  misc_feature (1)...(50): Xaa = X or * as defined in Table 2
QSLLLEYLHLYLHLCYLHLANKQELTLTWYKEXCTFFLPSVXNPFHQNLA

SEQ ID NO: 36715 - protein, 166 aa, Homo sapiens
MKVQSEGAASYPEDVDKTIDEGGHTKQQIFNVDEVAFYWKKMPSRTFIAREEKLMPSFKEQVVILLLGGSSNKRCCHLKVKVIQDTIKQNKFKSLTSHGQKLKDPEEQGEAPGKYLQHCLAFAYTLKYPALPLARCGPSWVMVRATTLESLPRDGVEISKKNYKRK

SEQ ID NO: 36716 - protein, 422 aa, Homo sapiens
  DOMAIN (138)..(149): RNase H domain identified by eMATRIX, accession number PF00075F, p-value=2.588e-10, raw score of 12.87
  DOMAIN (74)..(227): RNase H domain identified by PFam, accession name rnaseH, E- value=2.3e-22, PFam score of 87.7
TLLTILPFYLFKNRTSLTGYLRIWILSTKLFCLSTLWLAPTLFLIPLPDPHDCISLIHLAFTPFPHTSFFPIPHPDHTWFIDGSSTWPNRHSPAKVGYAIVVSSTSILEATALPPSTTSQQAELIALTRALALAKGLHVNIYTDSKYAFHILHHNAVIWAERGFLSTQRSSIIIASLIKTLLKAALLPKEAGVIHCKGHQKASDPIAQGNAYADKTKFLDLAFPPLRLSFTCQITQAVSQALGIQWNLHTPYRPQSSGKDWTVFLPLALHRIRARPREATGYSPFELLYGRTFLLSPNLVPDTSPLGDYLPVLWQARQEIHQAANLLLSTPDSQLYEDTLAGRSVLIKNLTPQTLQPRWTGPYLVIYSTPTAVRLQDPPHWVHRSRIKLCPSDNQPNLSSSSWKSQVLPTTSLKVTLISEEQ

SEQ ID NO: 36717 - protein, 646 aa, Homo sapiens
  DOMAIN (520)..(538): RNase H domain identified by eMATRIX, accession number PF00075J, p-value=4.600e-12, raw score of 15.78
  DOMAIN (429)..(583): Integrase core domain identified by PFam, accession name rve, E-value=3.1e-32, PFam score of 115.5
  misc_feature (1)...(646): Xaa = X or * as defined in Table 2
LFLGYSHTSLLPFPPVQSLLHLLPLYLHTLTHKYGIPLLPPWRPIMHPLPSHXNLITLTLLNANIPSCSTLXKDXSLLSLTCYSMAFXQPINSPYNSPILSVQKPDKPYSSFRYVYSLFVESPTITIVPGPDFNLASHIIPDTTPDPYDCISLIHLTFTPFPHVSFFPVPHPFHTWFIDGSSTRPNCHTPAKAGYAIVSSTSIIEVTTLPHSTTSQQAELIALTRTLTLAKGLCVNIYTDPISCTTMLFYGLKCFLTMQGSSIINASLIKTLLKAALLPKEAGVIHCKGPQKASDPIAQDNTYADKVAKKAASVPTSIPHSSFSPSHLVTPTYSPTETSTYQSLPTQGKWFLDQGKYLLPASQAHSILSSFCNLFHVGYKPLARLSELLISFPSWKSILKEITSQCSICYSATPQGLFRPPPFPKHQAWGFVPTQDWQIDFTHMPQVGKLKYLLVWVDTFTGWVEAFPTGSEKATVVISSLLSDVIPRFCLPTSIQSNNGLAMISQITQAVSQALGIQWKLCTPYHPQSSGKVKWANGLLKTHLTKLSLQLKKDWTVLLPLALLRIRACLRNATGYSPFELLYRCSFLLGPSLIPDTRPTWTAPPKTWHPYYLLSSHTPIHRSQLLIHALLLFTLPVYTVSPSHHS

SEQ ID NO: 36718 - protein, 272 aa, Homo sapiens
  DOMAIN (58)..(112): Potyvirus coat protein domain identified by eMATRIX, accession number PF00767C, p-value=5.019e-09, raw score of 19.89
DCSKRNRHSQVIAEGNICKIQEVRRKEDTQGGEKDPESLLLPPLLAPGPTEYSTYYNISVAKAELLNKLKDQPEMAEIGLGEEEVDHELAQKKIQLIESISRKLSVLREAQRGLLEDINANSALGEEVEANLKAVCKSNEFEKYHLFVGDLDKVVNLLLSLSGRLARVENALNSIDSEANQEKLVLIEKKQQLTGQLADAKELKEHVDRREKLVFGMVSRYLPQDQLQDYQHFVKMKSALIIEQRELEEKIKLGEEQLKCLRESLLLGPSNF

SEQ ID NO: 36719 - protein, 324 aa, Homo sapiens
  DOMAIN (129)..(174): Involucrin proteins domain identified by eMATRIX, accession number BL00795C, p-value=1.942e-10, raw score of 17.06
MAHSKTSFSWATPFHPCLENPALDLSSYRAISSLDLLGDFKHALKKSEETSVYEEGSSLASMPHPLRSRAFSESHISLAPQSTRAWGQHRRELFSKGDETQSDLLGARKKAFPPPRPPPPNWEKYRLFRAAQQQKQQQQQQKQQEEEEEEEEEEEEEEEEEEEEAEEEEEELPPQYFSSETSGSCALNPEEVLEQPQPLSFGHLEGSRQGSQSVPAEQESFALHSSDFLPPIRGHLGSQPEQAQPPCYYGIGGLWRTSGQEATESAKQEFQHFSPPSGAPGIPTSYSAYYNISVAKAELLNKLKDQPEMAEIGLGEEEVDHELA

SEQ ID NO: 36720 - protein, 74 aa, Homo sapiens
FIVPNSFFLQLLLSFCCFGFPCYILNVHTRVLPFLHSHGVSSFAILSRLRQCSFQCGLVCEIPTETEVLCIPST

SEQ ID NO: 36721 - protein, 181 aa, Homo sapiens
MATLLIPYSLRHKNIEIMAINNPTVTSKFSNGRKNLIYLTLNLKLEIIKLKSPNSPPSQSLIQSKPLTLFNSIKAETDKEAVEEMIEARRGWFMRFKKRSCLRNIKVQGEATSADVEAVASYPEDLAKIIDKDGYTKQQIFNVDEVALYWKKIPSKTFIALEKMSMFDFKASNVKLTPVRD

SEQ ID NO: 36722 - protein, 128 aa, Homo sapiens
  misc_feature (1)...(128): Xaa = X or * as defined in Table 2
NIKPASQISPGXIXVHSSPTQRLSAPPSAAGRLLSLSLPAGLVGGDTARCIPAGRLRPLCSWLDPGKLLHLSLKSKGSGGRSGAGTLQEGNQSVCIQAEKPPLKPAIQTQSGMNVLRCRAYSWVIDWD

SEQ ID NO: 36723 - protein, 178 aa, Homo sapiens
TSVVEFFQAMLKKPVVTEVRTPTNTWSGLGFSKSMPAETIKELRRANHVSYKPTMTTTYEGSSMSLSRSNSREHLGGGSESDNWRDRNGIGPGSHSEFAASIGSPKRKQNKSTEHYLSSSNYMDCISSLTGSNGCNLNSSFKGSDLPELFSKLGLGKYTDVFQQQEVSHYLFSQVSLF

SEQ ID NO: 36724 - protein, 972 aa, Homo sapiens
  DOMAIN (588)..(635): kw TRANSCRIPTASE REVERSE II ORF2 domain identified by eMATRIX, accession number DM01354V, p-value=1.000e-40, raw score of 12.97
  DOMAIN (716)..(853): Kelch motif domain identified by PFam, accession name Kelch, E-value=9.3e-22, PFam score of 85.7
LLKIHSSQSSPQQAVLTIPSQLKPLSVNTSGGVQTILMPVNKVVQSFSTSKPPAILPVAAPTPVVPSSAPAAVAKGEDASCFSAKSVEQYYGWNIGKRRAAEWQRAMTMRKVLQEILEKNPRFHHLTPLKTKHIAHWCRCHGYTPPDPESLRNDGDSIEDVLTQIDSEPDHGSLGDGKSSSVGPTAVVTLLACHLECPSSFSSADNLCRKLEDLQQFQKREPENEEEVDILSLSEPVKINIKKEQEEKQEEVKFYLPPTPGSEFIGDVTQKGGMLVWREAVSKAAIRTNGFLLLFQIGITLQPVALHRNVYASVVEDMILKATEQLVNDILRQALAVGYQTASHNRYYYLCSLWCEAYTSFLTVELPMKVFYTYINPVGDGGSKTCDTMVFNHPAIKKFLESPSRSSSPANQRAETPSANHSESDSLSQHNDFLSDKDNNSNMDIEERLSNNMEQRPSRNTGRDTSRITGSHKTEQRNADLTDETSRLFVKKTIVVGNVSKYIPPDKREENDQSTHKWMVYVRGSRREPSINHFVKKVWFFLHPSYKPNDLVEVRYKIVVTRYVLGSGRDKGTVKMSTGPWLWETKKVFLPLRIKYLGIQLTRDVKDLFKENYKPLLKEIKEDTNKWKNIPCSWVGRINIVKMAILPKTERGEEASEEKYEASRCWFVRFKEGCRLHNIQLQGEAASADGEAAASYPEDPAKIIDEGGYTKQHIFTVYVVGGYDGQNRLSSVECYDSFSNRWTEVAPLKEAVSSPAVTSCVGKLFVIGGGPDDNTCSDKVQSYDPETNSWLLRAAIPIAKRCITAVSLNNLIYVAGGLTKAIYCYDPVEDYWMHVQNTFSRQRGELGVFVVPSAGFPASTEAERHTPFYALPSSLERTPTKMTTSQKVTFCSHGNSAFQPIASSCKIVPQSQVPNPESPGKSFQPITMSCKIVSVLLSSVMFNKRKFITVDWQSCHKAKTKLIHTEMNGGDK

SEQ ID NO: 36725 - protein, 796 aa, Homo sapiens
MQGEAASADVEAVASYPEDLAMKIDEDSTMMSNRRCKENRDLKVQRLFQQDRGNRGSGQMCSGDCQSKIKSFKVKKKTKPSALNQVRGPSKRGSLGDCIGHMPTKPALPQSKRFSKVLVPTLKFCLLNQIQTPIPKICSKHIHGLTLEKENFKLHLPPFRYIREEILEEVLGKLMSVELYPQKNLTGCHQEAQWLDFHSYFKAALPVSASDKDFLWEDGIERIERRIPRHNQIYSSLGSTQQTITERDTKEVFAGTIKLHCLASGTKHEGKLPKDPPPSFKDSPIPFRSLQLSDSLPPPKCSRLLDRERDMDEPCKQTKPDKEIFNQGCLPLVLMFDMKEEIEVDPQFIAQLMEQLDVFISIKPKPKQPSKSVIVKSVERNALNMYEARKCLLGLESSGVTIATSPSPASCPAGLACPSLDILASAGLGLTGLGLLGPTTLSLNTSTTPNSLLNALNSSVSPLQSPSSGTPSPTLWAPPLANTSSATGFSAIPHLMIPSTAQATLTNILLSGVPTYGHTAPSPPPGLTPVDVHINSMQTEGKKISAALNGHAQSPDIKYGAISTSSLGEKVLSANHGDPSIQTSGSEQTSPKSSPTEGCNDAFVEVGMPRSPSHSGNAGDLKQMMCPSKVSCAKRQTVELLQGTKNSHLHSTDRLLSDPELSATESPLADKKAPGSERAAERAAAAQQNSERAHLAPRSSYVNMQAFDYEQKKLLATKAMLKKPVVTEVRTPTNTWSGLGFSKSMPAETIKELRRANHVSYKPTMTTTYEAASFQLFKQVSHTATHTAALDKGLMA

SEQ ID NO: 36726 - protein, 68 aa, Homo sapiens
AAGRVLVKREILVEVLTKRKTVTVNDKLILPYSLSEVCPLSITRTYKAQNCVESRHTHVRGGYHYEAR

SEQ ID NO: 36727 - protein, 1270 aa, Homo sapiens
MGHFKFVGKFLNGPFKGSGAKAGNSVCQFQKFNKNGFDPFLRNINKMSVRKRKDQDIYKYRNILGAEVIEHEDQDPPYPAQSKTAGPANTTWAHDPNIFTTKMLETENKLAPDPTINTIKGLDTKNSLKENLPNVSLPSIKGESSRAGNVQANTCHLSKSLNFTPHIEYLKQSMILKSILSENLQDLSDKLFSKPEVSMNSEAREKSSSPLLSIHDKSSSSMEDNVLEKKQDLNNWLSEKDILNSKTTLSQIIKNIPADSFSEGSQIIENIPADSLLEGGQVIKNIPEYSLSEGGQIIKNIPADSFLESGPGQSPEVEEHVSKKHFEADERDFPIKKNSSTKKKHLISEVPNSKSGSSGTVHDYIMRQIFTAPIFSELEIEVKEPSETPMNLENQLPTPWKRSLSSHILFHEENADEIELPQPRSATSQIIQAFPIDTLLESGIIKVIELDKEHHKSSLLGTGITSPKGNLKDSQEYYSEIRSETEPLSEQSIPIIPKDTTSVSRAEFIQEDQNMFPQDSSYYSIANKELYLPRNGQRLCKDKNDLSSTLESLTNSLMDKLSESDEIMLKSFLKNIFNVFFKYNHSERRGQPEKELERLIQPSFTSDTEHLEELQEDFDKADKLDRKPILSPKLRVFLEELSESEVKHLKSELSKQIQHYLVERLSESGHITKEDLPKIYQNLYLMNEKAEQKGPNSFQGKYSETVKEIMSFVNNFNHHFIDKHLEIKLRSFLKEILQNYFLKNISESSLFNETASETIYPNISSLRTKSVSISFHELEQDISKGSFGRRFEINMKYPLSKSLQNYLIALSENELLHLKADLSKHLQSLFIEKLSKSGLMTKKQLEGINQHINLLNSSSIPLKYIKTHLPFRDDCHFVEKHSEKQNKYSRIVQQTTLQTVSEDKLREAELIREKEKKYFPLQNLKGNSSLIKEQKSYYTKEEAKTPSLIKVQPSSNENIQASPLSKSSEILTDILLKKLRKEHVFTQLPQAENSVHKTEIQDPYSWGGKSKITQSKAWCEKTLKMKSLDRKEHVNIYKWTVQEKPEAVLTSYPRIPNARMPREDEYLNRITFPSWQSSTLTHFNTETGEKSKLEDQYCQTLKGNNNNNKKHLVTFAQYKKEIQTLYIKPDEICSEKCAKFPEIQSFQYKVVEDEKNLKPHLFPELFKIEDLKPKDCSDKFEDLHDMTSFTHLKKVKSRSRLLGKSSDDIHNHARHSARPYTAPEVNKQRESYSGKFTSRRMVSSGLVHINDKTSDYEMHKMRPKKIKRGY

SEQ ID NO: 36728 - protein, 347 aa, Homo sapiens
  DOMAIN (211)..(241): ALDO-KETO REDUCTASE SIGNATURE domain identified by eMATRIX, accession number PR00069D, p-value=4.682e-29, raw score of 19.36
  DOMAIN (33)..(328): Aldo/keto reductase family domain identified by PFam, accession name aldo_ket_red, E-value=3.1e-178, PFam score of 605.5
DTFLKRLPVVFRITPTVRFSTMDLSAASHRIPLSDGNSIPIIGLGTYSEPKSTPKGACATSVKVAIDTGYRHIDGAYIYQNEHEVGEAIREKIAEGKVRREDIFYCGKLWATNHVPEMVRPTLERTLRVLQLDYVDLYIIEVPMAFKPGDEIYPRDENGKWLYHKSNLCATWEAMEACKDAGLVKSLGVSNFNRRQLELILNKPGLKHKPVSNQVECHPYFTQPKLLKFCQQHDIVITAYSPLGTSRNPIWVNVSSPPLLKDALLNSLGKRYNKTAAQIVLRFNIQRGVVVIPKSFNLERIKENFQIFDFSLTEEEMKDIEALNKNVRFVELLMWRDHPEYPFHDEY

SEQ ID NO: 36729 - protein, 235 aa, Homo sapiens
  DOMAIN (43)..(68): ALDO-KETO REDUCTASE SIGNATURE domain identified by eMATRIX, accession number PR00069A, p-value=6.500e-26, raw score of 16.01
  DOMAIN (32)..(128): Aldo/keto reductase family domain identified by PFam, accession name aldo_ket_red, E-value=2.3e-28, PFam score of 103.3
MSFGGDKNNQTIANEKSVFREQDMLILMFNTPKGACATSVKVAIDTGYRHIDGAYIYQNEHEVGEAIREKIAEGKVRREDIFYCGKMQVSAVQSERTVHTRQPGDEIYPRDENGKWLYHKSNLCATWETPVASSGLQKLLTNQLQVGVSAAPSSGSVNLLEQFTELRETFTGFCISDNGWPHLDLPTSPVAPTQELTHHKRAALIPYDFISDPTNQYAPTLGPCSSKDPGKNPNL

SEQ ID NO: 36730 - protein, 111 aa, Homo sapiens
MVVPFSLPPLDSWNCESWLWEKLYHILDPDSEHTQPSGELCPSPAKYCHLVGIVIVTSKGYSTILSIQLLQDDGEHGNLPEKSEECIVALFLIAQTWKQPKYTTAEWINNV

SEQ ID NO: 36731 - protein, 221 aa, Homo sapiens
  misc_feature (1)...(221): Xaa = X or * as defined in Table 2
WAYLDFWMXHIPHLGVLLSAHLLSDLNSCQFXMGSRTEGSATGPGSCSAALPLGPYDPADPMVLEVSMADRDASPHDPLAKFLFPVPMTLHSALLEVLVPEGGTLPPGDTTTIPLNWIVKIATXTLWVPPTFKFTGCRLNTMWKLPRLGASTLXSNSLRCTLTSFSHDWSGWDAGHQVIRPHGFAGYNTCGCFHRLMLSACGFSRQMVQAVNGSTTLGSGG

SEQ ID NO: 36732 - protein, 228 aa, Homo sapiens
MSLVQWLTAVILALWEAKIWRADGQHSPHNLPGNGRYPLKPSQVTKPKPCAYWKEEAVESLTEAVVLEPGARRWAKHFTYCVLCNLHSNMRLTGLELKRGKQVTSWRRDSDQIMPRVPDHGRTSFVLCPERSAGQWTWNHSPPNFETLEHFKEKLCLLRKGHFLKNESSEVKSMMRSFPGSLYYFQLWDHILENEEFMKCLDGNIVSWEEDVWLVNKIIPTVDRTLRC

SEQ ID NO: 36733 - protein, 453 aa, Homo sapiens
  DOMAIN (172)..(202): kw OSTEOINDUCTIVE YOPM MEMBRANE OUTER domain identified by eMATRIX, accession number DM01551A, p-value=3.538e-26, raw score of 15.63
  DOMAIN (298)..(426): dUTPase domain identified by PFam, accession name dUTPase, E- value=1.4e-05, PFam score of 26.4
MKTLQSTLLLLLLVPLIKPAPPTQQDSRIIYDYGTDNFEESIFSQDYEDKYLDGKNIKEKETVIIPNEKSLQLQKDEAITPLPPKKENDEMPTCLLCVCLSGSVYCEEVDIDAVPPLPKESAYLYARFNKIKKLTAKDFADIPNLRRLDFTGNLIEDIEDGTFSKLSLLEELSLAENQLLKLPVLPPKLTLFNAKYNKIKSRGIKANAFKRFVLTGIDTYSGYGFAYTACNASAKTTIVDSQNALSTITVCHTALPLMKALTLRLKKCSTKIHGSRNQGVEVEVEVAPLTITPSVPLAKFLLPVPMALCSAGLEVLVPEGGTLPPGDTTTIPLNWKLRLPPGHFGLLLPLSQQAKKGVTVLAGMTDPDYQDEIILLLHNGGKEEYAWNSRDSLRLLLVLPSPVSKVNGKLRQPNPNRTTNGPDPSGMKVWVAPSGKKHDPLRCLLNAKGIHNG

SEQ ID NO: 36734 - protein, 2570 aa, Homo sapiens
  DOMAIN (193)..(229): Ribosomal protein L32e proteins domain identified by eMATRIX, accession number BL00580A, p-value=5.146e-09, raw score of 17.63
RRNPKCPGGNLNFQFKEIDVVSLGGSVPPSGTKTSRPAECNVVGTGSKSFASGSLGVMVRKCILIISFNVSCIVGYRNKPFEKYYQWRFAGLPLNGHLLVNMATEEAEASIWRADGQHSPHNLPGNGRYPLKPSQVTKPKPCAYWKEEAVESLTEAVVLEPGARRWAKHFTYCVLCNLHSNMRRRRRKPPPKKKKKKKKKKKSSRRRRRRRKKKRKKKKKKKRRRRRQQQQQQLCKEDKTKTKIRHFLKNESSEVKSMMRSFPGSLYYFQLWDHILENEEFMKCLDGNIVSWEEDVWLVNKIIPTVDRTLRCFVPENMTIQEKSTTVSQQIDMTTPSQITGVKPQNTAHSSTLLSQSIPIFATDYTTISYSNTTSPPLETMTAQKILKTLVDETATFAVDVLSTSSAISLPTQSISIDNTTNSMKKTKSPSSESTKTTKMVEAMATEIFQPPTPSNFLSTSRFTKNSVVSTTSAIKSQSAVTKTTSLFSTIESTSMSTTPCLKQKSTNTGALPISTAGQEFIESTAAGTVPWFTVEKTSPASTHVGTASSFPPEPVLISTAAPVDSVFPRNQTAFPLATTDMKIAFTVHSLTLPTRLIETTPAPRTAETELTSTNFQDVSLPRVEDAMSTSMSKETSSKTFSFLTSFSFTGTESVQTVIDAEATRTALTPEITLASTVAETMLSSTITGRVYTQNTPTADGHLLTLMSTRSASTSKAPESGPTSTTDEAAHLFSSNETIWTSRPDQALLASMNTTTILTFVPNENFTSAFHENTTYTEYLSATTNITPLKASPEGKGTTANDATTARYTTAVSKLTSPWFANFSIVSGTTSITNMPEFKLTTLLLKTIPMSTKPANELPLTPRETVVPSVDIISTLACIQPNFSTEESASETTQTEINGAIVFGGTTTPVPKSATTQRLNATVTRKEATSHYLMRKSTIAAVAEVSPFSTMLEVTDESAQRVTASVTVSSFPDIEKLSTPLDNKTATTEVRESWLLTKLVKTTPRSSYNEMTEMFNFNHTYVAHWTSETSEGISAGSPTSGSTHIFGEPLGASTTRISETSFSTTPTDRTATSLSDGILPPQPTAAHSSATPVPVTHMFSLPVNGSSVVAEETEVTMSEPSTLARAFSTSVLSDVSNLSSTTMTTALVPPLDQTASTTIVIVPTHGDLIRTTSEATVISVRKTSMAVPSLTETPFHSLRLSTPVTAKAETTLFSTSVDTVTPSTHTLVCSKPPPDNIPPASSTHVISTTSTPEATQPISQVEETSTYALSFPYTFSGGGVVASLATGTTETSVVDETTPSHISANKLTTSVNSHISSSATYRVHTPVSIQLVTSTSVLSSDKDQMTISLGKTPRTMEVTEMSPSKNSFISYSRGTPSLEMTDTGFPETTKISSHQTHSPSEIPLGTPSDGNLASSPTSGSTQITPTLTSSNTVGVHIPEMSTSLGKTALPSQALTITTFLCPEKESTSALPAYTPRTVEMIVNSTYVTHSVSYGQDTSFVDTTTSSSTRISNPMDINTTFSHLHSLRTQPEVTSVASFISESTQTFPESLSLSTAGLYNDGFTVLSDRITTAFSVPNVPTMLPRESSMATSTPIYQMSSLPVNVTAFTSKKVSDTPPIVITKSSKTMHPGCLKSPCTATSGPMSEMSSIPVNNSAFTPATVSSDTSTRVGLFSTLLSSVTPRTTMTMQTSTLDVTPVIYAGATSKNKMVSSAFTTEMIEAPSRITPTTFLSPTEPTLPFVKTVPTTIMAGIVTPFVGTTAFSPLSSKSTGAISSIPKTTFSPFLSATQQSSQADEATTLGILSGITNRSLSTVNSGTGVALTDTYSRITVPENMLSPTHADSLHTSFNIQVSPSLTSFKSASGPTKNVKTTTNCFSSNTRKMTSLLEKTSLTNYATSLNTPVSYPPWTPSSATLPSLTSFVYSPHSTEAEISTPKTSPPPTSQMVEFPVLGTRMTSSNTQPLLMTSWNIPTAEGSQFPISTTINVPTSNEMETETLHLVPGPLSTFTASQTGLVSKDVMAMSSIPMSGILPNHGLSENPSLSTSLRAITSTLADVKHTFEKMTTSVTPGTTLPSILSGATSGSVISKSPILTWLLSSLPSGSPPATVSNAPHVMTSSTVEVSKSTFLTSDMISAHPFTNLTTLPSATMSTILTRTIPTPTLGGITTGFPTSLPMSINVTDDIVYISTHPEASSRTTITANPRTVSHPSSFSRKTMSPSTTDHTLSVGAMPLPSSTITSSWNRIPTASSPSTLIIPKPTLDSLLNIMTTTSTVPGASFPLISTGVTYPFTATVSSPISSFFETTWLDSTPSFLSTEASTSPTATKSTEPGNCKADETASKYKGTYKWLLTNPTETAQTRCIKNEDGNATRFCSISINTGKSQWEKPKFKQCKLLQELPDKIVDLANITISDENAEDVAEHILNLINESPALGKEETKIIVSKISDISQCDEISMNLTHVMLQIINVVLEKQNNSASDLHEISNEILRIIERTGHKMEFSGQIANLTVAGLALAVLRGDHTFDGMAFSIHSYEEGTDPESHLPTMAPSHHFGSRHFTQASVEELQFSLYRRC

SEQ ID NO: 36735 - protein, 241 aa, Homo sapiens
MNLEFEKDMIFVFWNGHSRFHKIDEENEANLLAVLTETLDSLPVDEDGLPSFDALTDGDVTTDNEASPSSMPDGTPPPQEAEEPSLTENSWSNKAKSICQQQKPQRRPCSELLKYLTTNDDPPHTKPTENRNSSRDKCTSKKKSHTQSQSQHLQVCFYKCAISSSDPKGSPFENKTIERTLSVELSGTAEPVHHWTHRRCSSLMFYRCFWDSCDNIKGNKCIVTNAKEMQKPQDGGLAFGK

SEQ ID NO: 36736 - protein, 176 aa, Homo sapiens
MTLIDHEFKGVKLQTFPVSVTAHEGSVDPKRLGAEEQGAALIGEAPAAQEPTVGVGGSGMAGCRSGALPRGKAAKARREIERSAEHFNRICLKLTETLFEASTLGSQQEACPSVPLETGLQTAHPKEPFTCPTEQGLGGSQPVKVQTGSTAALVPGNRFAKQRTNCRPTKSRINQL

SEQ ID NO: 36737 - protein, 165 aa, Homo sapiens
  misc_feature (1)...(165): Xaa = X or * as defined in Table 2
HSPRRSAASLLSQRDHEPHQKEETPNTSEHQKEKTPDTPPLRTVTLTVRVHGFILEVSETKNPPIPDTKLRGERLQGFGLAGFRSEGCRPSPXVLQLIKAVWTQRPLGGRWDWAPWSRRWCSSGRLRPHRNQWSGWEAQAWGLQVPEPCPAGRQLRPGEKSSTAP

SEQ ID NO: 36738 - protein, 216 aa, Homo sapiens
  DOMAIN (128)..(171): kw TRANSCRIPTASE REVERSE II ORF2 domain identified by eMATRIX, accession number DM01354T, p-value=7.273e-13, raw score of 9.48
MRGLAPRPAAAEGVLGPPISAGPLALRSISRQALAAFPRGRVRDLQPAMPEPPHDSPPLPIDHPRAEERGRTVPDWQAAPPAAPVRDPLDEASWAPESASLLSHRDHEPHQKEETSNTSEHKEQTPDTTPLRTVTLTARVHGFILEVTLEVLARAIREEKETKGIQISKEEFKLSLFDADMIAYLENPKDSSRKLQELIKEFSKVSRYKINVHKSV

SEQ ID NO: 36739 - protein, 329 aa, Homo sapiens
  DOMAIN (98)..(121): FORMIN SIGNATURE domain identified by eMATRIX, accession number PR00828E, p-value=3.747e-11, raw score of 10.72
MVFYTDNFIPIVSWETQTMYRNPSSSFSLCYNAVSVHRQEEGLISTELEGPSNDLDELTQVDVVQYKEHCFIQDGKLLLSLVSFCYYQDFGWMLLSEKSNFYSLFKAIFNVDDSVVDLETLAALYENLFKTVLSCKSVIDPTSLLSYGAGTVSGPAAPGSLHPRACQARDDELLEPLTGGYYVVIRKSRNKYIVLEHKEGPCGWSLVGRRGEWCERRLERQKWLNQFVRHEYEVGFDSKRNEDEITECCDLCGRWRQRKTKSGSRETCLIWARTHQHPLSKVQTARPLRNLSTTSHLLRTWFLEAALERRLYFDQQEIMGGMRYEEIIQ

SEQ ID NO: 36740 - protein, 308 aa, Homo sapiens
  DOMAIN (70)..(90): FORMIN SIGNATURE domain identified by eMATRIX, accession number PR00828F, p-value=7.313e-20, raw score of 8.56
MVGDEFGSVIEARQGMSLTTRPRSLDFAECLKEDIGAIFNVDDSVVDLETLAALYENRAQEDELVKIRKYYETSKEEELKLLDKPEHQLNHNTVIPVTCCMQQDDPAAGKSSAEICAVGYSQPSQSRDEASVENEAEMELSDQGYQSALETSKVLRLALEFHALSLGSSRNGSPTPGPQTGTSPWPVRNQATQQEMGPSSCRKLEGPSGLPLILDYVLYVRSLTWDSQAKLKVLTGLYSLLEALGRICSLPFPLLEASHIPWLTAHFLHLQSQRHYISLIILTSLYLPLIIARESPQRLKTDFKDSCD

SEQ ID NO: 36741 - protein, 145 aa, Homo sapiens
MSLTSELSALVYLVYYCTELGTCGKTNGDPDCEASAPALTLSCLEELSQETKARMEEEAYSKGFQEGLKKTKELQDLKEEEEEQKSESPEEPEEMKLWVAIPMKRPKTKRVDSKPWSEFLTRTGTGRTHGIEGKLSSVAKASSPS

SEQ ID NO: 36742 - protein, 49 aa, Homo sapiens
  DOMAIN (21)..(41): Elongation factor 1 beta/beta'/delta chain proteins domain identified by eMATRIX, accession number BL00824B, p-value=6.595e- 09, raw score of 9.21
MLEGDQGDEGHEGDEGDEEDKEDEDEDEEKEEEEEEEEEESILCLILNC

SEQ ID NO: 36743 - protein, 369 aa, Homo sapiens
  DOMAIN (42)..(100): Trypsin Inhibitor like cysteine rich domain identified by PFam, accession name TIL, E-value=0.02, PFam score of 16.8
MWINYTYFWNYECDALSAYVALCNKFDICIQWRTPDYCSLSCPEGKEYQPCVRPCEARTCLNQWFYGHTSCLNLREDCVCKVGTILHRPHSAQCIPEKECACTDSEDQPRTAGEIWNGGIDECTLYKCLENGSIIPIEPDCDEEPTPVCEREAEVVMGIIDKWTCCSKEVCGCDTTLCETSIPTCTNSQKLIVGHSPLSCCPQYKCECDPLKCPSISTPECREDQFMIQVRQEEPCCFSPFCVCESCTKPVPLCHDGEFLTVDLNSTHFCCPQYYCGKREERICQKVIIKSVIRKQDCMSQSPINVASCDGKCPSATIYNINIESHLRFCKCCRENGVRNLSVPLYCSGNGTEIMYTLQEPIDCTCQWN

SEQ ID NO: 36744 - protein, 303 aa, Homo sapiens
  DOMAIN (33)..(132): Fes/CIP4 homology domain identified by PFam, accession name FCH, E-value=1.6e-18, PFam score of 75.0
PIESKFRNIWIMSTPSRFKKDKEIIAEYESQVKEIRAQLVEQQKCLEQQTEMRVQLLQDLQDFFRKKAEIETEYSRNLEKLAERFMAKTRSTKDHQQYKKDQNLLSPVNCWYLLLNQVRRESKDHATLSDIYLNNVIMRFMQISEDSTRMFKKSKEIAFQLHEDLMKVLNELYTVMKTYHMYHAESISAESKLKEAEKQEEKQIGRSGDPVFHIRLEERHQRRSSVKKIEKMKEKVIKKVENQHFLMVQLNTCSQDDYFEGKLSGAWGKPPGPPSAEPQEPNTATVPPSRSQPLFGQAVSLAA

SEQ ID NO: 36745 - protein, 53 aa, Homo sapiens
  DOMAIN (1)..(53): Ribosomal protein L31e domain identified by PFam, accession name Ribosomal_L31e, E-value=1e-12, PFam score of 55.7
MHKRIHGVGFKKRAPRTLKEIQKFAMKEMGTPDVRTDTRLNKAVWAKGIRNVP

SEQ ID NO: 36746 - protein, 257 aa, Homo sapiens
SNEGILSIWFEVSSGILVLMVPQMLLTEYLDMKNTRTASEPSAQLSYASTGREFAAFFAKKKPQRPKNSLFKFESSSHAISMSAYLREQRRELYSRSGELQGEEARLPRVKGNDDNRTYIIAGGFQLERKPLFLSTWLSKEQGSRMPRWNQGYASKHKDSRRKRLYRESTSYEKPGKVKAYKCAVPRYLNAYHQSAPYLHIRRVYPEVNDCSLTVSNRQYIKRRHGWLIQTGSPQILQPRKLDLGPNDDSLALADLP

SEQ ID NO: 36747 - protein, 416 aa, Homo sapiens
  DOMAIN (61)..(106): kw TRANSCRIPTASE REVERSE II ORF2 domain identified by eMATRIX, accession number DM01354N, p-value=9.878e-26, raw score of 13.17
  misc_feature (1)...(416): Xaa = X or * as defined in Table 2
MAQELRDTCTSFSSRFDQVEERVMVIEDQINEMKQEEKFREKRVKRNKQSLQEIWDYVKRPNLRLIGVPEKNLEETDKFLDTYTLPRLNQEEVESLNRPITDSEIEAIINSLPTKKSSGPDGFTAEFYQRYKEELPRQRHNKKREFXTNIPDEHRCKSPQXNTGKPNPAAHQKAYPPXSSGLHPWDARLVQHTQINKRNPAYKQNQGQKPHDYLSRCRKGLXQNSAALHAKNSQXIRYXWDISQNNKSYLXQTHSQYHTEWAKAGSIFFENWHKRGMPSLTTPIQHSVGSSGQGNQAGERNKGYSIRKRGSQIVPVYRXHNCISRKPHHLSPKSPXAGKQSSAKSQDDKINVQKSQAFLHTNNRQTESQIMSEAPIHNCYKENKISRNPTYKGCEGPLQGELQTTAQRSKKGHKQI

SEQ ID NO: 36748 - protein, 91 aa, Homo sapiens
  misc_feature (1)...(91): Xaa = X or * as defined in Table 2
KSECLIYTKGSQRLASNGTKLDGEXLXXVDRIRLQKIGNDKLLPAKGGCSNPSQRSXKPRKKIRQMANXNKQHRGDLKXPDGAENHGTRTT

SEQ ID NO: 36749 - protein, 210 aa, Homo sapiens
  misc_feature (1)...(210): Xaa = X or * as defined in Table 2
VDRSRLQKVSNNKLLXAKGECSNPLQGSXKPXKKIRRMANXNKHCREDLKXPDGVENNGTRTSXFMHKLQXPIXSSGRKGISDXRXNXXNKIHQGXNEGKSVKGSQRERSSYPQRKAHQTNSGSLSRNPTSQKKVGANIQHSXRKEFSTQNFISSQTKLHKXRRNKIFYRQADAERFCHHQACVTRAPEGSTKHGKKQPVPAPAKTGQIV

SEQ ID NO: 36750 - protein, 1198 aa, Homo sapiens
  DOMAIN (1112)..(1157): kw TRANSCRIPTASE REVERSE II ORF2 domain identified by eMATRIX, accession number DM01354N, p-value=9.878e-26, raw score of 13.17
  misc_feature (1)...(1198): Xaa = X or * as defined in Table 2
MRAFVVLMDVSKLPSERGGPGLRSNQQHMRMFLTSVDRGSVSLLADAVAAATPQGTKSQPRGPSNLAADLRVAEESSGMENLFLKMSFDSIRPAQDGQCTPEISMVTPSPGWSVHTGDLDGHPLPRMVSAHRRSRWSPPPQDGQCTPEISMVIPSPGCSVHTGDLDGHPLPRMLSAHRRSRWSPPPQDAQCTPEISMVTPSPGWSVHTGDLDGHPLPRMVSAHRRSRWSPPPQDAQCTPEISMVTPSPGCSVHTGDLDGHPLPRMVSAHRRSRWSPPPQDGQCTPEISMVTPSPGWSVHTGDLDGHPLPRMLSAHRRSRWSPPPQDAQCTVEISMVTPSPGWSVHTGDLDRHPLPRMLSAHRRSRWSPPPQDAQCTPEMWGPYQDEMMESQLLKSRAWCVPKQGKASAVTVNADSSASRGKGVFPAESRTHLPLNRGQRNSESYLGTQAQGIRNLIKARKLSEPPSWVLHKDGEKQSRKAENSKNQSTSSPPKESASRSNGTKLDGEXLXQVDRSTLQKIGNNKLLQAKGGCSNPSQRSYKPXKKIRRMANXNKQHREDLKXPDGAENYGTRTTXHMHKLQXPIRSSGRRGISDXKSNEXNEARREVXRKKSKKKQTKPPRNMGLCEKTKSTSDWCTXKKSRRNGXIPSPGCSVHTGDLDGHPLPRMLSAHRRSRWSPPPQDAQCTPEISMVTPSPGWSVHTGDLDGHPLPRMVSAHRRSRWSPPPQDAQCTPEISMVTPSPGCSVHTGDLDGHPLPRMVSAHRRSRWSPPPQDGQCTPEISMVTPSPGWSVHTGDLDGHPLPRMLSAHRRSRWSPPPQDAQCTVEISMVTPSPGWSVHTGDLDRHPLPRMLSAHRRSRWSPPPQDAQCTPEMWGPYQDEMMESQLLKSRAWCVPKQGKASAVTVNADSSASRGKGVFPAESRTHLPLNRGQRNSESYLGTQAQGIRNLIKARKLSEPPSWVLHKDGEKQSRKAENSKNQSTSSPPKECSFSPAMEQSWMENDFDKLTEVHFRRSVITNFSKLKEDVRTHRKEATNLEKRLDEWLTRINSIEKTLNDLMELKTMARELRDTCTSFSSQFDQVEEGVSVIENQMNEMKQEEKFREKRVKRNKQSLQEIWDYVKRPNLRLIGVPEKNLEETDKFLDTYTLPRLNQEEVESLNRPITDSEIEAIINSLPTKKSSGPDGFTAEFYQRYKEEL

SEQ ID NO: 36751 - protein, 216 aa, Homo sapiens
MARELRDSCTSFSSRFDQVEERVSQLYFSSSGKLCSSLPPHLFSCVERAFHQLFREQRPQCFILRLKDEKDAETGALTHSRHKDEKGVKVGAPTHSRHKDEKGTEAGASTHSKLNDEKGSETRALIHSRHKDEKGTEAGAPTHSKLKDEKGAETGALTHSRHEDEKGSETGALTHSRHKDEKGAETGALTHSRHEGDKDAETGALIHSKLKGRERR

SEQ ID NO: 36752 - protein, 822 aa, Homo sapiens
  DOMAIN (639)..(684): kw TRANSCRIPTASE REVERSE II ORF2 domain identified by eMATRIX, accession number DM01354N, p-value=1.000e-40, raw score of 13.17
  misc_feature (1)...(822): Xaa = X or * as defined in Table 2
MLVSFVSLGSLCLQPGSQTLLEKNRTVKPHVSFTLLPALSHVSEKNEAESMNSLIPPPPNLHTPAQAPFPLPTKEQDRSSSPATEQSWTENDFDELTEVGFRRSVITNSSKLKEDVRTHCKEAKNLEKRLHESANXNQQCREDLKXPEAEIHGTRTSXHMHKLQXPIXSSGRKGVSDXGSNQXNKXWGEWNQVGKHSAGYYPGELPQPSKAGQHSNSGNTENTTKILLEKSNPKTHNCQIHQGXNEGKSVKGSQRERTREARANKFKSXQKARYNXDQCRTERDRNTENPSKNXXIQEPVFXKDQQNXXNASKTNKEEKREESNRRNKKXXKNRTVKPHVSFTLLPALSHVSEKNEAESMNSLIPPPPNLHTPAQAPFPLPTKEQDRSSSPATEQSWTENDFDELTEVGFRRSVITNSSKLKEDVRTHCKEAKNLEKRLHEWLTRINSVEKTLNDLKLKSMARELHDTCTSFNSRFDQVEERVSAIEDQTNEINNGENGTKLENTLQDIIQENFPNLARQANIQIQEIRRTPQRYSSRKATPRHIIVRFTKVEMKEKVLRAAREKGLERQEQTNSKASRRQDITKISAELKEIETQKTLQKINEFRSRFFKKINKIDKTLARLIKKKREKNQTDAIKNDKRDITTDPTEIQTTIREYYKHLYANKLENLEEMDKFLDTYTLPRLNQEEAESLNRTITGSEIEAIINSLPTKKSPGPDGFTAEFYQRYKEELIPFLLKLLQSIEKERILLNSLYEANIILIPKTGRDTTKKENFTPISLMNINAKILNKLLANRIQQHIKKLIHHDQVASSLGCKAGSTYANQ

SEQ ID NO: 36753 - protein, 358 aa, Homo sapiens
  DOMAIN (124)..(144): SUBTILISIN SERINE PROTEASE FAMILY (S8) SIGNATURE domain identified by eMATRIX, accession number PR00723A, p-value=9.357e- 18, raw score of 13.37
  DOMAIN (87)..(282): Subtilase family domain identified by PFam, accession name Peptidase_S8, E-value=2.5e-26, PFam score of 98.3
MTMCQCRFSTRNKCTLCSSRDVDNNGKAVHLCEHTPEMPQILYPPQEDNSDKDDPGQGPEVKMALQQEGFDRKKRGYRDINEIDINMNDPLFTKQWYLINTGQADGTPGLDLNVAEAWELGYTGKGVTIGIMDDGIDYLHPDLASNYHSTMAGTKVQKQRLAIHKQMDVAVFRYNFTYKNRPWADLAGGPYFVTFAVGDQRKRTQQEKSASSQRHILTNLRSLLSTGDQGNAGWSCPKPVAQMPHRGISDLQHYVPVNAEASYDFSSNDPYPYPRYTDDWFNSLTRRHLPVGANRQLTKDRSSSTATEQSWMENDFDELTEVGFRSSVITNLSKLKEHILTHCKEAKNLEKKIRQMAN

SEQ ID NO: 36754 - protein, 125 aa, Homo sapiens
SVFKRALWDFPHYEGPPVGYRASPVRYGAPPLGYGTPPLGYGAPPLGYGAPPAGNEGPPAGYRASPAGSGARPQESREKVVPRSLEMPGTIGPQRGSHSPGLESSQVWASQRAAALLFFSLPTTC

SEQ ID NO: 36755 - protein, 79 aa, Homo sapiens
MGSLRRSNETKSNAKCGLSKHVNELYVDDPDKDSGGKIDVSLNISLPNLHCECSRYSKKYLLSKFGLLTDANTVLLTAR

SEQ ID NO: 36756 - protein, 284 aa, Homo sapiens
IPMKTYIEVEKPKIHVQSSSDSSDEPAEKRERKDKVSKETKKRRDFYGKYRNPQREKEMMQSYIRVDATESEPKSFIFMSEDALTNPQKLMVLIHGSGVVRAGQWARRLIINEDLDSGTQIPFIKRAVAIWLQGPKTYNTIPKCLRIPGKPSQEVEYYIWGKYSSNTKEREITTFPDKQKLSDFIHTRRVLQEMLKEVREWGNCSLLELTTKAPVFSVMAYPYIPRFSKITGAPISEYFWTSMAVFVESGDRVTNLSATNNAGKAVGPECSSSTMWTLRKTCSK

SEQ ID NO: 36757 - protein, 149 aa, Homo sapiens
  misc_feature (1)...(149): Xaa = X or * as defined in Table 2
SAIVCGSPLRLRMQAVSSRINSAHSRGAIYSQASSSAACPSVSIAFLRRXIEANVSWIRTLLSTLCTPKCGPGFKHRIVLCKSSDLSKTFPAAQCPEESKPPVRIRCSLGRCPPPRWVTGDWGQCDSRDPRPGRRRRDFCRNGRAGAGH

SEQ ID NO: 36758 - protein, 72 aa, Homo sapiens
  misc_feature (1)...(72): Xaa = X or * as defined in Table 2
AECTRCAIPKHSCYPVLLIVVSPXKKQNCSLGELSCWRRESCRSSWSNKALPSLTRCLRGFVCGLSCYKGSS

SEQ ID NO: 36759 - protein, 87 aa, Homo sapiens
TAVLAARISNQWILSCWSAVGCTPKCGPGFKHRIVLCKSSDLSKTFPAAQCPEESKPPVRIRCSLGRCPPPRWVTGDWGQLSPTREK

SEQ ID NO: 36760 - protein, 508 aa, Homo sapiens
  DOMAIN (404)..(454): Thrombospondin type 1 domain identified by PFam, accession name tsp_1, E-value=0.017, PFam score of 14.0
MESLDTETSTWGECHRKIRGMVPQVKELAEEKIPTQKKTEHNVPLLIVAVFSPMFPFSLSCPTRVVLRVPYPLGYLCFVDNPGTLVRCRGIRLAPELAVGVSLLIPIRSIPGISSLTAGWYLNPAAFFVLESFQTGKDTSELNQNQNQSIQKSKPGQKQNQSIKQSKSSQKQKPKCRYRQTVGDQATLPLKWSGQVPKTSLTKFQMSRLQVPVPSRCSATALIVHGGLPRAPLARRSTRPIAYPGVLSGSASAKLAGVPHRDAPQGRPKPPKGLPRPSDCLLITSLPGQGTKKCSRTSHGQNPSDTELKKEGLYSARSFSKTHVSNSRAPISFIFISLQSSVVPVGDLEMFLCTPKCGPGFKHRIVLCKSSDLSKTFPAAQCPEESKPPVRIRCSLGRCPPPRWVTGDWGQCSAQCGLGQQMRTVQCLSYTGQASSDCLETVRPPSMQQCESKCDSTPISNTEGPSSQYGYGKHIFRAFSRNPPTVTILALTMPRTIKIGPDQTLTTN

SEQ ID NO: 36761 - protein, 2912 aa, Homo sapiens
  DOMAIN (152)..(178): Integrins beta chain cysteine-rich domain proteins domain identified by eMATRIX, accession number BL00243H, p-value=6.864e- 12, raw score of 17.53
  DOMAIN (115)..(2733): EGF-like domain identified by PFam, accession name EGF, E- value=2.6e-276, PFam score of 931.3
MGRRRRLCLQLYFLWLGCVVLWAQGTAGQPQPPPPKPPRPQPPPQQVRSATAGSEGGFLAPEYREEGAAVASRVRRRGQQDVLRGPNVCGSRFHSYCCPGWKTLPGGNQCIVPICRNSCGDGFCSRPNMCTCSSGQISSTCGSKSIQQCSVRCMNGGTCADDHCQCQKGYIGTYCGQPVCENGCQNGGRCIGPNRWACVYGFTGPQSERDYRTGPCFTQVNNQMCQGQLTGIVCTKTLCCATTGRAWGHPCEMCPAQPQPCRRGFIPNIRTGACQDVDECQAIPGICQGGNCINTVGSFECRCPAGHKQSETTQKCEDIDECSIIPGICETGECSNTVGSYFCVCPRGYVTSTDGSRCIDQRTGMCFSGLVNGRCAQELPGRMTKMQCCCEPGRCWGIGTIPEACPVRGSEEYRRLCMDGLPMGGIPGSAGSRPGGTGGNGFAPSGNGNGYGPGGTGFIPIPGGNGFSPGVGGAGVGAGGQGPIITGLTILNQTIDICKHHANLCLNGRCIPTVSSYRCECNMGYKQDANGDCIDVDECTSNPCTNGDCVNTPGSYYCKCHAGFQRTPTKQACIDIDECIQNGVLCKNGRCVNSDGSFQCICNAGFELTTDGKNCVDHDECTTTNMCLNGMCINEDGSFKCICKPGFVLAPNGRYCTDVDECQTPGICMNGHCINSEGSFRCDCPPGLAVGMDGRVCVDTHMRSTCYGGIKKGVCVRPFPGAVTKSECCCANPDYGFGEPCQPCPAKNSAEFHGLCSSGVGITVDGRDINECALDPDICANGICENLRGSYRCNCNSGYEPDASGRNCIDIDECLVNRLLCDNGLCRNTPGSYSCTCPPGYVFRTETETCEDINECESNPCVNGACRNNLGSFNCECSPGSKLSSTGLICIDSLKGTCWLNIQDSRCEVNINGATLKSECCATLGAAWGSPCERCELDTACPRGLARIKGVTCEDVNECEVFPGVCPNGRCVNSKGSFHCECPEGLTLDGTGRVCLDIRMEQCYLKWDEDECIHPVPGKFRMDACCCAVGAAWGTECEECPKPGTKEYETLCPRGAGFANRGDVLTGRPFYKDINECKAFPGMCTYGKCRNTIGSFKCRCNSGFALDMEERNCTDIDECRISPDLCGSGICVNTPGSFECECFEGYESGFMMMKNCMDIDGCERNPLLCRGGTCVNTEGSFQCDCPLGHELSPSREDCVDINECSLSDNLCRNGKCVNMIGTYQCSCNPGYQATPDRQGCTDIDECMIMNGGCDTQCTNSEGSYECSCSEGYALMPDGRSCADIDECENNPDICDGGQCTNIPGEYRCLCYDGFMASMDMKTCIDVNECDLNSNICMFGECENTKGSFICHCQLGYSVKKGTTGCTDVDECEIGAHNCDMHASCLNIPGSFKCSCREGWIGNGIKCIDLDECSNGTHQCSINAQCVNTPGSYRCACSEGFTGDGFTCSDVDECAENINLCENGQCLNVPGAYRCECEMGFTPASDSRSCQDIDECSFQNICVSGTCNNLPGMFHCICDDGYELDRTGGNCTDIDECADPINCVNGLCVNTPGRYECNCPPDFQLNPTGVGCVDNRVGNCYLKFGPRGDGSLSCNTEIGVGVSRSSCCCSLGKAWGNPCETCPPVNSTEYYTLCPGGEGFRPNPITIILEDIDECQELPGLCQGGNCINTFGSFQCECPQGYYLSEDTRICEDIDECFAHPGVCGPGTCYNTLGNYTCICPPEYMQVNGGHNCMDMRKSFCYRSYNGTTCENELPFNVTKRMCCCTYNVGKAGNKPCEPCPTPGTADFKTICGNIPGFTFDIHTGKAVDIDECKEIPGICANGVCINQIGSFRCECPTGFSYNDLLLVCEDIDECSNGDNLCQRNADCINSPGSYRCECAAGFKLSPNGACVDRNECLEIPNVCSHGLCVDLQGSYQCICHNGFKASQDQTMCMDVDECERHPCGNGTCKNTVGSYNCLCYPGFELTHNNDCLDIDECSSFFGQVCRNGRCFNEIGSFKCLCNEGYELTPDGKNCIDTNECVALPGSCSPGTCQNLEGSFRCICPPGYEVKSENCIDINECDEDPNICLFGSCTNTPGGFQCLCPPGFVLSDNGRRCFDTRQSFCFTNFENGKCSVPKAFNTTKAKCCCSKMPGEGWGDPCELCPKDDEVAFQDLCPYGHGTVPSLHDTREDVNECLESPGICSNGQCINTDGSFRCECPMGYNLDYTGVRCVDTDECSIGNPCGNGTCTNVIGSFECNCNEGFEPGPMMNCEDINECAQNPLLCALRCMNTFGSYECTCPIGYALREDQKMCKDLDECAEGLHDCESRGMMCKNLIGTFMCICPPGMARRPDGEGCVDENECRTKPGICENGRCVNIIGSYRCECNEGFQSSSSGTECLDNRQGLCFAEVLQTICQMASSSRNLVTKSECCCDGGRGWGHQCELCPLPGTAQYKKICPHGPGYTTDGRDIDECKVMPNLCTNGQCINTMGSFRCFCKVGYTTDISGTSCIDLDECSQSPKPCNYICKNTEGSYQCSCPRGYVLQEDGKTCKDLDECQTKQHNCQFLCVNTLGGFTCKCPPGFTQHHTACIDNNECGSQPLLCGGKGICQNTPGSFSCECQRGFSLDATGLNCEDVDECDGNHRCQHGCQNILGGYRCGCPQGYIQHYQWNQCVDENECSNPNACGSASCYNTLGSYKCACPSGFSFDQFSSACHDVNECSSSKNPCNYGCSNTEGGYLCGCPPGYYRVGQGHCVSGMGFNKGQYLSLDTEVDEENALSPEACYECKINGYPKKDSRQKRSIHEPDPTAVEQISLESVDMDSPVNMKFNLSHLGSKEHILELRPAIQPLNNHIRYVISQGNDDSVFRIHQRNGLSYLHTAKKKLMPGTYTLEITSIPLYKKKELKKLEESNEDDYLLGELGEALRMRLQIQLY

SEQ ID NO: 36762 - protein, 214 aa, Homo sapiens
  DOMAIN (33)..(59): Integrins beta chain cysteine-rich domain proteins domain identified by eMATRIX, accession number BL00243H, p-value=6.217e- 11, raw score of 17.53
  DOMAIN (72)..(114): TB domain identified by PFam, accession name TB, E-value=2.1e -16, PFam score of 67.9
MALLPVTSGNSAPRKCRAATGPRAQAVQQCSVRCMNGGTCADDHCQCQKRYIGTYCGQHYRTGPCFTQVNNQMCQGQLTGIVCTKTLCCATIGRAWGHPCEMCPAQPQPCRRGFIPNIRTGACQGAQAQGDPNSVSEPLAGVIGDPAGRPHPLRKDGSGLDLKRHSGLRLPQPVCWAVRTSLGTKPSNLPGSSRGKAQPGAIEMDAALPRAQRA

SEQ ID NO: 36763 - protein, 183 aa, Homo sapiens
MKTASKSYASNLRYPGSLTRTDQAVGATHGVKLQTFTVSVTALKGGTAGVVHSFQWVRGLAGFRSEAADLHHSGAQLASPSGSHARAVGGAAHQTHTTCPHSALGQSMGLGAVEQGVAPVVAGAHSGGHSAVDITKVARRHRMSPFPLTSMDKAFITVLEMTPVLGTEIINYRVNIFPIRSPI

SEQ ID NO: 36764 - protein, 142 aa, Homo sapiens
  DOMAIN (102)..(127): RHODOPSIN-LIKE GPCR SUPERFAMILY SIGNATURE domain identified by eMATRIX, accession number PR00237A, p-value=3.000e-10, raw score of 11.48
  DOMAIN (117)..(138): 7 transmembrane receptor (rhodopsin family) domain identified by PFam, accession name 7tm_1, E-value=0.00036, PFam score of 15.4
SRYVQKELNSKSVNHVIIVRFLGLSQLRNIADGGWSSSVKMFLVNCLYPKYTHSIKGWFLFFIFSNPLFFSRCPSHTEPQNLTGVSEFLLLGLSEDPELQPVLAWLSLSIYLVTVLGNLLIILAVSSDSHLHTPIYFFQFSC

SEQ ID NO: 36765 - protein, 974 aa, Homo sapiens
  DOMAIN (261)..(278): G-protein coupled receptors proteins domain identified by eMATRIX, accession number BL00237D, p-value=1.000e-09, raw score of 11.23
  DOMAIN (203)..(269): 7 transmembrane receptor (rhodopsin family) domain identified by PFam, accession name 7tm_1, E-value=4.5e-10, PFam score of 34.2
MNTSQLLEIANQVFVNRAAVSLEENRKENGHQARRNTDLVVSCSNQRGQESLEKLLGRYFYISHLSALAKTMRQRFVTCRHHNARQGPAVPPGIQAYAAAPIEDLQAIRNNITAGVYTPCDIGGNIILCPLAYYQRYQTGVVYTPCDIGSIIILSTSGCPSHTEPRNLTGVSEFLLLGLSEDPELQPVLPGLSLSMYLLTVLRNLLIILAVSSDSHLHTPMYFFLSNPSWADIAFTSATVPKMIVDMQSGVVVSVMYTVVTPMLNPFIYCLRNRDIQSALWRLRSRTVESHDLFHPFSCVGIHCQVSELDAVMSLDTASGAFRWMAFGVEVAAPAYQPSCSCPGSQSSGEGARKGWSSRSLSETVSAVYSGLTQERRCQPQSPTSTVGSIIMNGSNMANTSPSVKSKEDQGLSGHDEKENPFAEYMWMENEEDFNRQVEEELQEQDFLDRCFQEMLDEEDQDWFIPSRDLPQAMGQLQQQLNGLSVSEGHDSEDILVHGRRSLSPQLRGGLAEHASQPTRPRAVRTRNLTRDCQQLPGVYRQAGSRRTGGAAADRSRSTWRRHQKEDSLRDAAIPGSYRRPAPRMRTRTGSQLAAREVTGSGAVPRQLEGRRCQAGRDANGGTSSDGSSSMAAIYGGVEGGGTRSEVLLVSEDGKILAEADGLSTNHWLIGTDKCVERINEMVNRAKRKAGVDPLVPLRSLGLSLSGGDQEDAGRILIEELRDRFPYLSESYLITTDAAGSIATATPDGGVVLISGTGSNCRLINPDGSESGCGGWGHMMGDEGSAYWIAHQAVKIVFDSIDNLEAAPHDIGYVKQAMFHYFQVPDRLGILTHLYRDFDKCRFAGFCRKIAEGAQQGDPLSRYIFRKAGEMLGRHIVAVLPEIDPVLFQGKIGLPILCVGSVWKSWELLKEGFLLALTQGREIQAQNFFSSFTLMKLRHSSALGGASLGARHIGHLLPMDYSANAIAFYSYTFS

SEQ ID NO: 36766 - protein, 380 aa, Homo sapiens
  DOMAIN (288)..(304): OLFACTORY RECEPTOR SIGNATURE domain identified by eMATRIX, accession number PR00245C, p-value=6.806e-17, raw score of 7.84
  DOMAIN (92)..(343): 7 transmembrane receptor (rhodopsin family) domain identified by PFam, accession name 7tm_1, E-value=2.6e-19, PFam score of 63.5
  misc_feature (1)...(380): Xaa = X or * as defined in Table 2
FLDFDCPYGSAHITGLRFWLPWYRKRQRYWGSHGNCMPPPSLRVPERCPSHTEPRNLTGAXELLLLGLSEDPELQPILAGLSLSMYLVTVLRNLLISLAVSSDSHLHTPMCFFLSNLCWADIGFTSAMVPKMIVDMQSHSRVISYAGCLTQMSLFAIFGGMEENMLLSVMAYDWFVAICHPLHYPVIMNPHLGVFLDLGAFFLSLLDSQLHSWIVLQFTFFKNVEISNFVXDPSQLLNLACSDSVINSIFIYLDSIMFGFLPISGILWSYANNVPSILRISSSDRKSKAFSTCRSHLAVVCLFYGTGIGVYLTSAVAPPLRNGVVASVTYAVVTPMLNPFIYSQRNRDIQSALRRLRSRTVESHDLLHPFSCVGKKGQAH

SEQ ID NO: 36767 - protein, 511 aa, Homo sapiens
  DOMAIN (203)..(251): Intermediate filaments proteins domain identified by eMATRIX, accession number BL00226B, p-value=3.000e-26, raw score of 23.86
  DOMAIN (99)..(441): Intermediate filament proteins domain identified by PFam, accession name filament, E-value=5.5e-122, PFam score of 418.7
PGFAPLSGKGLPGCAATMSFRLSGGSRRICSRTGSGRLSGGGTGFVAGNVCVGSGARSSFSCTLEGISSGGSFCNSGGGLGSGACAGFLGNEHSLLSGNEKVTMQNLNDRLASYLDHVHALEEANADLEQKIKGWYEKCEPGSSREHDHDYSRYFSVIEDLKRQIISATICNASIVLQNDNARLTADDFRLKYENELALHHSVEADTSGLRRVLDELTLCTTDLEIQCETLSEELTYLKKSHEEEMEVLQYTAGGNVNVEMNATPGVDLTVLLNNMRAEYEDLAEQNRKDAEAWFNERVGLWQITKGLLRRQSGQSLTLSTITLQSATLQQQISDHEGAATAARNELTELKRNLQTLEIELQSLMAVKHSYECSLAETEGNYCNQLQQIQDQIGVMEEQLQQIRTETEGQKLEYEQLLDVKIFLEKEIDIYCNLLDGEERDTEEATPTHTPGNGPSSTDLEMDSHPSASSMDQGSTDSPVNPETTQNPQLLQPLVTDLSTIDPTVDSAIAM

SEQ ID NO: 36768 - protein, 211 aa, Homo sapiens
  DOMAIN (31)..(67): Synapsins proteins domain identified by eMATRIX, accession number BL00415Q, p-value=9.392e-09, raw score of 2.23
MVVTPVIAATWEAEAGGCLIPEFENAPRAPPAGAHTQVQGAGTWAHTWPHTCAEPVAGPPGAGMACPQLPPLLLLVLVVLLKAGVNYNTPFTVPNPDPALEPHFPQPRNGALASTDQTLEPPGPAPRGGRGETPNKGTGGSLCQSCHHPPVDVQAVLNKCFEADEAAGSGCVGSSRGGFLSSKTKSPSETPKLLPTSHPCFFLMMMFDCLF

SEQ ID NO: 36769 - protein, 273 aa, Homo sapiens
EVIDQLLGVVLGAARVLHQRLIDTQHIPAQIPWRVVTIGKHTSEEVRGRGLQAGAGPPHLLHLQLLHPYPLILIIKAPKEEAVEAHLRKQRGLLPRVAEGVNVPGHTGSPIIAKCVLQKAQPKCHLVHDGTVVGGCLIVHHPATIGELQAPLAHKVSHDFLCGICLLVPPTGEEGNLHVNEATGGIFQQGRDDRVQDVLHTGVLDVILDSIKVLVHGFEPAHVIMCVRQQVHVQHVRLHCGACLVSPGPSTGSRQQQKEKAERRERWPQGAGH

SEQ ID NO: 36770 - protein, 377 aa, Homo sapiens
  DOMAIN (70)..(110): Putative membrane protein domain identified by eMATRIX, accession number PF01062A, p-value=2.394e-16, raw score of 16.52
  DOMAIN (51)..(280): Putative membrane protein domain identified by PFam, accession name Worm_family_8, E-value=0.00039, PFam score of -217.7
QLRQGSGLKGWRAGTWVECLCSVIPAPLHPHPQPPPGPPTLPWPHLPGATMTVTYTARVANARFGGFSQLLLLWRGSIYKLLWRELLCFLGFYMALSAAYRAGLQLCAAEGQKRYFEKLVIYCDHMPASSLSPSCLLMLLSEEKQSLAQENAGLRERMGRPEGEGTPGLTAKKLLLLQSQLEQLQEENFRALVRPRPQALILQAEIIHLVRKFWTPNSSGPEAKVIYDIWFAMGTSSNTPPSPAGLEYEVFIKNHLNRPCLDRKQPGGFRLGPYAVFHSHHYGSWYVRRYYRTNHTVMTMGSDFNMRMPTCGSRTLTSSSAGKCAVLDRLLFQSAGPQTLRAPQLQLPEVGVQPAGGAGGPGGPTWDPIGSRDSAPL

SEQ ID NO: 36771 - protein, 192 aa, Homo sapiens
  DOMAIN (47)..(101): Ribosomal protein S4e proteins domain identified by eMATRIX, accession number BL00528B, p-value=1.000e-40, raw score of 24.75
  DOMAIN (57)..(171): Ribosomal family S4e domain identified by PFam, accession name Ribosomal_S4e, E-value=6.9e-52, PFam score of 185.8
MARGPKKHLKQVAAPKHWMLDKLTGVFAPHPSTSPHKLRECLPLIIFIRNRLKYALTGEEVKKICMQRFIKIDGKVRTDITYPAGFMDVISIDKMGENFCLICDTKGIPHLVTHDARTICYPDPLIKVNDTIQIDLETGKITDFIRFDTGNLCMVTGGANLGRIGVITNRERHPGSLDVVHMKDANGNSFAT

SEQ ID NO: 36772 - protein, 227 aa, Homo sapiens
  DOMAIN (56)..(110): Ribosomal protein S4e proteins domain identified by eMATRIX, accession number BL00528B, p-value=1.000e-40, raw score of 24.75
  DOMAIN (68)..(227): Ribosomal family S4e domain identified by PFam, accession name Ribosomal_S4e, E-value=4.2e-07, PFam score of 33.2
  misc_feature (1)...(227): Xaa = X or * as defined in Table 2
QCGGIQRSHGSWSQEASDSVWQLQSMWMLDKLTGVFAPRPSTGPHKLRECLSRIIFLRNRLKYALTGDEVKKICMQRFIKIDGKVRTDITYPVGFMDVISIDKTGREFPVLIYDTKGRAFAVHRITPEEAQVPSCAKVRRDLCGAQKGIPHLVTHDARTIPLPRSPSSKVNDTIQIDLEDWARFTXFSSKFDNWXTCCMGDWEGAXPXGRNWVLIHQQRRRAPWDLF

SEQ ID NO: 36773 - protein, 81 aa, Homo sapiens [sequence omitted]

SEQ ID NO: 36774 - protein, 254 aa, Homo sapiens
SQPADSAVPATSGKVYGTPETELTYPTNIEAAPLAEEEHASSATSITECDKLSSFATSVAEDQSVASLTAPQTEETGKSSLLLDTVTSIPSSRTEATQGLDYVPSAEDKGFKSPPCEDFSVTGESEKRGEIIGKGLSGERAVEEEEEETAHVEMSEKLCSQYGTPVFSAPGHALHPGEPALGEAEERRLSPDDSTVKMASPAPSGPPSGTHTPFHESPVEEKSEPQDFQEADSWGDTQRTTSVGKRKAAEELRC

SEQ ID NO: 36775 - protein, 247 aa, Homo sapiens
MAGPFSRLLSVRPGLRLLALAGAGSLAAGFLLRPEPVRAASERRRLYPPRVLLWETFVMGFGTVQSVEYHQVEEPLKVTPSSREAFEGRDLELQGKAPEKETSLFLSSLTALAEAAEHVSDIQDETIPGYSETEQSISYEEIRDEPEERPAPPRFHTSTYALPGPEGAGPFEASHSADSAVPATSGKVYGTPETELTYHTNIVAAPLAEEEHVSSALSITECDKLSSFATSVAEDQSVASLTAPQTE

SEQ ID NO: 36776 - protein, 1714 aa, Homo sapiens
  DOMAIN (233)..(284): Neuromodulin (GAP-43) proteins domain identified by eMATRIX, accession number BL00412D, p-value=7.848e-10, raw score of 16.54
  misc_feature (1)...(1714): Xaa = X or * as defined in Table 2
XNLPGINGLLQRKVAELEEEQSQGSSSYSDWVKNLISPELGVVFFNVPEKLRLPDASRKAKRSIEEACLTLQHLNRLGIQAEPLYRVVSNTIEPLTLFHKMGVGRLDMYVLNPVKDSKEMQFLMQKWAGNSKAKTGIVLPNGKEAEISVPYLTSITALVVWLPANPTEKIVRVLFPGNAPQNKILEGLEKLRHLDFLRYPVATQKDLASGAVPTNLKPSKIKQRADSKESLKATTKTAVSKLAKREEVVEEGAKEARSELAKELAKTEKKAKESSEKPPEKPAKPERVKTESSEALKAEKRKLIKDKVGKKHLKEKISKLEEKKDKEKKEIKKDRKELQKDEGRKEDKKDARKEEKRKDSSPELRKISKPDLKPFTPEVRKTLYKAKVPGRVKIDRSRAIRGEKELSSEPQTPPAQKGTVPLPTISGHRELVLSSPEDLTQDFEEMKREERALLAEQRDTGLGDKPFPLDTAEEGPPSTAIQGTPPSVPGLGQEEHVMKEKELVPEVPEEQGSKDRGLDSGAETEEEKDTWEEKKQREAERLPDRTEAREESEPEVKEDVIEKAELEEMEEVHPSDEEEEDATKAEGFYQKHMQEPLKVTPRSREAFGGRELGLQGKAPEKETSLFLSSLTTPAGATEHVSYIQDETIPGYSETEQTISDEEIHDEPEERPAPPRFHTSTYDLPGPEGAGPFEASQPADSAVPATSGKVYGTPETELTYPTNIVAAPLAEEEHVSSATSITECDKLSSFATSVAEDQSVASLTAPQTEETGKSSLLLDTVTSIPSSRTEATQGLDYVPSAGTISPTSSLEEDKGFKSPPCEDFSVTGESEKRGEIIGKGLSGERAVEEEEEETANVEMSEKLCSQYGTPVFSAPGHALHPGEPALGEAEERCLSPDDSTVKMASPPPSGPPSATHTPFHQSPVEEKSEPQDFQEADSWGDTKRTPGVGKEDAAEETVKPGPEEGTLEKEEKVPPPRSPQAQEAPVNIDEGLTGCTIQLLPAQDKAIVFEIMEAGEPTGPILGAEALPGGLRTLPQEPGKPQKDEVLRYPDRSLSPEDAESLSVLSVPSPDTANQEPTPKSPCGLTEQYLHKDRWPEVSPEDTQSLSLSEESPSKETSLDVSSKQLSPESLGTLQFGELNLGKEEMGHLMQAEDTSHHTAPMSVPEPHAATASPPTDGTTRYSAQTDITDDSLDRKSPASSFSHSTPSGNGEVLTWGDHQALNEHILTPDSSFSKSPESLPGPALXDIAIKWEDKVPGLKDRTSEQKKEPEPKDEVLQQKDKTLEHKEVVEPKDTAIYQKDEALHVKNEAVKQQDKALEQKGRDLEQKDTALEQKDKALEPKDKDLEEKDKALEQKDKIPEEKDKALEQKDTALEQKDKTLEPKDKDLEQKDRVLEQKEKIPEEKDKALDQKVRSVEHKAPEDTVAEMKDRDLEQTDKAPEQKHQAQEQKDKVSEKKDQALEQKYWALGQKDEALEQNIQALEENHQTQEQESLVQEDKTRKPKMLEEKSPEKVKAMEEKLEALLEKTKALGLEESLVQEGRAREQEEKYWRGQDVVQEWQETSPTREEPAGEQKELAPAWEDTSPEQDNSCPLQLNPARHPVAPLPSLGIELWLWLQDPPPEPVRASYYVVSGNDPANGEPSRAVLDALLEGKAQWGENLQVKVTLIPTHDTEVTREWYQQTHEQQQQLNVLVLASSSTVVMQDESFPACKIEF

SEQ ID NO: 36777 - protein, 2622 aa, Homo sapiens
  DOMAIN (544)..(565): BREAST CANCER TYPE I SUSCEPTIBILITY PROTEIN SIGNATURE domain identified by eMATRIX, accession number PR00493G, p-value=8.100e- 12, raw score of 7.57
MKPRTLTVRVTALKVARLESVPSDVQMCSEFLPSDSAAQLASPSGSRTGAAGGAAYQSCAVLPHSSALWVVDGTRCRGAGGSAHQGGSATQEPTERVEGSGMAGCRSRVLPHWKAANVLGMSVESAPAVEEEKGEELEQKEKEKEEDTSGNTTHSLGAEDTASSQLGFGVLELSQSQDVEENTVPYEVDKEQLQSVTTNSGYTRLSDVDANTAIKHEEQSNEDIPIAEQSSKDIPVTAQPSKDVHVVKEQNPPPARSEDMPFSPKASVAAMEAKEQLSAQELMESGLQIQKSPEPEVLSTQEDLFDQSNKTGVVKGHRKESGELYYSIEKEGQRKWYKRMAVILSLEQGNRLREQYGLGPYEAVTPLTKAADISLVAAAQPLPERSQKVLVPPLGVLSGKRKLITSEEERSPAKRGRKSATVKPGAVGAGEFVSPCESGDNTGEPSALEEQRGPLPLNKTLFLGYAFLLTMATTSDKLASRSKLPDGPTGSSEEEEEFLEIPPFNKQYTESQLRAGAGYILEDFNEAQCNTAYQCLLIADQHCRTRKYFLCLASGIPCVSHVWVHDSCHANQLQNYRNYLLPAGYSLEEQRILDWQPRENPFQNLKVLLVSDQQQNFLELWSEILMTGGAASVKQHHSSAHNKGILSWNIDLSSFDLNQQLRLFITRHLAHFSSEVKAFLFRLHRFQGFWFLLRLSQQISRAEQNLGTYMMMGTIKSRVEGGAPEFTATRSSCTLRFGPDQSSHNAVSHSAGRIVENFLEKPTQLKTATAPPLLAPLSAVPTNNSQPRAAADTAPPSSLLLPHRAKQKHWSSDVVKAKKQLSLQCLVTDQPLFPALAPPSSSSTPLPPPPPAPLPPLSAADSSLKLPAEAGAAASMRGFLLHPRVRTEPKGLACGGQRTLCHQSEILETIILVNPSADSISSEVHHLLSSSSAYKLLILSGQSLEPGGDLILQSGTYSYENFAQVLHNPEISQLLSNRDPGIQAFLTVSCLGEGDWSHLGLSSSQETLHLRLNPEPTLPTMDGVAEFSEYVSETVDVPSPFDLLEPPTSGGFLKLSKPCCYIFPGGRGDSALFAVNGFNILVDGGSDRKSCFWKLVRHLDRIDSVLLTHIGADNLPGINGLLQRKVAELEEEQSQGSSSYSDWVKNLISPELGVVFFNVPEKLRLPDASRKAKRSIEEACLTLQHLNRLGIQAEPLYRVVSNTIEPLTLFHKMGVGRLDMYVLNPVKDSKEMQFLMQKWAGNSKAKTGIVLPNGKEAEISVPYLTSITALVVWLPANPTEKIVRVLFPGNAPQNKILEGLEKLRHLDFLRYPVATQKDLASGAVPTNLKPSKIKQRADSKESLKATTKTAVSKLAKREEVVEEGAKEARSELAKELAKTEKKAKESSEKPPEKPAKPERVKTESSEALKAEKRKLIKDKVGKKHLKEKISKLEEKKDKEKKEIKKERKELKKDEGRKEEKKDAKKEEKRKDTKPELKKISKPDLKPFTPEVRKTLYKAKVPGRVKIDRSRAIRGEKELSSEPQTPPAQKGTVPLPTISGHRELVLSSPEDLTQDFEEMKREERALLAEQRDTGLGDKPFPLDTAEEGPPSTAIQGTPPSVPGLGQEEHVMKEKELVPEVPEEQGSKDRGLDSGAETEEEKDTWEEKKQREAERLPDRTEAREESEPEVKEDVIEKAELEEMEEDETIPGYSETEQTISDEEIHDEPEERPAPPRFHTSTYDLPGPEGAGPFEASQPADSAVPATSGKVYGTPETELTYPTNIVAAPLAEEEHVSSATSITECDKLSSFATSVAEDQSVASLTAPQTEETGKSSLLLDTVTSIPSSRTEATQGLDYVPSAGTISPTSSLEEDKGFKSPPCEDFSVTGESEKRGEIIGKGLSGERAVEEEEEETANVEMSEKLCSQYGTPVFSAPGHALHPGEPALGEAEERCLSPDDSTVKMASPPPSGPPSATHTPFHQSPVEEKSEPQDFQEADSWGDTKRTPGVGKEDAAEETVKPGPEEGTLEKEDKDKAIVFEIMEAGEPTGPILGAEALPGGLRTLPQEPGKPQKDEVLRYPDRSLSPEDAESLSVLSVPSPDTANQEPTPKSPCGLTEQYLHKDRWPEVSPEDTQSLSLSEESPSKETSLDVSSKQLSPESLGTLQFGELNLGKEEMGHLMQAEDTSHHTAPMSVPEPHAATASPPTDGTTRYSAQTDITDDSLDRKSPASSFSHSTPSGNGEVLTWGDHQALNEHILTPDSSFSKSPESLPGPALEDIAIKWEDKVPGLKDRTSEQKKEPEPKDEVLQQKDKTLEHKEVVEPKDTAIYQKDEALHVKNEAVKQQDKALEQKGRDLEQKDTALEQKDKALEPKDKDLEEKDKALEQKDKIPEEKDKALEQKNTALEQKDKALEPKDKDLEQKDRVLEQKEKIPEEKDKALDQKVRSVEHKAPEDTVAEMKDRDLEQTDKAPEQKHQAQEQKDKVSEKKDQALEQKYWALGQKDEALEQNIQALEENHQTQEQESLVQEDKTRKPKMLEEKSPEKVNAMEEKLEALLEKTKALGLEESLVQEGRAREQEEKYWRGQDVVQEWQETSPTREEPAGEQKELAPAWEDTSPEQDNRYWRGREDVALEQDTYWRELSCERK

SEQ ID NO: 36778 - protein, 223 aa, Homo sapiens
  misc_feature (1)...(223): Xaa = X or * as defined in Table 2
ERRRRKLTIPCPPPHPAPPTGGQACRENAEGILXAANTSEPGKDAEKXKIKVXLAPCSHSGSSLQSDPHFGCSLGPSDPALGLSGCILPPCSGSYLAPAPNSRIPKPGLKPWHESYLPSAVRPHGTQAPGLWPERGLXPAGFLLRPEPVRAASERQEAVSPERXVPRPPKAQQLHGQSPDPSSLCTALRQDHTHWLDARSVYPDWRGQPWPPLHQDCGHGGWR

SEQ ID NO: 36779 - protein, 44 aa, Homo sapiens
  misc_feature (1)...(44): Xaa = X or * as defined in Table 2
XLLVVEAADTVGVPDFPKLVFPMSASPGVLLPGAPGVAPGDTTX

SEQ ID NO: 36780 - protein, 170 aa, Homo sapiens
MLNFSGTPVVSPGATPGAPGSSTPGEADIGNTSFGKSGKSGHDSLTVLNPAFLRRTPTVSAASTTSSPVSKHTDAASATAVTISGSKPGTPGTPGGATSGGKITSGWSSSGTSTGSSNTPDCSQEVVPNPLAANRDITEPMYEFLLIHCTHQEKSLETSLRVHILTTVQG

SEQ ID NO: 36781 - protein, 209 aa, Homo sapiens
MLAVLRALACTSPAWAPTLAAFEEPFSPHLHCGSPFLGWPRLEPTPSACREVWRERREREPGLRAALAGQLEFRSSQPAPLAPRNEGLSTRASGCGECTGSPSSAGPPALCSISRRALAAFPRGRAWDLQPAMPEPPTHSMGSCAARASPTSTTPCSTAPSPNDHPRADECERTAQDWQAAPPAALVQDPLGEASWAPESGGDVENLCI

SEQ ID NO: 36782 - protein, 111 aa, Homo sapiens
  misc_feature (1)...(111): Xaa = X or * as defined in Table 2
SCRGYSRILLLFHKSSWCSQVISIFRYNIICSRLPRSWKWRLPVYMNWLXYHWFKQYHSSINFISFRSMWFIIIINFKRSPAFILSGSWSISIARWQIFVFFTTFGSRTKV

SEQ ID NO: 36783 - protein, 147 aa, Homo sapiens
TEGLGHRSSETPGGAALDALTGERPRVACFPAARGRGLRPRPRLMIGPFETGGGQRLLTLRPRRRRQRRRPWQGLERPHVRNWGIELETLRDAFRPQPSVWRTARGEAGKRKGRLVECLGSQRKVLEGVLLYAVTRGSFPNLFTPRD

SEQ ID NO: 36784 - protein, 258 aa, Homo sapiens; identical to SEQ ID NO: 33124
  misc_feature (1)...(258): Xaa = X or * as defined in Table 2

SEQ ID NO: 36785 - protein, 424 aa, Homo sapiens
MGQACQNLSGKSDDLPGDLAIRGSPGPDPRDESSQALRPIPGHSSGKPAESTFDLYQQPPHYNLERIQWRAWIKIYYSVVFPYEPVVFSVSSSASPGLLADTKHTGPQASLRTAALEKLTKKETENHQQQQQQQQSRQHLGHEREKASVEGETTLDFTEGVVVSNVSLNISPNGTGEGVMQEEKDSSTCEGREIEKYRVCSGCHMRTQQKQAIETRKNSSHPYTPEEAIKPSYEPLIPAESSLYLEEKNVLILREVWRERREREPGLCAALVGQLEFRVGLGLAGPTLRAAGQPCWPQAMRDLAPRPVAAEGVLGPPSSASPPALRSISHRALAAFPRGRAPDLQPAMPEPPTYSMGSGAAQASPTSSTPCSTAPSPIDHPRAEECERTARDWQAAPPAALLQDPLGEASWDPESGGEVDSLYV

SEQ ID NO: 36786 - protein, 77 aa, Homo sapiens; identical to SEQ ID NO: 36562

SEQ ID NO: 36787 - protein, 152 aa, Homo sapiens
MGLVGLHSEQPAGPAGPGSERLGTRASGCRGCTGSPSSAGPPALCSISCRALAAFPLGRARDLQPAMPEPPTHSMGSCAARASPTSTTLCSTAPSPIDHPRAEECQRMARDWQAAPPAARTYVECVGQKEHLRNRFIILVYVLAVLSLSIKN

SEQ ID NO: 36788 - protein, 58 aa, Homo sapiens
ITFHSMGSCAARASPTSTTPCSTAPSPIDHPRAEECEHTARDWQAAPPAAREDLQLHT

SEQ ID NO: 36789 - protein, 469 aa, Homo sapiens
MHLIKNPVKTCDKVYSLIQSLTSQIRHRMEDPKSSDIQLYHSETLELMLRRWSKLEKDFKTKNGRYDISKIPDIYDCIKYDVQHNGSLKLENTMELYRLSKALADIVIPQEYGITKAEKLEIAKGYCTPLVRKIRSDLQRTQDDDTVNKLHPVYSRGVLSPERHVRTRLYFTSESHVHSLLSILRYGALCNTNDSQNEDGGMVKEMESKDEQWKRAMDYLNVVNELNYMTQIVIMLYEDPNKDLSSEERFHVELHFSPGAKGCEEDKNLPSGYGYRPASRENEGRRPFKIDNDDEPHTSKRDEVDRAVILFKPMVSEPIHIHRKSPLPRSRKTATNDPASLALDNEGLSTRASGCGGCTGSPGSASPPALRWISHRALAAFPQGRARDLQPAMPEPPTHSMGSCAARASPTSTTPCSTAPSPIDHPRAEECEHTARDWQAAPPAALVRDPLGEASWAPESGGEVESPYV

SEQ ID NO: 36790 - protein, 217 aa, Homo sapiens; identical to SEQ ID NO: 30995

SEQ ID NO: 36791 - protein, 72 aa, Homo sapiens
LPSRGAGLGTCSPPCLSLPSTPWAPVLPEHPRRAPPPAPRRPVPSTTQGLRSTSARRRTGRQLHLQPRCGIH

SEQ ID NO: 36792 - protein, 161 aa, Homo sapiens
IYSPHPHQTQEPSWLHLVDPAPGLQVELPASPARCARIPQPLGGRWDWAQTQEPSWLHLVEPAPGLQVELPASPTPCACIPQPLGDRWDWAPWSRGWCSLGRLGPHRSPWSGWEAEAWRAAGPEPCPTGRQLRLGEKSSAAPVGWHCWGTQYTLRSHWPGC

SEQ ID NO: 36793 - protein, 109 aa, Homo sapiens
  misc_feature (1)...(109): Xaa = X or * as defined in Table 2
LCRRIYMYFCVMKNWMQSLWKLCTNKRXRIDKPTLHQVVVRKXLTPLGMKNQVDSLELLETRSLKKDPVELGSKSLRRCCCQTEPVNLLPHVSIGTLKIXSRILRLQRP

SEQ ID NO: 36794 - protein, 158 aa, Homo sapiens
MCLKLVHLKPVPLKRAHLKAVHPRPAHQKAVHRSHVHLKAVHLKAVHLTQAHSKAVLRRGVHLKAVLLKAAHLQYAHLQHVQSQRAHLKHAHSQHVLQKCARPQCACLNHAHWNHAHLKCSGLKKSHIKPQHQKGFQVKRTHLEVAELKFDDRGGGLA

SEQ ID NO: 36795 - protein, 268 aa, Homo sapiens
MGPSDCCLSALAPEGIKPSAINAGGSEQGTWMGLLQSKGEASLWAWAGPGRRRSSGRSESQTARVLSAVPLPRDVPNSLRICASAQNLRFQFPPYNSLLPAAFLRGGARDLQPAMPEPPTHSMGSCAARASPKSTTPCSTVPSPIDHPRAEECERTARDWQAAPPAAPVRDPLAVFSSGYRQKPISVCSLGHCTWDRCLLPRAAVATNRALSAGFTGPPHAEATVGFRLGGDKAVRAVIAKLSPSHPLLLLAGRHRVHFPSHEIGLLP

SEQ ID NO: 36796 - protein, 81 aa, Homo sapiens
  misc_feature (1)...(81): Xaa = X or * as defined in Table 2
GANICCWXGLQEVFHSWXKTQEPSWLHLVDPTTGLQVELPASPAPFARIPQPLGGRWDWAPWSRGWCSSGRLGQHRSPWSG

SEQ ID NO: 36797 - protein, 112 aa, Homo sapiens; identical to SEQ ID NO: 36567

SEQ ID NO: 36798 - protein, 398 aa, Homo sapiens; identical to SEQ ID NO: 36568

SEQ ID NO: 36799 - protein, 126 aa, Homo sapiens
KGLRLKLCSFVQLRFSIRNFRLGILTYWKKEFEIVGWPRLEPTPLACREVWRERREREPGLRAALAGQLEFRVGVGLAGPSLGAAGQPCWPRVIRDLAPGPVAAEGVLGPPAVPAHRRCAGFLTEP

SEQ ID NO: 36800 - protein, 44 aa, Homo sapiens
IIWPKIYVMNFSYRTWMKLETNILSKITQEQKTKHHMFSLISGS

SEQ ID NO: 36801 - protein, 147 aa, Homo sapiens
QLAGRCGGRGMSGNRGCWGACGPAGVPGGCWAWCALHSEEPASPALRSISRRALAAFPRGRARDLQPAMPEPPTPSVGSCAAQASPTSAAPCSMAPSPIDHPRAEECVARRGTGRHDELIVALPFMMIPWHSSIQPFTIHPFNWNFG

SEQ ID NO: 36802 - protein, 82 aa, Homo sapiens
MLKTASGPSALINNPGHGLTDSFHPESEDHGGAILNSRPAQAPRNPYVTDLNSANVTNTAVIKSRELNTPQKELSLGMSGME

SEQ ID NO: 36803 - protein, 163 aa, Homo sapiens
  misc_feature (1)...(163): Xaa = X or * as defined in Table 2
VSVDPEWGAGTPTPTQQPPSGMKGGQGCNLDFHYCVRNWWVLGLTDFKNEAADPGRVKLQTFAVSVTALKAERLELFIPPGGLVISLGSGVKLQTFTVSVTALKAEHLESFLTPGGLVISLGSGVKLLQIFEVTVIAHKSNVDPKNSGAQLASPSGSRTRAAX

SEQ ID NO: 36804 - protein, 169 aa, Homo sapiens
  DOMAIN (35)..(143): Gag P30 core shell protein domain identified by PFam, accession name Gag_p30, E-value=3.4e-25, PFam score of 91.8
KTMHWKAPLMSWHMHRASSQKQTRTGTQTMEAQLQQLQRYQEALLQVLRKGEKKAFNMGNISEVLQRADESCSQFYERLYEAFQLCSPFDPEATENQCMVNAVFVGQTQGDIRRKLQKLECFTGMNVTQVLEVATKVYTNCEEETQGKGQFAGGSTYGKGGECPKTKWM

SEQ ID NO: 36805 - protein, 949 aa, Homo sapiens
  DOMAIN (651)..(698): kw TRANSCRIPTASE REVERSE II ORF2 domain identified by eMATRIX, accession number DM01354V, p-value=1.000e-40, raw score of 12.97
  DOMAIN (427)..(664): Reverse transcriptase domain identified by PFam, accession name rvt, E-value=0.0047, PFam score of -26.3
MRKFCRGRDIEKHSIQFYPLLGPSFTVFVKHLLHITCGLQHLAKIFLHSLPGRLHSLAGKVKAIKDPENVTRAPQKPASARTTTQAAGCRADSPFLKGLSLWDRKSSTVCLSLVVEDHSQKRGLRLAHSQIPAQHVHRPTSAQSEPKVGAGERACLKRESHLHEQTLTCSINAKSSQPALLARGNGGLSTRASGCGGCTGSPSSAGPPALCSISRRALAAFPRGRARDLQPAMPEPPTHSMGSCAARASPTSTTPYSTAPSPIDHPRAEECERTAQDWQAASPAAPVRDPLGEASWAPESGTNISITPGNATFVTRVQGQAWFASCITGHDMSSLKTSSVVVLRRQSEALLPANLTCNWQDSSALATLESALSQVRHKRFTFTLMVFTGSAIVIMATVSIAVVSITESVQTTAFVDNLAKNICDELLLQDMDEAGNQHSQQNNTRTENQTPHVLTHKWELNNENIRIQGGEHYILGPVGGRLPTSKLAVDCQLLLLAAAQHALCWCQNTLPPNPANFWNCPRGFPTLASELAYVSPNLALVIQLSQRKKFELFWGGLQRTIFFPFSVLRILTVDEQANDVSVAAARTLQIFRDDMIVYLENPIVSAQNLLKLISNFSKISGYKINVQKSQAFLYTNNRQTESQIMSELPFTTASKRIKYLGIQLTRDVKDLFKENYKSLLKEIKEDTNKWKNIPCSWVGKINIVKMAILPKVIYRFSAIPIKLPMTFFTELEKTTLKFIWNQKRAHTAKSILSQKNKAGGITLPDFKLYYKATVTKTAWYWYQNRDIDQWNRTEPSEITLLIYNYLIFDKPEKNKQWGKDSLFNKWCWENWLAICRKLKLDPFLIPYTKINSRWIKDLNVRPKTIKTLEENLGITIQDIGMGKDFLSKTPKAMATKDKIDKWDLIKLKSFCTAKETTIRVNRQPTKWEKIFATYSCEKGLISRIYNELK

SEQ ID NO: 36806 - protein, 116 aa, Homo sapiens
MAGCSSRALPRGKAAKAPREIEHSAEQYEAIRYPGGDGILLSQQEKATGRGAGFATGMSAGHTSGVQLHGAKTVVITFLDNSASVRGAFSFPFLCSLNQESSISISISISISICSA

SEQ ID NO: 36807 - protein, 345 aa, Homo sapiens
  DOMAIN (30)..(68): Ribosomal protein L21e proteins domain identified by eMATRIX, accession number BL01171, p-value=9.719e-36, raw score of 19.94
  DOMAIN (2)..(100): Ribosomal protein L21e domain identified by PFam, accession name Ribosomal_L21e, E-value=1.8e-62, PFam score of 220.9
MTKTKGKRRGTRYTFSRPFRKHGVVPLATYMRIYKKGVIVDIKGMGTVQKGMPHKCHHGKTGRVYNVTQHAVGIVVNKQVKSKILAKRINVRIEHIKHSESWDSFLKYMKENDQKKKEAKEKGTWVQLKCQPAPPREAHFVRTNEKEPELLEPIPTLDREFPPLQANPGVTAGHGNKPPKNYGSPLLEMSSLFSRNCPPGHCALTLTTHPSPQHPCQPLASQVPGANSMNYAPDQERQLTTHSEALFTLVLIQGCGDSEAMESQTALQKLPHRGEPSQLSPEEKRDLQLHPHTSQLEGQRVAIRKGAPRADGAHYSGEGAIGEEARPQNSACWKHWVFTVNKASS

SEQ ID NO: 36808 - protein, 203 aa, Homo sapiens
  DOMAIN (22)..(133): Ribosomal protein L21e domain identified by PFam, accession name Ribosomal_L21e, E-value=0.0054, PFam score of -9.3
  misc_feature (1)...(203): Xaa = X or * as defined in Table 2
INPPPPPFRPEPPSSSNSPKMTDHKGERGEATRYMFSRPFRKHGVVPLGPHICRIYRKGDIVDIKGMGYCSKKGIAPTKCYHGQNLEGVLPMLPQHACWPFVVNQPVLGQSFFPRELMCRIEHIXALLRARDKLPETVLKENDSEKERSPNEKGTWGSNLKRHPGSTPEEAHFVRTQWGRSLELAGTLFPMNFMGIIGVKEIK

SEQ ID NO: 36809 - protein, 340 aa, Homo sapiens
MGKHQRKKAENSQNQNTCPPPNDHNSSPAREQNWMGNEFDELTEVGFSRWVRTNSSELKEHVLTQCKEAKNLEKRITDVEKNINDLMELKNTAQELCEEYTSINSQIDQAEERISEIDDQLNEIRRKHKIREKRIKRNEQSLQEIWDYVNRPNLHLIGVPESDRENGTKLENTLQDIIQENFPDLARQANIQIQEIQRTPQRYSSRRATPRHVIIRFSKVEMKEKVLRAAKEKATFNSTWYDQRALLETNQGKTKLSANVANANCRDLPGPTHGAITQKKHTEKKAMNDNRNLIRKSVFANGFIFAHKQAACWFMSYMNVFQKEMDWKPRVVSTGSEARH

SEQ ID NO: 36810 - protein, 110 aa, Homo sapiens
KMQKLLKVRVTRLVLDPYLLKYFNKRKTYFAHDALQQCTVGDIVLLRALPVPRAKHVKHELAEIVFKVGKVIDPVTGKPCAGTTYLESPLSSETTQLSKNLEELNISSAQ

SEQ ID NO: 36811 - protein, 40 aa, Homo sapiens
MTFPTLKTISASSCFTCFARGTGKALRSTISPTVHCGRAS

SEQ ID NO: 36812 - protein, 115 aa, Homo sapiens
MEMVKVNLECNAKLYRHGTNICSAPGEGFRELPIIGEGEEEPAYHMCTIGDIVLLKALPVPRTKHVKHELAEIVFKVGKLVDPVTGKPCAGTTYLESPLSSETTQVLATINILHS

SEQ ID NO: 36813 - protein, 111 aa, Homo sapiens
  misc_feature (1)...(111): Xaa = X or * as defined in Table 2
TVRAYNVPQHAVGIVVNRQVKGKIPAKRINVGIKHFKHSTSXENFLKRMKENDQKKKEAKEKVTWIQLKHQSAPPREAQCERTNGKEPELLEPLPYEFMHNTYIHIYVCVH

SEQ ID NO: 36814 - protein, 162 aa, Homo sapiens
  DOMAIN (32)..(70): Ribosomal protein L21e proteins domain identified by eMATRIX, accession number BL01171, p-value=5.500e-36, raw score of 19.94
  DOMAIN (4)..(102): Ribosomal protein L21e domain identified by PFam, accession name Ribosomal_L21e, E-value=5.5e-53, PFam score of 189.4
ATMTITKGNKTGTPYKYSTSFRRHGVVPLATYMPNYKKGDIVDIKGMGTAQKGMPHKCYHGKTGRVYNVTQHAVGIVVNKQDKGTILAKRINARIEHIKHSKSRDSFLKRVKENDQNMKEAPEKGSWDQLKRQPAPPREAHFVRTNGKEPELLEPISYEFMA

SEQ ID NO: 36815 - protein, 129 aa, Homo sapiens
  misc_feature (1)...(129): Xaa = X or * as defined in Table 2
NCKISFLHFCYIFVKALKRISALSRGKILAKRINVRIEHIKHSKSRDSFLKRVKENDQKKKEAKEKGTWVQRKAPGKNLVYISLVLRALXGXDLTHHIIILFPFFFLXXPAPPREAHFVRTNGKEPELL

SEQ ID NO: 36816 - protein, 166 aa, Homo sapiens
  DOMAIN (33)..(71): Ribosomal protein L21e proteins domain identified by eMATRIX, accession number BL01171, p-value=1.000e-40, raw score of 19.94
  DOMAIN (5)..(103): Ribosomal protein L21e domain identified by PFam, accession name Ribosomal_L21e, E-value=7.8e-63, PFam score of 222.2
FAKMTNTNLNRRGTRYMFSRPFRKHGVVPLATYMRIYKKGDIVHIKGMGTVQKGMPHKCYHGKTGRVYNVTQHAVGIVVNKQGKGKILAKRINVRIEHITHSKSRHSFLKRAKENDQKKKEAKEKEVPMEPTVYMSEKGRTLFPGEPANHIKNKRLLCWTLPAYLC

SEQ ID NO: 36817 - protein, 223 aa, Homo sapiens
  misc_feature (1)...(223): Xaa = X or * as defined in Table 2
TMFCQTGSSVRRVGPGPWAENRTAMLRPCGGTFARKTRLSRLGNSPKMNEQQRGKRRGTPIIMFSKGLLRKHGVVPLAHIFMRIYKKGDIVRHPRGMGYLVPKRELPPQSCYPWPKPGRSLTNVTPAMLVGHLLXNKQVXGQRFLPKRNLMWRIXAPFRHFLRSPRLASLKTCGRENGSRKKERKPKGGKVTWGFQLKRRHLGFPPQEEATFLLKEPIGGREP

SEQ ID NO: 36818 - protein, 163 aa, Homo sapiens
MASMDYSTYSQAAAQQGYSAYNTQPTQGYAQTTQAYGQQSYGTYGQPIDVSYTQAQTTAIYGQTAYATSYGQPPTEPPGREESNKLPACQKPNASAKTHIKPSNSPPKLIHGARKQNSNCVHLVVTNIKPFNLPTPEDKGSKIQQPQCYGQNTKSLSNNTYLL

SEQ ID NO: 36819 - protein, 665 aa, Homo sapiens
  DOMAIN (371)..(390): Eukaryotic  RNA-binding region RNP-1 proteins domain identified by eMATRIX, accession number BL00030A, p-value=7.882e- 11, raw score of 14.39
  DOMAIN (377)..(456): RNA recognition motif. domain identified by PFam, accession name rrm, E-value=1.5e-19, PFam score of 78.4
  misc_feature (1)...(665): Xaa = X or * as defined in Table 2
ENEEEGEKMASTDYSTYSQAAAQQGYSAYTAQPTQGYAQTTQQAYGQQSYGTYGQPTDVSYTQAQTTATYGQTAYATSYGQPPTGYTTPTAPQAYSQPVQGYGTGAYDTTTATVTTTQASYAAQSAYGTQPAYPAYGQQPAATCPTRTEDXNKPTETSQPQSSTGGYNQPSLGYGQSNYSYPQVPGSYPMQPVTAPPSYPPTSYSSTQPTSYDQSSYSQQNTYGQPSSYGQQSSYGQQSSYGQQPPTSYPPQTGSYSQAPSQYSQQSSSYGQQSSFRQDHPSSMGVYGQESGGFSGPGENRSMSGPDNRGRGRGGFDRGGMSRGGRGGGRGGMGSAGERGGFNKPGGPMDEGPDLDLGPPVDPDEDSDNSAIYVQGLNDSVTLDDLADFFKQCGVVKMNKRTGQPMIHIYLDKETGKPKGDATVSYEDPPTAKAAVEWFDGKDFQGSKLKVSLARKKPPMNSMRGGLPPREGRGMPPPLRGGPGGPGGPGGPMGRMGGRGGDRGGFPPRGPRGSRGNPSGGGNVQHRAGDWQCPNPGCGNQNFAWRTECNQCKAPKPEGFLPPPFPPPGGDRGRGGPGGMRGGRGGLMDRGGPGGMFRGGRGGDRGGFRGGRGMDRGGFGGGRRGGPGGPPGPLMEQMGGRRGGRGGPGKMDKGEHRQERRDRPY

SEQ ID NO: 36820 - protein, 231 aa, Homo sapiens
  DOMAIN (178)..(198): DNAJ PROTEIN FAMILY SIGNATURE domain identified by eMATRIX, accession number PR00625A, p-value=2.286e-13, raw score of 12.84
  DOMAIN (167)..(231): DnaJ domain identified by PFam, accession name DnaJ, E-value= 4.9e-18, PFam score of 73.4
MPAKKKTGQPPKVRNIEHPTICESLKFRKLFTRQLTSQREHSKRQRQKLQISYTPALQVTQQPSHDTRRVEIDSASQWEAKLYYNWVMVNSKLRKLDNAIQDCTNTVKLNDTYLKACLRRAQCYMNTKQYEEAVHNYEKVYQTEKTKEHKQLLKNAQLKLKKSKKKDYYKILGVDNNASEDETKKAYHKWALMHHPDWHSGGSAEVQKEEGKFKEIGEAFTIFSDPKKKTR

SEQ ID NO: 36821 - protein, 217 aa, Homo sapiens
  DOMAIN (115)..(135): DNAJ PROTEIN FAMILY SIGNATURE domain identified by eMATRIX, accession number PR00625A, p-value=9.357e-17, raw score of 12.84
  DOMAIN (104)..(174): DnaJ domain identified by PFam, accession name DnaJ, E-value= 5.3e-33, PFam score of 123.1
LYTEALGIDPNNIKTNAKLYCNRGTVNSKLRKLDDAIEDCTNAVKLDDTYIKAYLRRAQCYMDTEQYEEAVRDYEKVYQTEKTKEHKQLLKNAQLELKKSKRKDYYKILGVDKNASEDEIKKAYRKRALMHHPDRHSGASAEVQKEEEKKFKEVGEAFTILSDPKKKTRYDSGQDLDEEGMNMGDFDPNNIFKAFFGGPGGFSFEASGPGNFFFQFG

SEQ ID NO: 36822 - protein, 144 aa, Homo sapiens
  DOMAIN (11)..(54): kw TRANSCRIPTASE REVERSE II ORF2 domain identified by eMATRIX, accession number DM01354T, p-value=8.412e-39, raw score of 9.48
MILNRGKLKAVPLRTGTQQGCPLSPLLFNTVLEVLARVIRQEKEIKDIQMGKEEINLSLFAGDRIVSFENPKDSSRKFLELIKEFSKVSRYKINVHKSLALVYTNSDLVENQIKNSTPFTVAAKIIKYLEIYLINNMKDLYKEN

SEQ ID NO: 36823 - protein, 78 aa, Homo sapiens
GQVDERSRVRLQSALRHLKFYNEPIGDAKKRASAEMVTPVTWMDNPIEVYVNDSEWVPGPTDDRCPAKPEEEGMMINI

SEQ ID NO: 36824 - protein, 882 aa, Homo sapiens
  DOMAIN (430)..(447): Zinc finger C2H2 type, domain proteins. domain identified by eMATRIX, accession number BL00028, p-value=3.700e-13, raw score of 16.07
  DOMAIN (401)..(874): Zinc finger, C2H2 type domain identified by PFam, accession name zf-C2H2, E-value=1.3e-102, PFam score of 354.3
LLPAFLLLCSDSHFLQFCSQFAPRKTQGSGSVNNIQANIIAKKSNNHLMKKNDQKFKDLPQMAGHPIHHQAQGPPGAKNPQEQQRRPMGQTTLPAEQEESRVKCKNCGAFGHSARNKTCPIKRWSGALPLQVLGSHKEKENLKPAKAQLPFTTPGPFTTNDREKERSPSSTMNPSEMQRKASPRRWKHHNQTPSIHKVNKMVMSEEQMKLPSTKKAEPPTWAQLKKLTQLPKKSLENTKVTQTPENTLLAALMIVSTAGAAAANYTYWAYVPFPPLIRAVTWMDNPIEVYVNNSAWVPGPTDDRCPDKPEEEGMMINISTGYRYPPICLGRAPACLMPAIQNWLVEVPTVGTTSRFTYHTGLLTFRDVAIEFSQEEWKCLDPALEDSYTRRKANSCGKPYKCNECGKAFTQNSNLTSHRRIHSGEKPYKCSECGKTFTVRSNLTIHQVIHTGEKPYKCHECGKVFRHNSYLATHRRIHTGEKPYKCNECGKAFRGHSNLTTHQLIHTGEKPFKCNECGKLFTQNSHLISHWRIHTGEKPYKCNECGKAFSVRSSLAIHQTIHTGEKPYKCNECGKVFRVGRGVSIGTTCLLSVFQVITVSSRKSRASPENRATQSILILAPPTSRGSGPGPASVLRRLAQTRKRMAWTESCTAACAFPSCLVLLYRGRGVPTDLQVPAPLFSTQSKLKRPGSRTKSSLATHQRIHTGEKPYKCNECGKVFSQTSSLARHWRIHTGEKPYKCNECGKVFSYNSHLASHRRVHTGEKPYKCNECGKAFSVHSNLTTHQVIHTGEKPYKCNQCGKGFSVHSSLTTHQVIHTGEKPYKCNECGKSFSVRPNLTRHQIIHTGKKPYKCSDCGKSFSVRPNLFRHQIIHTKEKPYKRN

SEQ ID NO: 36825 - protein, 102 aa, Homo sapiens
CSTMNPSEMQRIAPPRRQRHRSRAPSAHKMNRMVMSEEQMKLPSTKKAEPPTWAQLKKLTQLAKKKLENTKVTQTPENMLLAALKTVSTVSAGVPSSSEESD

SEQ ID NO: 36826 - protein, 1043 aa, Homo sapiens
  DOMAIN (965)..(978): PROTEIN ZINC-FINGER METAL-BINDI domain identified by eMATRIX, accession number PD00066, p-value=1.000e-14, raw score of 13.92
  DOMAIN (781)..(1027): Zinc finger, C2H2 type domain identified by PFam, accession name zf-C2H2, E-value=1.7e-56, PFam score of 201.1
SSTMNPSEMQRKAPPRRRRHRNRAPLTHKMNKMVTSEEQMKLPSTKKAEPPTWAQLKKLTQLATKYLENTKVTQTPENTLLAALMIVSMVVSLPMPAGAAAANYTYWAYVPFPPLIRAVTWMDNPIEVYVNNSAWVPGPTDDHCPAKPEEEGMMINISTGYRYPPICLGRAPACLMPAIQNWLVEVPTVGTTSRFTYHTIDLMTEKWVVLASVEVLLRFPLKPGEDPTARYVSNKKCQPSVDWPTTISQRRGYQEKWKSNHHLMKKNDRKFKDLPQMARHSVHHQAQRPPGAKNPQEQQRRPMGQTTLPAEQEESRVKCKNCGAFGHSARNKTCPIKRWSGALPLQVLGSHKEKENLKPAKAQLPFTTPGPFTTNDREKERSPSPQQQQSEAPTQTFPRTPQEKMQEAWKEPAEDCLFLRDLPALKTNISDRHQWQNGLPVITVSSRKSRWAKLKEKAPKHVGFSVLLCWIVCMLVNIIFPMYVTGKWNYTNITVNEDLGYCSGGGNNKIAQTLRAMLLSFPDVLCLGLMLWVSSSMVCILHRHKQRVQHIDRSDLSPRASPENRATQSILILASYQKVKKNFVQCDCFSLWEACSDNLEFEPEEKCLYFVGISSKCTMKEFSSTAQGNTEVIHTGTLQRHERHHIGDFSFQEIEKDIHNFEFQWQEDERNGHEAPMTKIKKLMGSTEQYDHRHAGNKPIKYQLGSSFHSHLSELHIFQPKGKINNQVEKSINDASSVSTAQRISCRPKTHISNNYGDNFLNYSLLTQRQEVRMREKSFQCIESGKAFNYSSLLRKHQIIHLGEKQYKCDVCDKVFIRKRYLARHRRCHTGEKPYKCNECGKSFSQMSSLTYHHRLHTGEKPYKCEECDKAFRHNSALQRHRRIHTGEKPHKCNECGKTFSQKSYLACHRSIHTGKKPYECEECDKAFSFKSNLESHRITHTGEKPYKCNDCGKTFSHMSTLTCHRRLHTGEKPYKCEECDEAFRFKSSLERHRRIHNGEKLYKCNECGKTFSQELSLTCHCRLHSGEKPCKCGECDKAYSFK

SEQ ID NO: 36827 - protein, 82 aa, Homo sapiens
MGKTGQSRLSRRTYQGQIKLWEAKVEEVDRSCDSDEDYEASGRSLLSTHYTIVIHPKDQGPTYLLIGSKHEKVFKDLLVDLE

SEQ ID NO: 36828 - protein, 82 aa, Homo sapiens; identical to SEQ ID NO: 36827

SEQ ID NO: 36829 - protein, 93 aa, Homo sapiens; identical to SEQ ID NO: 33940

SEQ ID NO: 36830 - protein, 121 aa, Homo sapiens
  DOMAIN (1)..(77): Gag P30 core shell protein domain identified by PFam, accession name Gag_p30, E-value=2.4e-27, PFam score of 99.4
GKEESPAQFYERLCEAYHMYTPFDPDSPENQRMINMALVSQSAEDIRRKLQKQAGFAGMNTSQLLEIANQVFVNRDAVSHTGAEHSVVTGPVAPLSKKTIDIIGAMGVSAKQAFCLPRTCT

SEQ ID NO: 36831 - protein, 45 aa, Homo sapiens; identical to SEQ ID NO: 36200

SEQ ID NO: 36832 - protein, 143 aa, Homo sapiens
  DOMAIN (59)..(143): Integrase core domain identified by PFam, accession name rve, E-value=4.6e-09, PFam score of 35.3
LMTFCWDTPRQSGVPRERMPHTGTWRTVGIRCPKKKLRSANSSMMRGKVQPFRPDIQAYGAAPFEDLQVDFREMPKCGGNKYVLVLGRTYSGWVEAYPTRTEKTREVTPVLLRDLIRRFRPPLWIGSDNGPAFLAALVQKTAK

SEQ ID NO: 36833 - protein, 288 aa, Homo sapiens
  DOMAIN (33)..(68): Matrix protein (MA) p15. domain identified by eMATRIX, accession number PF01140B, p-value=5.280e-14, raw score of 12.72
  DOMAIN (4)..(67): Matrix protein (MA), p15 domain identified by PFam, accession name gag_MA, E-value=5.3e-12, PFam score of 44.9
MTPGKCRTYFEIDWSKLEVGWPSEGNLERSLVSKVWHKVTGKSGHSDQFPYIATWLQLVLDPPQWLRGQAAAVLVAKGQIAKEGSYSTRRGKSTPEVLFDPTSEDPLQEMEPVIPVVPSPYQGKMLPTLEPTVLVPPQDKHIPRPPGVDKRGGEASRETPTLAARLRPKTGIQMPLREQWYTGIDEDGHMVERGHQQASTLVGLGNSCTDLEAQKAASDLFQASITAPLFPQAPGLVPTYSKEEKDFLQAEGGQVIKEGWVRLPDGRVAVPQMLGAAVVLAVHETTHL

SEQ ID NO: 36834 - protein, 1577 aa, Homo sapiens
  DOMAIN (472)..(488): Eukaryotic and viral aspartyl proteases proteins domain identified by eMATRIX, accession number BL00141A, p-value=4.150e- 10, raw score of 12.10
  DOMAIN (156)..(361): Gag P30 core shell protein domain identified by PFam, accession name Gag_p30, E-value=1.2e-67, PFam score of 238.2
MACAVVSEKHKAGSKRHLAQAHGEMLSGITYIKFVKVPGELVTAKMAEIREQCVAGPRGGSTQWLNTGKELALGVWTFETWERGSPLLSPRGLHLHKTNIPRPPRVGKRGGEASGETPPLAAGLRPKTGIQMPLREQWYTGIDEDGHMVERRVFVYQPFFSADLLNWKNNTPSYTEKPQALIDLLQTIIQTHNPTWADCHQLLMFLFNTDERRRVLQAATKWLEEHAPADYQNPQEYVRTQLPGTDPQWDPNEREDMQRLNRYREALLEGLKRGAQKATNVAIQGKEESPAQFYERLCEAYCMYTPFDPNSPENQRMINMALVSQSAEDIRRKLQKQAGFAGMNTSQLLEIANQVFVNRDAVSPKENRRENEHQVRRNADLLAAAITGVPPKRQGKGGPGKEIQPGCQSLQRNQCAYCKEIGHWKNKCPQLKGKQGDSEQEDPDKEEGALLNLAERTPKEPMVRMTVGGKDIDFLVDTGAEHSVVTTPVSPLSKKTIDIIGATGVSAKQAFCLPRTCTVGGHKVIHQFLYMPDCPLPLLGRDLLSKLRATIYFTEHGSLLLKLPGTGVIMTLMVPREEEWKLFLTESGQEIRPALAKWWPRVWAEDNPPGLAVNQAPVLIEVKPRAQPVRQKQYPVPREALQGIQVHLKCLRTFGIIVPCQSPWNTPLLPVPKPGTKDYRPVQDLRLVNQATVTLHPTVPNWYTLLGLLPAEDSWFTCLDLKDAFFSIRLAPESQKLFAFQWEDPESGVTTQYTWIRLPKGFKNSPTIFGEALAQDLQKFPTRDLGCMLLQYVDDLFLGHPTAVRCAKGTDALLRHLEDCGYKVFKKKVQICRQQVRYLGFTIRQGECSLGSKRKQVICNLPEPKTRRQSPVKHDCVEVLDSVYSSRPDLRDQPWASVDWVLYVDGSSFINPQGERCAGYAVVTLDTVVEARSLPQGTSAQKTELIALIWALELSEAPDLVPTYSKEENDFLQAEGGQVMEEGLIRLPDGRVAVPQLLGAAVVLAVHETTHLGQESLEKLLGWYFYISHLSALAKTVTQRCVTCRQHNARQGLAVPPGIQAYGEAPFEDLDPGGLHRDAKVWRFGLPLWIGSDNGPAFVADLVQKMAKVLGITWKLHAAYRPQSSGKVEQMNRTIKNSLGKNKKDPVYLQKGEANPSCAAGHCNPLELIITNPLDPRWKNGERVTLGIDGTGLNPQVAILIRGEVPKRSPKPVFQTFYEELNLPAPELPKKTKNLFLQLAENVAHSLNVTSCYVCGGTTIGDRWPWEARELVPTDPAPDIIPVQKAQASNFWVLKTSIIGQYCIAREGKDFIIPVGKLNCIGQKLYNSTTKTITCWGLNHTEKKPFSKFSKLKTAWAHPESHQDWMAPAGLYWICGHRAYIRLPDKWAGSCVIGTIKLCFFLLPIKTGELLGFPIYASQEKRGIVIGNWKDNEWPPERIIQYYGPATWAQDGSWGYRTPIYMLNRIIRLQAILKIITNETGRALTVLAWQETQMRNAIYQNRLALDYLLAAEGGVCGNFNLTNCCLQIDDQGQVVENIVRDMTKVAHVPVQIKLYTSLILSLYLENGFQLWEDLKPS

SEQ ID NO: 36835 - protein, 51 aa, Homo sapiens
  DOMAIN (24)..(42): RNase H domain identified by eMATRIX, accession number PF00075J, p-value=8.269e-13, raw score of 15.78
  DOMAIN (5)..(41): Integrase core domain identified by PFam, accession name rve, E-value=0.00018, PFam score of 19.4
TSQRCQSVEKTAKELGITRKLPAASRPQSSGKVEGMNRTIKIVLLSSAMDM

SEQ ID NO: 36836 - protein, 58 aa, Homo sapiens
  misc_feature (1)...(58): Xaa = X or * as defined in Table 2
YDPLPTWILGKISQRGAEEPAQHPGCQLXLPPPSPPRTSSSPSCAGLTSVSPRPRFPR

SEQ ID NO: 36837 - protein, 586 aa, Homo sapiens
  DOMAIN (457)..(560): Integrase core domain identified by PFam, accession name rve, E-value=6.9e-12, PFam score of 45.1
MKIRRRFPSSLQLSADLQVPVRKAPRQGVSQEKRTKPSLELMISGTISQEDIRNNVTRGCTPPAIQRVISSSPLLAIRNNVTEGVYTPCDTGGRVHLPVILLLISRDGGHDISFNIAVDVHSPCDTDPNIQGVEYDMTPNIAMNVQPPGTISQKRCTLPAILGLISYASSVNIRSNITGWLYIDRYVGSHVILYPLGIRMGVTGEMKGERRRGLHAATKWLEEHAPADYQNPQEYGRTQLPGTQPQLDPHEREDMQRLNRDREALLEGFKRGAQKATNVNKVSEVIQGKEESPAQFHQRLCEACAKQVLVNGDAVSREEKRKENERQARRNADLLVSCSNQSGPPKEAREELWTKDYRPGQDLRLLSQATLTFHPTVPSPSTLLGLLPAEDSWFTCLDLKDAFFPIRSAPESQKLFAFQWEDPESALAKTVRQRCVSCRQHHAGKVQPFRPDIQAYGAAAFEDLQVDFTEMPECGGNKYLPVLGRTYSGWVETYPTRAEKAREVTRVLLRDLIPRLELPFRIGSDNGPAFVADLLQKTATVLGITRKLHAASRPQSSGKGIQNNRTGGVYTPCDIESHVILFRSGY

SEQ ID NO: 36838 - protein, 77 aa, Homo sapiens
  misc_feature (1)...(77): Xaa = X or * as defined in Table 2
MFVPHIGFQNTAALCLLRLGVLFPXPVGFPAGSCLLIXWNRHWHVPDFSCVTTPQEWCGGVSDVCCGHPHAEPFHLQ

SEQ ID NO: 36839 - protein, 380 aa, Homo sapiens
  DOMAIN (163)..(174): RNase H domain identified by eMATRIX, accession number PF00075B, p-value=3.415e-10, raw score of 12.56
  DOMAIN (4)..(95): Gag P30 core shell protein domain identified by PFam, accession name Gag_p30, E-value=4.7e-30, PFam score of 108.9
MRGAQKATNVNKLSEDIQGKEESPTQFYERLWEAYRMYTPFDPDSPENQRMIPMALVRQSAEDMRRKLQKQAGLAGMNPSQLLEIASQVFVNRDAVSRKENGKENGGQARRYADLFSRTKNYQPVQDLRLLHQAKLTFHPTVPNPSTLLGFPPAEDSWFTCLDLKDAFFPIRLAPERQKLFAFQWEDPESGWPPCWRALAATALLVQEANKLTLGQKLNIKASRAVVTLMNTKGHHWLTNATLTDYQTLLCENPRITIEVCNTLHPATLLPVSKSPVKPGCVEVLDSIDSSRPDLWDQPWASVDWELYLDGSSFFNPQGEVEGSRGDTSELPPCWVCGIPALTQRLEKQHLPPSGHQGSLKHLIWDLLLLTKKRTFSSMI

SEQ ID NO: 36840 - protein, 184 aa, Homo sapiens
  DOMAIN (163)..(181): RNase H domain identified by eMATRIX, accession number PF00075J, p-value=4.068e-15, raw score of 15.78
  DOMAIN (119)..(181): Integrase core domain identified by PFam, accession name rve, E-value=3.5e-13, PFam score of 49.6
APDLVPTYSKEENDFLQAEGGQVMEEGLIRLPDGRVAVPQLLGAAVVLAVHETTHLGQESLEKLLGWYFYISHLSALAKTVTQRCVTCRQHNARQGLAVPPGIQAYGEAPFEDLDPGGLHRDAKVWRFGLPLWIGSDNGPAFVADLVQKMAKVLGITWKLHAAYRPQSSGKVEQMNRTIKNSLG

SEQ ID NO: 36841 - protein, 185 aa, Homo sapiens
  DOMAIN (7)..(21): C2H2-TYPE ZINC FINGER SIGNATURE domain identified by eMATRIX, accession number PR00048A, p-value=6.087e-10, raw score of 10.52
THTGEKPYECVECEKPFISKSDLMLQGKKPTEEKPYACNWWEKMLGIQRAKEKGHQDEEDTEVRIHDDWVVQRATDGYKAVIGHHSQEHVFHTCKKDKERHPCQAALIRDDSAMRLHVHNHLGNHGQGETDVSSAQFGEEEAHGGVERGVRADSQDAEQVPQHRDHIHGQGQGQQSEDRLQFWIL

SEQ ID NO: 36842 - protein, 264 aa, Homo sapiens
  DOMAIN (47)..(58): RNase H domain identified by eMATRIX, accession number PF00075B, p-value=3.415e-10, raw score of 12.56
SRTKNYQPVQDLRLLHQAKLTFHPTVPNPSTLLGFPPAEDSWFTCLDLKDAFFPIRLAPERQKLFAFQWEDPESGWPPCWRALAATALLVQEANKLTLGQKLNIKASRAVVTLMNTKGHHWLTNATLTDYQTLLCENPRITIEVCNTLHPATLLPVSKSPVKPGCVEVLDSIDSSRPDLWDQPWASVDWELYLDGSSFFNPQGEVEGSRGDTSELPPCWVCGIPALTQRLEKQHLPPSGHQGSLKHLIWDLLLLTKKRTFSSMI

SEQ ID NO: 36843 - protein, 878 aa, Homo sapiens
  DOMAIN (391)..(407): Eukaryotic and viral aspartyl proteases proteins domain identified by eMATRIX, accession number BL00141A, p-value=4.150e- 10, raw score of 12.10
  DOMAIN (75)..(280): Gag P30 core shell protein domain identified by PFam, accession name Gag_p30, E-value=1.2e-67, PFam score of 238.2
ERGSPLLSPRGLHLHKTNIPRPPRVGKRGGEASGETPPLAAGLRPKTGIQMPLREQWYTGIDEDGHMVERRVFVYQPFFSADLLNWKNNTPSYTEKPQALIDLLQTIIQTHNPTWADCHQLLMFLFNTDERRRVLQAATKWLEEHAPADYQNPQEYVRTQLPGTDPQWDPNEREDMQRLNRYREALLEGLKRGAQKATNVAIQGKEESPAQFYERLCEAYCMYTPFDPNSPENQRMINMALVSQSAEDIRRKLQKQAGFAGMNTSQLLEIANQVFVNRDAVSPKENRRENEHQVRRNADLLAAAITGVPPKRQGKGGPGKEIQPGCQSLQRNQCAYCKEIGHWKNKCPQLKGKQGDSEQEDPDKEEGALLNLAERTPKEPMVRMTVGGKDIDFLVDTGAEHSVVTTPVSPLSKKTIDIIGATGVSAKQAFCLPRTCTVGGHKVIHQFLYMPDCPLPLLGRDLLSKLRATIYFTEHGSLLLKLPGTGVIMTLMVPREEEWKLFLTESGQEIRPALAKWWPRVWAEDNPPGLAVNQAPVLIEVKPRAQPVRQKQYPVPREALQGIQVHLKCLRTFGIIVPCQSPWNTPLLPVPKPGTKDYRPVQDLRLVNQATVTLHPTVPNWYTLLGLLPAEDSWFTCLDLKDAFFSIRLAPESQKLFAFQWEDPESGVTTQYTWIRLPKGFKNSPTIFGEALAQDLQKFPTRDLGCMLLQYVDDLFLGHPTAVRCAKGTDALLRHLEDCGYKVFKKKVQICRQQVRYLGFTIRQGECSLGSKRKQVICNLPEPKTRRQSPVKHDCVEVLDSVYSSRPDLRDQPWASVDWVLYVDGSSFINPQGERCAGYAVVTLDTVVEARSLPQGTSAQKTELIALIWALELSEGDS

SEQ ID NO: 36844 - protein, 1410 aa, Homo sapiens; identical to SEQ ID NO: 36207
  DOMAIN (872)..(917): kw TRANSCRIPTASE REVERSE II ORF2 domain identified by eMATRIX, accession number DM01354N, p-value=1.000e-40, raw score of 13.17
  DOMAIN (1209)..(1410): Caveolin domain identified by PFam, accession name Caveolin, E-value=9.9e-77, PFam score of 268.3
  misc_feature (1)...(1410): Xaa = X or * as defined in Table 2

SEQ ID NO: 36845 - protein, 620 aa, Homo sapiens; identical to SEQ ID NO: 33954
  DOMAIN (433)..(473): G-protein coupled receptors proteins domain identified by eMATRIX, accession number BL00237A, p-value=7.171e-13, raw score of 27.68
  DOMAIN (39)..(228): Gag P30 core shell protein domain identified by PFam, accession name Gag_p30, E-value=2e-47, PFam score of 169.9

SEQ ID NO: 36846 - protein, 486 aa, Homo sapiens
  DOMAIN (5)..(191): Gag P30 core shell protein domain identified by PFam, accession name Gag_p30, E-value=2.6e-38, PFam score of 137.8
MRGHFTCVDLLNWKNNTPPYTEKPQALTDLLQAVIQTHNPTWADWRQLLMFLFNSEERRRVLQAATKWLEEHAPADYQNPQEYGRTQLPGTDPQLDPHEREEMQRLNRDREALLEGLMRGAQKATNVNKLSEVIQGEEESPAQFYERLCEAYLRQSAEDMRRKLQKQAGLAGMNPSQLPEIASQVFVNKDTPRTKDYRPVQDLRLLHQATLTLHPTVPNPSTLLVLPPAEDSWFTFWNLKDAFFPIRLAPERQKLFAFQWEDPESESPVEPDCVEVLDSVDSSRPDLRDQAWASVDWELYVYGSSFFNPQGERGCSKNRGTISNHLFPQRCDESKSQVSSCIQRKNIKSYPRRLQLELWRRQLSLGLARGVDLGTPQKGPRGRLTERRRKAHRMLKLYNGLSEGEAVRLLAGTDPLDPTDLNGAHFNPEVYLDKLPRECPLAQLMDSETDMVQQIRALDSDMQTLVYENYDKFIPATEIDKQHKTV

SEQ ID NO: 36847 - protein, 501 aa, Homo sapiens
  DOMAIN (367)..(451): Integrase core domain identified by PFam, accession name rve, E-value=2.1e-14, PFam score of 53.8
MQLGIQQAKEKGHQNEEDTEVDDLLLGHPTAVGCAKGTDALHWHLEDCGCKVSKKKAQICRQQALAATALRVQEANKLTLEQNLNIKASRAVVTLMNTKGHHWLTNARLTQYQTWLCENPRITIEVCNSLHPATLLPVSESPVEPRCVEVLDTIDSSRPDLRGQPWASVDWELYVDGSSFFNPQGERGAGCAVITLDTVVEARSLSQATSAQKAELIAFIRALELSEGDTSELPPCWVWGIPALTQRLEKQHCFGAAVFPQAPDLGPTSSKEEKDFLQVEGRTSDGGRMDSVTGWESTVPQLLGAAVVLAVQETTHRHQESLEKLLGRYFYISPLSALAKTVRQRCVTCRQHDARQGPAVLPGIGAYGAAPFEGLQVDFTEMPKCGGNKYVLVLVCTYSGWVEAYPTLTEKAREVTRVLLRDLIPRFRPPLRIGSDKGPAFLAALLQKTAKMGTRSDTQLAHIGTVLRDIHVSVCSDGPNLRTGLNVILGGVEWQSTPGNL

SEQ ID NO: 36848 - protein, 345 aa, Homo sapiens
  DOMAIN (90)..(215): Gag P30 core shell protein domain identified by PFam, accession name Gag_p30, E-value=5.9e-34, PFam score of 122.5
  misc_feature (1)...(345): Xaa = X or * as defined in Table 2
TISQKRCTLPAILGLISYASSVNIRSNITGWLYIDRYVGSHVILYPLGIRMGVTGEMKGERRRGLHAATKWLEEHAPADYQNPQEYGRTQLPGTQPQLDPHEREDMQRLNRDREALLEGFKRGAQKATNVNKVSEVIQGKEESPAQFHQRLCEAYRMYTPLDHDSPENQRMIHMALVRQSAEDMRRKLQKQAGLAGMNPSQLLEIASQVFVNRDAVSPKENSKENGGQARRHDDLFSPVEPDCVEVLDSIHSSRPDLRDQPWPSGDWRTICGWEQLLQPPRRERCRVCSDNPGHWLLKPHRCPRPLQARKLNSLLSLGPXNSTRDCVRPIVCILPLITIALKISA

SEQ ID NO: 36849 - protein, 809 aa, Homo sapiens
  DOMAIN (737)..(752): OLFACTORY RECEPTOR SIGNATURE domain identified by eMATRIX, accession number PR00245B, p-value=2.286e-14, raw score of 10.38
  DOMAIN (69)..(279): Gag P30 core shell protein domain identified by PFam, accession name Gag_p30, E-value=1.2e-50, PFam score of 181.2
  misc_feature (1)...(809): Xaa = X or * as defined in Table 2
XYIWINITGWVYTYCDIERNIMLSPSLDIRSNNTARLRPKTGTQMPLREQRYTGIDKDGHLVERRAFGYQPITCVNLLNWKNNTQNYTEKPQALIDFLQAVIQTHNPTLADWHQLLMFLFNSEERRRVLQAVTKWLEEHAPADYQNPQEYGRTQLPGTDPQLDPHEREELQRLNRDREALLEGFKRGAQKATNINKLSEVIQGKEESPAQFDERLCEAYRMYTPFDPDSPENQRMIHMALVRQSAEDMRRKLQKQAGLAGMNPSQLLEIASQMFVNRDAVSPKENGKENGDGVSKGWPPCLRALAATALLVQEANKLTLGQNLNIKASRAVVTLMNTKGHHWLTDARLIKYQTLLCENPRITIEVCNTLHPASLLPVSESTVEPDCVEVLDSVDSSRPDLRDQAWASGDWKLYVYGSSFFNPQGKREVQALAKTVRQRCVTCRQHDARQGPAVPHGIRAYGAAPFEGLQVDFKEMPKCGGNKYVLFLGRTYSGWVEAYPTRTEKAREVTPVLLRDLIPKFRPPLWIGSNNGPAFLAALVQKTAKILGKNVTGDVNSPAILRVVSSSPPLYIGNNITEDPELQPVLALLSLSLSMYLVTVLRNLLSILAVRSESPLHTTMYFFLSILCWADIGFTSATVPKMIVDMQWYSKVISHAGCLTQMSFLVLFACIEGMLLTVMAYDCFVGICRPLHYPVIVNPHLCVFFVLVSFFLSLLDSQLHSWIVLQFTIIKNVEISNFVCDPSQLLKLACSDSVINSIFIYFGSTMFGFLPISGILLSYYKIVPSILRISSSDGKYKAFSTYGSHLAVFC

SEQ ID NO: 36850 - protein, 734 aa, Homo sapiens
  DOMAIN (390)..(412): OLFACTORY RECEPTOR SIGNATURE domain identified by eMATRIX, accession number PR00245A, p-value=5.950e-19, raw score of 18.03
  DOMAIN (175)..(439): 7 transmembrane receptor (rhodopsin family) domain identified by PFam, accession name 7tm_1, E-value=1.2e-25, PFam score of 83.7
MRDDSAMRLHVHNHLGNRGQGETDVSPAQANSFWLSGANLIGKKASLRSKQVNQLSSAGSNPNNVDGLGTVGWKVRDRRKNVTRGCTSPAILAVISSSAPLAYYQRYQTGVVYTPCDIGSIIILSTSGCPSHTEPRNLTGVSEFLLLGLSEDPELQPALALLSLSLSMYLVTELRNLFSILAVSSDCPLHTPMYFFLSNLCWPDIGFTSAMVPKMIVDTQSHSRVISHAGCLTQMSFLLLAACIEGMLLTVMAYDCFVAICPSVTPCTTENGVVASVMYAVVTPMLNPFIYSLRNRDIQSALWRLRSRTVESHDLLSQDLLHPFSCVGRTVDLFSVVMAQQRGRAVQSSEDPERQPVLTGLFLSTCLVMALGNLLIILAISPDSHLHTPMYFFLSNLSLPDISFTSTTVPKMTVDIQSHSRVISYAGCLTQMSLFAIFGGMEDRHTPDLLDAQLYNLIALQMTCFKDVEIPNFFCDPSQLPHLACCDTFNNNIILYFPDAIFGFLPISGTLFSYDKIVSSILRVSSSGGKYKAFSTYGSHLILQLISLCDSVYTPCDFRSNIPQSYDEKYHRVNTLCDRRNKLGIQQAKEKGHQNEEDTEVRIHDDWVVQRATDGYKAVIGHHSQEHVFYTCKKDQERHLCQAASMRDDSAMRLRVHNHLGNRGRGVTDVSPAQVGEEEVHGGVEVGVRADSQDAEQVPQHRDQIHGQGQGEQSEDRLQFWILCDVVPNIQGGR

SEQ ID NO: 36851 - protein, 746 aa, Homo sapiens
  DOMAIN (277)..(434): Gag P30 core shell protein domain identified by PFam, accession name Gag_p30, E-value=4.3e-36, PFam score of 130.0
ILTSVSSSFWCPFSLACWIPSCTVGLCYNSPSSRMWKSLILSVTPLNFSNLPVLTASSIAYSYISIRIQNGQLVLAGLFLSIVTGHGDGEPAHHLWPSALTPTSTPTCTSSSSNLSLPDIGFTSTTVPKMSVDIQSHSRVISYAGCLTQMSLFAIFGGMEKRHAPEILRSKWQGGEAPPAIRGVIPPASPPAYIKIQMAGRRGAPRDAGNYIRINITGCVYTYCDIERSIMLSPSLEIRSNITARLRPKTGTQMPLRVQRYTGIDEDGHVVERRVFGEERRRVLQAGTKWLEEHALADYQNPQEYGRTQLPGTDPQLDPHEREEMQRLNRDREALLEGLMRGAQKATNVNKLSEVIQGKEESPAQFYERLCEAYRMYTPFDPDSPENQHMIHMALVRQSAEDMRRKLQKQAGLAGMNPSQLLEIASQVFINRDAVSPKENGKENGGWPPCLRALAATALLVQEANKLTLGQNLNIKASRAVVTLMNTKGHHWLTDARLTKYQTLLCENPRITTEVCNTLHPATLLPVSESPVEPDCVEVLDSVDSSRPDLRDQAWASVDWELYVDGSSFFNPQGERGAGYAVVTLDTVVEARSLPQATSAQKAELVAFIRALELSEVETVNIYTDSRGHQRASTLLGLGNSRADSEARKAASAPFWASVLPQAPDLGPTSSKEEKDLLQISTALRIGSDNGPVFLAALVQKTAKILGKNVTGDVNSPAILRVVSSPPPLHIGKQHHSKKECSRRAG

SEQ ID NO: 36852 - protein, 527 aa, Homo sapiens
  DOMAIN (188)..(418): Ank repeat domain identified by PFam, accession name ank, E- value=1.7e-31, PFam score of 118.1
MSRAAAAAGPPRQATPASPRWSNDCVLRRECSNPIGHTLQHYPGRYQDHVQLEIPNRVLNSPVTKTPSRDPPTTSGVTSPASDEPPADIQTAQNSRQVVKGQSLTWTSKGLAMRRKGSRDLVVDSAKSLEDGPSAALHSKLYEAIMREDCTTIEVLLRNHPVNQPITILPNSASNRLLLTQPTESIIPIHLAAKYHKAQSLLCLLRHGADPEVRDTTGLTTLNLMLLHWPVTSTTWAKPGNRTHRILTDIQNSSITCLRILCAHGAQVNTQGEISNKRSPLHLAIAYGCYPVLSILTQNGADVNAINEASMTPLHMAANMLNKEMMETLIAYGANVNCAVSSTGNTPLKLAVCTASSKAGRLLGAGVSCIRLLLTHGAKVNAQDYKGQTAIHEACFGGREAIINLLLEFEANVNILTRNGESPIYMYLQRSCNVRDTALLARLLYHTYPLRMTNNQGILPAGIMLPEFRLLRDTLIKQSQKPLSLQGICQRNIRNIYGEKYKQPLKQFLPVTIWNSVYCWYDLAYTS

SEQ ID NO: 36853 - protein, 142 aa, Homo sapiens [sequence omitted]

SEQ ID NO: 36854 - protein, 158 aa, Homo sapiens
  DOMAIN (105)..(133): HECT-domain (ubiquitin-transferase) domain identified by eMATRIX, accession number PF00632B, p-value=9.486e-19, raw score of 18.45
  DOMAIN (1)..(153): HECT-domain (ubiquitin-transferase) domain identified by PFam, accession name HECT, E-value=1.5e-05, PFam score of -55.9
CRVDPRVREEVPLKPGGGSILVTQNNKAEYVQLGTELRMTRAIQPQINAFLQGFHMFIPPSLIQLFDEYELELLLSGMPEIDVSDWIKNTEYTSGYEREDPVIQWFWEVVEDITQEERVLLLQFVTGSSRGPTWVGFANIMGWEVGLQNFYNRWLCHI

SEQ ID NO: 36855 - protein, 167 aa, Homo sapiens
METGTPDVAVIQMRSDDSLDWGAEMEAEYVQLVTELRMTRAIQPQINAFLQGFHMFIPPSLIQLFDEYELLPVQIGSKQAEEHGRARLAKSSGLHLSPLLDATCPRTSDSKSSAFGLLDLHQGLSDLQPQTKGCTVGFPIFEVLDSNWLPCSLACRQLTVELHLLIM

SEQ ID NO: 36856 - protein, 192 aa, Homo sapiens
  misc_feature (1)...(192): Xaa = X or * as defined in Table 2
SMWWNSAREPCPWRIVDDCGGAFTMGVIGGGVFQAIKGFRNAPVCRLLSEAPLFIYSCSRSVSPTVNVSSERAESRPTLFMAVSLHMAWCLAHIGIRHRLRGSANAVRIRAPQIGGSFAVWGGLFSTIDCGLVRLRGKEDPWNSITSGALTGAVLAARSAPLAMVGSAMMGGILLALIEGVSILLTRXTATV

SEQ ID NO: 36857 - protein, 181 aa, Homo sapiens
  misc_feature (1)...(181): Xaa = X or * as defined in Table 2
RRFRASAMEEYAREPCPWRIVDDCGGAFTMGVIGGGVFQAIKGFRNAPVGIRHRLRGSANAVRIRAPQIGGSFAVWGGLFSTIDCGLVRLRGKEDPWNSITSGALTGAVLAARSGPLAMGGLQQXWGGILFAPHLRAFGILLTRYTAQQFRNAPPFLEDPSQLPPKDGTPATGYPSYQQYH

SEQ ID NO: 36858 - protein, 684 aa, Homo sapiens
  DOMAIN (553)..(616): SAM domain (Sterile alpha motif) domain identified by PFam, accession name SAM, E-value=2.9e-10, PFam score of 47.5
EAAARLLSCKWLKSRRIMIPAQNEDGELEPERPELPGLHKLYENAEPDTMAKADSKLPAEIYQEPQPETEEEDFKEGEPDSAKNVQLKPGGTSQEGIAKESKRDVPSETEPGIHQEVKSETSREMGEFFKDLEAPMDETHKESDLEPPEEAKPNVTEDVFLESAMETDPDPVPPTETMSEVSGATVRERNLELLEEETEPGVPEESLRVQHEETGLEPPEQTKQDFPSEKLGESLEETDLQPPKMTKPETPEETQRESTEKKRTEPPEQARLEFLEKEPRKSSEEAGLEPPEETQPEVPEEMQRKATEEKGTELPERTKPDFPDHKPRKSTDENVPEPLEEIKLEFPEEESRKTNEETILEQSEMMKPESPEEIRKSNEKKNPQPPEETGPVLPQEINPQVEEKTQTKPTEKILELPDETKPRETHVEFSKEDRPEPIKSKYSVGNDELEHREPKRGKLSLSDKFRKEYYALGSLRESEESIGTHYEFLQPLQKLLNVSEECSYSDPSESQTELSEFVHEKEVVDLSQELKERVSEDDETQPEKGTELQFEHLNWDPEEVAEWISQLGFPQYKECFITNFISGRKLIHVNCSNLPQMGITNFEDMKAISRHTQELLEIEEPLFKRSISLPYRDIIGLYLEQKGHTGIKSDSLTLSEFVKAAGLQDYAPEITAPEENEELPCTEP

SEQ ID NO: 36859 - protein, 323 aa, Homo sapiens
  misc_feature (1)...(323): Xaa = X or * as defined in Table 2
FLHFHLRNAVPHQQWNKAGWRMTLRSXEKKASDDQITLSYGRTFKPKDKEVENFEQNLEECITRITNTEKCLKELMELKTKARELREECRSLRSRCDQLEERISVMEDEMNEMKREGKFREKRIKRNEQSLQEIWDYVKRPNLRLIGVPESDGENGTKLENTLQHIIQENFPNLARQANVQIQEIQRTPQRYSSRIAIPRHIIVRFTKVEMKEKMLRAAREKGRVTLKGKPIRLTADLSAETLQARREWGPIFNILKENNFQPRISYPAKLSFISEEEIKYLTDKQMVRDFVTTRPALKELLKEALNMERNNRYQLLQNHAKF

SEQ ID NO: 36860 - protein, 350 aa, Homo sapiens
  misc_feature (1)...(350): Xaa = X or * as defined in Table 2
TGAVPIRPSWQRWGKNRTEKLETLKRRAPLLLQRNAVPHQQQNKAGWRMILTSXEKKASDDQITLSYGRTFKPKDKEVENFEKNLEECITRITNTEKCLKELMELKTKAPELREECRSLRSRCDQLEERVSAMEDEMNEMKREGKFREKRIKRNEQSLQEIWDYVKRPNLHLIGVPESDVENGTKLENTLQDIIQENFPNLARQANVQIQEIQRTPQRYSSRRATPRHIIVRFTKVEMKEKMLRAAREKGRVTLKGKPIRLTADLSAETLQARREWGPIFNILKEKNFQPRISYPAKLSFISEGEIKYFIDKQMLRDFVTTRPALKELLKEALNMERNNRYQPLQNHAKM

SEQ ID NO: 36861 - protein, 55 aa, Homo sapiens
MEMQKSPVFCVTHAGSCRPELFLFGHLGCPPLPLFLTGRIKPLHCLYSFFFFQLP

SEQ ID NO: 36862 - protein, 76 aa, Homo sapiens
  misc_feature (1)...(76): Xaa = X or * as defined in Table 2
KSQNQLLSSKGEYADGQQDQVSIPAPSPYTLSGPQTQSCPVRPELGLXGASSAVQAPAVRYLTRFLLFVMSNLHSP

SEQ ID NO: 36863 - protein, 298 aa, Homo sapiens
MPRPALAGARCAQPLTCAHCLALPSEMNPLPQMEMQKSPSSASLRLGAVDWSCSYSAILAPPPLNFPFLYPYHIHIIPERCHDIDPHGEDPVEMTPGGLMNYKSQGTAFSLGCCFEKKKTRKFEDTMPGEVVENRYNEQGLCHPGTLYPRKQVEQIKRFILTEEYKTIRQKNFPESSSKEKENKESLLVPPPRRSVVSTACYCQCFLKARGLFTQLVVNTARPLPLEQWAPLWPRAGPEMLSRNQGLKSKALGASLVLYLNLVTKLQDQVPFTLPSPCLKQDEFLPVATRTGNVLSDT

SEQ ID NO: 36864 - protein, 2633 aa, Homo sapiens
  DOMAIN (77)..(99): KINESIN HEAVY CHAIN SIGNATURE domain identified by eMATRIX, accession number PR00380A, p-value=1.000e-25, raw score of 14.18
  DOMAIN (12)..(2412): Kinesin motor domain identified by PFam, accession name kinesin, E-value=4.9e-217, PFam score of 734.4
  misc_feature (1)...(2633): Xaa = X or * as defined in Table 2
MAEEGAVAVCVRVRPLNSREESLGETAQVYWKTDNNVIYQVDGSKSFNFDRVFHGNETTKNVYEEIAAPIIDSAIQGYNGTIFAYGQTASGKTYTMMGSEDHLGVIPRAIHDIFQKIKKFPDREFLLRVSYMEIYNETITDLLCGTQKMKPLIIREDVNRNVYVADLTEEVVYTSEMALKWITKGEKSRHYGETKMNQRSSRSHTIFRMILESREKGEPSNCEGSVKVSHLNLVDLAGSERAAQTGAAGVRLKEGCNINRSLFILGQVIKKLSDGQVGGFINYRDSKLTRILQNSLGGNPKTRIICTITPVSFDETLTALQFASTAKYMKNTPYVNEVSTDEALLKRYRKEIMDLKKQLEEVSLETRAQAMEKDQLAQLLEEKDLLQKVQNEKIENLTRMLVTSSSLTLQQELKAKRKRRVTWCLGKINKMKNSNYADQFNIPTNITTKTHKLSINLLREIDESVCSESDVFSNTLDTLSEIEWNPATKLLNQENIESELNSLRADYDNLVLDYEQLRTEKEEMELKLKEKNDLDEFEALERKTKKDQEMQLIHEISNLKNLVKHREVYNQDLENELSSKVELLREKEDQIKKLQEYIDSQKLENIKMDLSYSLESIEDPKQMKQTLFDAETVALDAKRESAFLRSENLELKEKMKELATTYKQMENDIQLYQSQLEAKKKMQVDLEKELQSAFNEITKLTSLIDGKVPKDLLCNLELEGKITDLQKELNKEVEENEALREEVILLSELKSLPSEVERLRKEIQDKSEELHIITSEKDKLFSEVVHKESRVQGLLEEIGKTKDDLATTQSNYKSTDQEFQNFKTLHMDFEQKYKMVLEENERMNQEIVNLSKEAQKFDSSLGALKTELSYKTQELQEKTREVQERLNEMEQLKEQLENRDSPLQTVEREKTLITEKLQQTLEEVKTLTQEKDDLKQLQESLQIERDQLKSDIHDTVNMNIDTQEQLRNALESLKQHQETINTLKSKISEEVSRNLHMEENTGETKDEFQQKMVGIDKKQDLEAKNTQTLTADVKDNEIIEQQRKIFSLIQEKNELQQMLESVIAEKEQLKTDLKENIEMTIENQEELRLLGDELKKQQEIVAQEKNHAIKKEGELSRTCDRLAEVEEKLKEKSQQLQEKQQQLLNVQEEMSEMQKKINEIENLKNELKNKELTLEHMETERLELAQKLNENYEEVKSITKERKVLKELQKSFETERDHLRGYIREIEATGLQTKEELKIAHIHLKEHQETIDELRRSVSEKTAQIINTQDLEKSHTKLQEEIPVLHEEQELLPNVKKVSETQETMNELELLTEQSTTKDSTTLARIEMERLRLNEKFQESQEEIKSLTKERDNLKTIKEALEVKHDQLKEHIRETLAKIQESQSKQEQSLNMKEKDNETTKIVSEMEQFKPKDSALLRIEIEMLGLSKRLQESHDEMKSVAKEKDDLQRLQEVLQSESDQLKENIKEIVAKHLETEEELKVAHCCLKEQEETINELRVNLSEKETEISTIQKQLEAINDKLQNKIQEIYEKEEQLNIKQISEVQENVNELKQFKEHRKAKDSALQSIESKMLELTNRLQESQEEIQIMIKEKEEMKRVQEALQIERDQLKENTKEIVAKMKESQEKEYQFLKMTAVNETQEKMCEIEHLKEQFETQKLNLENIETENIRLTQILHENLEEMRSVTKERDDLRSVEETLKVERDQLKENLRETITRDLEKQEELKIVHMHLKEHQETIDKLRGIVSEKTNEISNMQKDLEHSNDALKAQDLKIQEELRIAHMHLKEQQETIDKLRGIVSEKTDKLSNMQKDLENSNAKLQEKIQELKANEHQLITLKKDVNETQKKVSEMEQLKKQIKDQSLTLSKLEIENLNLAQELHENLEEMKSVMKERDNLRRVEETLKLERDQLKESLQETKARDLEIQQELKTCSEKISEKTIQISDIQKDLDKSKDELQKKIQELQKKELQLLRVKEDVNMSHKKINEMEQLKKQFEPNYLCKCEMDNFQLTKKLHESLEEIRIVAKERDELRRIKESLKMERDQFIATLREMIARDRQNHQVKPEKRLLSDGQQHLMESLREKCSRIKELLKRYSEMDDHYECLNRLSLDLEKEIEFHRIMKKLKYVLSYVTKIKEEQHECINKFEMDFIDEVEKQKELLIKIQHLQQDCDVPSRELRDLKLNQNMDLHIEEILKDFSESEFPSIKTEFQQVLSNRKEMTQFLEEWLNTRFDIEKLKNGIQKENDRICQVNNFFNNRIIAIMNESTEFEERSATISKEWEQDLKSLKEKNEKLFKNYQTLKTSLASGAQVNPTTQDNKNPHVTSRATQLTTEKIRELENSLHEAKESAMHKESKIIKMQKELEVTNDIIAKLQAKVHESNKCLEKTKETIQVLQDKVALGAKPYKEEIEDLKMKLVKIDLEKMKNAKEFEKEISATKATVEYQKEVIRLLRENLRRSQQAQDTSVISEHTDPQPSNKPLTCGGGSGIVQNTKALILKSEHIRLEKEISKLKQQNEQLIKQKNELLSNNQHLSNEVKTWKERTLKREAHKQVTCENSPKSPKVTGTASKKKQITPSQCKERNLQDPVPKESPKSCFFDSRSKSLPSPHPVRYFDNSSLGLCPEVQNAGAESVDSQPX

SEQ ID NO: 36865 - protein, 78 aa, Homo sapiens
SFLWKFCLRGVPGHPVGKAQYSGGSGPIFQVPSVTPFLDQERELPDPLRFPCDAMPRPASAGARCAAPTVLHLLSGTP

SEQ ID NO: 36866 - protein, 377 aa, Homo sapiens
  misc_feature (1)...(377): Xaa = X or * as defined in Table 2
ERADCLFKRKTNNQKGHLHRKPICTSPSSKTKSRXNHKDGEKTEQKNWKLXNAERLSSSIRNAVPHQQQNKAGWRMILTSXEKKASDDQITLSYGRTFKPKDKEVENFEKNLEECITRITNTEKCLKELMELKTKARELHEECRSLRSRCDQLEERVSAMEDEMNEMKREGKFREKRIKRNEQSLQEIWDYVKRPNLRLIGVPESDVENGTKLENTLQDIIQENFPNLARQANVQIQEIQRTPQRYSSRRATPRHIIVRFTKVEMKEKMLRAAREKGQVTLKGKPIRLTADLSAETLQARREWGPIFNILKEKNFQPKISYPAKLSFISEGEIKYFIDKQMLRDFVTTRPALKELLKEELNMERNNRYQPLQNHAKM

SEQ ID NO: 36867 - protein, 255 aa, Homo sapiens
  misc_feature (1)...(255): Xaa = X or * as defined in Table 2
MAGAPPPASLPPCSLILDCCASNQRDSVGVGPSEPGVGYSLVVRRFLSRSEKRNIRVGVTRFSSEMNPVPQMEMQKSPSSASLTLGAVDRSCSYSAILAPPLGFCFYPLYENSTLQSAKKRDAELANGALGIIELNNDYTLKKVMKPLITSNTVTDEIERANVFKMNGKWYLFTDSRGSKMTIDGINSNDIYMLGYDIKLFNRPLQAAEQNRACAANGSXSKRCDIHLLSLRSAASQRQQCGYHKLHDKQRLLRG

SEQ ID NO: 36868 - protein, 93 aa, Homo sapiens
  misc_feature (1)...(93): Xaa = X or * as defined in Table 2
XHKETVDKLREKISEKTIQISDIQKDLDKSKDELQKKMEMQKSPSSASPTLEAVDRNCSYSAILAPPRRMISRNEHNRPRAPEEDPQSVIFPI

SEQ ID NO: 36869 - protein, 323 aa, Homo sapiens; identical to SEQ ID NO: 36859
  misc_feature (1)...(323): Xaa = X or * as defined in Table 2

SEQ ID NO: 36870 - protein, 651 aa, Homo sapiens
  DOMAIN (129)..(174): kw TRANSCRIPTASE REVERSE II ORF2 domain identified by eMATRIX, accession number DM01354N, p-value=1.000e-40, raw score of 13.17
  DOMAIN (215)..(488): Reverse transcriptase domain identified by PFam, accession name rvt, E-value=1.4e-82, PFam score of 287.7
TRYLRWKCRNHPSSASLTLGAVDQSLFLFGHLGSQLKELEKQEQTHSKASRRQEITKSRAELKEIETQKTLQRINESRSWFFERINKIDRPLARLIKKKREKNQIHAIKNDKGNITTDPTEIQTTIREYYKHLYANKLENLEEIDKFLDTYSLPRLNQEEVESLNRPIAGSEIVALINSLPTKKSPGPDGFTAEFYQRYKEELVPFLLKLFQPIEKEGILPNSFYEASIILIPKLGRDTNKKENFRPISLMNIDAKILNKILAKRIQQHIKKLIHHDQVGFIPGMQGWFNIRKSINVIQHINRTKDKNHMIISIDAEKAFDKIQQPFMLKTLNKLGIDGTYLKIIRAIYDKPTANIILNGQKLEAFSLKTGTRQGGPLSPLLFNIVWEVLTRAIRQEKEIKGIQLGKEEVKLSLFADDMIVYLENPIVSAQNLLKLISNFSKVSGYKINVQKSQAFLYANNRQTESQIMSELPFTIASKRIKYLGIQLTRDMKDLFKENYKPLLNEIKEDRKKWKNIPCSWVGGINIVKMAILPKVIYRFNAIPIKLPMPSFTELEKSTLKFIWNQKRARIAKSILSQKNKAGGIMLPDFKLYYKATVTKTAWYWHQNRDIDQWNRTEPSEITPHIYNYLIFDKPEKNKQWGKDSLFNKWC

SEQ ID NO: 36871 - protein, 539 aa, Homo sapiens
  DOMAIN (315)..(350): Matrix protein (MA) p15. domain identified by eMATRIX, accession number PF01140D, p-value=8.200e-10, raw score of 15.54
MAAKILYCKDKKQRDRVISNGIEGDVCKPLEQYFRYPGLLGGRAHLWGWLIGCCSAHLREVKQGDQIKCWKGYQAFYRSWLFLATSITAFLSTGFFIKFLSFESSSSYLGSNVVSPTQFYIFHHHFLCSALRKVFAHPAEIQGESPLANLQMMQMTPLPPASVNLQATFLFFKMPIMNGHFSNCNSLAHPFLSLPFLMLGNYSPTLGLIFFVDFGDRSAFILSVGELFPWSPYLPGAVECTMNQEQHGAEPSEDHSYCDCQPLRGPYSSSPPGTDTHPCEGLAPASPSAMSKISPRLPQKQMQPCFLYSLQNSRGIFEEEEEEEEEEEEEEEEEEEEEDDEEEEEEEKWFYTMLDKHPIDTIMEDSTREGHVGFVFSGTSRPALVLQVLLSQCGQLVGLISSQHSLELVPEQNIQLDVCHNSNVPAKMRCMNHTAISSKRCLQTLTTSISGPRDLRLVILFSTAAFPRGENQKSRRKCRSRRITNRDFLFRLISLVDELNINPHRVTLRSPHECAAITIHRTCQRPGKNQDRASLCDSG

SEQ ID NO: 36872 - protein, 154 aa, Homo sapiens
  DOMAIN (94)..(105): PROTEIN REPEAT MUSCLE CALCIUM-BI domain identified by eMATRIX, accession number PD00301A, p-value=6.400e-09, raw score of 10.24
  misc_feature (1)...(154): Xaa = X or * as defined in Table 2
MGPIHKISHYVYANISKSEKVLKSEHFRSQAFQPGQQSETVSEKKKKTRKKRKKRKKKRKKKKKKKKKKKKKKKKKKKKKKKKKSEXDRLGKKEEDEEEEEEEEEEEEEEEEEEEEEEEEEEEEEEEEEEEEEEEEEEEEEEEEEEEEEEEEEI

SEQ ID NO: 36873 - protein, 57 aa, Homo sapiens
  DOMAIN (8)..(36): Dehydrins proteins domain identified by eMATRIX, accession number BL00315A, p-value=7.985e-09, raw score of 9.35
RKKGGGEREEEGEGEEEEEEEEEEEEEEEEEEEEEEEEEEEVVLLTPGTGAEDFKKH

SEQ ID NO: 36874 - protein, 109 aa, Homo sapiens
  DOMAIN (67)..(95): Granins proteins domain identified by eMATRIX, accession number BL00422C, p-value=8.054e-13, raw score of 16.18
MEMQDYLRLFEGLPGEVWDPVQNQICMRSQGLRVEYNTPLSSREEEEEEEEEEEEEEEEEEEEEEEEEEEEEEEEEEEEEEEEEEEEEEERKKECSKAQCKHFPLSEVL

SEQ ID NO: 36875 - protein, 49 aa, Homo sapiens; identical to SEQ ID NO: 34332
  DOMAIN (16)..(44): Granins proteins domain identified by eMATRIX, accession number BL00422C, p-value=9.270e-13, raw score of 16.18

SEQ ID NO: 36876 - protein, 60 aa, Homo sapiens; identical to SEQ ID NO: 34324
  DOMAIN (1)..(52): Neuromodulin (GAP-43) proteins domain identified by eMATRIX, accession number BL00412D, p-value=4.273e-14, raw score of 16.54

SEQ ID NO: 36877 - protein, 65 aa, Homo sapiens; identical to SEQ ID NO: 34287
  DOMAIN (4)..(55): Neuromodulin (GAP-43) proteins domain identified by eMATRIX, accession number BL00412D, p-value=2.688e-13, raw score of 16.54
  misc_feature (1)...(65): Xaa = X or * as defined in Table 2

SEQ ID NO: 36878 - protein, 196 aa, Homo sapiens; identical to SEQ ID NO: 36693
  DOMAIN (64)..(92): Granins proteins domain identified by eMATRIX, accession number BL00422C, p-value=2.029e-14, raw score of 16.18

SEQ ID NO: 36879 - protein, 68 aa, Homo sapiens
LGEEGPGPEHGEQPPVEERPQERSVSGSFPLQPHAAGGTSAPAPSRPQIPPRAGRDVTGKEQDCRSIE

SEQ ID NO: 36880 - protein, 52 aa, Homo sapiens
AADSTQCSGSPAPSRLRPFQPLAESLANCLYYFVHCFHQSALPWLTGQNCYF

SEQ ID NO: 36881 - protein, 779 aa, Homo sapiens
  DOMAIN (261)..(308): 7-fold repeat proteins in Clathrin also in VPS proteins. domain identified by eMATRIX, accession number PF00637C, p-value= 4.000e-37, raw score of 27.33
  DOMAIN (36)..(754): 7-fold repeat in Clathrin and VPS domain identified by PFam, accession name Clathrin_repeat, E-value=2.4e-196, PFam score of 665.7
RYIEIYVQKVNPSRTPAVIGGLLDVDCSEEVIKHLIMAVRGQFSTDELVAEVEKRNRLKLLLPWLESQIQEGCEEPATHNALAKIYIDSNNSPECFLRENAYYDSSVVGRYCEKRDPHLACVAYERGQCDLELIKVCNKNSLFKSEARYLVCRKDPELWAHVLEETNPSRRQLIDQVVQTALSETRDPEEISVTVKAFMTADLPNELIELLEKIVLDNSVFSEHRNLQNLLILTAIKADRTRVMEYISRLDNYDALDIASIAVSSALYEEAFTVFHKFDMNASAIQVLIEHIGNLDRAYEFAERCNEPAVWSQLAQAQLQKDLVKEAINSYIRGDDPSSYLEVVQSASRSNNWEDLVKFLQMARKKGRESYIETELIFALAKTSRVSELEDFINGPNNAHIQQVGDRCYEEGMYEAAKLLYSNVSNFARLASTLVHLGEYQAAVDNSRKASSTRTWKEVCFACMDGQEFRFAQLCGLHIVIHADELEELMCYYQDRGYFEELILLLEAALGLERAHMGVFTELAILYSKFKPQKMLEHLELFWSRVNIPKVLRAAEQAHLWAELVFLYDKYEEYDNAVLTMMSHPTEAWKEGQFKDIITKVANVELCYRALQFYLDYKPLLINDLLLVLSPRLDHTWTVSFFSKAGQLPLVKPYLRSVQSHNNKSVNEALNHLLTEEEDYQGLRASIDAYDNFDNISLMPCSMLQSRGMLSWPRSCCSDMVLELAWRHNLVDLAMPYFIQVMREYLSKVDKLDALESLRKQEEHVTEPAPLVFDFDGHE

SEQ ID NO: 36882 - protein, 1643 aa, Homo sapiens
  DOMAIN (1075)..(1122): 7-fold repeat proteins in Clathrin also in VPS proteins. domain identified by eMATRIX, accession number PF00637C, p-value= 4.000e-37, raw score of 27.33
  DOMAIN (554)..(1599): 7-fold repeat in Clathrin and VPS domain identified by PFam, accession name Clathrin_repeat, E-value=0, PFam score of 1081.5
IRDSCRCRRRRRGPAPAMAQILPVRFQEHFQLQNLGINPANIGFSTLTMESDKFICIREKVGEQAQVTIIDMSDPMAPIRRPISAESAIMNPASKVIALKAGKTLQIFNIEMKSKMKAHTMAEEVIFWKWVSVNTVALVTETAVYHWSMEGDSQPMKMFDRHTSLVGCQVIHYRTDEYQKWLLLVGISAQQNRVVGAMQLYSVDRKVSQHIEGHAAAFAEFKMEGNAKPATHFCFAVRNPTGGKLHIIEVGQPAAGNQPFVKKAVDVFFPPEAQNDFPVAMQIGAKHGVIYLITKYGYLHLYDLESGVCICMNRISADTIFVTAPHKPTSGIIGVNKKGQVLSVCVEEDNIVNYATNVLQNPDLGLRLAVRSNLAGAEKLFVRKFNTLFAQGSYAEAAKVAASAPKGILRTRETVQKFQSIPAQSGQASPLLQYFGILLDQGQLNKLESLELCHLVLQQGRKQLLEKWLKEDKLECSEELGDLVKTTDPMLALSVYLRANVPSKVIQCFAETGQFQKIVLYAKKVGYTPDWIFLLRGVMKISPEQGQQFSRMLVQDEEPLANISQIVDIFMENSLIQQCTSFLLDALKNNRPAEGLLQTWLLEMNLVHAPQVADAILGNKMFTHYDRAHIAQLCEKAGLLQQALEHYTDLYDIKRAVVHTHLLNPEWLVNFFGSLSVEDSVECLHAMLSANIRQNLQLCVQVASKYHEQLGTQALVELFESFKSYKGLFYFLGSIVNFSQDPDVHLKYIQAACKTGQIKEVERICRESSCYNPERVKNFLKEAKLTDQLPLIIVCDRFGFVHDLVLYLYRNNLQRYIEIYVQKVNPSRTPAVIGGLLDVDCSEEVIKHLIMAVRGQFSTDELVAEVEKRNRLKLLLPWLESQIQEGCEEPATHNALAKIYIDSNNSPECFLRENAYYDSSVVGRYCEKRDPHLACVAYERGQCDLELIKVCNENSLFKSEARYLVCRKDPELWAHVLEETNPSRRQLIDQVVQTALSETRDPEEISVTVKAFMTADLPNELIELLEKIVLDNSVFSEHRNLQNLLILTAIKADRTRVMEYISRLDNYDALDIASIAVSSALYEEAFTVFHKFDMNASAIQVLIEHIGNLDRAYEFAERCNEPAVWSQLAQAQLQKDLVKEAINSYIRGDDPSSYLEVVQSASRSNNWEDLVKFLQMARKKGRESYIETELIFALAKTSRVSELEDFINGPNNAHIQQVGDRCYEEGMYEAAKLLYSNVSNFARLASTLVHLGEYQAAVDNSRKASSTRTWKEVCFACMDGQEFRFAQLCGLHIVIHADELEELMCYYQDRGYFEELILLLEAALGLERAHMGMFTELAILYSKFKPQKMLEHLELFWSRVNIPKVLRAAEQAHLWAELVFLYDKYEEYDNAVLTMMSHPTEAWKEGQFKDIITKVANVELCYRALQFYLDYKPLLINDLLLVLSPRLDHTWTVSFFSKAGQLPLVKPYLRSVQSHNNKSVNEALNHLLTEEEDYQGLRASIDAYDNFDNISLAQQLEKHQLMEFRCIAAYLYKGNNWWAQSVELCKKDHLYKDAMQHAAESRDAELAQKLLQWFLEEGKRECFAACLFTCYDLLRPDMVLELAWRHNLVDLAMPYFIQVMREYLSKVDKLDALESLPPSKRSM

SEQ ID NO: 36883 - protein, 1583 aa, Homo sapiens
  DOMAIN (1072)..(1119): 7-fold repeat proteins in Clathrin also in VPS proteins. domain identified by eMATRIX, accession number PF00637C, p-value= 4.000e-37, raw score of 27.33
  DOMAIN (551)..(1543): 7-fold repeat in Clathrin and VPS domain identified by PFam, accession name Clathrin_repeat, E-value=6.6e-272, PFam score of 916.7
  misc_feature (1)...(1583): Xaa = X or * as defined in Table 2
SCRCRRRRRGPAPAMAQILPVRFQEHFQLQNLGINPANIGFSTLTMESDKFICIREKVGEQAQVTIIDMSDPMAPIRRPISAESAIMNPASKVIALKAGKTLQIFNIEMKSKMKAHTMAEEVIFWKWVSVNTVALVTETAVYHWSMEGDSQPMKMFDRHTSLVGCQVIHYRTDEYQKWLLLVGISAQQNRVVGAMQLYSVDRKVSQPIEGHAAAFAEFKMEGNAKPATLFCFAVRNPTGGKLHIIEVGQPAAGNQPFVKKAVDVFFPPEAQNDFPVAMQIGAKHGVIYLITKYGYLHLYDLESGVCICMNRISADTIFVTAPHKPTSGIIGVNKKGQVLSVCVEEDNIVNYATNVLQNPDLGLRLAVRSNLAGAEKLFVRKFNTLFAQGSYAEAAKVAASAPKGILRTRETVQKFQSIPAQSGQASPLLQYFGILLDQGQLNKLESLELCHLVLQQGRKQLLEKWLKEDKLECSEELGDLVKTTDPMLALSVYLRANVPSKVIQCFAETGQFQKIVLYAKKVGYTPDWIFLLRGVMKISPEQGLQFSRMLVQDEEPLANISQIVDIFMENSLIQQCTSFLLDALKNNRPAEGLLQTWLLEMNLVHAPQVADAILGNKMFTHYDRAHIAQLCEKAGLLQQALEHYTDLYDIKRAVVHTHLLNPEWLVNFFGSLSVEDSVECLHAMLSANIRQNLQLCVQVASKYHKQLGTQALVELFESFKSYKGLFYFLGSIVNFSQDPDVHLKYIQAACKTGQIKEVERICRESSCYNPERVKNFLKEAKLTDQLPLIIVCDRFGFVHDLVLYLYRNNLQRYIEIYVQKVNPSRTPAVIGGLLDVDCSEEVIKHLIMAVRGQFSTDELVAEVEKRNRLKLLLPWLESQIQEGCEEPATHNALAKIYIDSNNSPECFLRENAYYDSSVVGRYCEKRDPHLACVAYERGQCDLELIKVCNENSLFKSEARYLVCRKDPELWAHVLEETNPSRRQLIDQVVQTALSETRDPEEISVTVKAFMTADLPNELIELLEKIVLDNSVFSEHRNLQNLLILTAIKADRTRVMEYISRLDNYDALDIASIAVSSALYEEAFTVFHKFDMNASAIQVLIEHIGNLDRAYEFAERCNEPAVWSQLAQAQLQKDLVKEAINSYIRGDDPSSYLEVVQSASRSNNWEDLVKFLQMARKKGRESYIETELIFALAKTSRVSELXDFINGPNNAHIQQVGDRCYEEGMYEAAKLLYSNVSNFARLASTLVHLGEYQAAVDNSRKASSTRTWKEVCFACMDGQEFRFAQLCGLHIVIHADELEELMCYYPDPCFFEELILLLEAALGLERAHMGVFTELAILYSKFKPQKMLEHLELFWSRVNIPKVLRAAEQAHLWAELVFLYDKYEEYDNAVLTMMSHPTEAWKEGQFKDIITKVANVELCYRALQFYLDYKPLLINDLLLVLSPRLDHTWTVSFFSKAGQLPLVKPYLRSVQSHNNKSVNEALNHLLTEKEDYQDAMQHAAESRDAELAQKLLQWFLEEGKRECFAACLFTCYDLLRPDMVLELAWRHNLVDLAMPYFIQVMREYLSKVDKLDALESLPPSKRSM

SEQ ID NO: 36884 - protein, 146 aa, Homo sapiens; identical to SEQ ID NO: 34618
  DOMAIN (16)..(35): Eukaryotic  RNA-binding region RNP-1 proteins domain identified by eMATRIX, accession number BL00030A, p-value=1.000e- 12, raw score of 14.39
  DOMAIN (58)..(128): RNA recognition motif. domain identified by PFam, accession name rrm, E-value=6.4e-24, PFam score of 92.9
  misc_feature (1)...(146): Xaa = X or * as defined in Table 2

SEQ ID NO: 36885 - protein, 185 aa, Homo sapiens
  DOMAIN (65)..(75): Eukaryotic  RNA-binding region RNP-1 proteins domain identified by eMATRIX, accession number BL00030B, p-value=4.600e- 11, raw score of 7.03
  DOMAIN (28)..(98): RNA recognition motif. domain identified by PFam, accession name rrm, E-value=1.3e-14, PFam score of 62.0
  misc_feature (1)...(185): Xaa = X or * as defined in Table 2
MNARPHKVDGRVVEPKRAVXEDSQRPAFVAGIKEDTEEHHLRDYFQQYGKMEVIEIMTDRGSGKKRGFAFVTFDNHDSVDKTVVQKYHTANDHNCEGRKALSKQEMASASSSQRGHSSSGNFRGGHGGGFGGNDIFGYGENFSGHGGFSGSCGGGGYGSSGGGYNEFGNDGSNTGGGGSYNDFGN

SEQ ID NO: 36886 - protein, 215 aa, Homo sapiens
  DOMAIN (96)..(106): Eukaryotic  RNA-binding region RNP-1 proteins domain identified by eMATRIX, accession number BL00030B, p-value=4.600e- 11, raw score of 7.03
  DOMAIN (57)..(127): RNA recognition motif. domain identified by PFam, accession name rrm, E-value=3.6e-13, PFam score of 57.2
MLAAAGWAAPGASMGADSLRGYGWTMYHKQLPRLASGNAVAPGILGEARNCRAPKQTFVAGIKEDTEEHHLRDYFQQYGKMEVIEIMTDRGSGKKRGFAFVTFDNHDSVDKTVVQKYHTANDHNCEGRKALSKQEMASASSSQRGHSSSGNFRGGHGGGFGGNDIFGYGENFSGHGGFSGSCGGGGYGSSGGGYNEFGNDGSNTGGGGSYNDFGN

SEQ ID NO: 36887 - protein, 312 aa, Homo sapiens
  DOMAIN (137)..(147): Eukaryotic  RNA-binding region RNP-1 proteins domain identified by eMATRIX, accession number BL00030B, p-value=1.900e- 11, raw score of 7.03
  DOMAIN (7)..(171): RNA recognition motif. domain identified by PFam, accession name rrm, E-value=8.1e-34, PFam score of 125.8
  misc_feature (1)...(312): Xaa = X or * as defined in Table 2
GRGLRKLFIGGLSFXFIDESLKSQVGEWGTLTDCVVMRDPNTKRSRGFGFVTYATVEEVDAAMNARPHKVDGRVVEPKRAVSREDSQRPGAHITLVKKIFVGGIKEDTEEHHLRDYFEQYGKIEVIEIMTDRGSGKKRGFAFVTFDDHDSVDKIVIQKYHTVNGHNCEVRKALSKQEMASASSSQRGRSGSGNFGGGRGGGFGGNDNFGRGGNFSGRGGFGGSRGGGGYGGSGDGYNGFGNDGSNFGGGGSYNDFGNYNNQASNFGPMKGGNFGGRSSGPYGGGGQYFAKPRNQGGYGGSSSSSSYGSGRRF

SEQ ID NO: 36888 - protein, 504 aa, Homo sapiens
  DOMAIN (369)..(414): kw TRANSCRIPTASE REVERSE II ORF2 domain identified by eMATRIX, accession number DM01354N, p-value=1.000e-40, raw score of 13.17
MQGPRNPAQYLIMDHTARGDTGNPLLLGSGGSGEWQPPQAPLNTFSITSGTLYGSHGVIQSLWYCISYDERNERSSSSAMEQSWMENDFDELREEGFRRSNYSELREDIQTKGKEVENFEKNLEECITRITNTEKCLKELTELKTKARELPPHHTYSKIDHILGSKALLSKCKRTEIITNYLSDHSAIKLELKIKNPIQNCSTTWKLNNLLLNDYWVHNEMKAEIKMFFETNENKDTTYQSLWDAFKAVCRGKFIALNAHKRKQERFKIDTLTSQLKELEKQEQTHSKASRRQEITKIRAELKEIETQKTLQKINESRSWFFERINKIDRPLARLIKKKREKNQIDAIKNDKGDITTDPIEIQTTIREYYKHLYANKLENLEEMDKFLDTYTLPRLNQEEVESLNRPITGSEIVAIINSLPTKKSPGPDGFTAKFYQRYKEELVPFLLKQFQSIEKEGILPNSFYEASIILIPKPGRDTTKKENFRPISLMNVDAKILNKILAN

SEQ ID NO: 36889 - protein, 272 aa, Homo sapiens
  DOMAIN (5)..(20): LIM domain proteins domain identified by eMATRIX, accession number BL00478B, p-value=4.927e-09, raw score of 14.79
  misc_feature (1)...(272): Xaa = X or * as defined in Table 2
RCQLDHLPCHLCCCCHRCIPSLRDPQQAPGSTRLSRAPHIESRVGRKPPEEPANPTMNSLTLRDKQHDASTCDWKRALXVPESGLPRALLKYIRCPNMSSAQKPRELSKRRNXKXPCVKRTPFRPTXEDLPYSGKKTGVKGLICPVPGTAVKAPQRPPGPQQPHPAPQSASETAWFPVADRRVFSENPGWTAAKTLGTLSSPCQAGAGVGRQDGDPGQELTSQEKPWVGRKIPEHAVADKGYRQQCGAGEARGGPVFWAAAPRTSWQQASYT

SEQ ID NO: 36890 - protein, 222 aa, Homo sapiens
MTQALEEISGHPAFSESTPTKCFSVTCIHKSPDKDSTLKAPQQQLPLMCANSAWPSTDEPALRCTRALLQLPQQTLTKGPLAGPVPSPGQRDDEDRYITLDKAVENLQIRMDEFKRDPGHHVLGSSWCPFSMELEPVPFSMSIVHPALRQTLHGGLAHLGFIGNAAADFVRLLNFDLDRGVFPVVIQAVVDEGDGECVLFRPPGRAGRAGRKHVLREECLQQ

SEQ ID NO: 36891 - protein, 126 aa, Homo sapiens
  misc_feature (1)...(126): Xaa = X or * as defined in Table 2
EYSLGHRHYNWKCXALGQKDQVTFATKFAPTSHRTRKQPELWRQDPGSYGEKQPAWCSVPPGRFSGGLVGLGFLDGGIVVQPLRRPCCQDCVCGFPTLRSSTKTSTELGPSFLPCERQGKETISVT

SEQ ID NO: 36892 - protein, 221 aa, Homo sapiens
  DOMAIN (130)..(197): TPR Domain domain identified by PFam, accession name TPR, E- value=1.5e-07, PFam score of 38.5
MDPHKVNELWAFVKMCKQDPSILHTEEMHFLREWVESTVGKVPPATQKAKSEENTKEEKPDSKRVEEDLKADEQSSEKSDLEIDKEEIMEEMMDQANDKKVAAIETLNDGELQKATDLFTDAIKLNPRLAILYAKRASVFVKLQKPNAAIRDCDRAIEINPDSAQPYKWRGKAHRLLGHWEEAAHDLALACKLDYDEDVSAMLKEVQPRAQKSEEHQRKYE

SEQ ID NO: 36893 - protein, 373 aa, Homo sapiens
  DOMAIN (188)..(255): TPR Domain domain identified by PFam, accession name TPR, E- value=0.0006, PFam score of 26.6
SSTFPRMPWRLVTSWTAYIPELEGSTSDPDSPAVAQKGEKPVKLGNSLWGSHTEPVPRPGTGPRPLSFVHRLPTMDPHKVNALRAFVKMCKQDLSVLHTKEMHFLREWVESMGGKLSPATQKVKSEENTKEEKPDSKKVEEDLKADEPSSEESNLLIDNEDVIEPDPDAPQEMGDENAEITEEMMDQANHKKVAAIEALNDGELQKAIDLFTDAIKLNPQLAILYAKRASVFIKLQKPNAAIRDCDRAVEIYSAQPYKWRGKYEQKREEREIKERIERVKKAREEQERAQREEEARGQSVAQYGSFPDGLPGGMLEMRGGMPGKPGITGLNEIFSDPEVLAAVQDPKVMVAFFQDVAQNPANMSQYQGNPKVM

SEQ ID NO: 36894 - protein, 448 aa, Homo sapiens
  DOMAIN (314)..(349): Troponin domain identified by eMATRIX, accession number PF00992A, p-value=8.461e-09, raw score of 16.67
  DOMAIN (196)..(298): TPR Domain domain identified by PFam, accession name TPR, E- value=0.00015, PFam score of 28.6
PEAGGERERERAQREEDSTRQSRAQYGSFTGGFPGGMPGNFPGGMPGMGGPSARSRRAQRLSLEPDRSPPSYAHHLPTMDPRRVNELRAFEKMCKQDPSVLHTEEMRFLRECVESMCGKVPPATHKAMSEENTTEEKPDSEKAEEDLQADEPSSEESDLRKLIKEGVIEPDTDAPQEMGDENAEIPEEMMDQANDKKVAAIEALNDGELQKAIDLFTDAIKLNPRLAILYAKRASVFVKLQKPNAAIRDCDRAIEINPDSAQPYKWRGKAHRLLGHWEEAAHDLALACKLDYDEDASAMLKEVQPRAQKIAEHRRKYERKREEREIKERIERVKKAREEHERAQREEEARRQSGAQYGSFPGGFPGGMPGNFPGGMPGMGGGMPGMAGMPGLNEILSDPEVLAAMQDPEVMVAFQDVAQNPANMSKYQSNPKVMNLISKLSAKFGGQA

SEQ ID NO: 36895 - protein, 143 aa, Homo sapiens
  DOMAIN (118)..(128): C2H2-TYPE ZINC FINGER SIGNATURE domain identified by eMATRIX, accession number PR00048B, p-value=2.125e-10, raw score of 6.02
  DOMAIN (17)..(126): Zinc finger, C2H2 type domain identified by PFam, accession name zf-C2H2, E-value=3.7e-18, PFam score of 73.8
GPPLNLSSPRGGILKTYGCELCGKRFLDSLRLRMHLLAHSAGAKAFVCDQCGAQFSKEDALETHRQTHTGTDMAVFCLLCGKRFQAQSALQQHMEVHAGVRSYICSECNRTFPSHTALKRHLRSHTGDHPYECEFCGSCFRDE

SEQ ID NO: 36896 - protein, 229 aa, Homo sapiens
  DOMAIN (128)..(145): Zinc finger C2H2 type, domain proteins. domain identified by eMATRIX, accession number BL00028, p-value=1.692e-11, raw score of 16.07
  DOMAIN (98)..(148): Zinc finger, C2H2 type domain identified by PFam, accession name zf-C2H2, E-value=4.9e-10, PFam score of 46.8
MILSLLAHGQHSVNVQAAGESWKEHWPISPLAASNRLLLLLVPMCAQSHWLQTQLHCTIPLSDPPTGHVSSWPRVFTDTIPSSGFRHSPGVLGTDMAVFCLLCGKRFQAQSALQQHMEVHAGVRSYICSECNRTFPSHTALKRHLRSHTEQSQSTMEIEELLEEIGGTPEECGVMEAKGRGFKKKKARVLLTTDLYGQASCGLQASLPQLAEVLKALDPVTFALVLLSF

SEQ ID NO: 36897 - protein, 149 aa, Homo sapiens
  DOMAIN (67)..(84): Zinc finger C2H2 type, domain proteins. domain identified by eMATRIX, accession number BL00028, p-value=3.400e-10, raw score of 16.07
  DOMAIN (65)..(115): Zinc finger, C2H2 type domain identified by PFam, accession name zf-C2H2, E-value=5.3e-07, PFam score of 36.7
FSPSGSVVPLTERHRARSESPGRMDEPKQPSSQVEESAMMGVSGYVEYLREQEVSERWFRYNPRLTCIYCAKSFNQKGSLDRHMRLHMGITPFVCRMWGKKYTRKDQLEYHIRKHTGNKPFHCHVCGKSFPFQTETSRGRGLTLFPFEP

SEQ ID NO: 36898 - protein, 77 aa, Homo sapiens
  misc_feature (1)...(77): Xaa = X or * as defined in Table 2
TDAGCYYAARQCGTAVPSRDVHIRHQGTPVPQFXTAPLRARSEVSPARRRARMLSSSASFASANITTSSAWSDTLQP

SEQ ID NO: 36899 - protein, 227 aa, Homo sapiens
MAAPLELSCWGGGWGLPSVHSESLVVMKYNADYELSAKQGADTLAYIALLEEKLLPAVVGRETEKRSKTQRQSIEKEQWAQQTGAQHTEDLHQHRSLSSLSFYYYFHYLSKRNAVGEQGDNREKVSKKTWPQGFHEKLNAVESQKGVKWGVRSDAIRPVLGKHFCCCVEVTAGSQALVERLSKRLLQHSRCQRVHCRSSSRHEKEMNFRSILLVELIEFGNRWNIQE

SEQ ID NO: 36900 - protein, 161 aa, Homo sapiens
  DOMAIN (72)..(96): Gamma-thionins family proteins domain identified by eMATRIX, accession number BL00940A, p-value=1.409e-09, raw score of 20.51
MLLLAAAFLVAFVLLLYMVSPLISPKPLALPGAHVVGSRGPRGSVAARESMQHPWDVDVLSSVFPMSQLRHREAEKLCQGHSGRCGKDELNDKACVRGMKERWIGVIYFLAEARIFSDPCSANVAPFLNRENASLPAPSTFPFAVAFSRAFSFGSPKPEAQ

SEQ ID NO: 36901 - protein, 90 aa, Homo sapiens
TRGPWCDSVLRGCSLEQRSFISVRLLSYLSACRHPMEDSMDMDMSPLRPQNYLFGSLGAGAKDELHIVEAEAMNYEGSPIKVTLATLKMS

SEQ ID NO: 36902 - protein, 226 aa, Homo sapiens
MEDSMDMDTSTLRPQNYLFSCELKANKDDHLKVDNDENELKLSLNTVSLVVGAKDELHTVEAEAMNYKGSPIKVTLCGSGPVHISGQHLVAVEEEAESGDEEEEDVKLLSISGKQSAPGGGSKFPWKQVKLAADEDDDDDDNDNFDDEETEEKSILTFLVILTYAIWLALEQHEFELHGPFICRFSSTSVTPEMAKPIPLLPPPQSTQHEDNEDEELYDDPLPPSE

SEQ ID NO: 36903 - protein, 210 aa, Homo sapiens
LGRSCNHEGRQMGSKVMSYVVAGRGTCAQELLFIQPSDILRQEQYGAPWCDSVLRGCSLEQHSFIFVCLVSYLSVCRHPMEDLMDMDMSPLRPQNYLFSCELKADKDDHFKVDNDENEHQLSLRTVSLGAGAKDELHIVEAEAMNYEGSPIKVTLATLKMSVQPTVSLGGFEITPPVVLRLKCGSGPVHISGQHLVAVEEDAESEDEEEE

SEQ ID NO: 36904 - protein, 159 aa, Homo sapiens
  DOMAIN (26)..(111): Integrase core domain identified by PFam, accession name rve, E-value=1e-13, PFam score of 51.5
  misc_feature (1)...(159): Xaa = X or * as defined in Table 2
CSAKTAIRGVSECLIHHHGIPHSTASDQGTHFTAKEVWQWAYAHGIHWSYHVLHHPEEAGKERWNGLLKSQLQCQLGDNTLQGXGKVLQQAVYVLNXHPIYGTVSPIARIHGSRNQGVETELTPLTITPSDPLAKFLLPVPPTLHSAGLEILVPEGEIR

SEQ ID NO: 36905 - protein, 513 aa, Homo sapiens
  DOMAIN (61)..(78): RNase H domain identified by eMATRIX, accession number PF00075A, p-value=6.000e-09, raw score of 14.44
  DOMAIN (367)..(463): Integrase core domain identified by PFam, accession name rve, E-value=2.1e-15, PFam score of 57.3
  misc_feature (1)...(513): Xaa = X or * as defined in Table 2
MVGKAKWKPLELPLPRKMVSQKQYRILGGTAEISVTIKDLKDARVVIPSTSPFYSPIWPVQKIDGSWRMTEDYRKLNQVVTPTAAAVPDVVSLLEQINTSPGTRYAAIDLTNAFFSIPFHKAHQKLFAFSWQGQQYTFTVLPWGDINSPALCHNLIRRDPDCFSLPQDITLVHHIDDIMLTGSREQEVADTRDFLVKDKLLHLAPPTTKKQAQHLVGLFGFWRQHIPLLGVLLQPIYRVTQKVASFEWSQEQKTALQQVQAAVQAVLPLGPYNPADPMVLEVSVADRDAVCSLWQAPIGESQWRPLGFWSKALPSSADNYSPFERQLLACHKVGHAQQHSISKWKXYIHDRAQADYHPWTQACLIHCQGIPHSIASDKDAHFTTKEVWQWTHAHEIHWCYHVLHHPEAAGLTERWNRLLKSQLQRQLGDNTLQGSGKVLQKAMYALNQHPIYGTISPIARIHGSSNQGVEVAPLTITPSDPLAKFLLCVPTTLRSAGLDVLVPEGGMTQQQFH

SEQ ID NO: 36906 - protein, 188 aa, Homo sapiens
  DOMAIN (165)..(176): dUTPase domain identified by eMATRIX, accession number PF00692B, p-value=9.217e-09, raw score of 8.14
  misc_feature (1)...(188): Xaa = X or * as defined in Table 2
MGRNQSRKAENSKNWSASSPPKDHSSLPAMEQSWMENDFDEFTEVGFRRSVITNFSELKEHVLTYCKEAKNVEKRIYRSRNQGMEVKVAPLTITPSDPLANFFASVPATLHSAGLEVLVPEGGTLPLGDTTMIPLNWKLRLRTGYFGLLLRLSQQAKKGAMVLAGVVDPDYQNEISLLLHNXGKTHDH

SEQ ID NO: 36907 - protein, 45 aa, Homo sapiens
SSITPSDPLANFFASVPATLHSAGLEVLVPEGGTLPLGDTTMIPL

SEQ ID NO: 36908 - protein, 38 aa, Homo sapiens
MVSSPGSCPSSGSLATPVHSTLSPPSLGSSAFSSPVMR

SEQ ID NO: 36909 - protein, 35 aa, Homo sapiens
PEQAPIDNHFSDGSGQSSLKSFWKGFSIVDAIKNI

SEQ ID NO: 36910 - protein, 80 aa, Homo sapiens
MPLYEGLGSGGEKTAVVIDLGEAFTNALANNSSYYFLPGRCESEDRGLTPREAQKASVELPSSPPLVITPNPTNPLGSSV

SEQ ID NO: 36911 - protein, 162 aa, Homo sapiens
  DOMAIN (35)..(70): Actins proteins domain identified by eMATRIX, accession number BL00406A, p-value=6.604e-15, raw score of 9.95
  DOMAIN (30)..(66): Actin domain identified by PFam, accession name actin, E- value=4.3e-05, PFam score of 18.0
FVRLVGRGDCDPLLSVCLTTMPLYEGLGSGGEKTAVVIDLGEAFTKCGFAGETGPRCIIPSGIKRAGMPKPVRVVQYNINTEELYSYLKEFIHILYFRHLLVNPRDRRVVIIESVLCPSHFREDTHSCFFFKYFEVPSVLLAPSHLMALLTLGINSWHGPRL

SEQ ID NO: 36912 - protein, 193 aa, Homo sapiens [sequence omitted]

SEQ ID NO: 36913 - protein, 207 aa, Homo sapiens
MISFDFMSHIQVTLMQEWTLSVDLPFWGLEDCGPLLTAPLGSAPVETLWRRLYPTFPFHSVLAEVLCEGSTPAAHLCLDIQLVGGQFDLEMNFIIQEGESINCMVDLLEKCDITCQAEVWSMFTAILKKSIRNLQVCTEVGLVEKVLGKIEKVDNMIADLLVDMLGVLASYNLTVRELKLFFSKLQGDKGRWILPGYTGPNIRFYEN

SEQ ID NO: 36914 - protein, 117 aa, Homo sapiens
  DOMAIN (34)..(48): 1 kw CHROMO BROMODOMAIN SHADOW GLOBAL domain identified by eMATRIX, accession number DM00547D, p-value=1.982e-09, raw score of 11.60
  DOMAIN (7)..(73): SNF2 and others N-terminal domain identified by PFam, accession name SNF2_N, E-value=0.0014, PFam score of 16.6
MNWRMSTSKVTVLGYGLLTADAKTLIDALNNQNFKVVIVDESHYMKSRNATRSRILLPIVQKARRAILLTGTPALGRPEEMLPALEHWTPKFFSCGTRTGFLVPQPADGPLWDLVIM

SEQ ID NO: 36915 - protein, 149 aa, Homo sapiens
DKNKKLRPLYDIPYMFEAREFLRKKLIGKKGKEPLLSFHQLTVPKTVLDIDNDVEILNRSLQKGSAAALDSHRSAKPSVNYTCEGSRSHALYENLMLDDLKVNVTVDYIRPASPATETVPAFSERTCATVTIGGILMTYALIIVNEKNC

SEQ ID NO: 36916 - protein, 255 aa, Homo sapiens
IFMFCNQQVKVMQVLNADAIVVKLNSGDYKTIHLSSIRPPRLEGENTQDKNKKLRPLYDIPYMFEAREFLRKKLIGKKRVSMESSSPKDDISETQLKRSGVGGLRQADHKSCYKYGNIHQKNMSNLGVQPGPQEQNSISRKQQQQQQQITHFTKEMCAQLNTLIVLKEQRFAKERRLRIWRDYVAPTANLDREDKKFVAMHVTGHNATIQHGSIKQLSLCSIFSRHQDDIWTQYFRVREMVLANRVVTGSYIKQS

SEQ ID NO: 36917 - protein, 875 aa, Homo sapiens
MVLGSGREDVNGQKDQYVQRHIAAKERVLSNLRKHEAPQPPLALHPTKPPVPVISSAVLLSQKDATQLVCTDLNLLQQQARTAALRESQQVALDGELLDTMPKQYVNREEQTTLHLECRGSSGKKCQGAAVVTVQFEGMHKNEAISQQLHVLRKEVKQLQAEAAKPPSLNIVEAAVHAENLITALVNAYKLQPTPGIQKVGISLFFTIVDYVSDETQRHPPTRQFFTSCIEILGQVFISGIKSECRKVLETILKNSRLCSLLSPFFTPNAAPAEFIQLYEQVVKFLSEDNSDMIFMLLTKKVSRWFFCHYSVGITGRMYDDGKVRLGIWLFMSEMPFGTLSVQMLWKLFYLMHQVESENLQQLSSSLQPAQCKQQLQDPEHFTNFEKCLSSMNSSEEICLLTTFAQMAQARRTNVDEDFIKIIVLEIYEVSYVTLSTRETFSKVGRELLGTITAVHPEIISVLLDRVQETIDQVGMVSLYLFKELPLYLWQPSASEIAVIRDWLLNYNLTVVKNKLACVILEGLNWGFAKQATLHLDQAVHAEVALMVLEAYQKYLAQKPYAGILSESMKQAVKAGMPIGCYLALSMTAVGHSIEKFCAEGIPLLGILVQSRHLRTVVHVLDKILPLFYPCQYYLLKNEQISTLGMRQVWKLNGLETSLPLFMELGSFYRISSCSYTWTAVSLRVSHNRSPTRWHSTCTGASHGDNVKLLNSMIQAHISVSTQPNEVGPVAVLEFWVQALISQHLWYREQPILFLMDHLCKAAFQLMQEDCIQKLLYQQHKNALGYHCDRSLLSSLVSWIVAGNITPSFVEGLATPTQVWFAWTVLNMESIFEEDSQLRRVIEGELVINSAFTPDQALKVQIAVLHLSGRRWLTL

SEQ ID NO: 36918 - protein, 558 aa, Homo sapiens
  DOMAIN (64)..(96): ABC transporters family proteins domain identified by eMATRIX, accession number BL00211B, p-value=5.286e-21, raw score of 13.37
  DOMAIN (1)..(138): ABC transporter domain identified by PFam, accession name ABC_tran, E-value=2.9e-08, PFam score of 37.3
MVKLDSQTKGLDFCEEQGYLPYGRGIRQSEPEQGVQMYVLDNTVQKVLLDLDMQTIKDNQAKKLSGGQKRKLSLGIAVLGNPKILLLDEPTAGMDPCSRHIVWNLLKYRKANRVTVFSTHFMDEADILADRKAVISQGMLKCVGSSMFLKSKWGIGYRLSMYIDKYCATESLSSLVKQHIPGATLLQQNDQQLVYSLPFKDMDKFSGLFSALDSHSNLGVISYGVSMTTLEDVFLKLEVEAEIDQAGEFGLRRSSLYFLKPSYWSKSKRNYEELSEGNVNGNISFSEIIEPVSSEFVGKEAIRISGIQKTYRKKGENVEALRTETGEEAEEENSEALRGWSIRFKESSHLHNTKLQDETAKADTEAAVSYPDHLAKTIDEDGYTKQQIFCIDETAFSWKKMPSKTFTARKNTLCTATGAIDSDSSDKSGQKLLPLEEQRKCLLEMQTIVSEDAVNIVEMTTKDLEYYIHLVNKAATGLEGIDFNFERSFTLGKMLSNSIACYREIFHQKKPIESHISLLSSFKKLPQPPQPSATTTLISKQPSTSRQDCPAAKKIMTC

SEQ ID NO: 36919 - protein, 401 aa, Homo sapiens
  DOMAIN (123)..(170): kw TRANSCRIPTASE REVERSE II ORF2 domain identified by eMATRIX, accession number DM01354V, p-value=1.000e-40, raw score of 12.97
  misc_feature (1)...(401): Xaa = X or * as defined in Table 2
QTHSQYHTEWAKTGSIPFENWHKTGIPSLTTPIQHSVGSSGQGNQAGEGNKGYSIRKRGSQIVPVCRRHDVYIXKTPLSQPEISLSXXATSAKSLGYKINVQKSQAFLYTNNRQTESQIMSELPFTIASKRIKYLGIQLTRDVKDLFKENYKPLLKEIKEDTNKWKNIPCSWVGRINIVKMAILPKVIYRFNAIPIKLPMPFFTELEKTTLKFIWNQKRARITKSILSQKNKAGGITLPDFKLYYKATVTKTAWYWYQNRDIDQWNRTEPSEITPHIYNYLIFDKPEKNKQWGKDSLFNKWCWENWLAICRKLKLDPFLTPYTKMNSRWIKDLNVRPKTIKTLEENLGITIQDIGMGKDFMSKTPKAMATKAKIDKWDLIKLKSFCTAKETTIRVNRQPTK

SEQ ID NO: 36920 - protein, 517 aa, Homo sapiens
  DOMAIN (78)..(125): kw TRANSCRIPTASE REVERSE II ORF2 domain identified by eMATRIX, accession number DM01354V, p-value=1.000e-40, raw score of 12.97
  misc_feature (1)...(517): Xaa = X or * as defined in Table 2
AGEGNKGYSIRKRGSQIVPVCRRHDVYIXKTPLSQPKISLSXXATSAKSLGYKINVQKSQTFLYTNNRQTESQIMSELPFTIASKKIKYLGIQHTRDVKDLFKENYKPLLKEIKEDTNKWKNIPCSWVGRINIVKMAILPKVIYRFNAIPIKLPMTFFTELEKTTSKFIWNQKRARITKSILSQKNKAGGITLPDFKLYYKATVTKTAWYLYQNRDIDQWNRTEPSEMTPHTYNYLIFDKPEKNKQWGKDSLFNKWCWENWLAICRKLKLDPFLTPYTKINSRWIKDLNVRPKTIKTLEENLGITIQDIGMGKDFMSKTPKAMATKDKIDKWDLIKLKSFCTAKETTIRVNRQPKKWEKIFATYSSDKGLISRIYNELKQIYKKKTNNPIKKWAKDMNRHFSKEDIYAAKKHMKKCSSSLAIREMQIKTTMRYHLTPVRMAIIQKSGNNRCWRGCGEIGTLLHCWWDCKLVQHILTHRWELNNEITWTQEGEYHTLGTVVGWGEGGGIALGDIPNAR

SEQ ID NO: 36921 - protein, 927 aa, Homo sapiens
  DOMAIN (491)..(536): kw TRANSCRIPTASE REVERSE II ORF2 domain identified by eMATRIX, accession number DM01354N, p-value=1.000e-40, raw score of 13.17
  DOMAIN (575)..(850): Reverse transcriptase domain identified by PFam, accession name rvt, E-value=5.7e-86, PFam score of 299.0
MGKKQNRKTGNSKKQSASPPPKERSSSPATEQSWMENDFDEMREEGFRRSNYSELREDIQTKGKEVENFEKNLEECITRITNTEKCLKELMELKTKARELREECRSLRSRCDQLEERVSVMEDEMNEMNDGENGTKLENTLQDIIQENFPNLARQANVQIQEIQRTPQRYSSRRATPRHIIVRFTKVEMKEKMLRAAREKDFKPTKIKREKEGHYIMVKGSIQQEELTILKIYAPNTGAPRFTKQVLSDLQRDLDSHTLIMGDFNTPLSTLDTSTRQKVKKDTQELNSALHQADLIDIYRALHPKSTEYTFFSAPHHTYSKIDHIVGSKALLSKCKRTEIITNYLSDHSAIKLELRIKNLTQNHSTTWKLNNLLLNDYWVHNEVKAEIKVFFETKENKDTTYQNLWDAFKAVCRGKFIALNAHKRKQERSKIDTLTSQLKELEKQEQTHSKASRRQEITNIRAELKEIETKKPFKKLMNPGAEIQTTIREYYKHLYANKLENLEEMDKFLDTYTLPRLNQEEVESLNRPITGSEIVAIINSLPTKKIPGPDGFTAEFYQRYKEELVPFLLKLFQSIEKEGILPNSFYEASIILIPKPGRDTTKKENFRPISLMNIDAKILNKILAKRIQQHIKKLIPHDQVGFIPGMQGWFNIRKSINVIQHINRAKDKNHMIISIDAEKAFDKIQQPFMLKTLNKLGIDGTYFKIIRAIYDKPTANIILNGQKLEAFPLKTGTRQGCPLSPLLFNIVLEVLARAIRQEKEIKGIQLGKEEVKLSLFADDMIIYLENPIVSAQNLLKLISNFSKVSGYKINVQKSQAFLYTNNRQTESQIMSELPFPIASKRIKYLGIQLTRDVKDLFKENYKPLLQEIKEDTNKWKNIPCSWVGRINIVKMAILPKGIYRFNAIPIKLPMTFFTELEKTTLKFIWN

SEQ ID NO: 36922 - protein, 889 aa, Homo sapiens
  DOMAIN (154)..(199): kw TRANSCRIPTASE REVERSE II ORF2 domain identified by eMATRIX, accession number DM01354N, p-value=1.000e-40, raw score of 13.17
  DOMAIN (246)..(427): Reverse transcriptase domain identified by PFam, accession name rvt, E-value=1.5e-24, PFam score of 95.0
  misc_feature (1)...(889): Xaa = X or * as defined in Table 2
LQTILQVYSNQNSMVLVPKQRYRSMEQNRALRNNATYLQLSDLXQTXEKQAMGKGFPIXXMVLGKLASHMXKAETGSLPYTLYKNQFKMDXRLKRXTXNSKKQSPSPPPKERSSSPATEQSWTENDFDELREEGFRRSNYPELREDIQTKGKEEIQTTIREYYKHLYANKLENLEEMDKFLNTYTLPRLNQEEVESLNRPITGSEIVAVINSLPTKKSPGPDGFTAEFHQRYKVELVPFLLKLFQSIEKEGILPNSFYEASIILIPKPGRDTIKKENFRPISLTNIDAKILNKILANRIQQHIKKLIHYDQVGFIPGMQDWFNIRKSINVIQHINRTKVKNHMIISIDAEKAFDKIQQRFMLKTLNKLAQNLLKLISNFSKVSGYKINVQKSQAFLYTNNRQTESQIMSELPFTIASKRIKYLGIQLTRDVKDLFKENYKPLLKEIKEDTNKWKNIPCSWVGRLNIVKMAILPKVIYRFNAIPIKLPMTFFTELEKTTVKFIWNQKRACITKSILSQKNKAGGITLPDFKLYYKSTVTKTAWYWYQNRDIDQWNRTEPSEIMPHIYNYLIFDKPEKNKQWGKDSLFNKWCWENWLAICRKLKLDPFLTPYTKINSRWIKDLNVRPKTIKTLEENLGITIQDIGVDKDFMTKTPKAMATKPKIDKWDLIKLKSFCTAKETTIRAFDELDDVHPHEEIEACRVWQNYGTHPPVPSQLPTGDGQWAVSARFIIHLQAKMKCVKSECKGQNNLNLNNCGRELIAIKLATAHGLDLNTITKEGHHSETNAGIPGPYFPRPKPQGVQRTAVVGVNWGPLFHANLHGMGQLDGNRRVALKGQLPPMPPPSRTQSQESENSKSKLDLSDCYNIIFVKVLLGARAPEAQAWQQHGAVM

SEQ ID NO: 36923 - protein, 104 aa, Homo sapiens
  misc_feature (1)...(104): Xaa = X or * as defined in Table 2
KSLQCEHSSHIQDLPLACLGLRKHYMVAQYLXHSHSASGGGSRYDVLKISVSCSSTIDIXLAFVSLGXDKRTSXXTNLAESSPNFFHWVWIFLASKKFCSVPAR

SEQ ID NO: 36924 - protein, 47 aa, Homo sapiens
  misc_feature (1)...(47): Xaa = X or * as defined in Table 2
AIPFRIQAWARTSCPKHKKQWQQKPKLTNGIXFNXRASAQQKKLPSE

SEQ ID NO: 36925 - protein, 774 aa, Homo sapiens
  DOMAIN (174)..(215): kw TRANSCRIPTASE REVERSE II ORF2 domain identified by eMATRIX, accession number DM01354I, p-value=1.000e-40, raw score of 15.55
  DOMAIN (422)..(695): Reverse transcriptase domain identified by PFam, accession name rvt, E-value=6.6e-83, PFam score of 288.8
MEDEMNEMKQEGKFREKRIKGNEQSLQEIWDYVKRPNLRLIGVPESDRENGTKLENTLQDIFQESFPNLARQANIQIPEIHRMPQRYSSRRATPRHIIVRFTKVEMKENMLRAAREKAPHHTYSKIDHILGSKALLSKCKRTEIITNCLSDHSAIKLDLRIKKLTQNRSTTWKLNNLLLNDYWVHNEMKAEIKMFFETNENKDTTYQNLWDTFKAVCRGKFIALNAHKRKQERSKIDTLTSQLKELEKQEQTHSKASRRQEITKIRAQLKKMETQKTLQKINESRSWFFETINKIDRPLARLIKKKREKNQIDAIKNDKGDITTDPTEIQTTIREYYKHLYANKLENLQEMDKFLDTYTLPRLNQEEVESLNRPKTGSEIVAIINSLPTKKSPGLDGFTAEFYQMYKEELVLFLLKLFQSTEKEGILPNSFYEASIILTPKPGRDTTKKENFRPISLMNIDTKILNKILANRIQQHIKNLIHHDQVGFTPGMQVWFNICKSINVIQHINRTKDKNHMIISIDAEKAFDKIQQRFMLKTLNKLGIDGTYLKIIRAIYEKPTANIILNGQKLEAFPLKTGTRQGCPLSPLLFDIVLEVLARAIRQEKEIKDIQLGKEEVKLFLFADDMIVYLENPIVSAQNLLKLISNFSKVSGYKINVQKSQAFFYSNNRQTESQIMSELPFTIASKRIKYLGIQLTRDAKDLFKENYKPLLNKIKEDTKKWKNIPCSWVGRISIMKMAILPKIIYRFNAIPIKLPMPFFTELEKTTLKFIWNQR

SEQ ID NO: 36926 - protein, 452 aa, Homo sapiens
  DOMAIN (69)..(116): kw TRANSCRIPTASE REVERSE II ORF2 domain identified by eMATRIX, accession number DM01354V, p-value=1.000e-40, raw score of 12.97
  misc_feature (1)...(452): Xaa = X or * as defined in Table 2
IRKRGSQIVPVCRRHDVFVXKTPSSQPKISLSXXATSAKSLGYKINVQKSQAFLYTNNRQTESQIMSELPFTIASKRIKYLGIQLTRDVKDLFKENYKPLLKEIKEDTNKWKNIPCSWVGRINIVKMAILPKVIYRFNAIPIKLPMTFFTELEKTTLKFIWNQKRARIAKSILSQKNKAGGITLPDFKLYYKATVTKTAWYWYQNRDIDQCNRTEPSEIMPHIYNYLIFDKPERNKQWGKDSLFNKWCWENWLAICRKLKLDPFLTPYTKINSRWIKDLNVRPKTIKTLEENLGITIQDIGVGKDFMSKTPKAMATKDKIDKWDLIKLKSFCTAKETTIRVNRQPTTWEKIFATYSSDKGLISRIYNELKQIYKKKTNNPIKKWAKDMNRHFSKEDIYAAKKHMKKCSSSLAIRERQIKTTMRYHLTPVRMAIIKKSGNNRDMDEIGNHHSQ

SEQ ID NO: 36927 - protein, 742 aa, Homo sapiens
  DOMAIN (37)..(83): kw TRANSCRIPTASE REVERSE II ORF2 domain identified by eMATRIX, accession number DM01354O, p-value=1.000e-40, raw score of 8.73
  DOMAIN (70)..(323): Reverse transcriptase domain identified by PFam, accession name rvt, E-value=7e-26, PFam score of 99.4
MDKFLNTYTLPRLNQEEVESLNRPITGSEIVAIINSLQTKKSPGPDGFTAEFYQRYKEELVPFLLKLFQSIEKEGILPNSFYEASIILIPKPGRDTTKKENFRPISLMNIDAKILNKILGKRIQQHIKKLIHHDQVGFIPGMQGWFNIRKSMNVIQHINRAKDKNHMIISIDAEKAFDKIQQPFMLKTLNKLGIDGTYLKIIRAIYDKPTANIILNGQKLEVFPLKTGTRQRIKHLGIQLTRDVKDLFKENYKPLLNEIKEDTNKWKNIPCSWVGRINIVKMAILPKVIYRFNAIPIKLPMTFFTELEKTTIKFIWNQKRARIAKSILSQKNKAGGITLPDFKLYYKATVTKTAWYWYQNRDIDQWNRTEPSEIMPHIYNYLIFDKPEKNKQWGKDSLFNKWCWENWLAICRKLKLDPFLTPYTKINSRWIKDLNVRPKTIKTLEENLGITIQDIGMGKDFMSKTPKAMATKDKIDKWDLIKIKSFCTAKETTIRVNRQPTKWEKIFATYSSDKGLISRIYDELKQIYKKKTNNPIKKWAKDMNRHFSKEDIYAAKKHMKKCSSSLAIREMQIKTTMRYHLTPVRMAIIKKSGNNRCWRGCGQIGTLLHCWWDCKLVQPLWKSVWQFLRDLELEIPFDPAIPLLGIYPKDYKSCCYKDTCTRMFIAALFTIAQTWNQPKCPPMIDWIKKMWHIYSMEYYAAIKNDEFTSFVGTWMKLEIIILSKLSQEQKTKHRIFSLIGGN

SEQ ID NO: 36928 - protein, 224 aa, Homo sapiens
MGKKQNRKTGNSKTQSASPPPKERSSSPATEQSWMENDFDELREEGFRRSNYSELREDIQTKGKEVQNFEKNLEECITRITNTEKCLKELMELKTKARELREECRSLRSRCDQLEERVSAMEDEMNEMKREGKFREKRIKRNEQSLQEIWDYVKRPNLRLIGVPESDVENGTKLENTLQDIIQENCPQSSKAGQRSDSGNTENATKILLEKSNSKTHNCQIHQS

SEQ ID NO: 36929 - protein, 1724 aa, Homo sapiens; identical to SEQ ID NO: 35679
  DOMAIN (316)..(361): kw TRANSCRIPTASE REVERSE II ORF2 domain identified by eMATRIX, accession number DM01354N, p-value=1.000e-40, raw score of 13.17
  DOMAIN (400)..(675): Reverse transcriptase domain identified by PFam, accession name rvt, E-value=2.4e-85, PFam score of 297.0

SEQ ID NO: 36930 - protein, 122 aa, Homo sapiens
  misc_feature (1)...(122): Xaa = X or * as defined in Table 2
LQTILQGYSNQNSMVLVPKQRYRSMEQNRALRNNATYLQLSDLXQTXEKQAMGKGFPIXXMVLGKLASHMXKAETGSLPYTLYKNQFKMDXRLKHXTXNHKNPRRKPRHYHSGHRHGQGLHV

SEQ ID NO: 36931 - protein, 192 aa, Homo sapiens
  DOMAIN (77)..(124): kw TRANSCRIPTASE REVERSE II ORF2 domain identified by eMATRIX, accession number DM01354V, p-value=1.000e-40, raw score of 12.97
  misc_feature (1)...(192): Xaa = X or * as defined in Table 2
AGEGNKGYSIRKRGSQIVPVCRXHDVYIXKTPLSQPKISLSXXATSAKSLGYKINVQKSQAFLYTNNRQTESQIMSELPFTIASKRIKYLGIQLTRDVKDLFKENYKPLLKEIKEDTNKWKNIPCSWVGRINIMKMAILPKVIYRFNAIPIKLPMTFFTELEKTKVHMEPKKCPHHQGNPKPKEQSWRHHTT

SEQ ID NO: 36932 - protein, 479 aa, Homo sapiens
  DOMAIN (77)..(124): kw TRANSCRIPTASE REVERSE II ORF2 domain identified by eMATRIX, accession number DM01354V, p-value=1.000e-40, raw score of 12.97
  misc_feature (1)...(479): Xaa = X or * as defined in Table 2
AGEGNKGYSIRKRGSQIVPVCRXHDVYIXKTPLSQPKISLSXXATSAKSLGYKINVQKSQAFLYTNNRQTERQIMSELPFTIASKRIKYLGIQLTRDVKDLFKENYKPLLQEIKEDTSKWKNVPCSWVGRINIVKMAILPKVIYRFNAIPIKLPMPFFTELEKTILKFIWDQKRARIAKSILRQKNKAGGITLPDFKLYYKATVTKTAWYWYQNRDIDQCNRTEPSEITPHIYNYLIFDKPEKNKQWGKDSLFNKWCWENWLAICRKLKLDPFLTPYTKINSRWIKDLNIRPKTIKTLEENLGITIQDIGMGKDFMSKTPKAMATNAKIDKWDLIKLKSFRTAKETTIRVNRQPTKWQKIFATYSSDKGLMSRIYNELKQIYKKKTNNPIKKWAEDMNRHFSKEDIYAAKKHMKKCSSSLAIREMQIKTTMRYHLTPVRMAIIKKSGNNRLTLLNNHNNPQPLISIKEPREKEELNLQV

SEQ ID NO: 36933 - protein, 51 aa, Homo sapiens
ESERPRKMNSVTIELFVSLVDSFQEIASAVTRESFTWSTESDRREDCEATF

SEQ ID NO: 36934 - protein, 876 aa, Homo sapiens
  DOMAIN (454)..(499): kw TRANSCRIPTASE REVERSE II ORF2 domain identified by eMATRIX, accession number DM01354N, p-value=1.000e-40, raw score of 13.17
  DOMAIN (53)..(278): AP endonuclease family 1 domain identified by PFam, accession name AP_endonucleas1, E-value=1.5e-71, PFam score of 251.1
MNNSIKEKVKLSLTKWEMQTKPNNNTVDLKDAQEVNLTSTDYRKQHVMLPTEINSDDSLLKIGVIRLANWIKSQDPSVCCNQETHLTCRDTHRLKIKGWRKIYQANGKQKKAGVAILVSDKTDFKPTKIKRDKEGHYIMVKGSIQQEELTILNTYAPNTGAPRFIKQVLSDLQRDLDSYTLIMGDFNTPLSTLDRSTRQKVNKDTQELNSALHQVDLIDIYRTLHPKSTEYTFFSAPHHTYSKIDHILGSKALLSKCKRTEIITNYLSDHSAIKLELRIKNLIQKRSTTWKLNKLLLNDYWVHNELKAEIKMFFETNENKDTTYQNLWDAFKAVCRGKFIALNAHKRKQERSKIDTLTLQLKALEKQEQTHSKASRRQEITKIRAELKEIETQKTLQKINESRSWFFERINKIDKPLARLIKKKREKNQIDTIKNDRGDITTDPTEIQTTIREYYKHLYANKLENLEEMDKFLDTYTLPRLNQEEVESLNRPITGSEIVAIINSLPTKKSPGPDGFTAEFYQRYKQELHINRTKDKNHMIISIDAEKAFDKIQQRFMLKTLNKLGIDGAYFKIIRPIYDKPTANIILNGQKLEAFPLKTGTRQGCPLSPLLFNIVLEVLAKAIRQEKEIKGIQLGKEEVKLSLFADDMIVYLENPIVSAQNLLKLISNFSKVSGYKINVQNSQAFLYTNNRQTESQIMSELPFTVASKRIKYLGIQLTRDVKDLFKENYKPLLNEIKEDTNKWKNVPCSWVGRINIVKMAILPKVIYRFNAIPIKLPMTFFTELGKTTLKFIWNRKRAHIAKSILRQKNKAGGITLPDFKLYYKATVTKTAWYWYQNTDIDQWNRTEPSEITLHIYNYLIFDKPEKNKQWGKGFPI

SEQ ID NO: 36935 - protein, 1921 aa, Homo sapiens
  DOMAIN (373)..(418): kw TRANSCRIPTASE REVERSE II ORF2 domain identified by eMATRIX, accession number DM01354N, p-value=1.000e-40, raw score of 13.17
  DOMAIN (457)..(1469): Reverse transcriptase domain identified by PFam, accession name rvt, E-value=1e-169, PFam score of 577.2
  misc_feature (1)...(1921): Xaa = X or * as defined in Table 2
MGKKQNRKTGNSKTQSTSPPPKERSSSPATDQSWMENDFDELREEGFRRSNYSELREDIQTKGKEVENFEKNLEECITRITNTEKCLKELMELKTKARELREECRSLRSQCDQLEERVSAMEDEMNEMKQEGKFREKRIKRNEQSLQEIWDYVKRPNLRLIGVPESDAENGTKLENTLQDIIQETFPNLARQANVQIQEIQRTPQRYSSRRATPRHIIVRFTKVEMKEKMLRAAREKGRVTLKGKPIRLTADLSAETLQARREWGPILNILKEKNFQPRISYPAKLSFISEGEIKYFTDKQMLTDFVTSRPALKELLKEALNMERNNRINKIDRTLARLIKKKREKNQIDTIKNDKGDITTDPTEIQTTIREYYKHLYANKVENLEEMDTFLDTYTLPRLNQEEVESLNRPITGSEIVAIINSLPTKKSPGPDGFTAEFYQRYEEELVPFLLKLFQSIEKEGILPNSFYEASIILIPKPGRDTTKKENFRPISLMNIDAKILNKILANRIQQHIKKLIHHDQVGFIPGMQGWFNIHKSINVIQHINRAKDKNHMIISIDAEKAFDKIQQPFMLKTLNKLGIDGTYFKIIRAICDKPTANIILNGQKLEAFPLKTGTRQGCPLSPLLFNIVLEVLARAIRQEKEIKGIQLGKEEVKLSLFADDMIVYLENPIVSAQNLLKLISNFSKVSGYKINVQKSQAFLYTNNRQTESQIMSELPFTIASKRIKYLGIQLTRDVKDLFKENYKPLLKEIKEDTNKWKNIPCSWVGRINIVKMAILPKVIYRFNAIPIKLPMTFFTELEKTTLKFMWNQKRARITKSILSQKNKAGGITLPDFKLYYKATVTKTAWYRYQNRDTDQRNRTEPSEITPHTYNYLIFDKPLLEKNKQWGKDSLFNKWCWENWLAICRKLKLDPFLTPYTKINSRWIKDLNIRPKTIKTLEDNLGITIQDIGMGKDFMSKTAKAMATKAKIDKWDLIKLKSFCTAKETTIRVNRQPTTWEKIFATYSSDKGLISRIYNELKQIYKKKNKQPHQKVGEGHEQTLLKRRHLCSQKTHEKNAHHHWPSEKCKSKPQLLARLIKKKREKNQIDAIKNDKGDITTDPTEIQTTTREYYKHLYANKLENLEEMDKFLDTYNLPRLKQEEVESLNRPIRGSEIVAIINSLPTKKSPGPDGFTAEFYHRYKEELVPLLLKLFQSIEKEVILPNSFYEASIILIPKPDRDTAKKENFRPISLMNIDAKILNKILANRIQQHIKKLIHHDQVGFIPGMQGWFNIRKSVNVIQHINRTKDKNHMIISIDAEKSFDKIQQHFMLKTLNKLGIDGSYLKIIRATYDKPTANIILNGQKLEAFPLKTGTRHGCPLSPLLFNIVLEVLARAIRQEKEIKGIQLGKEEVKLSLFIDDMIVYLENPIISAQNLLKLIDNFSKVSGYKINVQKSQAFLYTNNRQTESQIMSELPFTIASERIKYLGIQLTRDVKDLFKENYKPLLNDIKEDTNKWKNTPRSWVGRINIMKMAILPKVIYRFNAIPIKLPMTFFTELEKTTLKFIWNQKGARIAKSILIYRFNAQELEKTTLKFIWNQKGARIAKSILSQKNKAGGITLPDFKLYYKATVIKTAWYWYQNRDIDQWNRTEPSEIMPHIYNHLIFDKPDKNKKWGNDSLFNKWCWENWLAICRKLKLDPFLIPYTKINSRWIKDLNVRPKTIKTLEENLGNTIQDIAMGKDFMSKTPKAMATKAKIDKWDLINLKSFCTAKETTIRVNRQPIEWEKIFAIYSSDKGRISRIYNELKQIYKKKTNNPIKKWAKDMNRHFSKEDIYAAKRHMKKCSSSLAIREMHIKTTMRHHLTSVRMAIIKKLGNDWCWRGCGEIGRLLHCWWDCKLVQPLWKSVWRFLRDLELETPFDPASPLLGIHPKDYRSCCYKDTCTX

SEQ ID NO: 36936 - protein, 529 aa, Homo sapiens
  DOMAIN (186)..(228): Aldehyde dehydrogenases glutamic acid proteins domain identified by eMATRIX, accession number BL00687B, p-value=1.000e- 40, raw score of 17.54
  DOMAIN (56)..(524): Aldehyde dehydrogenase family domain identified by PFam, accession name aldedh, E-value=1.9e-263, PFam score of 888.6
AGAPQTRAPRARERGGAMATANGAVENGQPDGKPPALPRPIRNLEVKFTKIFINNEWHESKSGKKFATCNPSTREQICEVEEGDKPDVDKAVEAAQVAFQRGSPWRRLDALSRGRLLHQLADLVERDRATLAALETMDTGKPFLHAFFIDLEGCIRTLRYFAGWADKIQGKTIPTDDNVVCFTRHEPIGVCGAITPWNFPLLMLVWKLAPALCCGNTMVLKPAEQTPLTALYLGSLIKEAGFPPGVVNIVPGFGPTVGAAISSHPQINKIAFTGSTEVGKLVKEAASRSNLKRVTLELGGKNPCIVCADADLDLAVECAHQGVFFNQGQCCTAASRVFVEEQVYSEFVRRSVEYAKKRPVGDPFDVKTEQGPQIDQKQFDKILELIESGKKEGAKLECGGSAMEDKGLFIKPTVFSEVTDNMRIAKEEIFGPVQPILKFKSIEEVIKRANSTDYGLTAAVFTKNLDKALKLASALESGTVWINCYNALYAQAPFGGFKMSGNGRELGEYALAEYTEVKTVTIKLGDKNP

SEQ ID NO: 36937 - protein, 80 aa, Homo sapiens
MATANGAVENGQPDRKPPALPRPIRNLEVKFTKAFPYRNDTVHTKRLLPSQDFCRGPCHSRDSSSVEDDGSSFMGMRNAT

SEQ ID NO: 36938 - protein, 95 aa, Homo sapiens
INLWMDLPTSWVNSSNYKVVLLGMDILSALVTRLQDRFKAQIGTVLPSLIDRLGDAKDSVREQDQTLLLKIMDQAANPQYVWDRMLGGFKHKNFR

SEQ ID NO: 36939 - protein, 186 aa, Homo sapiens
MGQEALGHWDKQENAGGQGDCHCQRKEVVYTAVHSSFCGRSSFFVLISLVLQSACVWTLGLRLGRKCLGLPGAGGRERCPAGRLLTGSRCFPLQVVLLGMDILSALVTRLQDRFKAQIGTVLPSLIDRLGDAKDSVREQDQTLLLKIMDQAANPQYVWDRMLGGFKHKNFRTREGICLCLIATLNA

SEQ ID NO: 36940 - protein, 1295 aa, Homo sapiens
  DOMAIN (1031)..(1047): SYNAPTOTAGMIN SIGNATURE domain identified by eMATRIX, accession number PR00399A, p-value=1.730e-13, raw score of 9.52
  DOMAIN (1044)..(1263): C2 domain identified by PFam, accession name C2, E-value=1.2e -71, PFam score of 251.4
MEKRETESQNLDEEVTGQEFKNYPRFPMPQSRSLHNYISWRFSCVSEELSSSDILEQGPSNALRLPRTAAVLSPELTPSSRQQAENPEWISTPFGSEPKGTSEEVAGSAALPGARPRPSGEHGLGVQPARPPPSDPPPGVARPHAQRRRRSSARPRAALRSPEGTGDEGTMYRDPEAASPGQRQRRTPSRSPSLGLLSARSRTGSPRGHPSPGGAGSSGSGSDPGPPQSGHCQAGCLGPASQCPHKDLSPTPQQPKDNVRAEGALPVESPPLICLDLGHLPWHLRRRGRRLPAHGPWQEYSLALLTFLEASSLVQKPALGYEDGRLHGLFLPSAFTLWFILKSLFLSDCLSPGQAGPSRPAGALRGGLPIISVVTLIVTNPNSDKTKDAGWLASLGRGSQAVPESASFLEKFCGALCSSISIPCPDRTLTQAVSVAGAATQYLHNPPALCGLRKGKDLLPAFCSLQKLPVTNRAAHGLCASLGPDFMTFKVPSSWRHSDSICREWFTLAGAPSRDVLLVSAIITVSLSVTVVLCGLCHWCQRKLGKRYKNSLETVGTPDSGRGRSEKKAINDLDRDFWNNNESTVQQKWSSYPPKEFILNISPYAPYGDPRLSLNGTLLSGAKVAAAAGLAVEREGRLGEKPAPVPPPGEDALRSGGAAPSEPGSGGKAGRGRWRTVQSHLAAGKLNLSNFEDSTLSTATTLESIPSSTGEPKCQRPRTLMRQQSLQQPLSQHQRGRQPSQPTTSQSLGQLQAHMASAPGPNPRAYGRGQARQGTSAGSKYRAAGGRSRSNPGSWDHVVGQIRNRGLDMKSFLTTSSRAAKWNFTNSETVPALDLDSAVVLIPWISSKEDTGDSHYGRVAIYHKGLSFSSDGLVYPGAKGREGRMVVLSLVLGLSEQDDFANIPDLQNPGTQQNQNAQGDKRLPAGGKAVNTAPVPGQTPHDESDRRTEPRSSVSDLVNSLTSEMLMPQLEHRETVPAVFHVFQRECLPHWDVVRGFSKETAMRESLVMLSPGSEEDEAHEGCSRENLGRIQFSVGYNFQESTLTVKIMKAQELPAKDFSGTSDPFVKIYLLPDKKHKLETKVKRKNLNPHWNETFLFEGFPYEKVVQRILYLQVLDYDRFSRNDPIGEVSIPLNKVDLTQMQTFWKDLKPCSDGSGSRGELLLSLCYNPSANSIIVNIIKARNLKAMDIGGTSDPYVKVWLMYKDKRVEKKKTVTMKRNLNPIFNESFAFDIPTEKLRETTIIITVMDKDKLSRNDVIGKIYLSWKSGPGEVKHWKDMIARPRQPVAQWHQLKA

SEQ ID NO: 36941 - protein, 767 aa, Homo sapiens
  DOMAIN (680)..(706): C2 domain proteins domain identified by eMATRIX, accession number PF00168C, p-value=2.636e-10, raw score of 27.49
  DOMAIN (655)..(743): C2 domain identified by PFam, accession name C2, E-value=4.9e -34, PFam score of 126.5
KLPVTNRAAHGLCASLGPDFMTFKVPSSWRHSDSICREWFTLAGAPSRDVLLVSAIITVSLSVTVVLCGLCHWCQRKLGKRYKNSLETVGTPDSGRGRSEKKAIKVSRPCPPPAKASATHPTCKSPRSQEKVESPGDLDRDFWNNNESTVQQKWSSYPPKEFILNISPYAPYGDPRLSLNGTLLSGAKVAAAAGLAVEREGRLGEKPAPVPPPGEDALRSGGAAPSEPGSGGKAGRGRWRTVQSHLAAGKLNLSNFEDSTLSTATTLESIPSSTGEPKCQRPRTLMRQQSLQQPLSQHQRGRQPSQPTTSQSLGQLQAHMASAPGPNPRAYGRGQARQGTSAGSKYRAAGGRSRSNPGSWDHVVGQIRNRGLDMKSFLTTSSRAAKWNFTNSETVPALDLDSAVVLIPWISSKEDTGDSHYGRVAIYHKGLSFSSDGLVYPGAKGREGRMVVLSLVLGLSEQDDFANIPDLQNPGTQQNQNAQGDKRLPAGGKAVNTAPVPGQTPHDESDRRTEPRSSVSDLVNSLTSEMLMEDWPPAVFSSGWAIATAHPASLHSPLIGYSFLAARGGLLLFEADFCWCKRSGSTFPDCDGVANLAATEMALSQLRFSKETAMRESLVMLSPGSEEDEAHEGCSRENLGRIQFSVGYNFQESTLTLKIMKAQELPAKDFSGTSDPFVKIYLLPDKKHKLKTKVKRKNLNPHWNETFLFEGFPYEKVVQRILYLQVLDYDRFSRNDPIGEVSIPLNKVDLTQMQTFWKDLKPCSDGS

SEQ ID NO: 36942 - protein, 192 aa, Homo sapiens
  DOMAIN (108)..(124): SYNAPTOTAGMIN SIGNATURE domain identified by eMATRIX, accession number PR00399A, p-value=8.239e-11, raw score of 9.52
MDVYPVLSAVMNDSSIAKLILVLHAEADLGYSEAGGLALALAGCRTGWQGGSRAKFCTKELVLASSGRSHSRKFTLPGPGSAAGSTGPPGSEEDEAHEGCSRENLGRIQFSVGYNFQESTLTLPAQRTASSDRFVNCSKCHAGLRVAAPQAARGNILSTALNRRPSLYDSILPARIFRRIVREYQLRTMSSV

SEQ ID NO: 36943 - protein, 51 aa, Homo sapiens
AAAGMQLCVDASQPLWMLFGLHGTITQIRILGECPQLRLGVCLSWRRGRSG

SEQ ID NO: 36944 - protein, 171 aa, Homo sapiens
  misc_feature (1)...(171): Xaa = X or * as defined in Table 2
DAGAQPSLPRYLIYHQPSRFFRITSTVTPFSKPISSLLWLVXGLHGDILLRLLQSXRCXCRSHPEYHSGPPGRWQGPSPAPQKCSRTTSRSRSSRXHPPPPRPGGSAPSSPASYSWTPPRTVPGSWARRWRRHLSRPSWATQPSWTATLWSQPLWRLKWEDCLSPGRSRLQ

SEQ ID NO: 36945 - protein, 196 aa, Homo sapiens
VRVRGSRCLQALRMLPCDVQKLFASMAGGKREPWKALEHGTDLAKAQLRSLSWQPGFHPGGSERNADVRQGGAILGLVVNADGELHLSHNGAAAGMQLCVDASQPLWMLFGLHGTITQIRILGWWFVSTSEEQGWVPATYLEAQNGTRDDSDINTFKTGEGKMHGKHSENARTRAGGHNTALYAPPIGSVSLENTD

SEQ ID NO: 36946 - protein, 392 aa, Homo sapiens
  DOMAIN (38)..(82): Synapsins proteins domain identified by eMATRIX, accession number BL00415N, p-value=8.292e-09, raw score of 4.29
GPLLREPHQLCHFPVAGFVLDAGLPEAAAAPHDRGPELAGPQAAGQHPAQVAHQPRAAAQQRQGRRAREEAGAQAQEEPRGPQERRRRLAEGLRRQCGHPAGRDGRGGYRRAAQGPARGGRTPEWQQSGGARRTPSVGHPRRARADWCLTGANDALSCSSPTCGKFLKTVSKVPVCRRGLAVNRKEAEGRSSESPTSSATFQSPALSWMLVSQRLLLPHMIGAQSSPGPKRPGNTLRKWLTSPVRRLSSGKADGHVKKLAHKHKKSREVRKSADAGSQKDSDDSAATPQDETVEEDTVAQPRGRREGAGRQSGSRAAGPGGRRASAIRGGHARTDVGKRNGTRTRKELMPLHGKRKDAAEHDEPTSASRPAGERPELTLAAVQTEYNCSFPS

SEQ ID NO: 36947 - protein, 325 aa, Homo sapiens
PPVGSSHHAQRIEASGHAGLAVLLSVQPTAAAGSRAPASTWILDLDSLSVSSNDASPPASVASLQPHMIGAQSSPGPKRPGNTLRKWLTSPVRRLSSGKADGHVKKLAHKHKKSREVRKSADAGSQKDSDDSAATPQDETVEELKSFGGDSVENLQCKTDVHRNSPAVEQGIRGWPCLIGNALAVNRQQTHMCACLADVMWHEGCQSQQRLGDLVGFVTLAVQGGPHFTAPALLPTLGLGRLSLDSSSRRSASSCFLPQPSAAFSYTSVTCGKFLKTVSKVPVCRRGLAVNRKEAEGRSSESPTSSATFQSPALSWMLVSQRLLL

SEQ ID NO: 36948 - protein, 200 aa, Homo sapiens
GTRQLFSRSCPRVLPRQPSTAMAAYGQTQYSAGIQQATPYTAYPPPAQAYGIPSYSIKTEDSLNHSPGQSGFLSYGSSFSTSPTGQSPYTYQMHGEYNTHNGPSTPAKEGDTDRPHRASDGKLRGRSKRSSDPSPAGDNEIERVFVWDLDETIIIFHSLLTGTFASRYGKDTTTSVRIGLMMEEMIFNLADTHLFFNDLE

SEQ ID NO: 36949 - protein, 538 aa, Homo sapiens [sequence omitted]

SEQ ID NO: 36950 - protein, 200 aa, Homo sapiens; identical to SEQ ID NO: 36948

SEQ ID NO: 36951 - protein, 538 aa, Homo sapiens [sequence omitted]

SEQ ID NO: 36952 - protein, 304 aa, Homo sapiens
  DOMAIN (27)..(45): GPR6 ORPHAN RECEPTOR SIGNATURE domain identified by eMATRIX, accession number PR00649B, p-value=2.853e-10, raw score of 8.21
MSEGAAAASPPGAASAAAASAEEGTAAAAAAAAAGGGPDGGGEGAAEPPRELRCSDCIVWNRQQTWLCVVPLFIGFIGLGLSLMLLKWIVVGSVKEYVPTDLVDSKGMGQDPFFLSKPSSFPKAMETTTTTTSTTSPATPSAGGAASSRTPNRISTRLTTITRAPTRFPGHRVPIRASPRSTTARNTAAPATVPSTTAPFFSSSTLGSRPPVPGTPSTQAMPSWPTAAYATSSYLHDSTPSWTLSPFQDAASSSSSSSSSATTTTPETSTSPKFRVDIDSVTAESELTRRKYEGSPAELPPLGS

SEQ ID NO: 36953 - protein, 67 aa, Homo sapiens
  misc_feature (1)...(67): Xaa = X or * as defined in Table 2
VLPLHRQIXXLLHXSKKHNHYKGKQQDLRCSSTVPRRPQGILPIISFSNVPVGSRRLKAPLVFIGPG

SEQ ID NO: 36954 - protein, 603 aa, Homo sapiens
  DOMAIN (427)..(474): kw TRANSCRIPTASE REVERSE II ORF2 domain identified by eMATRIX, accession number DM01354V, p-value=1.000e-40, raw score of 12.97
  DOMAIN (157)..(441): Reverse transcriptase domain identified by PFam, accession name rvt, E-value=2.4e-06, PFam score of 20.4
FNTPLSTLDRSSRQKVNKDIQDVISALHEAGLIDIYRTLHPKSTEYTFFSAPHHTYYKIDHIVGSKALLSKCKRTEITTNCLSDDRAIKLELRIKKLTQNYTTTWKLNNLLLSDYWVNNEMKAEIKMFFETNENKDTMYQNLWDTFKAVCRGKFIAVNAYKRKQERSKIHTLTSQLKEPEKQEQTHSKASRRQEITKIRAELKEIDTQKTLQKISVSRSWFSERINKIDRLIARLMKKKREKNQIDAIKNDKGDITIDPTEMQTTIREYYKNLYANKLENLEEMDKFLDTYILPRLNQEEVELPNRPITGSENEAIINSLPTKKSPGPDEFTAKFYQRYKGLARAIRQEKEREDTQLGKEEVKLLLFAEDMIVYLENPIVSAQNLLKLINNFSKVSGYKINVQKSQAFLHTNNRQTESQIMSECPLTIASKRIKYLGIQLTRDVKDLFKENYKPLLNKIKEDTNKWKNIPRSWLGRNNIVKMTILPKVIYKKTTLNFIWNQERARIAKTILSKKNKAGGITLPDFKLYYKATVTKTARYWTLTIKKGSVWPISLKSEKRGHRTRPLWKLCHNDVQGELLKTIQFLFGSPLGHSSLDPSALVCK

SEQ ID NO: 36955 - protein, 996 aa, Homo sapiens
  DOMAIN (483)..(524): kw TRANSCRIPTASE REVERSE II ORF2 domain identified by eMATRIX, accession number DM01354I, p-value=1.000e-40, raw score of 15.55
  DOMAIN (651)..(879): Reverse transcriptase domain identified by PFam, accession name rvt, E-value=3.3e-22, PFam score of 87.2
MPPHSEQPHSPSTRQKRKVPLFVRQCPSFVIQAPKAKMDTFDGRKKQFTRFLFLFSMDQLGQGRFSMQTLSFALAVYRKDSPLVACQVQALGNLEPSSVEAHVSSHGIAIDRKGWHVSLFSIQPGDCFPKALVEDSPRDRARRQQSSKEEGWCRDRRRLKFHSKKGAAAIVVKSKKYESPSFGVCFESLLNPPRLTSRREKTISSSKRCRQCHAEETTVVFWAKESQTGEQTGRGAGQRRMGMIICKACSMLPAERQDLRPTSLVISHGVSVKDRREHCQCPNYYPPLRNMSPLEHSIKICGGKKPQNDSQRITTITKVIVNQDFKQPDDTELSQGSRKETSEASLVTLLWELVTAGQTPPLVTPRQTGSGVDLQQTPTDLQLRVLTIRRKTNKQKGHPPKPHLYVTIIKDQRTLHPKSTEYTFFSAPHPTYSKIDHIVGSKALLSKCKRTEIITNCLSDHSAIKLELRIKKLTQNRSTTWKLNNLLLNDYWVYKEMKAEIKMFFETNENKDTTYQNLWDTFKAMYSGKFMALNAHKRKQQRSKIDTLISQLTELEKQEQTHSKASRRQETTKIRAELKEIETQKTLQKINESRSWFFEKINKIDRTLARLIKKKREKNQIDTIKNDKGDITTDPTEIQTTVYIIWYWYANKLENLEEMDKFLDTYTLPILNQEEVESLNRPITGSEFEAIINSLPTKKSPGPDGFTAEFYQRTKDKNHMIISIDAEKAFNKIQQPFMLKTLNKLGIDGTYLPTANIILTGQKLEAFPLKIGTRQVLEVLARAIRQEKEIKGIPLGKEEVKLSLFADDMIVYLETPIISAQNLLKLISNFSKVSGYKVSVQKSQAFLYTNNRQTESQIMSELPFTIASKRIKYLGIQLTRDVKDLFKENYKPLINEIKEDTNKWKNIPCSWVGRINVVKMAILPKVIYRFNAIPIKLPMTFFTELEKTTLKFIWNQKRASIAKTILSQKNKAGGITLPDFKLYYKATVTKTAWYWY

SEQ ID NO: 36956 - protein, 368 aa, Homo sapiens
  DOMAIN (149)..(194): kw TRANSCRIPTASE REVERSE II ORF2 domain identified by eMATRIX, accession number DM01354N, p-value=2.964e-37, raw score of 13.17
  DOMAIN (37)..(320): Reverse transcriptase domain identified by PFam, accession name rvt, E-value=2.8e-05, PFam score of 5.4
  misc_feature (1)...(368): Xaa = X or * as defined in Table 2
MKAEIKMFFETNENKDTMYQNLWDTFKAVCRGKFIAVNAYKRKQERSKIHTLTSQLKEPEKQEQTHSKASRRQEITKIRAELKEIDTQKTLQKISVSRSWFSERINKIDRLIARLMKKKREKNQIDAIKNDKGDITIDPTEMQTTIREYYKNLYANKLENLEEMDKFLDTYILPRLNQEEVELPNRPITGSENEAIINSLPTKKVQDQMSSQPNSTRGTKVLARAIRQEKEREDTQLGKEEVKLLLFAEDMIVYLENPIVSAQNLLKLINNFSKVSGYKINVQKSQAFLHTNNRQTESQIMSECPLTIASKRIKYLGIQLTRDVKDLFKENYKPLLNKIKEDTKQMEEHSTLMFRKKQYCENDHTAQX

SEQ ID NO: 36957 - protein, 353 aa, Homo sapiens
  DOMAIN (124)..(165): kw TRANSCRIPTASE REVERSE II ORF2 domain identified by eMATRIX, accession number DM01354I, p-value=1.000e-40, raw score of 15.55
PPLVTPRQTGSGVDLQQTPTDLQLRVLTIRRKTNKQKGHPPKPHLYVTIIKDQRTLHPKSTEYTFFSAPHPTYSKIDHIVGSKALLSKCKRTEIITNCLSDHSAIKLELRIKKLTQNRSTTWKLNNLLLNDYWVYKEMKAEIKMFFETNENKDTTYQNLWDTFKAMYSGKFMALNAHKRKQQRSKIDTLISQLTELEKQEQTHSKASRRQETTKIRAELKEIETQKTLQKINESRSWFFEKINKIDRTLARLIKKKREKNQIDTIKNDKGDITTDPTEIQTTVYIIWYWYANKLENLEEMDKFLDTYTLPILNQEEVESLNRPITGSEFEAIINSLPTKKSPGPDGFTAEFYQ

SEQ ID NO: 36958 - protein, 527 aa, Homo sapiens
  DOMAIN (65)..(86): GLUCOSE/RIBITOL DEHYDROGENASE FAMILY SIGNATURE domain identified by eMATRIX, accession number PR00081F, p-value=7.188e- 14, raw score of 15.71
  DOMAIN (67)..(93): Short chain dehydrogenase/reductase C-te domain identified by PFam, accession name adh_short_C2, E-value=6.8e-10, PFam score of 40.8
MVEGTSSQGSRKENVFQVKGSLAAEWGKYGMRFNVIQPGPIKTKGAFSRLDPTGTFEKEMIGRIPCGRLGTVEELANLAAFLCSDYASWINGAPPLVIPRQTVSAVDVQQTPTDLQLRVLTVRRKTNKQKGHPHQNPVSPHLTYSKIDHIGGSKALLSKCKRTEIITNCLSDHSAIKRQLRFKKLTQNRSTTWKLNNLFLNDYWVHNEMKAEIKMFFEANENKDTTYQNLWDTFKAVCRGKFIALNAHKRKQGRSKMGTLTSQLKELEKQEQTHSKASRRQEKIQTPIREYYKHHYADKLENLEEMDTFLYTYTLPRLNLEEVESLNTPITHSEIEAIIKSLLTKKSPGPDRFTAKFHQRYKEELVPFLLKLFQSIEKEVILPDSFYEASIILIRKPGRDTTTKKENFRPIFLMNIDAKNFSKILANQIQQHIKKVIHHDQVGLIPGMQGWFNIPKSINIIHHINRTKDKNHMIISIDAEKAFDKIQLPFMLKTLSKLGVSYNMFTRLTIPIAQVDTRGNQLPSYLI

SEQ ID NO: 36959 - protein, 231 aa, Homo sapiens
  DOMAIN (93)..(111): GLUCOSE/RIBITOL DEHYDROGENASE FAMILY SIGNATURE domain identified by eMATRIX, accession number PR00081A, p-value=6.049e- 11, raw score of 10.53
  misc_feature (1)...(231): Xaa = X or * as defined in Table 2
AAFPAPRTLFFLSRPLRPTACAAFRPEFWRLNMKLPARVFFTLGSRLPCGLAPRRFFSYGTKILYQNTEALQSKFFSPLQKAMLPPNSFQGKVAFITGGGTGLGKGMTTLLSSLGAQCVIASRKMDVLKATAEQISSQTGNKVHAIQCNVKYPDMVQNTVSELIKVQGHPSTVITNXSTERSSISFLLPTIYAXDWFRFCSTQVLLPKQVWKPMSKSLAAEWGKIWNAIQC

SEQ ID NO: 36960 - protein, 963 aa, Homo sapiens
  DOMAIN (317)..(362): kw TRANSCRIPTASE REVERSE II ORF2 domain identified by eMATRIX, accession number DM01354N, p-value=1.000e-40, raw score of 13.17
  DOMAIN (415)..(690): Reverse transcriptase domain identified by PFam, accession name rvt, E-value=8.7e-88, PFam score of 305.1
  misc_feature (1)...(963): Xaa = X or * as defined in Table 2
MVKGSLQQEELTILNIYAPNTEAPRFIKQVLRDLQRDLDSHTLIMGDFNTPLSTLDRSTRQKINKDTQELNSALYQADLIDIYGTLHPKSTEYTFFSAPHHTYSQNWTTIVGSKALLSEHKRTEIITNYLSDHSAIKLELRIKKLTQNRSATWKLNNLLLNDYWVHNDMKAEIKMFFETKENKDTTYQNLWDTFKAVCRGKFIAKNAHNRKQERSKIDTLTSQLKELEKKEQTYLKASRRQEITKIKAELKEIETQKNPSKKINESRSWFFEKINKIDRXTARLIKKKREKNQIHAIKNDKGDITTDPTEIQTTIREYYKHLYANKLENLEEMDKFLDTYTLPRLNQEEVESLNRPITGSEIVAIINSLPTKKSPVPDGFTAEFYQRYKEELVPFLLKLFQSIEKEGILPNSFYEASIILIPKPGRDTTKKENFRPISLMNIDAKILNKILANRIQQHIKKLIHHDQVGFIPGMQGWFNIRKSINVIQHINRAKDKNHMIISIDAEKAFDKIQQPFMLKTLNKLGIDGMYFKIIRAIYDKPTANIILNGQKLEAFPLKTGTRQGCPLSPLLFNIVLEVLARAIRQEKEIKGIQLGKEEVKLSLFADDMIVYLENPIVSAQNLLKLISNFSKVSGYKINVQKSQAFLYTNNRQTESQIMGELPFTIASKRIKYLGIQLTRDVKDLFKENYKPLLKEIKEDTNKWKNIPCSWVGRINIVKMAILPKVIYRFNAIPIKLPMTFFTELEKTTLKFIWNQKRARIAKSILSQKNKAGGITLLDFKLYYKATVTKTAWYWYQNRDIDQWNRTEPSEIMPHIYNYLIFDKPEKNKQWGKDSLFNKWCWENWLAICRKLKLDPFLTPYTKINSRWIKDLNVKPKTIKTLEENLGITIQDIGVGKDFMSKTPKAMATKDKIDKWDLIKLKSFCTAKETTIRVNRQPTTWEKIFATYSSDKGLISRIYNELKK

SEQ ID NO: 36961 - protein, 1709 aa, Homo sapiens; identical to SEQ ID NO: 32700
  DOMAIN (797)..(842): kw TRANSCRIPTASE REVERSE II ORF2 domain identified by eMATRIX, accession number DM01354N, p-value=1.000e-40, raw score of 13.17
  DOMAIN (391)..(621): AP endonuclease family 1 domain identified by PFam, accession name AP_endonucleas1, E-value=7e-83, PFam score of 288.8

SEQ ID NO: 36962 - protein, 1189 aa, Homo sapiens; identical to SEQ ID NO: 32525
  DOMAIN (562)..(607): kw TRANSCRIPTASE REVERSE II ORF2 domain identified by eMATRIX, accession number DM01354N, p-value=1.000e-40, raw score of 13.17
  DOMAIN (646)..(871): Reverse transcriptase domain identified by PFam, accession name rvt, E-value=4.9e-50, PFam score of 179.7

SEQ ID NO: 36963 - protein, 1221 aa, Homo sapiens; identical to SEQ ID NO: 35785
  DOMAIN (387)..(432): kw TRANSCRIPTASE REVERSE II ORF2 domain identified by eMATRIX, accession number DM01354N, p-value=1.000e-40, raw score of 13.17
  DOMAIN (473)..(746): Reverse transcriptase domain identified by PFam, accession name rvt, E-value=1.8e-87, PFam score of 304.0

SEQ ID NO: 36964 - protein, 994 aa, Homo sapiens
  DOMAIN (158)..(203): kw TRANSCRIPTASE REVERSE II ORF2 domain identified by eMATRIX, accession number DM01354N, p-value=1.000e-40, raw score of 13.17
  DOMAIN (242)..(520): Reverse transcriptase domain identified by PFam, accession name rvt, E-value=1.5e-78, PFam score of 274.3
  misc_feature (1)...(994): Xaa = X or * as defined in Table 2
MRMQSSAKLLCSAWTLAYSIAVRTLSSDSEGQPPLVIHRQTGSGEDLQQTPTDLQLRVLTIRRKTNKQKGHPHQNPISSRRQEITKIRAELKKIETQKPFKKINESRSWFFEKINKIDRLLARLIKKKIEKNQIDAIKNDKGNITTNPTEIQTTIREYYKHLYANKLEHLEEMDKFLDIYTLPRLNQEEVESVNRPITGSEIEAIINSLPTKKSPGPDRFTAELYQRYKEELVPFLLKLFQSIEKEGILPNSFYEASIILISKPGRDTTKKENFRPISLMNIDAKILNKILANQIQQHIKKLIHHHQVGFIPGMQGWFNILKSINVIHHINRTKDKNHMIISIEAEKAFDKIQQPFMLKTLNKLGIDGTYLTYLKIIRAIYDKPTANIILNGQKLEAFPFKTGTRQGCPLSPLLFNIVLEALARAIRQEKEIKGIQLGKEDVKLSLFADDMIVYLENPIVSAQNLLKLISNFSEVSGYKINVQKSQAFLYTNNRQTESQIMSELPFTIASKRIKYLGIQLTRDVKDLFKENYKPLLNEIKEDTNKWKNIPCSWIGRINIVKMAILPKTLNQKFSYWFRVNKHYIHQRTFPLKETEFNTIATLYNGASPAQHQKALEPMAIKHQDCHGSEELPFAVLLSSLNENSIRVICLVRQIGGKREFLGVQVVLKTKPELAFPVEGGLQGQRWISNYLYEGNGQGDEKEKSNTEDRKSLSMEMMFQPRQEGVERASEAKGRMGVGKDTEKQLLEEESARAQAWRRKCAGCMVTESRMLFWLSGDKGPQFVTMGPAEGPARSKNQHKKIESFKHLSLDNSSQEETPGPGQCHYHLQQLPSAPHKEAKATQHKRVCPSISSQSLTPSSLLSKDITTAPCKLNLTKDLCLMNEQPYRNVIGHKGSGLTVKDGVGKPSKTTEFFTEYFSYKKSYPKKPYKCIQRQLLLIQSQEELAGNHVQRPLALEFGALFSPGGASWGFGDLKSYLGLQNTVSTHLDKLPLLX

SEQ ID NO: 36965 - protein, 1078 aa, Homo sapiens; identical to SEQ ID NO: 36419
  DOMAIN (479)..(524): kw TRANSCRIPTASE REVERSE II ORF2 domain identified by eMATRIX, accession number DM01354N, p-value=1.000e-40, raw score of 13.17
  DOMAIN (563)..(838): Reverse transcriptase domain identified by PFam, accession name rvt, E-value=4.7e-88, PFam score of 306.0

SEQ ID NO: 36966 - protein, 1083 aa, Homo sapiens
  DOMAIN (667)..(692): 7 kw REVERSE TRANSCRIPTASE RNA POLYMERASE domain identified by eMATRIX, accession number DM00895E, p-value=3.333e-11, raw score of 15.72
  DOMAIN (638)..(892): Reverse transcriptase domain identified by PFam, accession name rvt, E-value=1.2e-70, PFam score of 248.1
MNLSRHLNEVKGELLWSLEWRDPDGGSIRMEVGLGGWTQRLEEEKKGNVCSHGNLEKDFPYIPHLFGLQQKKMDLKGVFKSCFKIYCSSKHLLKTGFISEAVLCYGEGGEGDTVLTMKERWPHECIVLIQCNKGRLTPHTARYSSETKLPEERSGSSICGSPISAVLQPPLLIPRQTGSGVDLQQTPTNLQLRVLTVRRKTNKQKGHPHQKPICMSPSSKTKDFKPTKIKRDKEGHYIMVKGSIQQEELTILNIYAPNTEAPRFIKQVLSDLQRDLDSHIIIMGDFNTPISTLDRSMRQKVNKDIQELKSALQQADLIDIYRTLHPKSTEYTFFSAPHHTYSKIDHIVGSKALLSKCKRMEIITNCLSDHSAIKLELRIKKLTQNRSTTWKLNNVLLNDYWVHNKMKAEIKMFFETNGNKDTTYQNLWDTFKGVCRGKFIALNAHKRKQEGSKIDTLTSQLKELEKQEQTHSKVSRRQEITKIRAELKEIETQKTLQKINESRSWFFEKFNKIDRRLARLIKKKREKNQIDAIKNDKRDITTDPTEIQTTIREHYKHLYANKLENLEEMDKFLDTYTLPRLNQEEVESLNRPITGSEIEAIINSLPTKKSPGPDGLTAKFYQRYKEELVPFLLKLFQSIEKEGILPNSFYEVCIILIPKPGRGTTKKENFRPISLMNIDAKILNKILANRIQQLIKKLIHHDQHINRTKYKNHMIISINAEKAFDKIQQRFMLKTLNKLGIDGTYLKIIRAIYDKPTANIILNGQKLEAFPLETGTRQGCPLSPPLFNIVLEVLARAIRQEKEIKGIQLGKEEVKLSLFADDMIVDLENPIVSAQNLLKLISNFSNVSGYKINVQKSQAFLYTNNRQTESQIMSELPFTIASKSIKYLGIQLTRDVKDLFKENYKPLLNEIKEDTNKWKNILCSWVGRINIVKMAILPKVIYRFNAIPIKLPMTFFTELEKTTFKYLEYIKWLSPKSGQLETVSRGCEWSNNKKKHSLSTCSGRDPCSHGAYILRSGGGDGSRTGKVSICKCQSEMQVSQQLQRLQGNDCSSEVTNGSFNHRLIADLGQDEGHCCNTRGSTRN

SEQ ID NO: 36967 - protein, 1099 aa, Homo sapiens; identical to SEQ ID NO: 34343
  DOMAIN (22)..(67): kw TRANSCRIPTASE REVERSE II ORF2 domain identified by eMATRIX, accession number DM01354N, p-value=1.000e-40, raw score of 13.17
  DOMAIN (71)..(341): Reverse transcriptase domain identified by PFam, accession name rvt, E-value=7.5e-70, PFam score of 245.5

SEQ ID NO: 36968 - protein, 854 aa, Homo sapiens; identical to SEQ ID NO: 36422
  DOMAIN (50)..(96): kw TRANSCRIPTASE REVERSE II ORF2 domain identified by eMATRIX, accession number DM01354O, p-value=1.000e-40, raw score of 8.73
  DOMAIN (83)..(358): Reverse transcriptase domain identified by PFam, accession name rvt, E-value=1.5e-87, PFam score of 304.3

SEQ ID NO: 36969 - protein, 1134 aa, Homo sapiens
  DOMAIN (469)..(515): kw TRANSCRIPTASE REVERSE II ORF2 domain identified by eMATRIX, accession number DM01354O, p-value=1.000e-40, raw score of 8.73
  DOMAIN (502)..(777): Reverse transcriptase domain identified by PFam, accession name rvt, E-value=5.5e-79, PFam score of 275.8
MASCLVSQSTSEDNGFHRVPTSSPKSQRQSAFTAVRSALSLWELIVVLVCVFLMTGCNEKNRESHLKPYPKVGVAERPKNDWAESSLVSRDTCSSLGTVAWTHRLAFRVQATDIRPEVTWREPPRHSGGAGWLCFIYPHMETPELPGLPTNKEFQAHKRTGYEEETWNLKECVGRCAHPPVNFLTKWSSFSDYVQCVLAFTGVAGYITYLSIDSALFVETLGFLAVLTEAMLGVPQLYRNHRHQSTEGMRATEALWVREHHGYGSTTGTGAPRVREHCGYESTTGTGVPQVQERRGYGSTVGMGGYGSTAGTRAPRVREHRGYGRVREHCGYESTVGTGALWVWERHGYGSTVERPRSWNVPAASRAQPSDGSVPAAAMLQSAPVRQGPGDANTFGFSGYCFWLRKKVEFLSPNGSVSSGRCRKGESYGDFSYDHPILGTTGNRLNQEEVESLNRPITGSEIVAIINSLPTKKSPGPDGFTAEFYQRYKEELVPFLLKLFQSIEKEGILPNSFYEASIILIPKLGRDTTKKENFRPISVMNIDVKILNKILANRIQQHIKKLIHHDQVGFIPGMQGWFNIHKSINVIQHINRTKDKNHMIISIHAEKAFDKIQQHFMLKTLNKLGIDGTYLKIIRAIYDKPTANIILNGQKLEAFPLKIGTRQGCPLSPLLFNIVLEVLARAIRQEKEIKGIQLGKEVVKLSLFADDMIVYLENPIVSAQNLLKLISNFGKVSGYKINVQKSQAFLYTNNRQTESQIMSELPFTIASKRIKYLGIQLTRDVKDLFKENYKPLLNEIKEDTNKWKNIPCSWVGRINIVKMAVLPKLPMTFFTELEKTTLKFIWNQKRARIAKSILSQKNKAGGITLPDFKLYYKATVTKTAWYWYQNRDIDQWNRTEPSEITLHIYNYLIFDEPEKNKQWGKDSLFNKWCWENWLAICRKLKLDPFLTPYTKINSRWIKDLKVRPKTIKTLEENLGITIQDIGMGKDFMSKTPKAMATKAKIDKWDLIKLKSFCAAKETTIRVNRQPTKWEKIFATHLSDKGLISRIYNELKQIYKKKTNNPINKWAKDMNRHFSKEDIYAAKRHMKKCSSSLAIREMQIKTTMRYHLTPVRMAIIKKSGNNSFRYVFISSMKMN

SEQ ID NO: 36970 - protein, 1096 aa, Homo sapiens; identical to SEQ ID NO: 32692
  DOMAIN (154)..(195): kw TRANSCRIPTASE REVERSE II ORF2 domain identified by eMATRIX, accession number DM01354I, p-value=1.000e-40, raw score of 15.55
  DOMAIN (256)..(527): Reverse transcriptase domain identified by PFam, accession name rvt, E-value=9.8e-24, PFam score of 92.3

SEQ ID NO: 36971 - protein, 1056 aa, Homo sapiens
  DOMAIN (246)..(291): kw TRANSCRIPTASE REVERSE II ORF2 domain identified by eMATRIX, accession number DM01354N, p-value=1.000e-40, raw score of 13.17
  DOMAIN (330)..(605): Reverse transcriptase domain identified by PFam, accession name rvt, E-value=5.1e-89, PFam score of 309.1
MGKKQNRKTGNSKTQSASPPPKERSSSPATEQSWMENDFDELREEGFRRSNYSELWEDIQTKGKEVENFEKNLEECITRITNTEKCLKELMELKTKARELREECRSLRSRCDQLEERVSAMEDEMNEMKREGKFREKRIKRNEQSLQEIWDYVKRPNLRLIGVPESDVENGTKLENTLQDIIQENFPNLARQANVQIQEIQRTPQRYSSRRATPRHIIVRFTKVEMKEKMLRAAREKEIQTTIREYYKHLYANKLENLEEMDTFLDTYTLPRLNQEEVESLNRPITGSEIVAIINSLPTKKSPGPDGFTAEFYQRYKEELVPFLLKLFQSIEKEGILPNSFYEASIILIPKPGRDTTKKENFRPISLMNIDAKILNKILANRIQQHIKKLIHHDQVGFIPGMQGWFNIRKSINVIQHINRAKDKNHMIISIDAEKAFDKIQQPFMLKTLNKLGIDGTYFKIIRAIYDKPTANIILNGQKLEAFPLKTGTRQGCPLSPLLFNIVLEVLARAIRQEKEIKGIQLGKEEVKLSLFADDMIVYLENPIVSAQNLLKLISNFSKVSGYKINVQKSQAFLYTNNRQTESQIMGELPFTIASKRIKYLGIQLTRDVKDLFKENYKPLLKEIKEDTNKWKNIPCSWVGRINIVKMAILPKVIYRFNAIPIKLPMTFFTELEKTTLKFIWNQKRARIAKSILSQKNKAGGITLPDFKLYYKATVTKTAWYWYQNRDIDQWNRTEPSEIMPHIYNYLIFDKPEKNKQWGKDSLFNKWCWENWLAICRKLKLDPFLTPYTKINSRWIKDLNVKPKTIKTLEENLGITIQDIGVGKDFMSKTPKAMATKDKIDKWDLIKLKSFCTAKETTIRVNRQPTTWEKIFATYSSDKGLISRIYNELKQIYKKKTNNPIKKWAKDMNRHFSKEDIYAAKKHMKKCSSSLAIREMQIKTTMRYHLTPYLNTVIPYEKKASPPSVEDLQMLTNNQSVHFLIKSSFSKNRVKFSKNPLPPISDQGPHPLPSPRVWDALTDNYIPSLSEDWRDPNIEALNGNCSDTEVPLRGPWFSRA

SEQ ID NO: 36972 - protein, 1172 aa, Homo sapiens
  DOMAIN (159)..(186): G-protein coupled receptors proteins domain identified by eMATRIX, accession number BL00237C, p-value=3.000e-18, raw score of 13.19
  DOMAIN (101)..(194): 7 transmembrane receptor (rhodopsin family) domain identified by PFam, accession name 7tm_1, E-value=1.2e-17, PFam score of 58.2
MTRARALRSQSEESASAFSADDLMSIDLAEQMANDSDDSISAATNKGRGRGRGRRGGRGQNSASRGGSQRGRADTGLETSTRSRNSKTAVSASRNMSIIDDFPEPADLFWKYLDLATFILLYILPLLIISVAYARVAKKLWLCNMIGDVTTEQYFALRRKKKKTIKMLMLVVVLFALCWFPLNCYVLLLSSKRTRKENKGEAKEERKQTKCRGQAWTRRYPLVEPDSGEDTSPQADPNEFISPVFEGSIPDERLYRMFVNKKVTMLRPKEDENSWFNLFVIHQNRSKHGSTNFIPEQFLDDFIDLVIWGHEHECKIAPTKNEQQLFYISQPGSSVVTSLSPGEAVKKHVGLLRIKGRKMNMHKIPLHTVRQFFMEDIVLANHPDIFNPDNPKVTQAIQSFCLEKPLLLIPRQTGSEVDLRQTPTDLKLRVPTVRRKTNKQKGHPHQNPISPQCTYSKIDHIVGSKALLSKCKRTEIITNSLPEHRAIKLDLRIKKLTQNRSTTWKLNNLLLNDYWVHNEMKAEIKMFSETKENKDTTYHNLWDTFKTVCRGKFIALNAHKGNQERSKIDTLTSQLKEQEKQEQTHSKASRRQEITNIRAELKEIETQKTLQKINESRSWFFEKINKIDRPLARLIKKKREKNQIDAIKNDKADITTNPTEIQTTIREYYKHLYANKLENLEEMDNFLDTYTLPRLNQEEVESLNRPITGSEMEAIINSLPTKKSPGPDGFTADFYQRYKEELVPFLLKLFQSIEKEGILPNSFYEASIVLIPKPGRDTTKRILDQYPRRTSMQKSSIQYWQTESSNTSKSLSTMIKWASSLGCKAVLEVLARAIRQEKEIKGILLGKEEVKLSLFADDMIVYLENPIISAQNLLKLISNFSKVSGYKINVQKSQAFLYTNNRQTESQIMSELPFTIASKTIKYLGIQLTRDVKDLFKENYKPLLKEIKEDTNKWKNIPCSWVGRISIVKMAILPKVIYRFNAIPIKLPVTFFTELEKTTLKFIWNQKRAHIAKSILRQKNKAGGIMLPDFKLYYKATVTKTAWFQLTLGFRLGTCRNRRRMRFLNYPTAGLFEAPQSRPKAVFFSGRKGRIREKKTTRSELASENPQGRKPEFRGRERRPFLSRHFMDNVDASSPVRLSLATARSEGAGKVAARPRPHAGANPEQARRRTRK

SEQ ID NO: 36973 - protein, 1231 aa, Homo sapiens
  DOMAIN (541)..(586): kw TRANSCRIPTASE REVERSE II ORF2 domain identified by eMATRIX, accession number DM01354N, p-value=1.000e-40, raw score of 13.17
  DOMAIN (625)..(900): Reverse transcriptase domain identified by PFam, accession name rvt, E-value=1.7e-88, PFam score of 307.4
MGKKQDRKTGNCKTQSASPPPKERSSSPATEQSWMENDFDELREEGFRRSNYSELREDIQTKGKEVENFEKNLEECITRRTNTEKCLKELMELKTKARELQIWDYVKRPNLRLIGVPESDAENGTKLENTLQDIIQENFPNLARQANVQIQEIQRTPQRYSSRRATPRHIIVRFTKVEMKEKMLRAAREKGRVTLKGKPIRLTADLSAETLQARREWGPIFNILKEKNFQPRISYPAKLSFISEGEIKYFTDKQMLRDFVTTRPALKELLKEALSMERNNRQINETESQQGYPGIEFSSAPSGPNRHLQNSPPQINRIYIFSAPHHTYSKIDHIVGSKALLSKCKRTEIITNYLSDHSAIKLELRIKNFTQSRSTTWKLNNLLLNDYWVHNEMNAEIKMFFETNENKDTTYQNLWDAFKAVCRGKFIALNAHKRKQERSKIDTLTSQLKELEKQEQTHSKASRRQEITKIRAELKEIETQKTLQKINESRSWFFERITKSDRPLARLIKKKREKNQIDTIKNDKGDITTDPTEIQTTIREYYKQLYANKLENLEEMNKFLDTYTLPRLNQEEVESLNRPITGSEIVAIINSLPTKKSPGPDGFTAEFYQRYKEELVPFLLKLFQSIEKEGILPNSFYEASIILIPKPGRDTTKKENFRPISLMNIDAKILNKILANRIQQHIKKLIHHDQVGFIPGMQGWFNIRKSINVIQHINRAKDKNHMIISIDAEKAFDKIQQPFMLKTLNKLGTDGTYLKIIRAIYDKPTANIILNGQKLEAFPLKTGTRQGCPLSPLLFNIVLEVLARAIRQEKEIKGIQLGKEEVKLSLFADDMIVYLENPIVSAQNLLKLISNFSKVSGYKINVQKSQAFLYTNNRQTESQIMSELPFTIASKRIKYLGIQLTRDVKDLFKENYKPLLTEIKEDTNKWKNIPCSWVGRINIVKTAILPKVIYRVNAIPIKLPMTVFTELEKTTLKFIWNQKRARIAKSILSQKNKAGGITLPDFKLYYKATVTKTAWYWYQNRDIDQWNRTEPSEITPHTYNYLIFDKPEKNKQWGKDSLFNKWCWENWLAICRKLKLDPFLTPYTKINSRWIKDLNVRPKTIKTLEENLGITIQDIGMGKDFMSKTPKAMATKAKIDKWDLIKLKSFCTAKETTIRVNRCSKGIPKSERRNYLATACEDILGQKLCNQGKERKEERKKERRREREGKERERERKKKKGRKEGEKEKERKVKK

SEQ ID NO: 36974 - protein, 593 aa, Homo sapiens
  DOMAIN (121)..(168): kw TRANSCRIPTASE REVERSE II ORF2 domain identified by eMATRIX, accession number DM01354V, p-value=1.000e-40, raw score of 12.97
  DOMAIN (443)..(541): 7 transmembrane receptor (rhodopsin family) domain identified by PFam, accession name 7tm_1, E-value=6.8e-12, PFam score of 39.9
  misc_feature (1)...(593): Xaa = X or * as defined in Table 2
TEPKTKTTXLSQXMQKRPLTKFNNLSCXKLSINIVLEVLARAIRQEKEIKGIQLGKEEVKLSLFADDMIVYLENPIVSAQNLLKLISNFSKVSGYKINVQKSQAFLYTNNRQTESQIMSELPFTIASKRIKYLGIQLTRDVKDLFKENYKPLLKEIKEDTNKWKNIPCSWVGRINIVKMAILPKVIYRFNAIPIKLPMTFFTELGKTALKFIWNQKRARITKSILSQKNKAGGITLPDFQLYCKATVTKTAWFPSGDVGLEADFSPSHTLKTQFFSCLAEFAAASCFFQRMNGFGMAMTTTYSTGAAESPLPSCSIDQGDDTKLHRARSPGRTFPAAAGIPAAAAPDGPPLSLLHKLWFPVELGGRALPRAEESHGEVAALGVMVVAQGGKNQGEEARSTPWLRPTSHLPPCSSSSAWWTEQTDAHPLLFLLCLGIYLLNALSNLSMVALVRSDGALRSPMYYFLGHLSLVDVCFTTVTVPRLLAGLLHPGQAISFQACFAEMYFFVALGITESYLPAAMSYDRATAACRPLRYGALVTPWALRLAARYDRLASVVYAVITPTLNPFINSLRNKEVKGALKRGLRWRAAPQEA

SEQ ID NO: 36975 - protein, 1170 aa, Homo sapiens; identical to SEQ ID NO: 34344
  DOMAIN (246)..(287): kw TRANSCRIPTASE REVERSE II ORF2 domain identified by eMATRIX, accession number DM01354I, p-value=1.000e-40, raw score of 15.55
  DOMAIN (459)..(736): Reverse transcriptase domain identified by PFam, accession name rvt, E-value=5.5e-72, PFam score of 252.6
  misc_feature (1)...(1170): Xaa = X or * as defined in Table 2

SEQ ID NO: 36976 - protein, 1104 aa, Homo sapiens; identical to SEQ ID NO: 36431
  DOMAIN (411)..(456): kw TRANSCRIPTASE REVERSE II ORF2 domain identified by eMATRIX, accession number DM01354N, p-value=1.000e-40, raw score of 13.17
  DOMAIN (5)..(235): AP endonuclease family 1 domain identified by PFam, accession name AP_endonucleas1, E-value=7e-83, PFam score of 288.8

SEQ ID NO: 36977 - protein, 1598 aa, Homo sapiens
  DOMAIN (154)..(195): kw TRANSCRIPTASE REVERSE II ORF2 domain identified by eMATRIX, accession number DM01354I, p-value=1.000e-40, raw score of 15.55
  DOMAIN (400)..(675): Reverse transcriptase domain identified by PFam, accession name rvt, E-value=3.6e-89, PFam score of 309.6
MVKGSIQQEELTILNIYAPNTGAPRFIKQVLSDLQRDLDSHTLIMGDFNTPLSTLDRSTRQKVNKDTQELNSALHQADLIDIYRTLHPKSTEYTFFSAPHHTYSKIDHIVGSKALLSKCKRTEIITNYLSDHSAIKLELRIKNLTQSRSTTWKLNNLLLNDYWVHNEMKAEIKMFFETNENKDTTYQNLWDAFKAVCRGKFIALNAYQRKQERSKIDTLTSQLKELEKQEQTHSKASRRQEITKIRAELKEIETQKTLQKINESRSWFFERINKIDRPLARLIKKKREKNQIDTIKNDKGDITTDPTEIQTTIREYYKHLYANKLENLEEMDTFLDTYTLPRLNQEEVESLNRPITGSEIVAIINSLPTKKSPGPDGFTAEFYQRYKEELVPFLLKLFQSIEKEGILPNSFYETSIILIPKPGRDTTKKENFRPISLMNIDAKILNKILANRIQQHIKKLIHHDQVGFIPGMQGWFNIRKSINVIQHINRAKDKNHMIISIDAEKAFDKIQQPFMLKTLNKLGIDGTYFKIIRAIYDKPTANIILNGQKLEAFPLKTGTRQGCPLSPLLFNIVLEVLARAIRQEKEIKGIQLGKEEVKLSLFADDMIVYLENPIVSAQNLLKLISNFSKVSGYKINVQKSQAFLYTNNRQTESQIMSELPFTIASKRIKYLGIQLTRDVKDLFKENYKPLLKEIKEETNKWKNIPCSWVGRINIVKMAILPKVIYRFNAIPIKLPMTFFTELEKTTLKFIWNQKRARIAKSILSQKNKAGGITLPDFKLYYKATVTKTAWYWYQNRDIDQWNRTEPSEIMPHIYNYLIFDKPEKNKQWGKDSLFNKWCWENWLAICRKLKLDPFLTPYTKINSRWIKDLNVKPKTIKTLEENLGITIQDIGVGKDFMSKTPKAMATKDKIDKWDLIKLKSFCTAKETTIRVNRQPTTWEKIFATYSSDKGLISRIYNELKQIYKKKTNNPIKKWAKDMNRHFSKEDIYAAKKHMKKCSSSLAIREMQIKTTMRYHLTPVRMAIIKKSGNNRPEKTKSFLPPLPTQSSIHSGFLEHCVEQDSEALSGEAGKSLMFAMGVGSERAKHSLSDDGQLRGAKVATALTPSPTPHSDADDNTHLALRHDEQMSASEGMKFKFHSGEKVLCFEPDPTKARVLYDAKIVDVIVGKDEKGRKIPEYLIHFNGWNRSWDRWAAEDHVLRDTDENRRLQRKLARKAVARLRSTGRKKKRCRLPGVDSVLKGLPTEEKDENDENSLSSSSDCSENKDEEISEESDIEEKTEVKEEPELQTRREMEERTITIEIPEVLKKQLEDDCYYINRRKRLVKLPCQTNIITILESYVKHFAINAAFSANERPRHHHVMPHANMNVHYIPAEKNVDLCKEMVDGLRITFDYTLPLVLLYPYEQAQYKKVTSSKFFLPIKESATSTNRSQEELSPSPPLLNPSTPQSTESQPTTGEPATPKRRKAEPEALQSLRRSTRHSANCDRLSESSASPQPKRRQQDTSASMPKLFLHLEKTSPAVLTPSGVLLSIILLELPKVIPVPFCVQVPISLCTSCPCHIHKLLRERFLAEYHDDFFPESAYVAACEAHYSTKNPRAIY

SEQ ID NO: 36978 - protein, 1190 aa, Homo sapiens; identical to SEQ ID NO: 36001
  DOMAIN (432)..(477): kw TRANSCRIPTASE REVERSE II ORF2 domain identified by eMATRIX, accession number DM01354N, p-value=1.000e-40, raw score of 13.17
  DOMAIN (501)..(774): Reverse transcriptase domain identified by PFam, accession name rvt, E-value=2.2e-80, PFam score of 280.5

SEQ ID NO: 36979 - protein, 1127 aa, Homo sapiens; identical to SEQ ID NO: 36435
  DOMAIN (154)..(195): kw TRANSCRIPTASE REVERSE II ORF2 domain identified by eMATRIX, accession number DM01354I, p-value=1.000e-40, raw score of 15.55
  DOMAIN (400)..(675): Reverse transcriptase domain identified by PFam, accession name rvt, E-value=5.1e-89, PFam score of 309.1

SEQ ID NO: 36980 - protein, 1143 aa, Homo sapiens; identical to SEQ ID NO: 34358
  DOMAIN (110)..(151): kw TRANSCRIPTASE REVERSE II ORF2 domain identified by eMATRIX, accession number DM01354I, p-value=1.000e-40, raw score of 15.55
  DOMAIN (356)..(631): Reverse transcriptase domain identified by PFam, accession name rvt, E-value=9.2e-89, PFam score of 308.3

SEQ ID NO: 36981 - protein, 1260 aa, Homo sapiens; identical to SEQ ID NO: 36437
  DOMAIN (272)..(317): kw TRANSCRIPTASE REVERSE II ORF2 domain identified by eMATRIX, accession number DM01354N, p-value=1.000e-40, raw score of 13.17
  DOMAIN (356)..(631): Reverse transcriptase domain identified by PFam, accession name rvt, E-value=2.6e-81, PFam score of 283.5

SEQ ID NO: 36982 - protein, 1298 aa, Homo sapiens; identical to SEQ ID NO: 36439
  DOMAIN (154)..(195): kw TRANSCRIPTASE REVERSE II ORF2 domain identified by eMATRIX, accession number DM01354I, p-value=1.000e-40, raw score of 15.55
  DOMAIN (400)..(675): Reverse transcriptase domain identified by PFam, accession name rvt, E-value=5.1e-89, PFam score of 309.1

SEQ ID NO: 36983 - protein, 1111 aa, Homo sapiens; identical to SEQ ID NO: 36440
  DOMAIN (154)..(195): kw TRANSCRIPTASE REVERSE II ORF2 domain identified by eMATRIX, accession number DM01354I, p-value=1.000e-40, raw score of 15.55
  DOMAIN (400)..(675): Reverse transcriptase domain identified by PFam, accession name rvt, E-value=2.8e-88, PFam score of 306.7

SEQ ID NO: 36984 - protein, 1049 aa, Homo sapiens
  DOMAIN (275)..(320): kw TRANSCRIPTASE REVERSE II ORF2 domain identified by eMATRIX, accession number DM01354N, p-value=1.000e-40, raw score of 13.17
  DOMAIN (359)..(634): Reverse transcriptase domain identified by PFam, accession name rvt, E-value=7.2e-87, PFam score of 302.0
  misc_feature (1)...(1049): Xaa = X or * as defined in Table 2
MVKGSIQQEELTILNIYAPNTGAPRFIKQVLSDLQRDLDSHTLIMGDFNNPLSTLDRSMRQKVNKDTQELNSALHQVDLIDIYRTLHHKSTEYRFFSAPHHTYSKIDHILGSKALLSKCKRTEIITNYLSGHSAIKLELKIKNLTQNRSTTWKLNNLLLNDYWIHNEMKAEIKMFFETNENKDTTYQNLWDAFKAVCRGKFIALNAHKRKQERSKIDTLTSQLKELEKQEQTHSKAGRKKEITKIRAQLKEIETQKTLKKLMNPGAEIQTTIREYYKHLYAKKLENLEEMDKFLDTYTLPRLNQEEVESLNRPITGAEIVAIINSLPTKKSPGPDGFTAKFYQRYKEELVPFLLKLFQSIEKEGILPNSFYEASIILIPKPGRDTTKKENFRPISLMNIDAKILNKILAKRIQQHIKKLIHHDQVGFIPGMQGWFNIHKSINVIQHINRPKDKNHMIISIDAEKAFDKIQQPFMLKTLNKLGIDGTYFKIISAIYDKPTANIILNGQKVEAFPLKTGTRQGCPLSPLLFNIVLEVLARAIRQEKEIKGIQLGKEEVKLSLFADDMIVYLENPIVSAQNLLKLISNFSKVSGYKINVQKSQAFLYTNNRQTESQIMSELPFTIASKRIKYLGIQLTRDVKDLFKENYKPLLKEIKEDTNKWKNIPCSWVGRINIVKMAILPKVIYRFNAIPIKLPMTFFTELEKTTLKFIWNQKRARIAKSILSQKNKAGGITLPDFKLYYKATVTKTAWYWYQNRDLDQWNRTEPSEITPHIYSYLIFDKPEKNKQWGKDSLFNKWCWENWLPICRKLKLDPFLTPYTKINSRWIKDLNVRPKTIKTLKENLGITIQDIGMGKDFMSKTPKAMATKDKIDKWDLIKLKSFCTAKETTIRVNRQPTKWEKIFATYSSDKGLISRIYNELKQIYKKKTNNPINKWVKDMNRHFSKEDIYAAKKHMKKCSSSLAIREMQIKTTMRYHLTPLRMAIIKKSGNNRTWEYNILCSLVPLLCSLLWLHLTDHHLKEDRTKHLTASDNLEKTELSRWKERALLYEHX

SEQ ID NO: 36985 - protein, 1466 aa, Homo sapiens
  DOMAIN (336)..(377): kw TRANSCRIPTASE REVERSE II ORF2 domain identified by eMATRIX, accession number DM01354I, p-value=1.000e-40, raw score of 15.55
  DOMAIN (582)..(857): Reverse transcriptase domain identified by PFam, accession name rvt, E-value=8.3e-88, PFam score of 305.1
MGKKQNRKTGNSKTQSASPPPKERSSSPATEQSWMENDFDELREEGFRRSNYSELREDIQTKGKEVENFEKNLEECITRITNTEKCLKELMELKTKARKLREECRSLRSRCDQLEERVSAMEDEMNEMKREGKFREKRIKRNEQSLQEIWDYVKRPNLRLIGVPESDVENGTKLENTLQDIIQENFPNLARQANVQIQEIQRTPQRYSSRRATPRHIIVRFTKVEMKEKMLRAAREKDRSTRQKVNKDTQELNSALHQADLIDIYRTLHPKSTEYTFFSAPHHTYSKIDHIVGSKALLSKCKRTEIITNYLSDHSAIKLELRIKNLTQSRSTTWKLNNLLLNDYWVHNEMKAEIKMFFETNENKDTTYQNLWDALKAVCRGKFIALNAHKGKQERSEIDTLTSQLKELEKQEQTHSKASRRQEITKIRAELKEIETQKTLQKINESRSWFFERINKIDRPLARLIKKKREKNQIDTIKNDKGDITTDPTEIQTTIREYYKHLYANKLENLEEMDTFLDTYTLPRLNQEEVESLNRPITGSEIGAIINSLPTKKSPGPDGFTAEFYQRYKEELVPFLLKLFQSIEKEGILPNSFYEASIILIPKPGRDTTKKENFRPISLMNIDAKILNKILANQIQQHIKKLIHHDQVGFIPGMQGWFNIRKSINVIQHINRAKDKNHMIISIDAEKAFDKIQQPFMLKTLNKLGIDGTYFKIIRAIYDKPTANIILNGQKLEAFPLKTGTRQGCPLSPLLFNIVLEVLARAIRQEKEIKGIQLGKEEVKLSLFADDMIVYLENPIVSAQNLLKLISNFSKVSGYKINVQKSQAFLYTNNRQTESQIMGELPFTIASKRIKYLGIQLTRDVKDLFKENYKPLLKEIKEDTNKWKNIPCSWVGRINIVKMAILPKVIYRFNAIPIKLPMTFFTELEKTTLKFIWNQKRARIAKSILSQKNKAGGITLPDFKLYYKATVTKTAWYWYQNRDIDQWNRTEPSEIMPHIYNYLIFDKPEKNKQWGKDSLFNKWCWENWLAICRKLKLDPFLTPYTKINSKWIKDLNVRPKTIKTLEENLGITIQDIGVGKDFMSKTPKAMATKAKIDKWDLIKLKSFCTAKETTIRVNRQPTTWEKIFATYSSDKGLISRIYNELKQIYKKKTNNPIKKWAKDMNRHFSKEDIYAAKKHMKKCSSSLAIREMQIKTTMRYHLTPTACLETAEEQQLNNMECAGTEAINSLISIALLPKGGMSRILIETQGDRTLKWHKERAVCGAHMQARAGQTTHSAGGFLLPPGIHLQSLPCGCEELPRKQRMERNQPPGVRTGTTPFPKMKPEDTVIVTTGSAQKLACGLPHTHWEKANAASFKDTSGASKVIHDSLIWAFQLMTFTWDWFSFLSGTSSPVELSGDTSWKWQNGQWKFQAFITPSASSTPRKTRVPTLSPTSVGISRKVFDEPQLGLNLVLDESQGHYPATVAGPSS

SEQ ID NO: 36986 - protein, 1110 aa, Homo sapiens
  DOMAIN (318)..(364): kw TRANSCRIPTASE REVERSE II ORF2 domain identified by eMATRIX, accession number DM01354O, p-value=1.000e-40, raw score of 8.73
  DOMAIN (351)..(626): Reverse transcriptase domain identified by PFam, accession name rvt, E-value=3.2e-86, PFam score of 299.8
AWKGTTDRSTRQKVNKDTQELNSALHQADLIDIYRTLHPKSTEYTFFSAPHHTYSKIDHILGSKALLSKCKRTEIITNYLSDHSAIKLELRIKNLTQNCSTTWKLNNLLLNDYWVHNEMKAEIKMFFETNENKDTTYHNLWDAFKAVCRGKFIALNAHKRKQERSKIDTLTSQLKELEKQEQTHSKASRRQEITKIRAELKEIETQKTLQKINESRSWVFERINKIDRPLARLTKKKSEKNQIDAIKNDKGDITTDPTEIQTTIREYYKHLYANKLENLEETDKFLDTYTLPRRNQEEVESLNRPITGAEIVAIINNLPTKKSPGSDGFTAEFYQRYKEELVPFLLKLFQSIEKEGILPNSFYEASIILIPKPGRDTTKKENFRPISLMNIDAKILNKILANQIQQHIKKLIHHDQVGFIPGMQGWFNICKSINVIQHINRTKDKNHMIISIDAEKAFDKIQQPFMLKTLNKLGIDGTYLKIIRAIYDEPTANIILNGQKLEAFPLKTGTRQGCPLSPLLFNIVLEVLARAIRQEREIKGIQLGKEEVKLSLFADDMIVYLENPIVSAQNLLKLISNFGKVSGYKINVQKSQAFLNTNNRQTESQIMSELPFTIASKRIKYLGIQLTRDVKDLFKENYKPLLKEIKEDTNKWKNIPCSWVGRINIMKMAILPKVIYRFNAIPIKLPMTFFTELEKTTLKFIWNQNRACIAKSILSQKNKAGGITLPDLKLYYKATVTKTAWYWYQNRDIDQWNRTEPSEITLHIYNYLIFDKPEKNKQWGKDSLFNKWCWENWLAICRKLKLDPFLTPYTKINSRWIKDLNIRPKTIKTLEENLGITIQDIGMGKDFMSKTPKAMATKAKIDKWDLIKLKSFCTAKETTIRVNRQPTKWGKIFATYSSDKGLISRIYNELKQIYKKKTNNPIKKFAKDMNRHFSKKDIYAAKKHMKKCSPSLAIREMQIKTTMRYHLTPVRMAIIKKSGNNRTGRGLHPGRDWSVTCARSPGDPEPSGIKGGCGSGTPSPSPSKQTVRRPWTQIPEMKPLLLAVSLGLIAALQAHHLLASDEEIQDVSGTWYLKAMTVDREFPEMNLESVTPMTLTTLEGGNLEAKVTML

SEQ ID NO: 36987 - protein, 1311 aa, Homo sapiens
  DOMAIN (294)..(335): kw TRANSCRIPTASE REVERSE II ORF2 domain identified by eMATRIX, accession number DM01354I, p-value=1.000e-40, raw score of 15.55
  DOMAIN (540)..(815): Reverse transcriptase domain identified by PFam, accession name rvt, E-value=7.7e-89, PFam score of 308.6
MGKKQNRKTGNSKTQSASPPPKERSSSPATEQSWMENDFDELREEGFRRSNYSELWEDIQTKGKEVENFEKNLEECITRITNTEKCLKELMELKTKARELHEECRSLRSRCDQLEERVSAMEDEMNEMKREGKFREKRIKRNEQSLQEIWDYVKRPNLRLIGVPESDVENGTKLENTLQDIIQENFPNLARQANVQIQEIQRMPQRYSSRRATPRHIIVRFTKVEMKEKMLRAARQKAPHHTYSKIDHIVGSKALLSKCKRTEIITNYLSDHSAIKLELRIKNLTQSRSTTWKLNNLLLNDYWVHNEMKAEIKMFFETNENKDTTYQNLWDTFKAVCRGKFIALNAYKRKQETSKIDTITSQLKELEKQEQTHSKASRRQEITKIRAELKEIETQKTLQKINESRSWFFERINKIDRPLARLIKKKREKNQIDTIKNDKGDITTDPTEIQTTIREYYKHLYANKLENLEEMDTFLDTYTLPRLNQEEVESLNRPITGSEIVAIINSLPTKKSPGPDGFTAEFYQRYKEELVPFLLQLFQSIEKEGILPNSFYEASIILIPKPGRDTTKKENFRPISLMNIDAKILNKILANRIQQHIKKLIHHDQVGFIPGTQGWFNIRKSINVIQHINRAKDKNHMIISIDAEKAFDKIQQPFMLKTLNKLGIDGTYFKIIRAIYDKPTANIILNGQKLEAFPLKTGTRQGCPLSPLLFNIVLEVLARAIRQEKEIKGIQLGKEEVKLSLFADDMIVYLENPIVSAQNLLKLISNFSKVSGYKINVQKSQAFLYTNNRQTESQIMSELPFTIASKRIKYLGIQLTRDVKDLFKENYKPLLKEIKEDTNKWKNIPCSWVGRINIVKMAILPKVIYRFNAIPIKLPMTFFTELEKTTLKFIWNQKRACISKSILSQKNKAGGITLPDFKLYYKATVTKTAWYWYQNRDIDQWNRTEPSEIMPHIYNYLIFDKPEKNKQWGKDSLFNKWCWENWLAICRKLKLDPFLTPYTKINSRWIKDLNVRPKTIKTLEENLGITIQDIGVGKDFMSKTPKAMATKAKIDKWDLIKLKSFCTAKETTIRVNRQPTTWEKIFTTYSSDKGLISRIYNELKQIYKKKTNNPIKKWAKDMNRHFSKEDIYAAKKHMKKCSSSLAIREMQIKTTMRYHLAPVRMAIIKKSGNNRLLRKCPRISTVQIKLSWPWVSHCSPTCHGLQEEQSSVWRRPDYAQKPLSRCSIDSPAGAGSHLGGTVSTRRAAKQGYGISEPLRSRVSHFRASAVKGMAFPSLCGQGYGVSEPLQSRAQRWVVGAAVGASQMWVPTCLMT

SEQ ID NO: 36988 - protein, 1702 aa, Homo sapiens
  DOMAIN (401)..(442): kw TRANSCRIPTASE REVERSE II ORF2 domain identified by eMATRIX, accession number DM01354I, p-value=1.000e-40, raw score of 15.55
  DOMAIN (647)..(1563): Reverse transcriptase domain identified by PFam, accession name rvt, E-value=1.2e-173, PFam score of 590.3
MGKKQNRKTGNSKTQSASPPPKERSSSPATEKSWMENDFDELREEGFRRSNYSELREDIQTKGKEVENFEKNLEECITRITNTEKCLKELMELKTKARELREECRSLRSRCDQLEERVSAMEDEMNEMKREGKFREKRIKRNEQSLQEIWDYVKRPNLRLTGVPESDGENGTKLENTLQDIIQENFPNLARQVNVQIQEIQRTPQRYSSRRATPRHIIVRFTKVEVKEKMLRAAREKGRVTLKGKPIRLTADLSAETLQARREWGPIFNILKEKNFQPRISYPAKLSFISEGEIKHFTDKQMLRDFVTTRPALKELLKEVLNMERNNQYQPLQNHAKIQINETETPHHTYSKIDHIVGSKALLSKCKRTEIITNYLSDHSAIKLEIRIKNLTQSHSTTWKLNNLLLNDYWVHNEMKAEIKMFFETNENKDTTYQNLWDAFKAVCRGKFIALNAYKRKQERSKIDSLTSQLKELEKQEQTHSKASRRQEITKIRAELKEIETQKTLQKINESRSWFFERINKIDRPLARLIKKKREKNQIDTIKNDKGDITTDPTEIQTTIREYYKHLYANKLENLEEMDTFLDTYTLPRLNQEEVESLNRPITGSEIVAIINSLPTKKSPGPDGFTAEFYQRYKEELVPFLLKLFQSIGKEGILPNSFYEASIILTPKPGRDTTKKENFRPISLMNIDAKILNKILANRIQQHIKKLIHHDQVGFIPGMQGWFNIRKSINVIQHINRAKDKNHMIISIDAEKAFDKIQQPFMLKTLNKLGIDGTYFKIIRAIYDKPTANIILNGQKLEAFPLKTGTRQGCPLSPLLFNIVLEVLARAIRQEKEIKGIQLGKEEVKLSLFADDMIVYLENPIVSAQNLLKLISNFSKVSGYKINVQKSQAFLYTNNRQTESQIMGELPFTIASKRIKYLGIQLTRDVKDLFKENYKPLLKEIKEDTNKWKNIPCSWVGRINIVKMAILPKVIYRFNAIPIKLPMTFFTELEKTTLKFIWNQKRARIAKSILSQKNKAGGITLPDFKLYYKATVTKTAWYWYQNRDIDQWNRTEPSEIMPHIYNYLIFDKPEKNKQWGKDSLFNKWCWENWLAICRKLKLDPFLTPYTKINSRWIKDLNVRPKTIKTLEENLGITIQDIGVGKDFMSKTPKAMATKAKIDKWDLIKLKSFCTAKETTIRVNRQPTTWEKIFATYSSDKGLISRIYNELKQIYKKKTNNPIKKWAKDMNRHFSKEDIYAAKKHMKKCSSSLAIREMQIKTTYHAGPDGFTAEFYQRYKEELVPFLLKLFQSIEKEGILPNSFYEASIILIPKPGRDTTKKENFRPISLMNIDAKILNKILAKRIQQHIKKLIHHDQVGFIPGMQGWFNICKSINVIQHINRTKDKNHMIISIDAEKAFDKIQQLFMLKTLNKLGIDGTYLKIIRAIYDKPTANIILNGQKLEAFPLKTGTRQGCPLSPLLFNIVWEVLARAMRQEKEIKGIQLGKEEVKLSLFADDMIVYLENPIVSAQNLLKLISNFSKVSGYKINVQKSQAFLYTNNRQTESQIMSELPFTTASKRIKYLGIQLTRDEKDLFKENYKPLLNEIRGYKQMEEHSMLTGRKNQYRENAHTAQAKANHRPATSKKVYLITAMKPLSSPIPEGLGLENRTGKEIKSREWTTMLRLAVAAELTFRDWKERSRRTLDTHETKGIPLSKSRAGILVIDIR

SEQ ID NO: 36989 - protein, 2390 aa, Homo sapiens
  DOMAIN (154)..(195): kw TRANSCRIPTASE REVERSE II ORF2 domain identified by eMATRIX, accession number DM01354I, p-value=1.000e-40, raw score of 15.55
  DOMAIN (400)..(1950): Reverse transcriptase domain identified by PFam, accession name rvt, E-value=1.3e-178, PFam score of 606.8
MVKGSIQQEELTILNIYAPNTGAPRFIKQVLSDIQRDLDSHTLIMGDFNTPLSTLDRSTRQKVNKDTQELNSALHQADLIDIYRTLHPKSTEYTFFSAPHHTYSKIDHIVGSKALLSKCKRTEIITNCLSDHGAIKLELRIKNLTQSRSTTWKLNNLLLNDYWVHNEMKAEIKMFFETNENKDTTYQNLWDAFKAVCRGKFIALNAYKRKQERSKIDTLTSQLKELEKQEQTHSNASRRQEITKIRAELKEIETQKTLQKINESRSWFFERINKIDRPLARLIKKKREKNQIDTIKNDKGDITTDPTEIQTTIREYYKHLYANKLENLEEMDTFLDTYTLPRLDQEEVESLNRPITGSEIVAIINSLPTKKSPGPDGFTAEFYQRYKEELVPFLLKLFQSIEKEGILPNSFYEASIILIPKPGRDTTKKENFRPISLMNIDAKILNKILAKRIQQHIKKLIHHDQVGFIPGMQGWFNICKSINVIQHINRAKDKNHMIISIDAEKAFDKIQQPFMLKTLNKLGIDGTYFKIIRAIYDKPTANIILNGQKLEAFPLKTGTRQGCPLSPLLFNIVLEVLARAIRQEKEIKGIQLGKEEVKLSLFADDMIVYLENPIVSAQNLLKLISNFSKVSGYKINVQKSQAFLYTNNRQTESQIMSELPFTIASKRIKYLGIQLTRDVKDLFKENYKPLLKEIKEDTNKWKNIPCSWVGRINIVKMAILPKVIYRFNAIPIKLPMTFFTELEKTTLKFIWNQKRARIAKSILSQKNKAGGITLPDFKLYYKATVTKTAWYWYQNRDIDEWNRTEPSEIMPHIYNYLIFDKPEKNKQWGKDSLFNKWCWENWLAICRKLKLDPFLTPYTKINSRWIKDLNVRPKTIKTLEENLDITIQDIGVGKDFMSKTPKAMATKDKIDKWDLIKLKSFCTAKETTIRVNRQPTTWEKIFATYSSDKGLISRIYNELKQIYKKKTNNPIKKWVKDMNRHFSREDIYAAKKHMKKCSSSLAIREMQIKTTMRFYWDLIMLIMMVGNLVIIPVGITFFTEQTTTPWIIFNVASDTVFLLDLIMNFRTGTVNEDSSEIILDPKVIKMNYLKSWFVVDFISSIPVDYIFLIVEKGMDSEVYKTARALRIVRFTKILSLLRLLRLSRLIRYIHQWEEERSSSPATEQSWTENDFDELREEGFRRSNYSELREDIQTKGKEVENFEKNLEECITRITNTEKCLKELMELKTKARELREECRSLRSRCDQLEERVSAMEDEMNEMKQEGKIKRDKEGHYIMVKGSIQQEELTILNIYAPNTGAPRFIKQVLSDLQRDLDSHTLIMGDFNTSLLTLDRSMRQKVNKDTQELNSSLHQADLIDIYRTLHPKSIEYTFFSAPHHTYSKIDHIVGSKALLSKCKRTEIITNYLSDHSAIKLELRIKNLTQSRSTTWKLNNLLLNDYWVHNEMKAEIKMFFETNENKDTTYQNLWDAFKAVCRGKFIALNAHKRKQERSKIDTLTSQLKELEKQEQTHSKASRRQEITKIRAELKEIETQKTLQKINESRSWFFERINKIDRPLARLIKKKREENQIDTIKNDKGDITTDPTEIQTTIREYYKHLYANKPENLEEMDKFLDTYTLPRLKQEEVESLNRPITGAEIVAIINSLPTKKSPGPDGFTAEFYQRYKEELVPFLLKLFQSIEKEGILPNSFYEASIILIPKPGRDTTKKENFRPISLMNIDAKILNKILANRIQQHIKKLIHHDQVGFIPGMQGWFNIRKSINVIQHINRAKDKNHMIISIDAEKAFDKIQQPFMLKTLNKLGIDGTYFKIIRAIYDKPTANIILNGQKLEAFPLKNGTRQGCPLSPLLFNIVLEVLARAIRQEKEIKGIQLGKEEVKLSLFADDMIVYLENPIVSAQNLLKLISNFSKVSGYKINVQKSQAFLYTNNRQTERQITSELPFTIASKRIKYLGIQLTRDVKDLFKENYKPLLKEIKEDTNKWKNIPCSWVGRINIVKMAILPKVIYRFNAIPIKLPMTFFTELEKTTLKFIWNQKRARIAKSILSQKNKAGGITLPDFKLYYKATVTKTAWYWYQNRDIHQWNRTEPSEIMPHIYNYLIFDKPEKNKQWGKDSLFNKWCWENWLAICRKLKLDPFLTPYTKINSRWIKDLNVRPKTIKTLEENLGITIQDIGVGKDFMSKTPKAMATKAKIDKWDLIKLKSFCTAKETTIRVNRQPTTWEKIFATYSSDKGLISRIYNELKQIYKKKTNNPIKKWAKDMNRRFSKEDIYAAKKHMKKCSSSLAIREMQIKTTMRYHLTPVRMAIIKKSGNNRQTGSGVDLQHTPADLQQRGLTVRRKMNKHKGIASTSTKRTSTQKPHLKVTKIKDQRPTLQELLKEALNMERNNQYQPLQNHAKM

SEQ ID NO: 36990 - protein, 163 aa, Homo sapiens
  DOMAIN (107)..(117): DEAH-box subfamily ATP-dependent helicases proteins domain identified by eMATRIX, accession number BL00690A, p-value=9.471e- 11, raw score of 6.87
SCSSGATPSGPWGPSARRWGGASLVTFYPNMAAPVGPVKFWRPGTEGPGVSISEERQSLAENSGTTVVYNPYAALSIEQQRQKLPVFKLRNHILYLIENYQTVVIVGETGCGKSTQIPQEKSYVMWIGVERRIKKGLVKELAFEIDLDWELTEKIFQASEYCG

SEQ ID NO: 36991 - protein, 243 aa, Homo sapiens
MPPSANLEKRLPQKLRPPSVPTLVKRFTSSEANASQNQEQLKRESFQATGELSKINQKSSAFALEARLIMRADLLALLPLSFISQVVVSTTVNVDGHVLAVSDNMFVHNNSKHGRRARRLDPSEDWVIFEEKEFMSYGSGGWEVQGHDASTGEGFQAASSYCGKLITPHAIRVQTPPRHIPGVVEVTLSYKSKQFCKGTPGRFIYTAHFSYFGHGDSPEGSSSNSYLSEVFSDRCGIVDRALG

SEQ ID NO: 36992 - protein, 266 aa, Homo sapiens
  DOMAIN (25)..(35): TYPE I ANTIFREEZE PROTEIN SIGNATURE domain identified by eMATRIX, accession number PR00308C, p-value=6.260e-09, raw score of 3.83
SPAWELLTGPGYGQVMILGPAGLGSAAAAAAASASLCLSFLTCTTFCAPPPHSTSFSPQQATLQFCVVKPLMAVSSLQGSVPARKCSPSRSVTSGYLYVTIIYNISVSLALYALFLFYFATRELLSPYSPVLGKESFWVQTPVPPHPGMLLAILEKCGAIPKIHSARVSVGEGTVAAGYQDFIICVEMFFAALALRHAFTYKVYADKRLDAQGMSQGPRRPPLGEAGSPKHPRTLPPPSILQVRLGQDMGSPLYMQEWGHRGRGRA

SEQ ID NO: 36993 - protein, 109 aa, Homo sapiens
MKVIAFSRHTFEGNRKHWHKVANYGVGGQYEPHFDFSRSCGWWMKPVVNLGESCCLLQRPFDSGLKTEGNRLATFLNYNDERDTFKHLGTGNRVATFLNYVSMMCADEP

SEQ ID NO: 36994 - protein, 151 aa, Homo sapiens
KSSWLEEDDDPVVARVNRRMQHITGLTVKTAELLQVANYGVGGQYEPHFDFSRRPFDSGLKTEGNRLATFLNYMSDVEAGGATVFPDLGAAIWPKKGTAVFWYNLLRTGEGDYRTRHAACPVLVGCKWVSNKWFHESGQEFLRPCGSTEVD

SEQ ID NO: 36995 - protein, 238 aa, Homo sapiens
  DOMAIN (79)..(238): TBC domain identified by PFam, accession name TBC, E-value= 0.05, PFam score of -73.1
  misc_feature (1)...(238): Xaa = X or * as defined in Table 2
RHRLRNRLKDVGGEAFYPLLEDDQSNLPHSNSNNELSAAATLPLIIREKDTEYQLNRIILFDRLLKAYPYKKNQIWREARVDIPPLIRGLTWAALLGVEGAIHAKYDAIDKDTPIPTDRTQLKWDIPRCHSVRXTVIHAPEGHAKFRRVLKAWVVSHPDLVYWQGLDSLCAPFLYLNFNNEALVYACMSAFIPKYLYNFFLKDNSHVIQEYLTVFSQMIAFHDPELSNHLNEIGFIPD

SEQ ID NO: 36996 - protein, 169 aa, Homo sapiens
MTYFHLGSRRLDEGNAVTLEQRYQLSHREVEYQAGSCGPQFQDLALGQHFWTCRGPKGNYTEDQSNLPHSNSNNELSAAAMLPLIIREKDTEYQLNRIILFDRLLKGAIHAKYDAIDKDTPIPTDRQIEVDIPRCHQYDELLSSPEVHAKFRRVLKAWVVSHPDLVYWQ

SEQ ID NO: 36997 - protein, 296 aa, Homo sapiens
MKEEEHSRPTEQPVERVRFSRVLKNRAWPTFKQAKSKISPLHSSDFCPTNCHVNVMEVSYPKTSTSLGSAFGVQLDSRKHNSHDKENKSSEQGLSLGQQDGHGLRYLLKEEDLETQDIYQKLLGKLQTALKEVEMCVCQIDDLLSSITYSPKLERKTSEGIIPTDSDNEKGERNSKRVCFNVAGDEQEDSGHDTISNRDSYSDCNSNRNSIASFTSICSSQCSSYFHSDEMDSEFQQEMEPKLSCPKRLRLHIKQDPWNLPSSVRTLAQNIRKFVEGQHEKQRTLHDISNNQFKTH

SEQ ID NO: 36998 - protein, 194 aa, Homo sapiens
LWIPNFAVLAKPLYRVTKGGDREPFEWGPLQQQAFCKLKEKFMLAPALGLSDVTKPFTLYVSERETMAVGVLTQTVGHWPRPAAYLSKQLDGVSKGWPPRLRALAATALLAQEADKLTLGQNLNIKVPHAVPWASVDWELYVDWSSFINPQGERCAGYAVVTLDAVIEAKPLPQGTSAQKTELIALTRAQELSE

SEQ ID NO: 36999 - protein, 50 aa, Homo sapiens
QVAKGMDALLQHLEDCGYRSSKKKAQICRQQVTKWGDGSALMGTSTTASL

SEQ ID NO: 37000 - protein, 54 aa, Homo sapiens
DHYNQTVQLDITAFWGSSRVDLEDCGYKVSKKKAQICRQQVRYLGFTIRKGEHS

SEQ ID NO: 37001 - protein, 541 aa, Homo sapiens
MNADYKPLLQDSSTLSEKNFYPEPRVPNFPNLPQVFGCHKELKHSFDEQFGNTVLVGSAKGYLEHLRVYGEKYLQIKTRRIFAKNCCDMGKTFLSFEPFENRFGGTAPAILERLKPRGNRKFHGTISLHSKAGEIQVGGFGWLRKDEGSASGGRSQSDFQWILHRGGTNWWAYLGLGMSGPVAFIATLEMCRQDKLQTKPFRHQLEKKGLYSARSFGKTHSPTTELPKIAPESQKLFAFRWKIYSQVSLLSTLGTGFPRVQELPYYLRGGSDLDLQKFPAKDLSYVLLLSWMTFCWDTPWQLGAQKVDALFQHLEDCGYKVPRRNLRSADSSACGNLFPLVGVEECSLVQSTECLFDSLTIAWGHNSETASQKKKKKLRTCYMVPSVTPATWNRAKGKTDRVKTGEQDFEPGPNGGPAKKTRKDDTNRQRRDNEKTTNEKKIKKRTKTQGATNRRERQQPNKRRQNPSTRNKTEQTKSHTAKKRTAQDKPGTREMHREHNRRTKPTDARTRAKHSDQNNTHTPNQRPDKGHSKGTKKQQKS

SEQ ID NO: 37002 - protein, 657 aa, Homo sapiens
  DOMAIN (94)..(105): RNase H domain identified by eMATRIX, accession number PF00075B, p-value=6.276e-12, raw score of 12.56
  DOMAIN (24)..(181): Reverse transcriptase domain identified by PFam, accession name rvt, E-value=5e-12, PFam score of 53.4
MAQVWANDNPPGLAVNQAPVLIDVKPGAQPIRQKQYPVPREALKGIQPGTKDYQPVQDLRLVNQATVTLHPTVPNPYTLLGLLLAEDSWFTCLDLKDAFFSIRLAPESQKLFAFQWEDPQSDLGCILLLYVDDLLLGHSTAVECAKGMDVLLQHLEDCRYKMSKKKAHICRQQVRYLGFTIRKGERSWEREKMAVGVLTQTVGPWPRPVAYLSKQLDEVSKGWPLCLRTLAATALLAQEADKLTLGQNLNIKAPHAVVTLMTTEGHHWLTNARLTKYQSLPCENPHITIEVCNTLNPTTLLPVSESPGEHNCVEVLDSVYSSRPDLRDQPWASSVDWELYMDGSSFINSQGERCAGYAVVTLDAVIKAKLWLQGTSAQKAELIALTRAVELSEGQESLEELLGRYFYVSHLPAFAKAVAQLCITCRQHNARQSPTVSPHIQAYGAAPFEDLQVDFTEMPKCGGNKYLLVLTCTYSGWVEAYPTRTEKPYKKGKNDPSCTKGQCNPLELVITNPLNPHWKKGERVTLGIDRARLDPRVNILVRGGEVYERSPEPVFQTFYDELNVPVPEIPGKTRNLFLQLAECVAQPLNVTSCYVCGGTVTGYQWPWKARELVPVDPVPDEFLAQKNYPDNFWVLKPSITGQYCIAREGKKFTHPVG

SEQ ID NO: 37003 - protein, 487 aa, Homo sapiens
  DOMAIN (62)..(79): RNase H domain identified by eMATRIX, accession number PF00075A, p-value=3.286e-09, raw score of 14.44
  DOMAIN (41)..(189): Reverse transcriptase domain identified by PFam, accession name rvt, E-value=1.7e-09, PFam score of 45.0
MRELYSIWLKGYWTEGDWAQSPPRSPREALEGIRVHLRCFKAYGIIVLCQCPWNTPLLPVPKPGTKHYEPVQDLRLVNQATVTLHPTVPNPYTLLGLLPAEDIWFTHLDLKDAICSIRIAPESQKLFAFQWEDLQSGVTTQYTWNWLPQGWVLKRVDALFQHLEDCGYKVPKKKSQICRQQVRYLGFTIWKGEHSLWSERKQVICSLPEPKTRRQVREFLGAVGFCTLWIPNFAVLAKHLYGITKGGNWEPFEWGPLQQQAFLSESPVEHNCVEVLDSVYSSRPDLRDQPWASVDLELYLDGSSFINPQGERCAEYAVVTLDAVIETKPLPQGTSAQKAELIALTRALELSEGDCIWIKDCNIAPLRPRWKGPQTVILTTPTAVKRSIAIGNWQDDEWLPERITQYYGPATWAQYGSWGYYNPIYMLNQMIWLQAVLEITTNKTGRALTILAWQETQMRNPTYQDRLALDYLLAAEGGVCGKFNLTN

SEQ ID NO: 37004 - protein, 335 aa, Homo sapiens
  DOMAIN (6)..(36): kw TRANSCRIPTASE REVERSE II ORF2 domain identified by eMATRIX, accession number DM01354R, p-value=7.195e-17, raw score of 8.50
  DOMAIN (148)..(283): Zinc finger, C2H2 type domain identified by PFam, accession name zf-C2H2, E-value=1.5e-31, PFam score of 118.3
MVISVDAEKAFGKIQQPFMLRTLSKLGLGVARSRNPGVSAARTESGPFRRRRQVERKTKKRAARLWKALESQLTCTQFAASGALPAFLTECHHVRFYGVVLQRPAQLRTESQGRPGRDGLPLQQYKLVFNAHYNLTRHMPVHTGARPFVCKVCGKGFRQASTLCRHKIIHTQEKPHKCNQCGKAFNRSSTLNTHTRIHAGYKPFVCEFCGKGFHQKGNYKNHKLTHSGEKQFKCNICNKAFHQVYNLTFHMHTHNDKKPFTCPTCGKGFCRNFDLKKHVRKLHDSSLGLARTPAGEPGTEPPPPLPQQPPMTLPPLQPPLPTPGPLQPGLHQGHQ

SEQ ID NO: 37005 - protein, 58 aa, Homo sapiens
PCPPPGPGCSAAPGPSGAQQGAPCPSRCGEQPARHSLPEPSGSLAVLCPILHPPPIHL

SEQ ID NO: 37006 - protein, 23 aa, Homo sapiens
QHHFHSSSLASPARSHLYHPGSP

SEQ ID NO: 37007 - protein, 1508 aa, Homo sapiens
  DOMAIN (315)..(339): Receptor tyrosine kinase class III proteins domain identified by eMATRIX, accession number BL00240B, p-value=6.233e-10, raw score of 24.70
  DOMAIN (486)..(1091): Fibronectin type III domain identified by PFam, accession name fn3, E-value=4e-98, PFam score of 339.4
GRAGLGWSSGGRGSRACSEGPAEARGREGDKGSAALSPPLPLTLGEEMAAERGARRLLSTPSFWLYCLLLLGRRAPGAAAARSGSAPQSPGASIRTFTPFYFLVEPVDTLSVRGSSVILNCSAYSEPSPKIEWKKDGTFLNLVSDDRRQLLPDGSLFISNVVHSKHNKPDEGYYQCVATVESLGTIISRTAKLIVAGLPRFTSQPEPSSVYAGNNAILNCEVNADLVPFVRWEQNRQPLLLDDRVIKLPSGMLVISNATEGDGGLYRCVVESGGPPKYSDEVELKVLPDPEVISDLVFLKQPSPLVRVIGQDVVLPCVASGLPTPTIKWMKNEEALDTESSERLVLLAGGSLEISDVTEDDAGTYFCIADNGNETIEAQAELTVQAQPEFLKQPTNIYAHESMDIVFECEVTGKPTPTVKWVKNGDMVIPSDYFKIVKEHNLQVLGLVKSDEGFYQCIAENDVGNAQAGAQLIILEHAPATTGPLPSAPRDVVASLVSTRFIKLTWRTPASDPHGDNLTYSVFYTKEGIARERVENTSHPGEMQVTIQNLMPATVYIFRVMAQNKHGSGESSAPLRVETQPEVQLPGPAPNLRAYAASPTSITVTWETPVSGNGEIQNYKLYYMEKGTDKEQDVDVSSHSYTINGLKKYTEYSFRVVAYNKHGPGVSTPDVAVRTLSDVPSAAPQNLSLEVRNSKSIMIHWQPPAPATQNGQITGYKIRYRKASRKSDVTETLVSGTQLSQLIEGLDRGTEYNFRVAALTINGTGPATDWLSAETFESDLDETRVPEVPSSLHVRPLVTSIVVSWTPPENQNIVVRGYAIGYGIGSPHAQTIKVDYKQRYYTIENLDPSSHYVITLKAFNNVGEGIPLYESAVTRPHTDTSEVDLFVINAPYTPVPDPTPMMPPVGVQASILSHDTIRITWADNSLPKHQKITDSRYYTVRWKTNIPANTKYKNANATTLSYLVTGLKPNTLYEFSVMVTKGRRSSTWSMTAHGTTFELVPTSPPKDVTVVSKEGKPKTIIVNWQPPSEANGKITGYIIYYSTDVNAEIHDWVIEPVVGNRLTHQIQELTLDTPYYFKIQARNSKGMGPMSEAVQFRTPKADSSDKMPNDQASGSGGKGSRLPDLGSDYKPPMSGSNSPHGSPTSPLDSNMLLVIIVSVGVITIVVVVIIAVFCTRRTTSHQKKKRAACKSVNGSHKYKGNSKDVKPPDLWIHHERLELKPIDKSPDPNPIMTDTPIPRNSQDITPVDNSMDSNIHQRRNSYRGHESEDSMSTLAGRRGMRPKMMMPFDSQPPQPVISAHPIHSLDNPHHHFHSSSLASPARSHLYHPGSPWPIGTSMSLSDRANSTESVRNTPSTDTMPASSSQTCCTDHQDPEGATSSSYLASSQEEDSGQSLPTAHVRPSHPLKSFAVPAIPPPGPPTYDPALPSTPLLSQQALNHHIHSVKTASIGTLGRSRPPMPVVVPSAPEVQETTRMLEDSESSYEPDELTKEMAHLEGLMKDLNAITTA

SEQ ID NO: 37008 - protein, 293 aa, Homo sapiens
  DOMAIN (95)..(143): Membrane attack complex components / perforin proteins domain identified by eMATRIX, accession number BL00279E, p-value=2.250e- 13, raw score of 37.11
  DOMAIN (110)..(141): EGF-like domain identified by PFam, accession name EGF, E- value=1.6e-07, PFam score of 38.5
MAINERLDKENVVHKHHGILCSHKKEQDHVLWRDMDGAGGHHPQQTDKETANQTLHVLTYKWELNTPKTLDDRNNECLLYVNEKTGGWGLLDSFRMGIGHQKDQEEYSSCSRHPCQNGGTCINGRTSFTCACRHPFTGDNCTIKLVEENALAPDFSKGSYRYAPMVAFFASHTYGMTIPGPILFNNLDVNYGASYTPRTGKFRIPYLGVYVFKYTIESFSAHISGFLVVDGIDKLAFESENINSEIHCDRVLTGDALLELNYGQEVWLRLAKGTIPAKFPPVTTFSGYLLYRT

SEQ ID NO: 37009 - protein, 62 aa, Homo sapiens
VRISGVWFSSCVSLLRMMASRFIHVSAKDMFSFFLWLHSIPWCICPTFSLSSVSLMGIWVGS

SEQ ID NO: 37010 - protein, 1207 aa, Homo sapiens
  DOMAIN (5)..(35): H-NS histone family domain identified by eMATRIX, accession number PF00816B, p-value=9.284e-09, raw score of 13.84
  DOMAIN (425)..(527): PH domain identified by PFam, accession name PH, E-value=1e- 11, PFam score of 46.9
SEKEKEELERLQKEEEERKKRLQLYVFVMRCIAYPFNAKQPTDMARRQQKISKQQLQTVKDRFQAFLNGETQIMADEAFMNAVQSYYEVFLKSDRVARMVQSGGCSANDSREVFKKHIEKRVRSLPEIDGLSKETVLSSWMAKFDAIYRGEEDPRKQQARMTASAASELILSKEQLYEMFQNILGIKKFEHQLLYNACQLDNPDEQAAQIRRELDGRLQMADQIARERKFPKFVSKEMENMYIEELKSSVNLLMANLESMPVSKGGEFKLQKLKRSHNASIIDMGEESENQLSKSDVVLSFSLEVVIMEVQGLKSLAPNRIVYCTMEVEGGEKLQTDQAEASKPTWGTQGDFSTTHALPAVKVKLFTESTGVLALEDKELGRVILHPTPNSPKQSEWHKMTVSKNCPDQDLKIKLAVRMDKPQNMKHSGYLWAIGKNVWKRWKKRFFVLVQVSQYTFAMCSYREKKAEPQELLQLDGYTVDYTDPQPGLEGGRAFFNAVKEGDTVIFASDDEQDRILWVQAMYRATGQSHKPVPPTQVQKLNAKGGNVPQLDAPISQFSGLKDADRAQKHGMDEFISSNPCNFDHASLFEMVQRLTLDHRLNDSYSCLGWFSPGQVFVLDEYCARNGVRGCHRHLCYLRDLLERAENGAMIDPTLLHYSFAFCASHVHGNRPDGIGTVTVEEKERFEEIKERLRVLLENQITHFRYCFPFGRPEGALKATLSLLERVLMKDIVTPVPQEEVKTVIRKCLEQAALVNYSRLSEYAKIEENQKDAENVGRLITPAKKLEDTIRLAELVIEVLQQNEEHHAEGKEAFAWWSDLMVEHAETFLSLFAVDMDAALEVQPPDTWDSFPLFQLLNDFLRTDYNLCNGKFHKHLQDLFAPLVVRYVDLMESSIAQSIHRGFERESWEPVNNGSGTSEDLFWKLDALQTFIRDLHWPEEEFGKHLEQRLKLMASDMIESCVKRTRIAFEVKLQKTSRSTDFRVPQSICTMFNVMVDAKAQSTKLCSMEMGQEHQYHSKIDELIEETVKEMITLLVAKFVTILEGVLAKLSRYDEGTLFSSFLSFTVKAASKYVDVPKPGMDVADAYVTFVRHSQDVLRDKVNEEMYIERLFDQWYNSSMNVICTWLTDRMDLQLHIYQLKTLIRMVKKTYRDFRLQGVLDSTLNSKTYETIRNRLTVEEATASVSEGGGLQGISMKDSDEEDEEDD

SEQ ID NO: 37011 - protein, 202 aa, Homo sapiens
MAYRSFDSWAQATLPPHLPKYLALQVSQYTFAMCSYREKKAEPQELLQLDGYTVDYTDQQPALFTIAELEPTQMPINDRLDKENVAHIHHGILCSHKNGSFLSQNKRSSTSPKYFIISKVLRNLRMVVTSHFSEHMISPFSAPPKVTQLLPMKMLPAEGVQPAQEPGRPAPLQLAESFLAQRRGKLASGGMYEGPEEENEPL

SEQ ID NO: 37012 - protein, 309 aa, Homo sapiens
  misc_feature (1)...(309): Xaa = X or * as defined in Table 2
MLQDIIQEHFLNLARQANIQIQEIQRTPVIYSTRRSTPRHIIVRFSKSALGAYPRLGLEIPLTPVWAQSDVYGEKEREEQEKEKEGQRIPDANDPILKDQTQEWSGSATFTSDGKIRLFYTDYSGKHYGKQSLTTAQVNVSKSDDTLKINGVEDHKTIFDGDGKTYQNVQQFIDEGNYTSGDNHTLRDPHYVEDKGHKYLVFEANTGTENGYQGEESLFNKAYYGGGTNFFRKESQKLQQSAKKRDAELANGALGIIELNNDYTLKKVMKPLITSNTVTDEIERANVFQMNGKWYLFTDSRGFKMTIDX

SEQ ID NO: 37013 - protein, 118 aa, Homo sapiens
  DOMAIN (27)..(72): kw TRANSCRIPTASE REVERSE II ORF2 domain identified by eMATRIX, accession number DM01354N, p-value=6.538e-24, raw score of 13.17
MCYEHSKQREQHVQQYRSLKEYGYVLVSTVLETGMQENLEEMDKFLDTYTLPRLNQEEVESQSTPITGSEIEAIINSLPTKKSPGPDKFTAEFYQRIQTQHCNFNSNLNVQAASLPQF

SEQ ID NO: 37014 - protein, 168 aa, Homo sapiens
  DOMAIN (75)..(93): Extracellular proteins SCP/Tpx-1/Ag5/PR-1/Sc7 proteins domain identified by eMATRIX, accession number BL01009A, p-value=9.571e- 16, raw score of 13.75
  DOMAIN (17)..(154): SCP-like extracellular protein domain identified by PFam, accession name SCP, E-value=1.1e-60, PFam score of 215.1
SRYFILLRKPTFPAMALLPVLFLVTVLLPSLPAEGKDPAFTALLTTQLQVQREIVNKHNELRKAVSPPASNMLKMEWSREVTTNAQRWANKCTLQHSDPEDRKTSTRCGENLYMSSDPTSWSSAIQSWYDEILDFVYGVGPKSPQYCPAGNNMNRKNTPYQQGTPCPG

SEQ ID NO: 37015 - protein, 257 aa, Homo sapiens
  DOMAIN (149)..(170): Extracellular proteins SCP/Tpx-1/Ag5/PR-1/Sc7 proteins domain identified by eMATRIX, accession number BL01009D, p-value=9.471e- 23, raw score of 14.19
  DOMAIN (17)..(191): SCP-like extracellular protein domain identified by PFam, accession name SCP, E-value=7.9e-97, PFam score of 335.1
SRYFILLRKPTFPAMALLPVLFLVTVLLPSLPAEGKDPAFTALLTTQLQVQREIVNKHNELRKAVSPPASNMLKMEWSREVTTNAQRWANKCTLQHSDPEDRKTSTRCGENLYMSSDPTSWSSAIQSWYDEILDFVYGVGPKSPNAVVGHYTQLVWYSTYQVGCGIAYCPNQDSLKYYYVCQYCPAGNNMNRKNTPYQQGTPCAGCPDDCDKGLCTNSCQYQDLLSNCDSLKNTAGCEHELLKEKCKATCLCENKIY

SEQ ID NO: 37016 - protein, 188 aa, Homo sapiens
  DOMAIN (66)..(76): Bacterial luciferase subunits proteins domain identified by eMATRIX, accession number BL00494A, p-value=5.737e-09, raw score of 9.37
MALLPVLFLVTVLLPSLPAEGKLLQLQSWLKGVNVQLRLFLQRVQAPSPGSLHVVLGLWEHRSQELKFGNFCLHFTGCMEVPGYPDRNLLQGKSCHGEPLLGQCRREMWGASPNTESLLKHCVVELRRGPPSSRPQNGTSSDNSLPPCRASVTQFNPTNDLTNNSSHYSSLMRSTLMMMIIIIILMSV

SEQ ID NO: 37017 - protein, 91 aa, Homo sapiens
  DOMAIN (18)..(91): SCP-like extracellular protein domain identified by PFam, accession name SCP, E-value=1.4e-27, PFam score of 103.1
NTCKKEHSTSPLFPAMALLPVLFLVTVLLPSLPAEGKDPAFTALLTTQLQVQREIVNKHNELRKAVSPPASNMLKMEWSREVTTNAQRWAN

SEQ ID NO: 37018 - protein, 326 aa, Homo sapiens
MCLVFLSSSEEASVLEQSEQGGKGGLYEAVNEVYKNLIPILEAHRDYKKLAAVHGKLQEAFTKIMHQSSGWEPQRVFGTYFRVGFYGAHFGDLDEQEFVYKEPSITKLAEISHRLEACPCEDLGELVYTFIEAFTSCQLEKVLQQGDISECCEPYMVLKEVDTAKNKEKLEKLRLAAEQFCTRLGRYRMPFAWTAVHLANIVSSAGQLDRDSDSEGERRPAWTDRRRRGPQDRASSGDDACSFSGFRPATLTVTNFFKQEAERLSDEDLFKFLADMRRPSSLLRRLRPVTATQQTYTESTYCARGIRDPTMTMMDKSLTSGAGYSF

SEQ ID NO: 37019 - protein, 138 aa, Homo sapiens
VHHHQRAQQVGRAAPHRSHAAAGEGPAPGAPEKPAARAADLAAPAGAALRAAAGTLAPVECRAKACVQSCESPAGPLQVPIPPGDPGDLHTGPQGECPLCVRSLAAGAAAAGWWPSRPAHCAQGPETSPWGCRRGAPG

SEQ ID NO: 37020 - protein, 82 aa, Homo sapiens
  misc_feature (1)...(82): Xaa = X or * as defined in Table 2
VRAPAQGPDLAGGRRRCGSGASCTPSPRGPASWSRSAAQVPRSSRWRAGSASSXNGRQPAPPTSQPPRAQPFAQPPGPWPLS

SEQ ID NO: 37021 - protein, 63 aa, Homo sapiens
  misc_feature (1)...(63): Xaa = X or * as defined in Table 2
GTQETYTVAHEENVRFVSEAWQQVQQQLDGGPAGEGGPRPVQYVERTPNPRLQNFVPIDLDEX

SEQ ID NO: 37022 - protein, 64 aa, Homo sapiens
  misc_feature (1)...(64): Xaa = X or * as defined in Table 2
PTYHLYPCHFWYQHRTRRIPRKSERLFPTPPPQLSWKGTWDYXICLLCCNDSEGRDFLVLRVLK

SEQ ID NO: 37023 - protein, 389 aa, Homo sapiens
YPGGQWAGGFLLLPVRVKAQILRVGSGAEAAQGSSGWGPCLPGVGALWPGPFAGPWSPVSKFLCFFSTREKNERYYCVLFNDEHHSYDHVIYSLQRALDCELAEAQLHTTAIDKEMFDTVKRLREKSCLIVATTSGSESIKNDEITHDKEKAERKRKAEAARLHRQKIMAQMSALQKNFIETHKLMYDNTSEMPGKEDSIMEEERSGMGTSDMWVTHRERRRTKLRDPPSSVKTPKAWGKTRRQPSGKSGRTRTISEMESDGVWHEPRACSELKVPGTPPLLSRLGHSARGAAGGGGRDWGRAAPWGVGGCVLPGPWRTQGFLEEGSGPAQDRDRRGLTLGRRDRHCLPIPHRRLRRDPSAASRAGRLGSPLGYRPRLLAGGGQHRPIT

SEQ ID NO: 37024 - protein, 246 aa, Homo sapiens
  DOMAIN (105)..(152): TRANSMEMBRANE COTRANSPORTER SYMP domain identified by eMATRIX, accession number PD01941B, p-value=9.365e-18, raw score of 15.02
VVGIETVRDLLQEYGAPIVDPINDIRIIGVVSVTVLLAISLAGMEWESKAQVLFFLVIMVSFANYLVGTLIPPSEDKASKGFFSYRADIFVQNLVPDWRGPDGTFFGMFSIFFPSATGILAGANISGDLKGRLLGLAFKAPACLSSLIPDQCHPSHEPAAALRLYCFARVTSSLLHAFACAALSTCNSAQYPSKQKGVFYAEAQPLTTSTLARGTFGHCPPWPKKGDRTTAQEANSRGEVLTFLEK

SEQ ID NO: 37025 - protein, 68 aa, Homo sapiens
  DOMAIN (22)..(39): GTPase-activator protein for Rho-like GTPases domain identified by eMATRIX, accession number PF00620B, p-value=8.412e- 15, raw score of 14.20
YGRLGEVNPPSHMGTFRRSNTDVHTVASLLKLYLRELPEPVIPYAKYEDFLSCAKLLSKEEEACVNEL

SEQ ID NO: 37026 - protein, 138 aa, Homo sapiens; identical to SEQ ID NO: 33488
  DOMAIN (11)..(53): PH domain identified by PFam, accession name PH, E-value= 0.00026, PFam score of 20.5

SEQ ID NO: 37027 - protein, 48 aa, Homo sapiens
  misc_feature (1)...(48): Xaa = X or * as defined in Table 2
YIDSILPKXNHDTLQSYCRYMHSRQRAASXPLSTGKLQQCLGLDLVLC

SEQ ID NO: 37028 - protein, 322 aa, Homo sapiens
  DOMAIN (167)..(208): PROTEIN GTPASE DOMAIN ACTIVATION domain identified by eMATRIX, accession number PD00930B, p-value=2.029e-23, raw score of 33.72
  DOMAIN (65)..(220): RhoGAP domain identified by PFam, accession name RhoGAP, E- value=1.4e-61, PFam score of 218.0
GGDRDRMTANHESYLLMASTQNDMEDWVKSIRRVIGDLSGGGIFGQKLEDTVRYEKRYGNRLAPMLVEQCVDFIRQRGLKEEGLFRLPGQANLVKELQDAFDCGEKPSFDSNTDVHTVASLLKLYLRELPEPVIPYAKYEDFLSCAKLLSKEEEAGVKELAKQVKSLPVVNYNLLKYICRFLDEVQSYSGVNKMSVQNLATVFGPNILRPKVEDPLTIMEGTVVVQQLMSVMISKHDCLFPKDAELQSKPQDGVSNNNEIQKKATMGQLQNKENNNTKDSPSRQCSWDKSESPTEKQHEQWIPHSSIRQQNQQPKEQWSQAI

SEQ ID NO: 37029 - protein, 236 aa, Homo sapiens
  DOMAIN (142)..(183): PROTEIN GTPASE DOMAIN ACTIVATION domain identified by eMATRIX, accession number PD00930B, p-value=2.029e-23, raw score of 33.72
  DOMAIN (47)..(193): RhoGAP domain identified by PFam, accession name RhoGAP, E- value=1.5e-28, PFam score of 108.2
LSTLQAKRRKEPWSLRELRLGSSPGQGCDSLFGVLWYLTFSSFWAPLRSPVPASEAACSAPGLAAAWLRASACAGTWSCRSRCSSHNTDVHTVASLLKLYLRELPEPVIPYAKYEDFLSCAKLLSKEEEAGVKELAKQVKSLPVVNYNLLKYICRFLDEVQSYSGVNKMSVQNLATVFGPNILRPKVEDPLTIMEDILKIKEDKIERKGCEKEHRNDLNDFKSLLSITEVAFYPLD

SEQ ID NO: 37030 - protein, 79 aa, Homo sapiens
QQRCLPGCSQPCWKRVGRLSSSLPGASEGGRESGAPGRNRPPLPASTGPGKPESLALLPHPHCHGNGRHNGFCGVRIYK

SEQ ID NO: 37031 - protein, 192 aa, Homo sapiens
  misc_feature (1)...(192): Xaa = X or * as defined in Table 2
XLNASLSVHPEKDELILFGGEYFNGQKTFLYNELYVYNIRKDTWTKVDIPSPPPRRCAHQAVVVPQGGGQLWVFGGEFASPNGEQFYHYKDLWVLHLATKTWEQVKSTGGPSGRSGHRMVAWKRQLILFGGFHESTRDYIYYNDVYAFNLDTFTWSKLSPSGTVPTPRSGCQMSVTPQGGIVRLWGLLETES

SEQ ID NO: 37032 - protein, 154 aa, Homo sapiens
  DOMAIN (57)..(104): kw TRANSCRIPTASE REVERSE II ORF2 domain identified by eMATRIX, accession number DM01354V, p-value=1.000e-40, raw score of 12.97
MIVYLENPIISAPNLLKLISNFSKVSGYKINVQKSQAFLYTNNRQTESKIMSELPFTIVSKRAKYLGIQLTRDVKDLFKENYKPLLNEIKEDTNKWKNIPCSWVGRINIVKMAILPKVIYRFNAIPIKLPMTSCTELEKTTLKFIWKQKRARIA

SEQ ID NO: 37033 - protein, 869 aa, Homo sapiens
  DOMAIN (498)..(531): Nuclear hormones receptors DNA-binding region proteins domain identified by eMATRIX, accession number BL00031A, p-value=8.043e- 31, raw score of 19.55
  DOMAIN (1)..(236): Ion transport protein domain identified by PFam, accession name ion_trans, E-value=2.3e-71, PFam score of 250.5
MVRRRDFILNVKGSHLKQQDGDPGLPDPRGTSGEHHNVEVETEPFLTYVEGVCVVWFTFEFLMRITFCPDKVEFLKSSLNIIDCVAILPFYLEVGLSGLSSKAAKDVLGFLRVVRFVRILRIFKLTRHFVGLRVLGHTLRASTNEFLLLIIFLALGVLIFATMIYYAEPHWRRPDDILGSNHTYFKNIPIGFWWAVVTMTTLGYGDMYPKTWSGMLVGALCALAGVLTIAMPVPVIVNNFGMYYSLAMAKQKLPKKKNKHIPRPPQPGSPNYCKPDPPPPPPPHPHHGSGGISPPPPITPPSMGVTVAGAYPAGPHTHPGLIRGGAATPPLPRYCSDPIPTVFPPGEQTMLSGGVVVATKNAELIGRMVLRGPWAQDERNVATRWLLRDPTMSSPTTSSLDTPLPALITHEQKLTVPLPDSTLFQEMAPLSLGAPSSSPTVKEEGPEPWPGGPDPDVPGTDEASSACSTDWVIPDPEEEPERKRKKGPAPKMLGHELCRVCGDKASGFHYNVLSCEGCKGFFRRSVVRGGARRYACRGGGTCQMDAFMRRKCQQCRLRKCKEAGMREQCVLSEEQIRKKKIRKQQQESQSQSQSPVGPQGSSSSASGPGASPGGSEAGSQCSGEGEGRCGSPVWQMGPKAGLGRVPGGVAGGPNWASLGPAFYVPATSSSSHVESLTTELSAERSFSAKAESGRQQLERQIQELRGRLGEEDAGARARHKTRKKAPSYELKISGTKFPIQYGTGRVDEILSEDKLTIGGIKGASVIFGEALWESSLVFTVSRPDGILGLGFPILSVEGVRPPLDVLVEQGLGSGLDFTDVQSWEVVGGEFRGHRKDPWTLGGFKKPKAFPKAHAFVPLLFSSVASRSLL

SEQ ID NO: 37034 - protein, 306 aa, Homo sapiens
  DOMAIN (101)..(130): MYOSIN HEAVY CHAIN SIGNATURE domain identified by eMATRIX, accession number PR00193D, p-value=5.939e-12, raw score of 14.36
  DOMAIN (47)..(303): Myosin head (motor domain) domain identified by PFam, accession name myosin_head, E-value=2.1e-80, PFam score of 279.8
MPYLISSTRNLADVDAEAEQGQSTRVRSRSKHLFPVLMESWCLSPSAAQKLCRLLGLGVTDFSRALLTPRIKVGRDYVQKAQTKEQADFALEALAKATYERLFRWLLTCPASLQLNSFEQLCINYTNEKLQQLFNHTMFVLEQEEYQREGIPWTFLDFGLDLQPCIDLIERPPAFHSGGQMSLKARGTPAAMPGSKEPEANQRWSRSLRTPRPSEGDRQVDYKANEWLMKNMDPLNDNVAALLHQSTDRLTAEIWKDADLLLEPCSHYRFLTNGPSSSPGQERELFQETLESLRVLGFSHEEIICE

SEQ ID NO: 37035 - protein, 183 aa, Homo sapiens
  DOMAIN (62)..(133): Myosin head (motor domain) domain identified by PFam, accession name myosin_head, E-value=3.8e-21, PFam score of 74.8
MKDKAGHSLHSPVVHGEDFGFTLGHVLREYVLVALVVAASTRRPLGSVLRCRYRFVLHPCVRMVSAVLQFGNIALKRERNTDQATMPDNTAAQKLCRLLGLGVTDFSRALLTPRIKVGRDYVQKAQTKEQVESLTTELSAERSFSAKAESGRPSWNGRSRSYGDAWVRRMLGPVPPQDDHCCP

SEQ ID NO: 37036 - protein, 229 aa, Homo sapiens
  DOMAIN (153)..(185): Alpha-2-macroglobulin family thiolester region proteins domain identified by eMATRIX, accession number BL00477G, p-value= 4.682e-24, raw score of 19.43
  DOMAIN (149)..(198): Alpha-2-macroglobulin family domain identified by PFam, accession name A2M, E-value=8e-17, PFam score of 56.8
MQRGNVGLEPPQRVLTGALPSGTVRRGPPSSRPQNGRPTNGLHRAPRKATDTQCQLVKAATGAFPCSAIGVELPQALGAHPFHQCDMDVRHAEGIEKSYSQSILLDLTDNRLQSTLKTLSFSFPPNTVTGSERVQITAIGDVLGPSINGLASLIRMPYGCGEQNMINFAPNIYILDYLTKKKQLTDNLKEKALSFMRQEHYGIILICSVLWFLEAMGYDGKDQESGRDA

SEQ ID NO: 37037 - protein, 86 aa, Homo sapiens
MNRSRQVTCVAWVRCGVAKETPDKVSSGIQQHLNHRLVPTDAGIHQGSHALCCWSASRKLNASEHVALPIIDIWFDMVICKQKASK

SEQ ID NO: 37038 - protein, 508 aa, Homo sapiens
  DOMAIN (279)..(294): G-PROTEIN BETA WD-40 REPEAT SIGNATURE domain identified by eMATRIX, accession number PR00320A, p-value=3.880e-12, raw score of 16.74
  DOMAIN (258)..(426): WD domain, G-beta repeat domain identified by PFam, accession name WD40, E-value=7.6e-26, PFam score of 99.3
HGLDLRTMNRSRQVTCVAWVRCGVAKETPDKVELSKGGVKRLIAEAEEKLQEEGGGSDEEKTGSPLEEGMQSARTQARPREPLEDGDPEDDRTLDDDELAEYDLDKYDEEGDPDAETLGESLLGLTVYGSNDQDPYVTLKDTEQYEREDFLIKPSDNLIVCGRAEQDQCNLEVHVYNQEEDSFYVHHDILLSAYPLSVEWLNFDPSPDDSTGNYIAVGNMTPVIEVWDLDIVDSLEPVFTLGSKLSKKKKKKGKKSSSAEGHTDAVLDLSWNKLIRNVLASASADNTVILWDMSLGKPAASLAVHTDKVQTLQFHPFEAQTLISGSYDKSVALYDCRSPDESHRMWRFSGQIERVTWNHFSPCHFLASTDDGFVYNLDARSDKPIFTLNAHNDEISGLDLSSQIKGCLVTASADKYVKIWDILGDRPSLVHSRDMKMGVLFCSSCCPDLPFIYAFGGQKEGLRVWDISTVSSVNEAFGRRERLVLGSARNSSISGPFGSRSSDTPMES

SEQ ID NO: 37039 - protein, 183 aa, Homo sapiens
MSFAATWMEPETIILSEVTQEWKINYRYGQAYRQLCPELIAKLFCRSAIEMHLASTSSLQQVQLPSLGIQPSSFPSSGQSVGNLRDSSMPKEPAGDFPFEDYSPLIFRTISDGTISGFKPESGKMDAKTTVGRAKGKLWLFGKKPKEAPDNAQCLAKVMRRREERRAATIWATQTLKLPKPGL

SEQ ID NO: 37040 - protein, 439 aa, Homo sapiens
  DOMAIN (385)..(401): SH3 DOMAIN SIGNATURE domain identified by eMATRIX, accession number PR00452B, p-value=4.250e-09, raw score of 11.65
  DOMAIN (371)..(427): SH3 domain identified by PFam, accession name SH3, E-value= 2.2e-14, PFam score of 61.2
AKQQLNLRTHMADENKNEYAAQLQNFNGEQHKHFYVVIPQIYKQLQEMDERRTIKLSECYRGFADSERKVIPIISKCLEGMILAAKSVDERRDSQMVVDSFKSGFEPPGDFPFEDYSQHIYRTISDGTISASKQESGKMDAKTTVGKAKGKLWLFGKKPKPQSPPLTPTSLFTSSTPNGSQFLTFSIEPVHYCMNEIKTGKPRIPSFRSLKRGWSVKMGAALEDFSHLPPEQRRKKLQQRIDELNRELQKESDQKDALNKMKDVYEKNPQMGDPGSLQPKLAETMNNIDRLRMEIHKNEAWLSEVEGKTGGRGDRRHSSDINHLVTQGRESPEGSYTDDANQEVRGPPQQHGHHNEFDDEFEDDDPLPAIGHCKAIYPFDGHNEGTLAMKEGEVLYIIEEDKGDGWTRARRQNGEEGYVPTSYIDVTLEKNSKGAVTYI

SEQ ID NO: 37041 - protein, 247 aa, Homo sapiens
  DOMAIN (118)..(141): Kazal serine protease inhibitors family proteins domain identified by eMATRIX, accession number BL00282, p-value=8.200e-09, raw score of 16.88
  DOMAIN (114)..(153): Kazal-type serine protease inhibitor domain identified by PFam, accession name kazal, E-value=0.076, PFam score of 6.3
MELAWASSCLFRKQVGIIEMPKVRAEGGRGKKVEGGQRTQPEDPGGLRIRAKTGGGRCKCEAGVTQPECETYEKCCPNVCGTKSCVAARYMDVKGKKGPGSECDIWDGQPVCKCKDRCEKEPSFTCASDGLTYYNRCYMDAEACSKGITLAVVTLAITSPGPTPAPHHLRPPCTPPQPPQRPLSWTWRPLRCSTTLCTSRSPWITWEKQLEDRENVVMRPNHVRGNVVVTNIAQLVIYNAQLQDAGI

SEQ ID NO: 37042 - protein, 354 aa, Homo sapiens
  misc_feature (1)...(354): Xaa = X or * as defined in Table 2
MPFYISDLSICGDRILRALCPQDLPTYSLHSRGKMRASCSRKFLDNNSSRLVSCNMGALISIWGTTTPPLHATILDSQPTVHPPLAKDCLPCGLQASASDLRARALQRLCQQLPWVGSQPHTRSPSPQRGGKTGLFAGLASSVSMRPASPPSPAADSCSACRFFARRPPLRVTWVKPSSALALCVSISDSIPGNLKALPAETRAQLHHAEASLSQPPLQLRPFPKTSQAGDLQDLGPYVCVRKAVGKGDKQIRAVVKEHSVRSQERIWHYPGITTANMPGHLGQNTESGRDKLPMFGVWFPGCRFWGLWVWRLPXLKLAAPCRPSRSLRSSPISRRASTTRCLTVSGCPAAPNL

SEQ ID NO: 37043 - protein, 183 aa, Homo sapiens
  DOMAIN (102)..(113): Trp-Asp (WD) repeat proteins proteins domain identified by eMATRIX, accession number BL00678, p-value=3.769e-11, raw score of 9.67
  DOMAIN (69)..(113): WD domain, G-beta repeat domain identified by PFam, accession name WD40, E-value=0.0016, PFam score of 25.2
LKLVAPCRPSRSLRSSPISRRASTTRCLTIEKAKPIKCGTFGATSLQQRYLATGDFGGNLHIWNLEAPEMPVYSVKGHKEIINAIDGIGGLGIGEGAPEIVTGSRDGTVKVWDPRQKDDPVANMEPVQGENKRDCWTVAFAIPVILRSTLTSQAQTSQCFSTNAGSRSTLLWFKVLKLSIHSV

SEQ ID NO: 37044 - protein, 161 aa, Homo sapiens; identical to SEQ ID NO: 35565

SEQ ID NO: 37045 - protein, 332 aa, Homo sapiens
  misc_feature (1)...(332): Xaa = X or * as defined in Table 2
MVGKAKWKPIELPLLRKIVNQKQYHIPGGVAKISATIKDLKDVGVVIPTTSPFNSPIWPVQKTDGSWRKWLSXQGQQFTFTVLPHGYINSLALCHNLIRRDLDHFSLPQDITLVHYIDDIVLTGSSEQEVANTLDLLTSLDWALVETECLTMGHQVTMQPELTIMNWALSDPSNYKVGCAQQHSIIKWKWYIRDQARAGTTCKWTAAALQPLSRTSLKDSGERKSSQWAELRAVHLIMHFAWKEKWPDVQLYTDSWAVANGSAGWSGTWKNHDWKIATTVIAQWAHEQSSHGSRNGGYTWAQQHGLPLTKADVATATDECPICQQQRPTLSP

SEQ ID NO: 37046 - protein, 460 aa, Homo sapiens
  DOMAIN (256)..(305): Integrase core domain identified by PFam, accession name rve, E-value=3.6e-09, PFam score of 35.7
  misc_feature (1)...(460): Xaa = X or * as defined in Table 2
CLAGLFGFWSPCIPHLGVLLQSIYLVTQKAASSEWGPEQEKALQEVQAAVQAALILEPYDPAGPVVLEVSLADRDAVWSLWQAPIGESQQRPLGFWSKALPSSADHKACHAQQHSIIKWKWYIHDRARAGPEGTNSSARYAATMXKWTASALQPLSRKSLKDSSEGKSSQWAELRAVHLAVHVAWKEKWPDVRLDTDSWAVANGLARWSGTWKEHDRKIGDKEVWGRGTRIELSEWSKTVTIFVSHVLLPRLPSIRGLTECLIHQHGIPHSIASDQGTHFTAKELQQWAHAHGIHWSYHVPHHPGWGKVLQKAVYALNQRPIYEWKEESCLHTGVADALRGNWAEGHREHKALWLGLWSTWSQHPLRSLKTTRHHPGLGVLSEDICEAGGATEELSRASGFATGYGKRKEDTKKHKQHSVSDIIEQQHSLGLTEKTVKGTPTQGISMRPGLYHKATEFQE

SEQ ID NO: 37047 - protein, 743 aa, Homo sapiens
  DOMAIN (592)..(639): kw TRANSCRIPTASE REVERSE II ORF2 domain identified by eMATRIX, accession number DM01354V, p-value=1.000e-40, raw score of 12.97
  DOMAIN (88)..(234): Reverse transcriptase domain identified by PFam, accession name rvt, E-value=8.5e-05, PFam score of -1.5
MKLLKIKDKERILQPATENKQITYNKAPIHLAADSSVETLQARLRAIVVGKDQWKPLQLPLARKTVNQKQYCIPGETAEINAKIKDLKDAGVVIPTTSPFNSPIWPVQETDGSWRMTVDYCKLNQVVTPIAAAVPDVVSLPERSNTAPGTCWEVRQYTFTVVPQGHINSLVLCHDVVRRDLGHFFLPQDITLVHYIDDIMLIGSTPPITKKKAQHLVGLFGFWRQLVPHLGVLLWPIYQVTQQAASFEWGPEKEKALQQVQAAVQAALPLGPYDPADPMVLEVSVADRDAVWSLWQDPIGESQWRSLGFWSKALPSSADNYSPFERQLLACYWGLVETKCLTMGHQPALMASWGVPYDKLTEEEKTRAWFTDGSACFRKSPQAQRCRHWQLEGTVPLWLLSWVGIECLFQAHSASFSRHTVQAFSGSTTLESGGQWPFSQSSTRQCPSGDSESTQMPINRLDKENVVHICHGILCSHKKEQDVLCRKKHDLGQGGSLLVKQDMKGLPAKGWYDSAPRSWGNECFFEGESERHILGSPQEVSENSQRWLGTVPSRASQWEAPDIQKAALPLIISLKEIHKTRVMAFSRFPCAYIDIQRIKYLAIQLTRDVKDLFKENYKPLLKEIKEDANKWKNIPCSWVGRINIVKMAILPKVIYRFNAIPIKLPMPFFTELEKTTLKFIRNQKRARIAKSIRSQKNKAGGITLPDFKLYYKATVTKTAWYWYQNRDIDQWNRTEPSEIMPHI

SEQ ID NO: 37048 - protein, 263 aa, Homo sapiens
  DOMAIN (55)..(234): Reverse transcriptase domain identified by PFam, accession name rvt, E-value=3.9e-23, PFam score of 90.3
RDLQPFTSVTVHCRKGNDQTFGGPLDAGSELTLIPGDPKHHCGPPVKVGAYGGQVINGVLAHPLIWLVQKTDGSWRMTVDYCKLNQVVIPIAAAVSDVVSLLEQINTSPGTWYAAIDLANAFFSIPVHKAQQKQFAFSWQGQQYTFTVLPQWYINSPALCHNLIRRDLDCFSLPLDITLVHYIDDIMLIGSSEQEVANTLDLFVRHLRARGWEINPTKIQGPSTSVKFLGFQWCGACQAIPSKMRDKLLHLVPPTTKKEAQCL

SEQ ID NO: 37049 - protein, 184 aa, Homo sapiens
  DOMAIN (3)..(151): Reverse transcriptase domain identified by PFam, accession name rvt, E-value=0.032, PFam score of -38.1
MTVDYCKLNQVVIPIAAAVSDVVSLLEQINTSPGTWYAAIDLANAFFSIPVHKAQQKQFAFSWQGQQYTFTVLPQWYINSPALCHNLIRRDLDCFSLPLDITLVHYIDDIMLIGPRQLLACYWALVETEHLTISHQVTMRPELPIMNWVLFDPSSHKVGCAQQHSIIKWKWYVHDWARAGPEGT

SEQ ID NO: 37050 - protein, 88 aa, Homo sapiens; identical to SEQ ID NO: 33995
  DOMAIN (25)..(41): AUXIN BINDING PROTEIN SIGNATURE domain identified by eMATRIX, accession number PR00655E, p-value=7.333e-09, raw score of 8.06

SEQ ID NO: 37051 - protein, 193 aa, Homo sapiens
NPVISQWAHEQSGHGGRDGDYAWAQQHGLPLTKADMAMATAECLVCQQQRPTLRPQYGNGWGKVLQKAMYALNQHPIYGTVFPIPRIDGSRNQGVEVKVAPLTITLSDPLAKFLLPVLSALHSAGLEVLVPEGGMLPSGDTAMIPLNWKLSLPPGYFGLLLPLSQQTKKGVTDLGGVIDLDYQDEISLLFHIR

SEQ ID NO: 37052 - protein, 133 aa, Homo sapiens
TTCKWTAAALQPLSRTSLKDSGERKSSQWAELRAVHLIMHFAWKEKWPDVQLYTDSWAVANGSAGWSGTWKNHDWKIATTVIAQWAHEQSSHGSRNGGYTWAQQHGLPLTKADVATATDECPICQQQRPTLSP

SEQ ID NO: 37053 - protein, 904 aa, Homo sapiens
  DOMAIN (538)..(547): Zinc finger C3HC4 type (RING finger), proteins. domain identified by eMATRIX, accession number BL00518, p-value=2.800e-11, raw score of 12.23
MENYTSSPFNVQKNDIQKILVGKYKRTIQLKRILKYVKTDEKHQESFKSFSVEHQITLIQDCKDTLELIETELTEEELDVQDEVLKKCCKENIQPPIVKSGSKDDRQRFLWRKYIARVKITVPASWPTSLLAPMASWGIPYDQLTEEEKTRAWFTDVSAWYAGTTQKWTAAALQPLSKTSPKDSATPAIAQWAHEQSGHGGRDGGYAWTQQHGLPLTKANLAAATAECPICQQQRPTLSPQYGTIPRGDQPVTWPFLFNLSFRPSLRALFPSLGFYPLPLAPLRTFLQGVPVKRRQLRRTGSPPSIRPWRPVVRGLRFPGLPSGVVPTSSVPATTAPTLVLLSSEPGPVGDVGLREGRAPALFYLAQLLWPTLWRLAGRLRSPSRGILFTLGVDGREWVGDFLLSQSALGGISCYKSNNELQGTNSSGSLGGLDVRRRIPIKLISKQANKAKPAPRTQRTINRMPAKAPPGDEEGFDYNEEERYDCKGGELFANQRRFPGHLFWDFQINILGEKDDTPVHFCDKCGLPIKIYGRMIPCKHVFCYDCAILHEKKGDKMCPGCSDPVQRIEQCTRGSLFMCSIVQGCKRTYLSQRDLQAHINHRHMRAGKPVTRASLENVHPPIAPPPTEIPERFIMPPDKHHMSHIPPKQHIMMPPPPLQHVPHEHYNQPHEDIRAPPAELSMAPPPPRSVSQETFRISTRKHSNLITVPIQDDSNSGAREPPPPAPAPAHHHPEYQGQPVVSHPHHIMPPQQHYAPPPPPPPPISHPMPHPPQAAGTPHLVYSQAPPPPMTSAPPPITPPPGHIIAQMPPYMNHPPPGPPPPQHGGPPVTAPPPHHYNPNSLPQFTEDQGTLSPPFTQPGGMSPGIWPAPRGPPPPPRLQGPPSQTPLPGPHHPDQTRYRPYYQ

SEQ ID NO: 37054 - protein, 211 aa, Homo sapiens; identical to SEQ ID NO: 36482
  misc_feature (1)...(211): Xaa = X or * as defined in Table 2

SEQ ID NO: 37055 - protein, 211 aa, Homo sapiens
  DOMAIN (42)..(58): AUXIN BINDING PROTEIN SIGNATURE domain identified by eMATRIX, accession number PR00655E, p-value=6.556e-09, raw score of 8.06
MTVDYRKFNQVVTPMAAAVPDAVSLLEQINTFPGTWYAAIDLANAFFSIPVHEAHQKQFAFLPQGYINFPALCHNLIRRELDFFLLLQDITLVHYIDDILLIGSSEQEVVNTLDLLIHKRSKEAEHTAASRIRVSCLPEQKSHEQTLPWEQVPSSGDIKEYFPNAFVLLTTASLQGQDNTSQLQLTWKAPEDIKMSKTDADADEEIEALRG

SEQ ID NO: 37056 - protein, 367 aa, Homo sapiens
  DOMAIN (86)..(269): Reverse transcriptase domain identified by PFam, accession name rvt, E-value=8.1e-17, PFam score of 69.3
DLWPFTRVTLHRGKRNDQTFQGLLDTGSELMLIPEDTKHHCGPPVKVEAYGGQVINGVLAQIQLTVGPVGSGTHPVVIYPVPECIIGIGILSSWQNPHIGSLTSRKTDGSWRMTVHYHKLNQMVTPIAAAIPDVVSLLEQVNTSPGSWYAAIDLANAFFFIPVHKAHQKQFAFSWQGQQYTFTVLPQWYINSPALCHNLIRRDLDCFSLPLDITLVHYIDDIMLIGSSEQEVANTLDLFVRHLRARGWEINPTKIQGPSTSVKFLGFQWCGACQAIPSKMRDKLLHLVPPTTKKEAQCLQLLACYWALVETEHLTISHQVTMRPELPIMNWVLFDPSSHKVGCAQQHSIIKWKWYVHDWARAGPEGT

SEQ ID NO: 37057 - protein, 686 aa, Homo sapiens
  DOMAIN (141)..(152): RNase H domain identified by eMATRIX, accession number PF00075B, p-value=3.077e-09, raw score of 12.56
  DOMAIN (460)..(615): Integrase core domain identified by PFam, accession name rve, E-value=3.2e-25, PFam score of 91.2
MDEAGSRHLQQTNTGTENQTPHVLTLKWELNHENTWTQGGKQQTLGSVGGERTEIVEIQTQALIMQVADLQQKMYTLKSLQALRGEVESVTHEEVHTLKKNCFEFSNLYEQPIWRTGAVPDVVSLLEQINTSPATWYAAIDLGNAFFSIPVHNTHQKQFAFSWQGQQYIFTILLQVYINSPALCHNLIGRDFDCFLLLQAITLVHYIDDIMLNGSNTLDSWVRNLHARGWKINPTKIQGASTSVKFLGIQWPYDPADPMVLEVLMADRDAVWILWQAPIGESQQRPLGFWSKALPSSADNYSPFERLLLACYWAFVETERLTMGHQVIVRRELPIMNWMLSDSSGHKVGHAQQHHEIEVIFVYHVSAHQWVTSADEEFNNQVDKMTRSEDTTQPLSSATPVITQWAHEQSGHGGRDGGYTWAQQHGLPLTKADLTMATVECPICQQQRPTLSPQYGTIPWGDQPSTWWQVSYIGPFPSWKGQRFVLTGIGTYSGYGSAYPARNASAKTTTCGLKECLIHHHGIPHSIASDRGTHFMAKEVWQWAHARGVHWSYRVSHHPEADGLIEWWNGLLKSQLQHQLGDNTLQDWGKVLQKATYALNQHLIYEHWTPSSSVLGHGLALLPSQLADNLLWDLVVMAYTLKLQNADEINIRRRCLTRQPGSTAPTERPKYGVNQHASNTSSERKH

SEQ ID NO: 37058 - protein, 390 aa, Homo sapiens
  misc_feature (1)...(390): Xaa = X or * as defined in Table 2
WEVRQYTFTVVPQGHINSLVLCHDVVRRDLGHFFLPQDITLVHYIDDIMLIGSTPPITKKKAQHLVGLFGFWRQLVPHLGVLLWPIYQVTQQAASFEWGPEKEKALQQVQAAVQAALPLGPYDPADPMVLEVSVADRDAVWSLWQDPIGESQWRSLGFWSKALPSSADNYSPFERQLLACYWVLVETERLQWVTPAEEDFNNQVDRMTHSVDTTQPLSPATHVITQWAHEQSGHGGRDGGYTRVQQHGLPLTKADLATAGKVFQKAVXALNXHSIYGTLSLIARIHRSRNQGVEVEVAPLTISPSDPPAKFLLPVPPTLRSAGLEFLVPEEGMLPSGDTTVPLNWKLRLPPGHFGLLFPLHQQANKGVTVLVGVTDLDYQDEISLLPHNG

SEQ ID NO: 37059 - protein, 555 aa, Homo sapiens
  DOMAIN (273)..(289): AUXIN BINDING PROTEIN SIGNATURE domain identified by eMATRIX, accession number PR00655E, p-value=7.222e-09, raw score of 8.06
  DOMAIN (360)..(440): Integrase core domain identified by PFam, accession name rve, E-value=2e-08, PFam score of 33.1
KELKLWKNRHKLLSYPTVGAAVTQLQNLTAMGVIGSHGARGQVVALNRQRQGDLQPFTRVTVHWGKGNMQIFGGLLDTGSELTLIPGDPKHHCGPPVKVGAFGGQVINGALARVQLIVGPVGPWAHPVVISPVPECIIDIDILSSWQNPHISSLTGRVRAIMVGKAKWKSLELPLPRKIVNQKQYHIPGGIVEISATIKDLKDAGEVIPIPTTFPLNSPIWPVRKTDGCWRMTVDYCELNQVVTPTAATVPDVVSLLEQINTSPGTWYADIDLANAVFSIPVHKAHQKQFAFSWQGQQYTFTVLPQEYINSLGLCHNLIQRDLDHFSLLQDITLVHYIEDIMLIGSTEQEIANTLDLLFMAKEVWQWAHAHGIHWSYHVSHHPEAAGLIEWWKGLLKLQLQCQLGDNTLEGWGKVLQKTVYALNQHPIYGTVSPIARIHRSRNKGVEVAPFTITPSDPLPQFLLPVPATLCSAGLEVLAPEGGTLPPGDRTTIPLNWKLRLPPEDFGLLPSLSQQAKKGVTVLAGVIHPDYQDEISLLLHNGCKEDLLNGIQQIH

SEQ ID NO: 37060 - protein, 115 aa, Homo sapiens
PKAGTEMSTSIRQFTSSSSIKGSSGLGGGSSRTSCRLSGGLGAGSCRLGSAGGLGSTLGGSSYSSCYSFGSGGGYGNSFGGVDGLLAMQPPHLPHSLRPLQPQPPASVPSPCFLA

SEQ ID NO: 37061 - protein, 1113 aa, Homo sapiens
  DOMAIN (1004)..(1024): kw ALLERGEN POLLEN CIM1 HOL-LI domain identified by eMATRIX, accession number DM01724, p-value=3.045e-11, raw score of 8.14
  DOMAIN (84)..(1104): Intermediate filament proteins domain identified by PFam, accession name filament, E-value=3.3e-277, PFam score of 934.3
MTTSIRQFTSSSSIKGSSGLGGGSSRTSCQLSGGLGAGSCRPGSAGGLGSALGGSSYSSCYSFGSGGGYGSSSFEGVDGLLVGGEKATMQNLNDRLASYLDKVRALEEADTELEVKIRDWYQRQAPGPARDYSQYYRIIEELQNKPPPSDDLTTLPSPLILTATVDNANILLQNDNAHLAAADFRTKFETEQALCLSVEADINGPCRVLDELTLARADPEMHIENLKEELAYLKKNHEEMNAPRGQVGGEINVEMGAAPGVDLSRILNEMREQYEKMAEKNRKDAEDWFFSKTEELNREVATNSELVQSGKSEISELRCTMQALEIELQSQLSMKASLEGNLAETENRYCMQLSQIQGLIGSVEERLAQLLCEMEQQNQEYKILLDMKMRLELEITTYHRLLEGEDAQTVQHTPGSPCVPEWAHDRCSLPAQLDEWSCQAQRGICGHRRENCWERIPSQSCFYRPTARSLTSLLGTMSTCSHQFTSSRSMKGSCSIGGSIGGGSSRISSVLAGGSCHAPSTYGGASCGLGGGYGGGFGSSSSFASGFGGGYGGGLGAGFGGGLGAGLGGGFAGGDGLLVGSEKVTMQHLGDRLASYLDKVRALEEANADLEVKIRDWYQRQRPSEIKDYSPYFKTIEDLRHKIIAATIENAQPILQIDNARLAADDFRTNYEHELALQQTVEAGVNGLCREMLALRGQTGGEVNVETDAAPGVDLSCILNEMRNHWGLWESLTFHSAFLSQTKELNKKVASSSELVQSSRSEVTELQRVFQGLEMELQSQLSIKASLENSLEETKGCHCMQLSQIQGLIGSVEEQLAQLCCEMEQQSREYQILLDMKTRLEQEIATYRHLLEGEDAHLHLLFVLFEPSDLAHPQGAGLIQLQPGPVLLELSCLYHSLLPTSWPHLLKAWPTARSLTSLLSTMSTCSRQFTSSSSMKGSCGIGGGIGGGSSRISSVLAGGSCRATSTYRGGLSVASSCFSSGGAYRLGGGYGGSFSSSSSFSSGFGGGYGDGLGAGFGGGLGGGFAGGDGLLVGSEKVTMQNLNDSLVSYLDKARALEEANADLEVKIHDWYQWQRPAEIKDYSPYFKTIEDLRNKVGEWAAEGAIPASSFWEQ

SEQ ID NO: 37062 - protein, 757 aa, Homo sapiens
  DOMAIN (577)..(602): Vertebrate galactoside-binding lectin proteins domain identified by eMATRIX, accession number BL00309C, p-value=7.429e- 22, raw score of 18.65
  DOMAIN (84)..(388): Intermediate filament proteins domain identified by PFam, accession name filament, E-value=2.4e-123, PFam score of 423.2
MTTSIRQFTSSSSIKGSSGLGGGSYRTSCQLSGGLGAGSCRPGSAGGLGSALGGSSYSSCYSFGSGGGYGSSSFEGVDGLLVGGEKATMQNLNDRLASYLDKVRALEEADTELEVKIRDWYQRQAPGPARDYSQYYRIIEELQNKPPPSDDLTTLPSPLILTATVDNANILLQNDNAHLAAADFHTKVLDELTLARADPEMHIENLKEELAYLKKNHEEMNAPRGQVGGEINVEMGAAPGVDLSLILNEIREQYEKMAKKNRKDAEDWFFSKTEELNREVATNSELVQSGKSEISELRCTMQALEIELQSQLIMKASLEGNLAETENRYCMQLSQIQGLIGSAEERLAQLLCEMEQQNQEYKILLDMKMRLELEITTYHRLLEGEDAQSLLKLQAAAPYREALASDEGHFSGQTSLLRPPRVVDLGVTDHSILIKTGVHVEGDVAPRAQVDVEPAGRESGKEGMRDEDQRVRSPDLLRAYCALRSSQGAPSNAKRVTAAPIQLPVPCGNVGPAYPNLPIFHVVLAVPFSGTIQGGLQDGFQITVNGAVLSSSGTQTGFSGNDIAFHFNPRFEDGGYVVCNTRQKGRWGPEERKMHMPFQKGMPFDLCFLVQSSDFKVPGNIYFSATLFQPLSRVYYGYSSVSTLQITFASTVGTLGLRSRRRDQELRGGPHPGLGHLPRNHVEGMKDEDNHDLATTIIIIDPTKIINEMLNLVGTFEPAIGQYPAGMELPEEVAGSHLCCFTDFTDDTSSYGKNRGN

SEQ ID NO: 37063 - protein, 458 aa, Homo sapiens
  DOMAIN (288)..(328): kw TRANSCRIPTASE REVERSE II ORF2 domain identified by eMATRIX, accession number DM01354Y, p-value=7.136e-37, raw score of 10.69
  DOMAIN (23)..(236): Intermediate filament proteins domain identified by PFam, accession name filament, E-value=1.8e-23, PFam score of 91.4
  misc_feature (1)...(458): Xaa = X or * as defined in Table 2
AHLAADDFCTKXGWVSGLPQGLDKLTLPGANLEMQPENLKEDLVYLKKNHEELSMAIKRNESMAKGLQRALLQQQPEDDSKCFPRPQDLIRLYDIILQLTLEDREGKGLSFSFACVDKDVSVKMDTVPGVNLSCILNEMRDQDKKLVEKSCKDAQGWFFSLKALLEGSLVETEVCYRTQLAQLQGLIRSMEQQLCELCCDAEHQDHEHQVLLDVKTQLEQEIATYSRLLEVEDAQLATQYSLSLASQPTREDLEKAILKFIWNQNRAQIAKTILSKKSKARGIMLPSFKIYYKTTVTKTAWCWYKNRHIDQWNRIENPEIRPHTYNHVIFDKPDKRKQWGKDSLFNKWCWENWLAICSKLTLDPFLNPYTKVNSRWIKDLNLQPKTIKILKENLGNAIQDTGKGKDFMTKMPKAIATKAKIDKWDLIKLKSFCTALRNYQQSKPTTYRMGENFCTLSI

SEQ ID NO: 37064 - protein, 294 aa, Homo sapiens
  DOMAIN (259)..(290): Intermediate filaments proteins domain identified by eMATRIX, accession number BL00226C, p-value=1.632e-10, raw score of 13.23
  DOMAIN (242)..(288): Intermediate filament proteins domain identified by PFam, accession name filament, E-value=0.0027, PFam score of 16.2
MTTSIRQFTSSSSIKGSSGLGGGSSRTSCQLSGGLGAGSCRPGSAGGLGSALGGNSYSSCYSFGSCGVHPIAIATPLHIPDNAASPAVEPTPSEPVPSAASRKQAQSYQTQLNGKKQCLEDSSSEIPRLICDPDPNCEINERDEFIIEKLKSAVNEIALSRNKLQDENQKLLQELKMYQRQCQARLTRSILGERYQKNTGVATDTRQRTTTGVVIYTAPISYGLSPRERRQAPGSFPRMALGQVDKDVSVKMDTVPGVNLSCILNEMRDQDKKLVEKSCKDAQGWFFSVVGGRV

SEQ ID NO: 37065 - protein, 459 aa, Homo sapiens
  DOMAIN (376)..(423): Intermediate filaments proteins domain identified by eMATRIX, accession number BL00226D, p-value=1.000e-40, raw score of 19.10
  DOMAIN (142)..(431): Intermediate filament proteins domain identified by PFam, accession name filament, E-value=3.8e-147, PFam score of 502.2
STGSTHACDLLFSPSPVCLPPAAATMTTSIRQFTSSSSIKGSSGLGGGSSRTSCRLSGGLGAGSCRLGSAGGLGSTLGGSSYSSCYSFGSGGGYGSSFGGVDGLLAGGEKATMQNLNDRLGSYLDKVPCPWKEANTELEVKIRDLVTRGRAPGPARDYSQYYRTIEELQNKILTATVDNANILLQIDNARLAADDFRTKFETEQALRLSVEADINGLRRVLDELTLARADLEMQIENLKEELAYLKKNHEEEMNALRGQVGGEINVEMDAAPGVDLSRILNEMRDQYEKMAEKNRKDAEDWFFSKTEELNREVATNSELVQSGKSEISELRRTMQALEIELQSQLSMKASLEGNLAETENRYCVQLSQIQGLIGSVEEQLAQLRCEMEQQNQEYKILLDVKTRLEQEIATYRRLLEGEDAHLTQYKKEPVTTRQVRTIVEEVQDGKVISSREQVHQTTR

SEQ ID NO: 37066 - protein, 150 aa, Homo sapiens
  misc_feature (1)...(150): Xaa = X or * as defined in Table 2
FLLPSSFSCTHSLLSPTITIVPGPDFNLASHIIPDTTPDPHDCISMIHLTFTPFPHISFFPVPHPDHAXFIDGSSTRPNRHTPAKAGYAIAQATIPPLRTSHFLSIVEIYPQGNNFSVFHVLFYYSSGIIQAPSLPYTLRRDRRPGTSRA

SEQ ID NO: 37067 - protein, 597 aa, Homo sapiens
  DOMAIN (329)..(372): DNA mismatch repair proteins mutS family proteins domain identified by eMATRIX, accession number BL00486C, p-value=1.000e- 40, raw score of 18.37
  DOMAIN (262)..(507): DNA mismatch repair proteins, mutS family domain identified by PFam, accession name MutS_C, E-value=3.8e-179, PFam score of 608.5
MTSGPQTSQPKEHLTNFKSDEQERVSSLAQSHTDNHRLHEPGLQEGIRAVPREDPQWNYQADSPRGPLDHHRRRASGNSQWRQAKLIALTRALTLAKGLRINIYTDSKYAFRILHHHAVIWAERGFLPTQGSSIINATLIKTLLKAALLPKEAGVIHCKGHQKASDPITQGNAYADKPIGFGLEKLLTFHLSQLQEYRGTKWREKSHRKVNHDENTSKLTSLNEEYTKNKTEYEEAQDAIVKEIVNISSGYVEPMQTLNDVLAQLDAVVSFAHVSNGAPVPYVRPAILEKGQGRIILKASRHACVEVQDEIAFIPNDVYFEKDKQMFHIITGPNMGGKSTYIRQTGVIVLMAQIGCFVPCESAEVSIVDCILARVGAGDSQLKGVSTFMAEMLETASILRSATKDSLIIIDELGRGTSTYDGFGLAWAISEYIATKIGAFCMFATHFHELTALANQIPTVNNLHVTALTTEETLTMLYQVKKGVCDQSFGIHVAELANFPKHVIECAKQKALELEEFQYIGESQGYDIMEPAAKKCYLEREQGEKIIQEFLSKVKQMPFTEMSEENITIKLKQLKAEVIAKNNSFVNEIISRIKVTT

SEQ ID NO: 37068 - protein, 73 aa, Homo sapiens
LKTDTAQSPRKPTGPSQMLWVTLTVEGSSIINASLIKTLLKAALLPKEAGVIHCKGHQKASDPIAQGNAYADK

SEQ ID NO: 37069 - protein, 175 aa, Homo sapiens
  DOMAIN (151)..(162): RNase H domain identified by eMATRIX, accession number PF00075F, p-value=2.023e-09, raw score of 12.87
  DOMAIN (88)..(175): RNase H domain identified by PFam, accession name rnaseH, E- value=0.015, PFam score of -21.2
  misc_feature (1)...(175): Xaa = X or * as defined in Table 2
TLTVESKSIKAYKLSLQFPHFTCPKTGHALQVSSGFVESPTVTIVPGLDINLASHTIPDNTPEPHDCISLIHLTFTPFPHVSFFPVPHPDHTWFIDGSSTRPNCHSPAKTGYAIVSSTLIIDATALPPSTTSQQAELIALTRALTLAKGLPINIHTDSKYAFHILHHHAVIXAER

SEQ ID NO: 37070 - protein, 582 aa, Homo sapiens
  misc_feature (1)...(582): Xaa = X or * as defined in Table 2
MSDKREEMTVVAFSDPVGKAFTHPVKVSTQTKRAEMSILETNQYLRSELEKCKQNFQDLTEKFLTSKATAYCLANHLQKCKCEECKDLIESVLEEEVQFQERELAELPRSAARLREVQEEEMDEVLEYSLDEQYLTHSSCHDSHQLPSSNAFLFDAQEGPSAVETASPGGGMVNIDVEFHIRHNYPWNKLPANVRQSLSGDSSSWRSSSLSSHQKVLLSWGGGESRRPVQEASSATDTDTNSQEDPADTASVRSLSLSAGHTKHIAFLFDSTLTAFLMMGNLSPVQSTGEREAQRYFDHALTLRNTILFLHHNKDLVVQTAQPDQPNYGFPLDLLCCESLLGLDPATGSRVLNKNYTLLVSMAPLTNEIRPVSSCTPQHIGPAIPEVSSVWFKQYIYVYHITGQGPPSLLLSKGTRPRKLPDIFQSYDRLLITSWGHDPGVVPTSNVLTMLNDALTHSAVLIQEHANLQIENSVMLLMREENLIWLLAQMLNGSTESFEMVIEEATIDSATKQTSGATTEADWVPLELCFGIPLFSSELNRKVYRKIATHGLCRKESLQNLLHSSRKLSLQVLNFVHSFQEX

SEQ ID NO: 37071 - protein, 458 aa, Homo sapiens
MCKRMPGLQASQTVCPFYDKNYLDLKRKGTEIKRRERLKCGTKIERRKRLRDSERLEKRIKRGCLPDLKLSTEIQINRLRGLYTLLRKERRFGLQETINYAEVTGIYVKELIEDREHLNSGKYIFNIFDIKVPRVVFGIIDPYMLWEKKEGTKEGIKEGMKRESQKRIKWERSFITFIALNTADRTLMSSAGCYRKQVKIHIDALPPPNSQTLKKRGGASLIISFRRQSGPSAAGLWEFARGPFQTLFAWLSPAEAAEQQRLLPASSAESFIAEGDPPDAGQSSPPSSLHAAAATALMLLEALKITNYAQLTLYSSPNFQNLFSSSHLTHILSADWLLQLYSLFVESPTITIVPGPDFNPAFHFIPDTTPDPHDCISLIHLTFTPFPHISFFPVPHPDHTWFIDGSSTRPNRHTPAKAGYADGRNTSYCVLSPVGNSPLVPNPGSARCTEGGLLYARA

SEQ ID NO: 37072 - protein, 141 aa, Homo sapiens
  misc_feature (1)...(141): Xaa = X or * as defined in Table 2
MQGSSIINASLVKTLFKVALLPKEAGVIHRKGHQKASDPIAPGNAYADKECSPFMVALPETWHFLRIRFIQHEAIDIDPGVYSVEYQEIGFEKDIFASVIVAYQILWTVLLSSHTVTSEMAATLVSPSDSTAQSLKKMVTX

SEQ ID NO: 37073 - protein, 397 aa, Homo sapiens
  DOMAIN (46)..(92): kw TRANSCRIPTASE REVERSE II ORF2 domain identified by eMATRIX, accession number DM01354O, p-value=3.901e-13, raw score of 8.73
  DOMAIN (270)..(396): RNase H domain identified by PFam, accession name rnaseH, E- value=1.7e-10, PFam score of 48.3
MHINQKIYKKLIYFWTYTLPRLDQEEIRSLNRPITSSEIESAINSLPTKKFPRPDGFTVEFYQMYKEELTHNKKRKLQANILDEHQCKKSSRNPGKLNPAAHEKLIHHDQAGFIPGMQALVCWITVFLLQCSKGTTDAPVGSGLWLCQPTPRCGNKIYNPSEQCCYDDAILSLKETRRCGSTCTFWPCFELCCPESFGPQQKFLVKLRVLGMKSQCHLSPISRSCTRCCCRASTQLCSCQCPKHTYPGSCIPLPASCTPTPPHPLHFYRKPQVDIASNALSTVLLPERQRELFSQAKLIALTRALTLAKGLRINIYTDSKYAFHILHHHAVIWAERGFLITQGSSIINASLIKTLLKAALLPKEAGVIHCKGHQKASDPITQGNAYADKPIGFGLEN

SEQ ID NO: 37074 - protein, 334 aa, Homo sapiens
  DOMAIN (244)..(251): RNase H domain identified by eMATRIX, accession number PF00075I, p-value=5.263e-10, raw score of 16.21
  DOMAIN (236)..(334): Integrase core domain identified by PFam, accession name rve, E-value=1.3e-19, PFam score of 71.8
MRINKELRSEYQQFSQEALELESGRYKEKRVGYQPLLQQETDMGRKGNDKEEALSLLGLKRQREGKLYSVFVESPTVTIVPGLDFNLASHVIPDTTPDPHDCISLIHLTFTPFPHIFFFPVPHPDHIWFIDGSSTRPNHYSPAKEAGVIHCKGHQKASDPIALGNAYADNVAKEASSVPTSVPHSYKLLAHLLDPLISFPSWKSILKEITSQCSTCYSTTPQGLFRPPPFPTHQAQGFAPAQDWQIDFTHMPRVKKLKCLLVWVDTFTGWVEAFPTRSEKATTVTYSLLSDIVPQFGLPTSIQSNNRLAFTSQITQAVSQALGIQWNLHIPYRP

SEQ ID NO: 37075 - protein, 1072 aa, Homo sapiens
  DOMAIN (226)..(266): Protein phosphatase 2C proteins domain identified by eMATRIX, accession number BL01032F, p-value=8.412e-22, raw score of 26.52
  DOMAIN (104)..(642): Protein phosphatase 2C domain identified by PFam, accession name PP2C, E-value=2.2e-39, PFam score of 142.0
MSTAALITLVRSGGNQVRRRVLLSSRLLQDDRRVTPTCHSSTSEPRCSRFDPDGSGSPATWDNFGIWDNRIDEPILLPPSIKYGKPIPKISLENVGCASQIGKRKENEDRFDFAQLTDEVLYFAVYDGHGGPAAADFCHTHMEKCIMFVMFEHNSWVKFVFASVRVICGRELCLVSSSRPGARGHYMRGFSGKRDLLNFVPATLLTSGTTATVALLRDGIELVVASVGDSRAILCRKGKPMKLTIDHTPERKDEKERIKKCGGFVAWNSLGQPHVNGRLAMTRSIGDLDLKTSGVIAEPETKRIKLWNSPGEMVLLFFLTCTQSASITCTQSCSITCTQSSSITCTQSASPASNQPASPAPKQSASPAPSQPASPAPNQPASPTPNQPASSAPNQPASPAPNQSASLAPNQPASSAPNQPASPAPNQPASPAPNQHHLHPISITCTQSASPASSQPASPAPNQPASPAPNQHHLHPISITCTQSAAPAPSQPAPPAPNQHHLHTASITCTQSANITCTQSANIACTQSSSITCTQSSSITCTQSASITCIQSASITCTQSASPAPNQLTPAPNQPASPAPNQPASPAPNQHHLHPISQHHLHPLHHADDSFLVLTTDGINFMVNSQEICDFVNQCHDPNEAAHAVTEQDFAAPSLNTPTAQRELVPDNQEEKTVSHKEMETCYPGEEGMVVHTRDSASDQAQQVALHLGTGPEQGGVTHPLRLSGPGENLTSYLKLIIKPLCYLFGGLFTWTRVTFGAVTRIGDLPWEINPLSSCSLLSDKDPPVTSGPQTNQPKEHLTNFKLVSTPGFESFGSSFSTDPSDLSPPPQAAPCQAEPEALKITNCAQLTLYSSHNFQNLFSSLHLMHVLSAPRLLRLYSLFVESPTITIVPGPDFNPASHIIPDTTPDPHDCISLIHLTFTPFPHISFFPVPNPDHTWFIDGSSTRPNRHSPAKEGYAIVSSTSIIEATTLPPSTTSQQAELIALIWALTLAKGLHVNIYIDSKYAFHILHHHAVIWAERGFLAMRGSSIINASLIKTLLKAALLPKEAGVIHCKGHQKVSDPITQGNAYADK

SEQ ID NO: 37076 - protein, 1340 aa, Homo sapiens
  DOMAIN (1211)..(1261): ENV polyprotein (coat polyprotein) domain identified by eMATRIX, accession number PF00429, p-value=2.500e-19, raw score of 31.08
  DOMAIN (1088)..(1335): ENV polyprotein (coat polyprotein) domain identified by PFam, accession name ENV_polyprotein, E-value=4.4e-48, PFam score of 165.2
MDTSICSGGGDKGVIKSFIAHTKPVWWSPHTDTHEIWCCDSDRGTSLGRSIPCPPALCSMKKIHLQPRVLRPTSPRNISPILNRAAHRHAELSPNSSSVSAPPPYNPSITSPPHTWSGLQFSSTTSSSPPSQQFPLREVAGAEGSQDDRERVFSLAQSHADNHRLHEPDLQEGSRVVPQEDPQWNSQANSPDLLGLATEDRRCPIASEAPWTITDAELQLLQLCSLFVESPTITIVPGPDFNPASHIIPDTTPDPHDCISLIHLTFTPFPHISFFPVSHPDHTWFIDGSSTRPNCHSPAKAGYAIVSSTSVIDATALPPSTTSEQAELVALTQALTLAKGLCINIYTDSKYAFHILHHRVVTWAERGYLTTQGSSIINASLIKTLLKAALLPKEAGVIDCKGHQKASEPIALGNAYADKVARQAASSPTSVPHGQFFSFTSVTPTYSPAETSTYQSLPTQGKWFLDQGKYLLPASQAHSILSSFHNLFHAVYKPLARLLEPLISFPSRKSILKEITSQCSICYSTTPQGLFRPPPFPTHQAQGFVSAQDWQIDFTHMPRVRKLKYLLVWVDTFTGWVEAFPTGSEKATAVISSLLSDIILQFGLPTSIQSDNRPAFTSQITQAVSQALGIQWNLHISYHPQSSGKVEQTNGLLKTHLTKVSLQLKKDWTVLLPLALLRIRACPRDATRYSPFELLYGCTFLLGPNLIPDTSPLDDHLPVLQQARQEICQAANLLLPTPDPQPYEDTLAGQSVLVKNLTPQTLQPRWTGPYLVIYSTPTAVHLQDPPHWVHRSRVKLCPSVSQPNPSSSSWKSQVLSPTSLKLTHISEEHAYTAVPALQTDWATSPISLHLRTSFNSPHLYPPEELIYFLDRSSKTSPDISHQQAAALLRTYLKNLSPYINSTPPIFGPLTTQTTIPVAAPLCISWQRPTGIPLGNLSPSRCSFTLHLRSPTTNINETIGAFQLHITDKPSINTDKLKNISSNYCLGRHLPCISLHPWLSSPCSSDSPPRPSSCLLIPSPENNSERLLVDTRRFLIHHENRTFPSTQLPHQSPLQPLTAAALAGSLGVWVQDTPFSTPSHLFTLHLQFCLAQGLFFLCGSSTYMCLPANWTGTCTLVFLTPKIQFANGTEELPVPLMTPTQQKRVIPLIPLMVGLGLSASTVALGTGIAGISTSVMTFRSLSNDFSASITDISQTLSVLQAQVDSLAAVVLQNRRGLDLLTAEKGGLCIFLNEECCFYLNQSGLVYDNIKKLKDRAQKLANQASNYAEPPWALSNWMSWVLPIVSPLIPIFLLLLFGPCIFRLVSQFIQNRIQAITNHSIRQMFLLTSPQYHPLPQDLPSA

SEQ ID NO: 37077 - protein, 385 aa, Homo sapiens
  DOMAIN (306)..(314): RNase H domain identified by eMATRIX, accession number PF00075E, p-value=7.545e-10, raw score of 8.53
MQVATRPGKGEINRWGSLPGRSLSMEDSPDCALGTVQSRIVSECSQQRALSLRTARGQRRRREKQQMNSQVGKEGALTSSPLALKINPLQFPSKRHPLLTIRIGWGPRFHSQESPLGQVQNSELQPDEQYFPTTHREVNPREKNLGQMKRSRLADLIKHSASLYTQLPNTPSALCCPQLRFPEEQMLLIRTEVSLFPLEVAMSQDKCTCFPDSLQEGMAKATQSEVVGWRFWENSLKGADTTLLQLYSLFVESPTITIVPGPDFNPASHIIPDTTPDPHDCISLIHLTFTPFPHISFFPVSHPDHTWFTDGSSTRPNCHSPAKAGYAIVSSTSVIDATALPPSTTSQQAEPAALTQALTLAKRLGINIYTDSKYAFHILHHHAVI

SEQ ID NO: 37078 - protein, 115 aa, Homo sapiens
SSYLMHILSAPNLLQLYSLFVESPTITIVPGPDFNLASHIILDTTPDPHDYLSDPPDIHSTFPDISFFPVPHPGHTWFNDGSSTRPNRHSPAKAGHAIVFSTSIIEATALPPSTT

SEQ ID NO: 37079 - protein, 337 aa, Homo sapiens
QSDLSASQHGLFPLATEVRSSGAASCPDSDSICPAPTIAPGRATPPQANCWASEGTLRYQALPGNRAPVSQVSQAGGANLCVQQPKKHLTNFKSGKRPLFTLFSNLQGPRSRPVAFLSKQLDLTVLGWPSCLRAAAAAALIVLEALKITNYAQLTLYSSHNFQNLFSSSHLTHILSAPRLLQLYSLFVESPTITNVPGPDFNPASHIIPDTTPDPHDCISLIHLTFTPFPHISFFPVSHPDHTWFIDGSSTRPNRHTPAKAGYAIVQANSPPLRTSHILSIVEMYPQGNNFSVFHLLFYYSSGIIQAPSLPYTSSSGICHRLGLANQRYSTCPESGN

SEQ ID NO: 37080 - protein, 77 aa, Homo sapiens
MEKQSSFEGKGVVQYGWVCEHEVTFQLQLLSPSSSIVPAFNTGTITQVIKVLNPQKRNYCCQNEEVNSNAYAYYPFN

SEQ ID NO: 37081 - protein, 278 aa, Homo sapiens
  DOMAIN (193)..(206): PROTEIN ZINC-FINGER METAL-BINDI domain identified by eMATRIX, accession number PD00066, p-value=4.462e-15, raw score of 13.92
  DOMAIN (35)..(225): Zinc finger, C2H2 type domain identified by PFam, accession name zf-C2H2, E-value=1.7e-50, PFam score of 181.2
MPKALGPYNYWVGMPPYSFLLFAKSPEIHTGVKPYMCNECGKAFSVYSSLTTHQVIHTGEKPYKCNECGKVFTQNSHLARHRGIHTGEKPYKCNECGKVFRHNSYLSRHQRIHTGEKPYKYNEYGKAFSEHSNLTTHQVIHTGEKPYKCNECGKVFTQNSHLARHRRVHTGGKPYQCNECGKAFSQTSKLARHQRVHTGEKPYECNQCGKAFSVRSSLTTHQAIHTEICPGYYWGPHVLKVQEAHGDLGKVARRLTTYTRSRNVTRLRVADPHQRLSV

SEQ ID NO: 37082 - protein, 84 aa, Homo sapiens
  misc_feature (1)...(84): Xaa = X or * as defined in Table 2
PRNPSSFLQVQVQHRFLQLFVPFHFVFFLASLYVMVTLTTWFRXDPCVSGMALNCSFLKIASSSGEYLRPTPSYLNQVVRVTMT

SEQ ID NO: 37083 - protein, 228 aa, Homo sapiens
LKPCNVSSMILSLLDGRPDFYSYIVHLAMRSDNKTCKLEYLSQRATRSTGSSAQKILISVYTASTSCTSSFLKAKGVQRDHVEKLSLEELCSLHLLLPGLSPQTLQAIPRRVLVGACSCLAPELSRLSACQTAALLQTFRKPSLCFCCPETVEADKGQRGGAARPADQETPPAPPVQVQHLSYNYSAFHFVFFLASLYVMVTLTNWFRDSEIMQQKQKKANEKKEEPK

SEQ ID NO: 37084 - protein, 52 aa, Homo sapiens
KTFFFFFFGNYKSYFLNTLGLSPHRELKKHWEKVKPPSPPREMAPRGKRGLP

SEQ ID NO: 37085 - protein, 107 aa, Homo sapiens
  DOMAIN (17)..(59): Zinc-containing alcohol dehydrogenases proteins domain identified by eMATRIX, accession number BL00059D, p-value=6.464e- 26, raw score of 29.23
  misc_feature (1)...(107): Xaa = X or * as defined in Table 2
MSDGTSRFTXKGKSIYHFGNTSTFCEYTMIKEISVAKIDAVAPLEKVCLISCGFSTGFGAAINTAKVTPGSTCAVFGLGGVGLSVVMGCKAAGAARIIGSGCQQGEI

SEQ ID NO: 37086 - protein, 52 aa, Homo sapiens
SHRLLRLLHSSRSSRALVFSSISSFKHFSVLVILVIHSSKPFSKFSTSLPLV

SEQ ID NO: 37087 - protein, 469 aa, Homo sapiens; identical to SEQ ID NO: 34694
  DOMAIN (182)..(228): kw TRANSCRIPTASE REVERSE II ORF2 domain identified by eMATRIX, accession number DM01354O, p-value=1.000e-40, raw score of 8.73
  DOMAIN (215)..(465): Reverse transcriptase domain identified by PFam, accession name rvt, E-value=7e-68, PFam score of 238.9

SEQ ID NO: 37088 - protein, 611 aa, Homo sapiens
  DOMAIN (230)..(271): kw TRANSCRIPTASE REVERSE II ORF2 domain identified by eMATRIX, accession number DM01354I, p-value=1.000e-40, raw score of 15.55
  DOMAIN (1)..(216): AP endonuclease family 1 domain identified by PFam, accession name AP_endonucleas1, E-value=9.7e-07, PFam score of -14.0
MENGFDELREEGFRRSNYSELQEEIQTKGKEVKNIEKNLDECITRIPNTEKCLKKLMELKTKARELREECISLRSRCDQLEESVSVMEDEMHEMKREGKFREKRIKRNEQSLQEIWDYVKRPNLRLIGVPEDRSMRQKVNKDTQELNSALHQADLIDIYRTLHPKSTEYTFFSAPHHTYSKIDHIVGSKALLSKCKRTEIITNYLSDHSAIKLELKIKKLTQNFSTTWKLNNLLLNDYWVHNKMKAEIKMFFETNENKDTTYQNLWDTFKAVCRGKFIALNAYKRKQERSKIDTLTSQLKELEKQEQTHSKASRRQEITKIRAELKEIETQKTLQKINESRSWFFERINKIDRPLARLIKKKREKNQIDAIKNDKGDITTDPTEIQTTIREYYKHLYTNKLENLEEMDKFLDTYTLPRLNQEEVESLNRPITGSEIVAIIHSLPTKKSPGPDGFTAQFYQRYKEELNKIPRNPTYKGCEGPLQGQLQTTAQGNKRGYKEMEEHSMLMGRKNQYRENGHTAQASRLIGLKADHGMNGGYKQQLTSVSIQISLILKEYNTQNISKATMKGQQTSVLEQLTLAIVKSICISVKIHLEYKPPNFEPVNKTVKEIY

SEQ ID NO: 37089 - protein, 60 aa, Homo sapiens
VGFLGILFCFEAIVNVSSLMIWLSVCLLSVYKNACDFCTLILYPETLLKLLISSSSLYLW

SEQ ID NO: 37090 - protein, 127 aa, Homo sapiens
  misc_feature (1)...(127): Xaa = X or * as defined in Table 2
FFLPMSMECSSICLYPLCISLRSGLXFSLKRSFTSLVSWIPRYFILCKSQGMRWLGLGSEAXYSCLLILIRKITQNSVEVLGRRKFLGGGMEREWVMFLRAASSGIRGSVGTNFKSESRHQISCASV

SEQ ID NO: 37091 - protein, 931 aa, Homo sapiens
  DOMAIN (323)..(364): kw TRANSCRIPTASE REVERSE II ORF2 domain identified by eMATRIX, accession number DM01354I, p-value=1.000e-40, raw score of 15.55
  DOMAIN (548)..(814): Reverse transcriptase domain identified by PFam, accession name rvt, E-value=5.6e-77, PFam score of 269.2
MENDFDELREEGFRRSNYSELQEEIQTKGKEVENFEKNLDECITRITNTEKCLKELMELKAKARELREQCRSLRSLCDQLEERVSVMEDEMNEMKHRLANWIKSQDPSVCCIQEAYLTCRDTHRLKIKGWRKIYQANGKQKKAGVAILVSDKTDFKPTKIKRDKEGLYIMVKGSIPREELTILNIYAPNPEAPRFTKQVLSDLQRDVDSHTIILGDFNTPLSALDRSMRQKVNKDTQELNSALHQADLIDIYRTLHPKSTEYTFFSAPHHTYSKIDHRVGSKALLSKCKRSEIITNCLSDHSAIKLELRIKKLTQNCSTTWKLNNLLLNDYWVHNEMKAEIKMFFETNENKDTTYHNLWDTFKAVCRGKFIALNAHKRKQERSKIDTLTSQLKELEKQEQTHSKASRRQEITKIRAELKEIETQKTLQKINESRSWFFKKINKIDRPLARLIKKKREKNQLDSIKNDKGDITTYPTEIQTTIREYYKHLYTNKLENLEKMDKFLDTYTLPRLNQEEVESLNRPITGSEIVALINSLPTKKSPGPDGFTAEFYQSIILIPKPGRDTTKKENFRPISLMNIDAKILNKILANRIQQHIKKLIHHDQVGFIAGMQGWFNICKSINVIQHINRTKDKNHMIISIDAEKAFDKIQQPFMLKTLNELSIDGTYLKIIRAIYDKPTANIILNGQKLEVFPLKTGTRQGCPLSPLLFNIVLEVLAMAIRQEKEIKGIQLGKEEVKLSLFADDMIVYLENPIVSAQNLLKLISNFSKVSGYKINVQKSQAFLYTNNRQTESQIMSELPFTIALKTIKYLGIQLTRDVKDLFKENYKPLLNEIKEDTNNWKNIHAHGAAAPLPLGHDGHRTVPLRDQFPEGSNKLLAVVTTTASAPTVHRPAQLRGLALLSERLIAYSCPSLVNILTAAQRPSENPTPTDL

SEQ ID NO: 37092 - protein, 121 aa, Homo sapiens
  misc_feature (1)...(121): Xaa = X or * as defined in Table 2
FFLPMSMECSSICLYPLLFPGAVVCSSPXRGPSHPLXVGFLGILFCFEAIGNGSSLMIWLSVCLLLVYKNACDFCTLILYPETLLKLLISLRRFWAETMGFSRYIIMSSANRDNLTSSFPN

SEQ ID NO: 37093 - protein, 183 aa, Homo sapiens
  DOMAIN (101)..(113): Fungal Zn(2)-Cys(6) binuclear cluster domain proteins domain identified by eMATRIX, accession number BL00463, p-value=7.469e-10, raw score of 8.22
MGKKQNRKTGNSKKQSTSPPPKERSSSPATEKSWMENDFDELREEGFRRSNYSELREDIQTKGKEVENFERNLEECITRITNTEKCLKELMELKTKARELCEECRSLRSRCDQLEDCLLKKLHSHQANPEFDLITEHLTLCIRISIQIKAYLSLSKAQSSLSHRPPTYLAYLFNGFRLFKNLK

SEQ ID NO: 37094 - protein, 95 aa, Homo sapiens
  misc_feature (1)...(95): Xaa = X or * as defined in Table 2
MCPRDYGMLCLCSHCFKEHLYFCLHFVMYPVVIQEQVVQFPCSXAVLSEFLNPEFXFDCTVVXETVCYNFXSFTFAEKSFTSNSVVNFGIGVVWC

SEQ ID NO: 37095 - protein, 697 aa, Homo sapiens
  DOMAIN (424)..(449): 7 kw REVERSE TRANSCRIPTASE RNA POLYMERASE domain identified by eMATRIX, accession number DM00895E, p-value=4.517e-10, raw score of 15.72
  DOMAIN (395)..(620): Reverse transcriptase domain identified by PFam, accession name rvt, E-value=6.2e-48, PFam score of 172.7
MGKKRSRKTGNSKEQSASPPKEPSSLPAMEQSWMENDFDELREEGFRRSNYSELQEEIQTKDEEVENFEKNLDECITRRTNTEKCLKEVMELKAKARELPEECRSLRSRCDQLEERVSVMEDEMNEMNAIKLELRIKKLTRNCSTTWKLNNLLLNDYWVHNEKKAEINIFFETNENKDTTYQNLWDAFKAVCRGKFIALNAHKRKQERSKIDTLTSQLKELEKQEQTYSKASRRQEITNIRAELKEIETQKTLQKINESRSWFFERINKIDRPLARLIKKKREKNQIDAIKNDKGDITTDPTEIQTTVREYHKHLYANKLENLEEMDKFLDTYTLPRLNQEEVESLNRPVTGSEIVAIINSLPTKKRPGPDGFTAEFYQRYKEELVPFLLKLFQSIEKEGILPNSFYEASIILIPKPGRDTTKKENFRSISLMNIDAKILNKILANRIQQHIKKLIHHDQVGFIPGMQGSFNIRKSINVIQHINRNKDKNHTIISIDAEKAFDKIQQPFMLKTLNKLVLEVLARAIRQEKEVKGIELGKEEVKLSQFAEDMIVYLENPIVSAQNLLKLISNFSKVSGYKINVQKSQAFLYTNNRQTESQIMSELPFTIASKRIKYLGIQLTRDVKDLFKENYKPLLNEIKEDTNKWKNIPCSRVERINIVKMAILPKVIYRFNAIPIKLPMPFFTELEKTTLKFIWN

SEQ ID NO: 37096 - protein, 485 aa, Homo sapiens
  DOMAIN (360)..(403): kw TRANSCRIPTASE REVERSE II ORF2 domain identified by eMATRIX, accession number DM01354T, p-value=1.316e-35, raw score of 9.48
  DOMAIN (244)..(482): Reverse transcriptase domain identified by PFam, accession name rvt, E-value=1.1e-37, PFam score of 138.7
MQSASPPPKELSSSLAMEQSWTENDFDELREEVFRRSNYSELREEIQTKGKEVENFEKSLEEYITRITNTEKCLKELMELKTKARELREECRSLRSRCDQLEERVSVMEDEVNEMKREGKFREKRSKQSLQEIWDYVKRPNLHLIGVPESDGENGTKLENTLQDIIQENFPNLAGRPTPYLVLFSRLGNYPAQWLDESLARGELMEYWAHEACFMPRSDFRLIRHRMLAPEKMGWKYKDAWMQEHEAEIAQLIQHIHDKGPIQDFPMGLRLDLTQVISLMAKVLRLRSKKGKHYSVGTNDKSHMIISIDAKKAFHKIQQPFMLKTLNKLGIDGTYLKIIRAIYDKPTASIILNGQKLEAFPLKTSTRQECPLSPLLFNTVLEALASAIRQEKEIKRIQLGKEEVKLFLFADDMIVYLENPIVSAQNLLELLNNFSKVSGYKINVQKSQAFLYTINRQTESQIMSELPFTIATKRIKYLGIQLTRM

SEQ ID NO: 37097 - protein, 168 aa, Homo sapiens
MGKKQNRKTGNSKTQSASPPPKERSSSPATEQSWMENDFDELREEGFRRSNYSELREDIQTKGKEVENFEKNLEECITRITNTEKCLKELMELKTKARELREECRSLRSRCDQLEERISIVVDGGKKVVEFMFQATEGDVLNYIFRNRELRPLFDRQWHKLGISIQSQ

SEQ ID NO: 37098 - protein, 146 aa, Homo sapiens
  misc_feature (1)...(146): Xaa = X or * as defined in Table 2
NHASPGIRNLFLHPRGLRAITIAVFCKQNTYIRLEPFKINVLEQITKHIEKLQCGGVVKQLSRRGNNQHISSTYDINRADTQVRRAVNNYDIIAXATVSMASRSIRCGSVGSLPSSNLPINSVSIRCRARQEGIMSSPGQQVGFIA

SEQ ID NO: 37099 - protein, 100 aa, Homo sapiens
CGFMLWRHLLSLNVMNRSLPVSNFPSAASSPLSGFTELMRVKALLWIRLWFKGILWLVRSSFSLAALNIFSFISTLVNLTIMCLGVALLEEYLCGILCIS

SEQ ID NO: 37100 - protein, 2023 aa, Homo sapiens
  DOMAIN (562)..(607): kw TRANSCRIPTASE REVERSE II ORF2 domain identified by eMATRIX, accession number DM01354N, p-value=1.000e-40, raw score of 13.17
  DOMAIN (646)..(1705): Reverse transcriptase domain identified by PFam, accession name rvt, E-value=8.7e-102, PFam score of 351.6
  misc_feature (1)...(2023): Xaa = X or * as defined in Table 2
MHIVVETALSASWQNKAKPPARVLLQVVPNVWFLVAVVWELYPSLDLMDRSIECSSSPATEQSWTENDYDKLREEGFRRSNYSELQEDIQTKGKDVENFEKNLEECITRITNTQKCLKELMELKTKARELREECRSLRSRCDQLEERVSVMEDEMNEMKQEGKFREKRIKRNEQSLQEIWDYVKRPNLRLIGVPESDGENGTKLKNTLQDIIQENFPNLARQAKVQIQEIQRMPQRYSLTRATPRHIIVRFTKVEMKEKMLRAAREKGAPRFIKQVLSDLQRDLDSHTLIMGDFNTPLSTLDRSTRQKVNKDTQELNSALHQVDLIDIYRTLHPKSTEYTFFSAPHHTYSKIDHILGSKALLSKCKRTEIITNYLSDHSAIKLELRIKNLTQNRSTTWKLNNLLLNDYWVHNEMKLEIKMFFETNENKDTTYQNLWDAFKAVYRGKFIALNAHKRKQERSKIDTLTSQLKELEKQEQTHSKASRRQEITKIRAELKEIETQKTLQKINESRSWFFERINKIDRLLARLIKRKREKNQIDAIKNDKGDITTNPTEIQTTIREYYKHLYANKLENLEEMDKFLDTYTLPRLNQEEVESLNRPITGSEIVAIINSLPTKKSPGPDGFTAEFYQRYKKELVPFLLKLFQSIEKEGILPNSFYEASIILIPKPGRDTTKKENFRPISLMNIDAKTLNKILADRIQQHIKKLIHHDQVGFIPGMQGWFNIHISINVIQHINRAKDKNHMIICIDAERAFDKIQQPFMLKTLNKLVLEVLARAIRQEKEIKGIQVGKEEVKLSLFADDMIVYLENPIVSAQNLLKLISNFSKVSGYKINVQKSQAFLYTNNRQTESQIMSELPFTIASKRIKYLGIQLTRDVKDLFKENYKPLLNEIKEDTNKWKNILCSWVGRINIVKMAILPKVIYRFNAIPIKLPMPFFTELEETTLKFIWNQKRARIAKAILSQKKKAGGITLPDFKLYYKATVTKTAWYWYQNTDIEQWNRTEPSEIMLHIYNYLIFDQPEKNKQWGKDSLFNKWCWENWLAICRKLKLDPFLTPYTKINSRWIKDLNVRPKTIKTLEENLGITIQDISMGKDFMSKTPKAKATKAKIDKWDLIKLKSFCXSCLSAXGDFNTPLSTLDRSTRQKVNKDTQELNSALHQVDLIDIYRTLHPKSTEYTFFSAPHHTYSKIDHILGSKALLSKCKRTEIITNYLSDHSAIKLELRIKNLTQNRSTTWKLNNLLLNDYWVHNEMKLEIKMFFETNENKDTTYQNLWDAFKAVYRGKFIALNAHKRKQERSKIDTLTSQLKELEKQEQTHSKASRRQEITKIRAELKEIETQKTLQKINESRSWFFERINKIDRLLARLIKRKREKNQIDAIKNDKGDITTNPTEIQTTIREYYKHLYANKLENLEEMDKFLDTYTLPRLNQEEVESLNRPITGSEIVAIINSLPTKKSPGPDGFTAEFYQRYKKELVPFLLKLFQSIEKEGILPNSFYEASIILIPKPGRDTTKKENFRPISLMNIDAKTLNKILADRIQQHIKKLIHHDQVGFIPGMQGWFNIHISINVIQHINRAKDKNHMIICIDAERAFDKIQQPFMLKTLNKLVLEVLARAIRQEKEIKGIQVGKEEVKLSLFADDMIVYLENPIVSAQNLLKLISNFSKVSGYKINVQKSQAFLYTNNRQTESQIMSELPFTIASKRIKYLGIQLTRDVKDLFKENYKPLLNEIKEDTNKWKNILCSWVGRINIVKMAILPKVIYRFNAIPIKLPMPFFTELEETTLKFIWNQKRARIAKAILSQKKKAGGITLPDFKLYYKATVTKTAWYWYQNTDIEQWNRTEPSEIMLHIYNYLIFDQPEKNKQWGKDSLFNKWCWENWLAICRKLKLDPFLTPYTKINSRWIKDLNVRPKTIKTLEENLGITIQDISMGKDFMSKTPKAKATKAKIDKWDLIKLKSFCTAKETTIRVNRQPTKWEKIFATYSSDKGLISRIYNELKQIYKIKTNNPIEKWVKDMNRHFSKEDIYAAKNT

SEQ ID NO: 37101 - protein, 54 aa, Homo sapiens
IHFISFSCLIALARTSNTMLNRSGERGHPCLVPVFKGNASSFCPFSMILAVGLS

SEQ ID NO: 37102 - protein, 198 aa, Homo sapiens
  DOMAIN (115)..(162): Zinc-containing alcohol dehydrogenases proteins domain identified by eMATRIX, accession number BL00059E, p-value=8.412e- 33, raw score of 32.37
MENDFGELREEGFRRSNHSELQEEIQTKGKEVENIEKNLDECITRITNTEKCLKELMELKAKARVLHEECRSLRSRCDQLEERTTTCQAASSLSIEEMQVEPLKAGGVCIKVTPGSTCAVSGLGGVGLSVVMGCKAAGAARIIGVDVNKEKFKKAQELGATECLDPQDLKKPIQEVLFDMTDAGIDFCFEAIGNLDVL

SEQ ID NO: 37103 - protein, 463 aa, Homo sapiens
  DOMAIN (335)..(380): kw TRANSCRIPTASE REVERSE II ORF2 domain identified by eMATRIX, accession number DM01354N, p-value=1.000e-40, raw score of 13.17
  misc_feature (1)...(463): Xaa = X or * as defined in Table 2
MGKKQSRKTGNSKRQSASPPPKERSSSPAMEQSWMENDFDELREEGFRRTNYSELQEGIQTKGKEVKNFEKNLDECITRITNTEKCLKELMELKAKARELREECRSLRSRCDQLEERHHTTPIPKLTTYLEVKLSPANVKEQVITNCLSDHSAIKLELRIKKPTQNPSTTWKLNNLLLNDYWVNKEMKSEIKMFFETNENKNTTYQNLWDAFKAVCRGKFIALNAHKGKQERSKIDTLTSQLRELEKQEQTHSKVSRRQEITKIRAEPKEIETQKTLQKINESRSWFFERINKIDRRLARLIKKKREKNQRDAIKNDEGDITTDPTEIQTTIREYYKHLYANKLENLKEMDKFLNTYTLPRLNQEEAESLNRPIAGSEIVAIINSLPTKKSPGPDGFTAEFYQRYKEKLVFGAGYFGMWALAALPSNLLKLSQLCQEAAEVNVLVQFVCICXSCLNSVRRQQK

SEQ ID NO: 37104 - protein, 572 aa, Homo sapiens
  DOMAIN (259)..(304): kw TRANSCRIPTASE REVERSE II ORF2 domain identified by eMATRIX, accession number DM01354N, p-value=1.000e-40, raw score of 13.17
  DOMAIN (266)..(472): Reverse transcriptase domain identified by PFam, accession name rvt, E-value=9.2e-10, PFam score of 45.9
  misc_feature (1)...(572): Xaa = X or * as defined in Table 2
MHNTDGNRFLSHWGYRQALSISKPASASLHPSSKTKPLGTQSKTVVAKRNREHGKKERSSSPAMEQSWMENDFDELREEGFRRSNYSELREDIQTKGKEVENFEKNLEECITRITNTEKCLKELMELKTKARELREECRSLRSRCDQLEERRKQERSKIDTLTSQLKELEKQEQTHSKAGRRQEITKIRAELKEIETQKTLQKINESRSWFFERINKIDRPLARLIKKKREKNQIDTIKNDKGDITTDPTEIQTTIREYYKHLYANKLENLEEMDTFLDTYTLPRLNQEEVESLNRPITGSEIVAIINSLPTKKSPGPDGFTAEFYQRYKEELHINRAKDKNHMIISIDAEKAFDKIQQPFMLKTLNKLVLEVLARAIRQEKEIKGIQLGKEEVKLSLFADDMIVYLENPIVSAQNLLKLLSNFSKVSGYKINVQKSQAFLYTNNRQTESQIMSELPFTIASKRIKYLGIQLTRDVKHLFKENYKPLLKEIKEDTNKWKNIPCSWVXKNQYRENGHTAQGNLQIQCRPHQATNDFLHRIGKNYFKVHMEPKKSLHRQVNPKPKEQSWRHHTT

SEQ ID NO: 37105 - protein, 365 aa, Homo sapiens
MREKHSDPHNIVLESNIRDKHSEPSSIVPESYVRDKHSEPSSSVLESYVSHKHSELHSRVLESYVRDKHSEPSSSVLESYVRDKHSEPSSSVLESFVRDKHSEPHSSVLESYECSSSPAMEKSWAENDFDELREGFRRSNYSELQEEIQTKGKEVKNFEKNLDECISRITNTEKCLKELMELKAKARELREECRRFRSRCDQLEERDIIQENSPNIARQANIQIQEIQRMPQRYSLKRAIPRHIIVRFTIAEMKEKMLRAAREKGRVTHKGKPIRLTVDLLAETLEARREWGPILNILKEKNFQCRISYPAKLSFISEGEIKYFTDKQMLRDFVTTRPALKELLKEALNMKRNNQYQPLQNHAKM

SEQ ID NO: 37106 - protein, 594 aa, Homo sapiens
  DOMAIN (358)..(399): kw TRANSCRIPTASE REVERSE II ORF2 domain identified by eMATRIX, accession number DM01354I, p-value=1.000e-40, raw score of 15.55
  DOMAIN (126)..(344): AP endonuclease family 1 domain identified by PFam, accession name AP_endonucleas1, E-value=2.9e-07, PFam score of -6.0
MKKKALSCVCRHPPGRADVGLGCQRTRNICIATLQEEQIVCVKAQNNEKALHRLRTTELRIKKLIQNRTTTWKLNNLLLNDYGVNNEMKAEINKFFETNENKDTTSPESLGHREKAGEIQIDTLEQSWTENDFDKLREEGFRRSNYSELQEEIQTKGKEVKNLEKNLDECITKITNTEKCLKELTELKAKARELCEECRSLRSRCDQLEERVSVMEDEMNEMKREGKFREKRIKGDEQSLQEIWDYVKRPNLCLIGVPEDRSMRQKVNKDTQELNSALHQADLIDIYRTLHPKSTEYTFFSAPHHTYSKIDHIVGSKALLSKCKRTEIITNYLSDHSAIKLELKIKKLTQNFSTTWKLNNLLLNDYWVHNKMKAEIKMFFETNENKDTTYQNLWDTFKAVCRGKFIALNAYKRKQERSKIDTLTSQLKELEKQEQTHSKASRRQEITKIRAELKEIETQKTLQKINESRSWFFERINKIDRPLARLIKKKREKNQIDAIKNDKGDITTDPTEIQTTIREYYKHLYTNKLENLEEMDKFLDTYTLPRLNQEEVESLNRPITGSEIVAIIHSLPTKKSPGPDGFTAQFYQRYKEEL

SEQ ID NO: 37107 - protein, 40 aa, Homo sapiens
  misc_feature (1)...(40): Xaa = X or * as defined in Table 2
CRCLQMAMXWSXAIALSMKISMSPRKPEVXIKVLAGLCCL

SEQ ID NO: 37108 - protein, 1788 aa, Homo sapiens
  DOMAIN (672)..(717): kw TRANSCRIPTASE REVERSE II ORF2 domain identified by eMATRIX, accession number DM01354N, p-value=1.000e-40, raw score of 13.17
  DOMAIN (699)..(935): Reverse transcriptase domain identified by PFam, accession name rvt, E-value=8.4e-47, PFam score of 168.9
MRKKQSRKTGNSKKQSTSPPPKERSSSPAMEQSWTENDFDELREEGFRRSNYSKLQEEIETKGQEVENLEKNLDKCITRITNIEKCLKELMELKAKARELHEECRSLRSRCDQLEERVSVMEDEMNEMKQEGKFREKRIKRNEQSLQEIWDYVKRPNLPPIDVPESDRENGTKLENTLQDVIQENFPNLARQANIQIQEIQRMPQRYSSRRATPRHIIVRFTKVEMKEKMLRAAREKAFKQASRREDDIAKVTSGMRVLFKPGTTEVQELALCYGGMANRTISALKTTQRQLSKLWKEELLQDVCAGLAEELHLPPDAPGGMVDFRCTLTLSFFFKFYLTVLQKLGQENLEDKCGKLDPTFASATLLFQKDPPADVQLFQEVPKGQSEEDMVGRPLPHLAADMQPLVRPCTVTTFLATRMSCLSGWSPAPGPTPRSSIEMKFKNMLFPMIVCPAWIPELNSVEHGPDGISFGAACPLSIVEKTLVDAVAKLPAQKTEVFRGVLEQLRWFAGKQVKSVASVGGNIITASPISDLNPVFMASGAKLTLVSRGELPEAEVQEEGLGGEKSHQIGHFLEKQSSKFSDPAFPVIWIQGSMENVPGLVDGKAGYFLCREFTAGTATCMPYLVGHQENCPDGPHLLPWLQKDPAEPGGDTALHRDPLQQGEIQTTIREYYKHLSANKLENLEEMDKFLDTYTLPRLNQKEVESLNRPITGAEIVPIINSLPTKKSSGLDGFTAEFYQRYKEELHINRTKDKNHMIISIDAEKAFDKIQQPFMLKTLNKLGIDGTYLKIIRAIYDKPTANIILNGQKLEAFPLKTGTRQGCPLSPLLFNIVLEVLARAIRQEKEIKGIQLGKEEVKLSLFADDMIVYLENPIVSAQNPLKLISNFSKVSGYKINVQKSQAFLYTNNRQTESQIMSELPFTIASKRIKYLGIQLTRDVKDLFKENYKPLLNEIKEDTNKWKNIPCSWVGRINIMKMAILPKVMYRFNAIPIKLPMPFFTELEKTTLKFIWNQKRARIIKSILSPKNKAGGITLPDFKLYCKATVTKTAWYWYQNRNIDQCNRTEPSEIMPHIYNYLIFDKPDKNKQWGKDPLFNKWCWENWLAICRKLKLDPFLTPYTKINSRWIKDLNIRPKTIKTLEESLGITIQDIGMGKDFMSKTPKAMATKDKIDKWDLIKLKSFCTAKETTIRVDRQPTEWEKIFTTYSSDKGLIISRIYNELKQIYKKKSNNPIKKWAKHMNRCFSKEDIYAANRHMKKCSSSLVIREMQIQTTMRYHLTPVRMAIIKKSGNNRCWRGCGEIGTLLHHWNCRVKMTQQMQNLHLCQSKKHSAPSSPNAAKRLYRNLSEKLKGSHSSFDEAYFRTRTDRLSLRKTSVNFQGNEAMFEAVEQQDMDAVQILLYQYTPEELDLNTPNSEGLTPLDIAIMTNNVPIARILLRTGARESPHFVSLESRAMHLNTLVQEAQERVSELSAQVENEGFTLDNTEKEKQLKAWEWRYRLYRRMKTGFEHARAPEMPTNVCLMVTSSTSLTVSFQEPLSVNAAVVTRYKERSSSPATEQSWTENDFDELREEGIRRSNYSELQEAIQTKGKQVENFEKNLDECITRITNTGNCLKELMELKAKARELREECRSLRSRCNQLEERVSVIEDEMNEMKREGKFREKRIKRNEQSLQEIWDYVKRPNLRLIGVPECDGENGTKLENTLQDIIQENFPNLARQANIQIQEIQRTPQRYSSRRATPRHIIVRFTKVEMKEKMLRAAKEKGRVTHKGKPIRLTADLSLPTKGSPSD

SEQ ID NO: 37109 - protein, 834 aa, Homo sapiens
  DOMAIN (308)..(353): kw TRANSCRIPTASE REVERSE II ORF2 domain identified by eMATRIX, accession number DM01354N, p-value=1.000e-40, raw score of 13.17
  DOMAIN (377)..(650): Reverse transcriptase domain identified by PFam, accession name rvt, E-value=8.9e-80, PFam score of 278.5
MTELTGIQQPQIVLFEHKGHKLVQGSSSDAGKVNRIYQHYEASDKFNYTTGLAWKTAPEQTGKTVRKQQIKLNVKKMESRSKMQEHSSSPPMEQSWRENDFDELREEAFRRSNYSELQEEIQTKGQEVKNFEKTLDEYITRITNTEKCLKELMELKAKARELREECRSLRSRCDQLEERVSVMEDEMNEMKREGKFREKRIKRNEQSLQEKWDYVKTPNLRLIGVPESDGENGTKLENTLQDIIQENLPNLVRQANIQIQEIQRTPQRYSSRRATPRHIIVRFTKVEMKEKMLRAAREKEIQTTIREYYKHLYANKLENLEEMDKFLDTYTLPRLNQEEVESLNRPITGSEIVAIINSLPTKKSPDQLDSQPNSAREKEGILSISFCEASIILIPKLGRDTTKKENFRPISLMTIDTKIFNKILANQIQQHIKKLIHHDQVGFIPGMQGWFNICKSINVIQHINRTKDKNHMIISIDAEKAFDKIQQLFMLKTLNKLGIDGTYFKIIRAIYDKPTANIILNGQKLEAFPLKTGTRQGCPLSPLLFNIVLEVLAGAIRQEKEIKGVQLGKEEVKLSLFADDMIVYLENHIVSAQNLLKLISNFSKVSGYKINVQKSLAFLYTNNRQTESQIMSELPFTIASKRIKYLGIQLTRDVKDLFKENYKPLLNEIKEDTNKWKNIPCSWVGRINIVKMAILSKVIYRFNAIPINLPITVFTELEKTTLKFTWNQKRAHIAKSILSQKNKAGGITLPDFKLYYKATVTKTGWYWYQNRDIDQWNRTEPSEITTHIYNYLIFDKPEKNKQRGKDSLFNKWCWENWLAICRKQCVFIVPPTEG

SEQ ID NO: 37110 - protein, 391 aa, Homo sapiens
  DOMAIN (83)..(111): Quinone oxidoreductase / zeta-crystallin proteins domain identified by eMATRIX, accession number BL01162B, p-value=7.796e- 18, raw score of 18.11
  DOMAIN (40)..(391): Zinc-binding dehydrogenases domain identified by PFam, accession name adh_zinc, E-value=1.4e-106, PFam score of 367.5
  misc_feature (1)...(391): Xaa = X or * as defined in Table 2
KLLQDLPFSINSSAVEKISMSTTGQVIRCKAAILWKPGAPFSIEEVEVAPPKAKEVRIKVVATGLCGTEMKVLGSKHLDLLYPTILGHEGAGIVESIGEGVSTVKPGDKVITLFLPQCGECTSCLNSEGNFCIQFKQSKTQLMSDGTSRFTCKGKSIYHFGNTSTFCEYTVIKEISVAKIDAVAPLEKVCLISCGFSTGFGAAINTAKVTPGSTCAVFGLGGVGLSVVMGCKAAGAARDIIGVDVQQGRKFXGRAQELGATECLNPQALKKPHFKEVLFDMTDAGIDFCFEAIGNLDVLAAALASCNESYGVCVVVGVLPASVQLKISGQLFFSGRSLKGSVFGGWKSRQHIPKLVADYMAEKLNLDPLITHTLNLDKINEAVELMKTGKW

SEQ ID NO: 37111 - protein, 613 aa, Homo sapiens
MGKKQSRKTGNSKKQSATPPPKERSSSPATEQSWTENDFDELREEGFRRSNYSELQEETQTKGREVENFEKNLDECITRTTNTEKCLKELMELKAKAWELREECRSLRSRCNQLEERVSVMEDEMNEMKREGKFREKRIKRNEQSPQVIRDYVKRPNLRLIGVPESDGKNGTKLENTLQDIIQENFPNLARQANIQIQEIPRTSKDTLQKSTPLLALLVDSQVEGRTCLGPQKSGNKKGTTERFKKKKEDEPHQLGSELGISERNTAAPVRDCGRSFSRLKRSCLLALKTAADLPVQHSSYAKGQTASSSRYLTHVPPHGETPPSRDRQTSHTGELQLASGKEVENFEKNLEECITRITNTEKCLKELMELKAKARELREECRSLRSQCDQLEERVSMMEDEMKEMKREGKPNLRLIGVPESDGENGTKLENTLQDIIQENFPNLARQANVQIREIQRTPQRYSSRRSTPRHIIVRFTKVEMKEKMLRAAREKGRVTLKVKPIRLTADLSAETLQARREWGPIFNILKEKNFQPRISYPAKLSFISEGEIKYFTDKQMLKDFVTTRPALKELLKESAKHGKEQLVPATAKSCQNVTTIETRKKLHQLTSKITS

SEQ ID NO: 37112 - protein, 89 aa, Homo sapiens
  misc_feature (1)...(89): Xaa = X or * as defined in Table 2
LVYLKVMGRMEPSWKTLCRILSRRTSANLSKAGQCSDSGNTENTTKILLKKSNSKTHNCQIHQSXNEGKNVKGSQRERSGYPQRGRPSD

SEQ ID NO: 37113 - protein, 212 aa, Homo sapiens
  DOMAIN (29)..(66): Heat shock hsp70 proteins family proteins domain identified by eMATRIX, accession number BL00297A, p-value=1.000e-40, raw score of 17.58
  DOMAIN (28)..(212): Hsp70 protein domain identified by PFam, accession name HSP70, E-value=6.7e-11, PFam score of -111.8
HEGSWVFCGFLRYWSQAYIPATMSKGPAVGIDLGTTYSCVGVFQHGKVEIIANDQGNRTTPSYVAFTDTERLIGDAAKNQVAMNPTNTVFDAKRLIGRRFDDAVVQSDMKHWPFMVVNDAGRPKVQVEYKGETKSFYPEEVSSMVLTKMKEIAEAYLGKTVTNAVVTVPAYFNDSQRQATKDAGTIAGLNVLRIINEPTAAAIAYGLDKKVG

SEQ ID NO: 37114 - protein, 332 aa, Homo sapiens
  DOMAIN (210)..(264): Heat shock hsp70 proteins family proteins domain identified by eMATRIX, accession number BL00297H, p-value=9.625e-23, raw score of 15.46
  DOMAIN (5)..(332): Hsp70 protein domain identified by PFam, accession name HSP70, E-value=1.1e-15, PFam score of 22.6
MKIHSCAFVIEQEEKKKTEAHKEGDGVKRADKILGVTKDPGTIAGLNVVRIINEPTAASIAYGTDKKFGAERHVLIYDLRDEIFDVSVLTLEDEIFEIKSTAGDTHLGEEDFDNQMINHFIAEFKYKHKDSRADIYTSITHAQFEELNAVLFRGTQDPIEIALQDTKLDKLQIHVIVLTQTFTTYPDNQPDVLIQVYEGESAITKDNNLLVIQGKFELTGILPAPFAVPQIKVTCDIDVNSSLNISAVGKSTEKENKIIITNDQGHLSKEDIENMVQEAEYKAEDEKQKNKVASKNSLDSYAFNMKATEKLQGKINNKDKQKILDKCNKIIN

SEQ ID NO: 37115 - protein, 311 aa, Homo sapiens
INKFLVVFMKFAEAELLTSVKDTNSEEILLIQCALPVTRNSPPIVQKVHTIYSTWLFCKLQDLIKKRKAMIKGCSPMKLMETLNQSINAGHEMTKAIAIAQFNDDSPEARKITRRCTIGEAADLVGGFFRPCPCLGSDLSSTCHRDWKIRQEHKASGEHGLLQLGLSCSPLFQLLGQVNVSKSDDPLKINGVEDHKTIFDGDGKTYQNVQQFIDEGNYTSGDNHTLRDPHYVEDKGHKYLVFEANTGTENGYQGEESLFNKAYYGGGTNFFRKESQKLQQSAKKRDAELANGALGIIELNNDYTLKKALTR

SEQ ID NO: 37116 - protein, 353 aa, Homo sapiens; identical to SEQ ID NO: 35910
  misc_feature (1)...(353): Xaa = X or * as defined in Table 2

SEQ ID NO: 37117 - protein, 76 aa, Homo sapiens
PIYRVTQKTACFERSLEKEKALQQVQAAVQAALPLGLCDSADPVVLEHKVDHAQQHFIIKWKWYTCDQARAGPEGI

SEQ ID NO: 37118 - protein, 337 aa, Homo sapiens; identical to SEQ ID NO: 35913
  DOMAIN (234)..(337): Integrase core domain identified by PFam, accession name rve, E-value=1e-21, PFam score of 79.1
  misc_feature (1)...(337): Xaa = X or * as defined in Table 2

SEQ ID NO: 37119 - protein, 245 aa, Homo sapiens; identical to SEQ ID NO: 35917
  DOMAIN (48)..(194): RNase H domain identified by PFam, accession name rnaseH, E- value=1.5e-05, PFam score of 10.1
  misc_feature (1)...(245): Xaa = X or * as defined in Table 2

SEQ ID NO: 37120 - protein, 118 aa, Homo sapiens; identical to SEQ ID NO: 34629

SEQ ID NO: 37121 - protein, 196 aa, Homo sapiens; identical to SEQ ID NO: 35919

SEQ ID NO: 37122 - protein, 79 aa, Homo sapiens; identical to SEQ ID NO: 35920
  misc_feature (1)...(79): Xaa = X or * as defined in Table 2

SEQ ID NO: 37123 - protein, 212 aa, Homo sapiens
  misc_feature (1)...(212): Xaa = X or * as defined in Table 2
MEFNDSMHNTFDHIWRTKEYDEAGWLLLSSLDKAMKENDELRDSNSQIQKQILSLQSSKIILNLTEGTVVTQLQNLNSVGIIGSQGGRGQVAALSLQRQGASFEWSPEQEKALQQVQTAVQAALPLGPYDPSDPMVFEVSVADGNAVWSLWQAPIGELQWRTLEFWSKALPSSADNYSPFGRQLLACYWALVETEHLTVDHQVTMXPELPIM

SEQ ID NO: 37124 - protein, 224 aa, Homo sapiens
  DOMAIN (102)..(223): Integrase core domain identified by PFam, accession name rve, E-value=7.8e-19, PFam score of 69.1
MLIGPSEQEVANILDLLVSSFEWEPEHKKALQQVQAAMQAALPLGPYGPADTKVLEVPVADRNAVWSLWQAPIADLAMATAECPVYQQQRSTLSPQYGNISRGDQQATWWQVDYIGSLPSWKEQRFVLTGIDTYSRYRFAYPAPSASAKTTIHGLTECLIHRCGIPHSIASDQGTHLRQWANAHEIHWSYHVAHYPEAAGLTEWWNGLLKSQLQCQLDDHTLQG

SEQ ID NO: 37125 - protein, 54 aa, Homo sapiens
GRHSLWDSPKLAEQEKDRGWGHLDLPVVPISSFPPHVAGEYLVYPSGAAQPPLM

SEQ ID NO: 37126 - protein, 636 aa, Homo sapiens; identical to SEQ ID NO: 35566
  DOMAIN (253)..(276): PHOSPHOLIPASE D SIGNATURE domain identified by eMATRIX, accession number PR00718F, p-value=9.909e-09, raw score of 11.34

SEQ ID NO: 37127 - protein, 407 aa, Homo sapiens
  misc_feature (1)...(407): Xaa = X or * as defined in Table 2
MGIIGSRGGRGQVAALKRQRQVTKKAASFEWGPEEEKALQQVQAAVQAALPLGPYDPADPIVLEVSVADRGAVWSLWQVPIGESQQRPLGFWSKALPSSADNDSPFERQLLACYCALVETERLDMGHQVTMRPEVLIINCVLSDPSSHQGWRLCMDSATWTSTYQAXPGYGHCXVPNLPAAETNTDPSIWHHSYGXLASYLVIGXLHWTSSIMEGAEVCPHWNRHLLRIXVCLSCTQCFCEDSHPWIHEASYLPSWHSTXHCLXSRHSPYSXRSVAVGSCSWNSLVLPCSPSSXSSWINRMVEWPFEVTITMPTRXQYSAGLGKSSSEGCVCSESASNIWYCFSRSQDSWVQESRGGSGSGTIHHHFXXPTSKIFASCFLDIMFCWTXGCSSXWRNAATRRHNNNFI

SEQ ID NO: 37128 - protein, 81 aa, Homo sapiens
GPEDLQGLFILSFQDPLLSHPVCLEALAPFPSPPVVPISSFPPHVAGEFWLYPSGAARASSDAQSWTVIAVSPLRGLNSWG

SEQ ID NO: 37129 - protein, 483 aa, Homo sapiens
MGEERRWRPSSNGKHGAFAELDKGWLVWLEGKGVIGARRSWRAHSALIKICVQQIKDSLPGKMSKGLLQQQQKPKHLLHDLYKAMSTRWGVQKARLNCTALPPTGCVTLDPSFLTEPQFPRQLSEDLLLTREALEKEVQLRRQLQQEKEELLYRVLGANASPAFPLAPVTPTEVEKERELELRDRLDEQQRVLEGKNEEALQDPRLVDPLTSCTVHFEKPQMLNARLWKHAGREAVACKVRGSELPKTMGTYPLHQHDLDVRHGVKGDHFGALRFDCPAGFWTCMGPLAPSFWPISPIWNGPPLDISGYPATSTQKSTMCLRIIDTRLHPESRLKQQSNFALNAREKALQQVQAAVQAALPLGPYDPADPMVLEVSLADRDAVWSLWQAPLGESHHKVGRAQQHSIIKWKWYICDRARASPEGTSKLHEEVAQMPMVSTPATLPSLPKPALMALWRVPYDQLTEEEKTRDWFTDGSAGYAGTT

SEQ ID NO: 37130 - protein, 572 aa, Homo sapiens
  DOMAIN (387)..(424): Fibrinogen beta and gamma chains C-terminal domain proteins domain identified by eMATRIX, accession number BL00514C, p-value= 4.000e-29, raw score of 17.41
  DOMAIN (356)..(570): Fibrinogen beta and gamma chains, C-term domain identified by PFam, accession name fibrinogen_C, E-value=6.2e-74, PFam score of 257.5
AGLFFPLQSDSLLHAWREHSSKNQVCYWKKRKEKTFIDGPSHGSVAALRFRRQQLGTLDVCLPSSLLSCWFITEERMWQIVFFTLSCDLVLAAAYNNFRKSMDSIGKKQYQVQHGSCSYTFLLPEMDNCRSSSSPYVSNAVQRDAPLEYDDSVQRLQVLENIMENNTQWLMKLENYIQDNMKKEMVEIQQNAVQNQTAVMIEIGTNLLNQTAEQTRKLTDVEAQVLNQTTRLELQLLEHSLSTNKLEKQILDQTSEINKLQDKNSFLEKKVLAMEDKHIIQLQSIKEEKDQLQVLVSKQNSIIEELEKKIVTATVNNSVLQKQQHDLMETVNNLLTMMSTSNSAKDPTVAKEEQISFRDCAEVFKSGHTTNGIYTLTFPNSTEEIKAYCDMEAGGGGWTIIQRREDGSVDFQRTWKEYKVGFGNPSGEYWLGNEFVSQLTNQQRYVLKIHLKDWEGNEAYSLYEHFYLSSEELNYRIHLKGLTGTAGKISSISQPGNDFSTKDGDNDKCICKCSQMLTGGWWFDACGPSNLNGMYYPQRQNTNKFNGIKWYYWKGSGYSLKATTMMIRPADF

SEQ ID NO: 37131 - protein, 49 aa, Homo sapiens
  misc_feature (1)...(49): Xaa = X or * as defined in Table 2
MTHVTALRTSSNLMRNXRKVGEAKSQQEHXSXQACHLKSRMSSSRLWIN

SEQ ID NO: 37132 - protein, 358 aa, Homo sapiens
  DOMAIN (290)..(311): BREAST CANCER TYPE I SUSCEPTIBILITY PROTEIN SIGNATURE domain identified by eMATRIX, accession number PR00493G, p-value=9.276e- 13, raw score of 7.57
MEVSGVRSSFTFSPGPYLVSLSYTWDDSFSLIFQLQLENYIQDNMKKEMVEIQQNAVQNQTAVMIEIGTNLLNQTAEQTRKLTDVEAQVLNQTTRLELQLLEHSLSTNKLEKQILDQTSEINKLQDKNSTEMNCKETVEGSVRSGCSGAGGMIQASGERGGKEKTEEVKQLFQKQGHGLDGGRRRCQGRLHVSGLSFDEDETAGVKEGWTRTRLLGVGKWKMPYTLALALQEPPCRREEPRPECRLQAKQVTSSPKQNVVIQVVDKLKGFSIAPDVCETTTHVLSGKPLRTLNVLLGIARGCWVLSYDWEETIPICMFYSYLQPSHAALCSNEKDLDDYNPKKEQLKVDRCMVKKKVK

SEQ ID NO: 37133 - protein, 71 aa, Homo sapiens
  misc_feature (1)...(71): Xaa = X or * as defined in Table 2
LTIWQDSNPGSCLXGCSVCAHACVGGQHMVCFXPSYSLYLKSEPKEGTGRNKDPDLNSQNRKGFLEQIHFQ

SEQ ID NO: 37134 - protein, 194 aa, Homo sapiens
  DOMAIN (59)..(114): Domain present in ZO-1 and Unc5-like netrin receptors domain identified by eMATRIX, accession number PF00791B, p-value=9.214e- 10, raw score of 28.49
  DOMAIN (54)..(119): Ank repeat domain identified by PFam, accession name ank, E- value=9.9e-10, PFam score of 45.8
NSFSSDKTEILYPSNNNALLPPSPVSSNYYSTFCFYEFDNSVYPTANVNATDNFLWTPLHFACHAGQQDIVELLVESGALIDAASINNSTPLNRAIESCRLDTVKYLLDIGAKFQLENRKDSLRRTEPRVQEQMMCEGSAPRGEQYGVRGMKHGHGNERSQTRVRFQMKPQLLSSPWGAVAHRQGAGLLGFLYQ

SEQ ID NO: 37135 - protein, 162 aa, Homo sapiens
MAEQFWNKVTELLQGPHRRPSSADLPQMAQMACFLLGPCVGRNVPEPQLKTPVSRSLSGQNYIQIAAKKTLDSDYRAISRSSGRPKPVVLPPGTQMDVSPSMSFAGPSAAGLLEFAGGPLPILFAWLSQVEAAEQQRLLPVPSSGSFIPEGHPPYASQSSSV

SEQ ID NO: 37136 - protein, 333 aa, Homo sapiens
  DOMAIN (252)..(295): kw TRANSCRIPTASE REVERSE II ORF2 domain identified by eMATRIX, accession number DM01354T, p-value=1.000e-40, raw score of 9.48
  DOMAIN (113)..(331): Reverse transcriptase domain identified by PFam, accession name rvt, E-value=8.4e-10, PFam score of 46.0
NDMISEIPQHYRKPGIKLQDVFPQEVAQMTSDKEQRPAEASKNPTGSLPENKAEAREPSDLAQQIPTPMEASKLRSTGLKFSQPAQQSEVDLGHSSLENSSWHLAGDPLGRSFQRKEQVAIFAVLQPPLVITRQTGSGEDLQQTPADLQQRGLTVRRKTNKQKGMASTSTKRTSTQKPHPKVTNIENQRTNYKNHMIISIDAEKAFNKIQHPFTLKTLNKLSTDGMYLKIIRAIYDKPTANIILNGKKLEAFSLKTGTRQGCPLSPLLFNIIVEVLARAIRQEKEIKGIQTGREEVKLSLFADDLIVYLENPIISAKNLLKLISNFSSLRIQN

SEQ ID NO: 37137 - protein, 769 aa, Homo sapiens; identical to SEQ ID NO: 36639
  DOMAIN (173)..(218): kw TRANSCRIPTASE REVERSE II ORF2 domain identified by eMATRIX, accession number DM01354N, p-value=1.000e-40, raw score of 13.17
  DOMAIN (257)..(438): Reverse transcriptase domain identified by PFam, accession name rvt, E-value=7.3e-21, PFam score of 82.7

SEQ ID NO: 37138 - protein, 129 aa, Homo sapiens
QYESNFCTVALQFIEEEKNYALPSPATTEGGSLTPVRDSPCTPRLRSVSSYGNIRAVATARSLNKSLQNLSLTEESGGAVAFSPGNLSTSSSASSTLGSPENEEHILSFETIDKMRRASSYSSLNSLIG

SEQ ID NO: 37139 - protein, 592 aa, Homo sapiens
MHGVQDDQLSLPSPCRAAKVLHAEMCQSGAWRHTGFDRKSCQADLVKDNGHKYFLSVLADPYMPAEHRTMTAFILAVIVNSYHTGQEACLQGNLIAICLEQLNDPHPLLRQWVAICLGRIWQNFDSARWCGVRDSAHEKLYSLLSDPIPEVRCAAVFALGTFVGNSAERTDHSTTIDHNVAMMLAQLVSDGSPMVRKELVVALSHLVVQYESNFCTVALQFIEEEKNYALPSPATTEGGSLTPVRDSPCTPRLRSVSSYGNIRAVATARSLNKSLQNLSLTEEYQKEGPGSTPLTPLRLGQLVARWRFSPGNLSTSSSASSTLGSPENEEHILSFETIDKMRRASSYSSLNSLIALIWDSQLKTSGKVGPTYTREAMVVGFGGSSQPCEVWQHTTAEATGAAHLRSHLNYQTPFEATGQQRPVQDGPARGHRGAQQPDAVRRPCHKSASIWHSCPLGVHIHCFARKPGARAWCESLLLASSFPRAERLTKAPFMLTSVARAVRRCVPRFFIPDVRQTQPWGHSDTRQKGARDQEEARAVLPCPSLAIKGIAAVILHEHSSLRCTWAGPEALAAGSGCTSDRYSGRVPLAALF

SEQ ID NO: 37140 - protein, 380 aa, Homo sapiens
  DOMAIN (324)..(359): Kappa casein domain identified by eMATRIX, accession number PF00997D, p-value=8.306e-09, raw score of 9.95
MTGFPFQAETTVYVIVRCKLDDRVATEAEFSPEDSPSVRMEAKVENEYTISVKAPNLSSGNVSLKIYSGDLVVCETVISYYTDMEEIGNLLSNAANPVEFMCQAFKIVPYNTETLDKLLTESLKNNIPASGLHLFGINQLEEEDMMTNQRDEELPTLLHFAAKYGLKNLTALLLTCPGALQAYSVANKHGHYPNTIAEKHGFRDLRQFIDEYVETVDMLKSHIKEELMHGEEADAVYESMAHLSTDLLMKCSLNPGCDEDLYESMAAFVPAATEDLYVEMLQASTSNPIPGDGFSRATKDSMIRKFLEGNSMGMTNLERDQCHLGQEEDVYHTVDDDEAFSVDLASRPPVPVPRPETTAPGAHQLPDNEPYIFKGKYGRE

SEQ ID NO: 37141 - protein, 186 aa, Homo sapiens
MPSSRRRAPRARAASRGAARVAQMVLRGSVFLSQWTRQIHRCVGDTECERQGQQQGLGGRGDPAQDLNVIEEVIRMMLEIINSCLTNSLHHNPNLVYALLYKRDLFEQFRTHPSFQDIMQNIDLQVLSNKQQHLLLGKIKGMDTHPALGPRYAELTESRTWSMNVEKPVALQIPAKHKASLEDVVH

SEQ ID NO: 37142 - protein, 264 aa, Homo sapiens
PRVRIFFSITWYSLRVLTEISLWGGLILVVIITIQYDMTRTRNKYLHTNSLVALANMSAQFRSLHQYAAQRIIRLFSLLSKKHNKVLEQATQSLRGSLSSNDVPLPDYAQDLNVIEEVIRMMLEIINSCLTNSLHHNPNLGITPWLLQRRSLWNNFRTHPSFQGINGKILIWVIFLSSRLQGLAGKLGAELSVERVLEIIKQGVRSLPKDRLKKFPELKFKYVEEEQPEEFFIPYVWSLVYNFSSRPVLGIPQDIPAVSPWVSD

SEQ ID NO: 37143 - protein, 68 aa, Homo sapiens
  misc_feature (1)...(68): Xaa = X or * as defined in Table 2
PSASRPAWHAPALHPSPVPARGWQPPTGLHPLREQRGLGQHMXQSSGQQPQGGVGPGSHFPGALWAQL

SEQ ID NO: 37144 - protein, 134 aa, Homo sapiens
  misc_feature (1)...(134): Xaa = X or * as defined in Table 2
EMGSCDQWQRPCVPWEAVVMPRDPLKMALAVVWPKMKAPRVTKRTPXLTSTHQLAGLTSSISESLAXMRHSPGKTKMKQAARPPMTEITLPMSGMKSVQQQGEQEPDQRLQHSPPPLPPHVLLHWHPLVAQPQA

SEQ ID NO: 37145 - protein, 460 aa, Homo sapiens
MEQGPQDLPLVPGVFVPKCHVSSVPVFNSMQQPEVKTWGGVVTAAMVIALAVYMGTGGLGTGSLTGIGTGALGLPAVNNDPFVQRKLGTSGLNQPTFQQSKMKPSDLSQVWPEANQHFSKEIDDEANSYFQRIYNHPPHPTMSVDEVLEMLQRFKDSTIKREREVFNCMLRNLFEEYRFFPQYPDKELHITACLFGGIIEKGLVTYMALGLALRYVLEALRKPFGSKMYYFGIAALDRFKNSTCDNHLDNSHKGALGPGSHFPGALWAQLPVLRSRRGLLQFPAASLGVGPGHCAHLSQVAGPVDGGDLDPVACFLSWCRRVGLELSPKVAVSRQGTVAGYGMVAGRACRRRTAVSGAAGRAPVDRNLAQSGAAGASGTAAGKARGGQAEGRALGPPKSLKVCLPELYSLALGQSELLWDLQHSCGFWWVLVSYGVLLVTLGAFIFGQTTANAIFVDLLA

SEQ ID NO: 37146 - protein, 293 aa, Homo sapiens
  misc_feature (1)...(293): Xaa = X or * as defined in Table 2
HCXLNALPSGETWGQKRGLPGTQLPLPLVPLRAPKGRSPKGSKGPTHHTWALSSFSLTPSQVTVGTEDQATSASGRPWLRIGTGPGGGRVWAGRDSRGVPALTVLHVLSSLGRETPXRPCLRGPTAPAGPKRAPGKWLPWSQAPPCGCCPRXLSHVLXDRNRCAWXKGGGRGLLRAPTPVPELAPHPCGPAPTLSKPLSSPNMPAQGLTQEXPGSVANLPPYGPALLCLGRREWDERGQVGXVPTESEMEXRRTEPLKTPGDCSAAASKIPSFFSNRTPFPPLCPHKNKLKGT

SEQ ID NO: 37147 - protein, 103 aa, Homo sapiens
MFETVSKEVAWYELAISYSIKRATSFKSLAANRVEVILDESSSKREKVVLKPNDVSVFTTLTINGRLFACPREQFDSLVGVDGLLRAALQSEKLVWSLILQSH

SEQ ID NO: 37148 - protein, 134 aa, Homo sapiens
MVLVPAESASAWMGPQDKLEIWMESSEVQKPEKTLQKANLTFCNGLMRSRVRGADAAQAKVLTFLDSHCECNEHWLEPLLERVAEIHNREFFKLICACAFGKDKSRCSDVTVSWFFLFALKPALSDLRQIRPEE

SEQ ID NO: 37149 - protein, 250 aa, Homo sapiens
  DOMAIN (58)..(90): ABC transporters family proteins domain identified by eMATRIX, accession number BL00211B, p-value=9.700e-15, raw score of 13.37
  DOMAIN (1)..(136): ABC transporter domain identified by PFam, accession name ABC_tran, E-value=0.04, PFam score of -41.1
MKVLLESVKERAEEEKLAAAHLRSFAAKKAKKYDSVKKEKTLQDVDLTQHQHKQTRALSGGLKRKLSLGIAFMGMSRTVVLDEPTSGVDPCSRHSLWDILLKYREGEEQPFAWLFITSVIRADPPVGVAGAAWFVGRTPVLGTIKQANYTFYIVDKLKTLSETLLEMSSLFQRSGSGQMFNQLQEALRNKFVRNFVENQLHIDVDKLTEKLQTYATAEGIPSILLGTGDGGQEDRQAPAPHEAYITAGDK

SEQ ID NO: 37150 - protein, 106 aa, Homo sapiens
  misc_feature (1)...(106): Xaa = X or * as defined in Table 2
MEPCIGLPSQKPCXXXXXXXXXXXXXXXXXXXXXXXXXXXXXXXXXXXXXXXXXXXXXXXXXXXXXXXXXXXXXXXXXXXXXXXXXXXXXXXXXXXXXXXXXQDAS

SEQ ID NO: 37151 - protein, 290 aa, Homo sapiens
  DOMAIN (140)..(176): TGF-beta family proteins domain identified by eMATRIX, accession number BL00250A, p-value=8.000e-31, raw score of 21.24
  DOMAIN (142)..(241): Transforming growth factor beta like domain identified by PFam, accession name TGF-beta, E-value=1.5e-54, PFam score of 169.5
MRLLRLKLKVEQHVELYQKYSNNSWRYLSNRLLAPSDSPEWLSFDVTGVVRQWVWSRGGEIEGFRLSAHCSCDSRDNTLQVDINGFTTGRRGDLATIHGMNRPFLLFMATPLERAQHLQSSRHRRALDTKYCFSSTEKNCCVRQLYIDFRKDLGWKWIHEPKGYHANFCLGPCPYIWSLDTQYSKVLALYNQHNPGASAAPCCVPQALEPLPIVYYVGRKPKVEQLSNMIVRSCKCNLGPAPPRPAPAGPAPPRPAPVALPMGAVFKDTRAPSPPGAPLKMERGKKKKKK

SEQ ID NO: 37152 - protein, 157 aa, Homo sapiens
TGGFPGLCGAGVPSLQGSRAPCQESRCWRWHRPHSQGEQMGVCKCTWLSQFLADDRSRETHGRVDESKYSNNSWRYLSNRLLAPSDSPEWLSFDVTGVVRQWLSRGGSCCVPGHVLGGVGDIVITKTALSSALMGPTVTSGHLRDLVKAPPGRNDLE

SEQ ID NO: 37153 - protein, 614 aa, Homo sapiens
  DOMAIN (20)..(39): Eukaryotic  RNA-binding region RNP-1 proteins domain identified by eMATRIX, accession number BL00030A, p-value=4.938e- 12, raw score of 14.39
  DOMAIN (212)..(578): KH domain identified by PFam, accession name KH-domain, E- value=1.8e-51, PFam score of 184.4
AGYRRREPRPQGKRRMMNKLYIGNLSPAVTADDLRQLFGDRKLPLAGQVLLKSGYAFVDYPDQNWAIRAIETLSGKVELHGKIMEVDYSVSKKLRSRKIQIRNIPPHLQWEVLDGLLAQYGTVENVEQVNTDTETAVVNVTYATREEAKIAMEKLSGHQFENYSFKISYIPDEEVSSPSPPQRAQRGDHSSREQGHAPGGTSQARQIDFPLRILVPTQFVGAIIGKEGLTIKNITKQTQSRVDIHRKENSGAAEKPVTIHATPEGTSEACRMILEIMQKEADETKLAEEIPLKILAHNGLVGRLIGKEGRNLKKIEHETGTKITISSLQDLSIYNPERTITVKGTVEACASAEIEIMKKLREAFENDMLAVNQQANLIPGLNLSALGIFSTGLSVLSPPAGPRGAPPAAPYHPFTTHSGYFSSLYPHHQFGPFPHHHSYPEQEIVNLFIPTQAVGAIIGKKGAHIKQLARFAGASIKIAPAEGPDVSERMVIITGPPEAQFKAQGRIFGKLKEENFFNPKEEVKLEAHIRVPSSTAGRVIGKGGKTVNELQNLTSAEVIVPRDQTPDENEEVIVRIIGHFFASQTAQRKIREIVQQVKQQEQKYPQGVASQRSK

SEQ ID NO: 37154 - protein, 594 aa, Homo sapiens
  DOMAIN (43)..(62): Eukaryotic  RNA-binding region RNP-1 proteins domain identified by eMATRIX, accession number BL00030A, p-value=4.938e- 12, raw score of 14.39
  DOMAIN (235)..(558): KH domain identified by PFam, accession name KH-domain, E- value=1.8e-51, PFam score of 184.4
ILDPPLTSYVSLVKQLNGGGEERRVPGRGSRGLSGKRRMMNKLYIGNLSPAVTADDLRQLFGDRKLPLAGQVLLKSGYAFVDYPDQNWAIRAIETLSGKVELHGKIMEVDYSVSKKLRSRKIQIRNIPPHLQWEVLDGLLAQYGTVENVEQVNTDTETAVVNVTYATREEAKIAMEKLSGHQFENYSFKISYIPDEEVSSPSPPQRAQRGDHSSREQGHAPGGTSQARQIDFPLRILVPTQFVGAIIGKEGLTIKNITKQTQSRVDIHRKENSGAAEKPVTIHATPEGTSEACRMILEIMQKEADETKLAEEIPLKILAHNGLVGRLIGKEGRNLKKIEHETGTKITISSLQDLSIYNPERTITVKGTVEACASAEIEIMKKLREAFENDMLAVNTHSGYFSSLYPHHQFGPFPHHHSYPEQEIVNLFIPTQAVGAIIGKKGAHIKQLARFAGASIKIAPAEGPDVSERMVIITGPPEAQFKAQGRIFGKLKEENFFNPKEEVKLEAHIRVPSSTAGRVIGKGGKTVNELQNLTSAEVIVPRDQTPDENEEVIVRIIGHFFASQTAQRKIREIVQQVKQQEQKYPQGVASQRSK

SEQ ID NO: 37155 - protein, 117 aa, Homo sapiens; identical to SEQ ID NO: 34864
  DOMAIN (49)..(65): AUXIN BINDING PROTEIN SIGNATURE domain identified by eMATRIX, accession number PR00655E, p-value=9.000e-09, raw score of 8.06

SEQ ID NO: 37156 - protein, 560 aa, Homo sapiens
  DOMAIN (491)..(560): Integrase core domain identified by PFam, accession name rve, E-value=0.008, PFam score of 13.8
MLMRGQGLKLVSLGEPTRCSITLSSSLYSSSGVSPHGYHIWKCSGSPPNPVLYWVSPKAHSEYYLITTKVYSRPKGSLGKLNPPRPVLALASTGLSEQLLNFQEFCKLFDVTFTTYIGNAASNVTICTSSCSRSMLSISHISGSANGHILRPWASGCGGCTGSPSSASPLTLRSISHRALAAFPLGRARDLQPTVPEPPTLSVGSCAAGASPTSATPCSTGPSPMDHPRAEQCRCTMQDWQAAPPAAPVWDPLGEASWAPESARSDVFHVKHCNPVCFVVLVKFDSSVKSRVRNGRLPLDVAEVNTPHESRTAMDSCRQPIVGPSDCLQKQTLSLKSAKIALSESLISCRERAETVKKQTSSYHTSEWCTCKERCMHSLARRRLCNGYRLLCKLLPLGPYDPDPADPMELEVSVEDRDAVWSLWQAPKATPVIAQWAHEKRGRGGRDGGYTWAQQHELPFTKADLAMAPAECPICQQERPTLSPRYSTIPWGDQQATWWQVDHIQLLPSWKGQSLVLTEIDSYSGYGFACTACNASAKTAIGGLMECLIHTILPLTKALT

SEQ ID NO: 37157 - protein, 252 aa, Homo sapiens
IKVINHTLPEATVMASLEAVARQDNADSPQELPPTPLFASRPVTKVLAGLKRSYSGTTVTQLENLKAMGIIGSRGGRDQVAALNCQRQDLQPFTRVTVQWGKRNVQTFWGLLYTGSELMFIPGDQNVTVVLQLNRGLTEGYIISPALCQNLVCRDLDHFSLLQDITWVRYIDYTMLIGSNPMVLEVSVADRDAIWSLWQAPIDELQQRSLGFWSRALPSSADNHPPFDMHLLACYRALIETECLTMGHQVTM

SEQ ID NO: 37158 - protein, 945 aa, Homo sapiens
  DOMAIN (181)..(355): Reverse transcriptase domain identified by PFam, accession name rvt, E-value=0.00048, PFam score of -12.2
  misc_feature (1)...(945): Xaa = X or * as defined in Table 2
DVEHVGKMRRRWRRRVVVADGNVVKPMSCAGDLQPFTRVTVHWGKGNDQTFQDLLDTGSELTLIPGDPKRHCGPPVKIGAYGGQIINGVLAQVQLTVDAVGPWTHPVVIFPVPECIIGIDMLSSRQNPHTGSLTGRVWTIMVRKAKWKPLELPLPRKIVNQKQYHIPEGIVEISATIKDLKDAGVVIPTTSPFNSPIWPVQKTDGSWRMTVGYCKLNQVVTPIAAAVPDVVSLLEQINTPPGTWYAAIDLANDFFPIPVHKAHQKQFAFRWQGRQYTFTVLPQGRWEINMTKIQGPSTSVKFLGVQWCGACQDIPSKVKDKLLHLVPPTIKKEAQRLVGQLGFWRQHIPHLGALLWLIYQATQKAASFEWGPEQEKALQQVQVAVQAALPLGPYDPADPMVLEVSVADRDAVWSLWQAPLGHTCHCPMGPXTKNPPNPGHKTTSISQRPKALVSLGPEVRRGTRGEDEKALEKEGGGRRWECGEANELCGRPPAFTRVTVHWGKGNDQTFQDLLDTGSELTLIPGDPKRHCGPPVKIGAYGGQIINGVLAQVQLTVDAVGPWTHPVVIFPVPECIIGIDMLSSRQNPHTGSLTGRVWTIMVRKAKWKPLELPLPRKIVNQKQYHIPEGIVEISATIKDLKDAGVVIPTTSPFNSPIWPVQKTDGSWRMTVGYCKLNQVVTPIAAAVPDVVSLLEQINTPPGTWYAAIDLANDFFPIPVHKAHQKQFAFRWQGRQYTFTVLPQGRWEINMTKIQGPSTSVKFLGVQWCGACQDIPSKVKDKLLHLVPPTIKKEAQRLVGQLGFWRQHIPHLGALLWLIYQATQKAASFEWGPEQEKALQQVQVAVQAALPLGPYDPADPMVLEVSVADRDAVWSLWQAPLATPVIAQWAHEQSGHGGRDGGYAWAQQLGLPLTKADLATAAAECPICQQQRPTLSPQYGTIPRAAT

SEQ ID NO: 37159 - protein, 73 aa, Homo sapiens
MSDAAVDTSSEITTKDEEEEEGWDEEEEEEEGDGEEEDGDEDEEAESATGKRAAEDDEDDDVDTKKQKTDEDD

SEQ ID NO: 37160 - protein, 64 aa, Homo sapiens
  misc_feature (1)...(64): Xaa = X or * as defined in Table 2
MSDAAVDTSSEITTKEEEEEEEGDGEEEDGDEDEEAESATGKRAAEDDEDDDVDTKKQKTXEDD

SEQ ID NO: 37161 - protein, 72 aa, Homo sapiens
ENEENGEQEADNEVDEEEEEGGEEEEEEEEGDGEEEDGDEDEEAESATGKRAAEDDEDDDVDTKKQKTDEDD

SEQ ID NO: 37162 - protein, 106 aa, Homo sapiens
  DOMAIN (34)..(83): Eukaryotic RNA polymerase II heptapeptide repeat proteins domain identified by eMATRIX, accession number BL00115Z, p-value= 5.103e-09, raw score of 3.12
  misc_feature (1)...(106): Xaa = X or * as defined in Table 2
LFLFLLSSHPRRSSASWYRHRHPHHPSAARLPVADSASSSSSPSSSSPSPSSSSSSSSPPSSSSFVYPHCQPPAPHFPHXHSRXQGRLFHFLPLPQLPSSPLSPWW

SEQ ID NO: 37163 - protein, 139 aa, Homo sapiens
  DOMAIN (2)..(64): Peptidase family M20/M25/M40 domain identified by PFam, accession name Peptidase_M20, E-value=0.0022, PFam score of 15.0
MGLINVTLSEKGTLMATLPANVPGDIPAIGFISHVDTSPDCSGKNVNPQIVENYRGGDIALGIQLGFWSLLFSHITFCLPFVVVTVYSRLKGFDVRICHISRQDKAPRLNKVQPLLFTVVEIIGPRGGNVRQPVFVGRR

SEQ ID NO: 37164 - protein, 41 aa, Homo sapiens
FWCSANARLMYWANGQAMLTAPLSPTPVCCRNFAIASSLPH

SEQ ID NO: 37165 - protein, 27 aa, Homo sapiens
AVSACLFAYLIGRIRRLRRIRHPSTIA

SEQ ID NO: 37166 - protein, 245 aa, Homo sapiens
  DOMAIN (38)..(71): Bacterial export FHIPEP family proteins domain identified by eMATRIX, accession number BL00994C, p-value=7.000e-33, raw score of 13.04
  DOMAIN (3)..(197): FHIPEP family domain identified by PFam, accession name FHIPEP, E-value=1.8e-102, PFam score of 353.8
  misc_feature (1)...(245): Xaa = X or * as defined in Table 2
CALNAGLIGENEAKKRRSKVTQEADFPGSMDGASNFVRGDAIAGILIMVINIVGGLLVGVLQHGMSMGHAAESYALLTIGDGLVAQIPALVISTAAGVIVTRVSTDQDVGEQMVNQLFSNPSVMLLSAAVLGLLGLVPGMPSLVFLLFTAGLLGLAWWIRGREQKAPAEPKPVKMAENNTVVEATWNDVQLEDSLGMATGLLTXPIFRAQWTGQVTLFAAMPSPGSSSWSLTLSAGCWSACCNMA

SEQ ID NO: 37167 - protein, 354 aa, Homo sapiens
  misc_feature (1)...(354): Xaa = X or * as defined in Table 2
XKPLPFSEVTGSKGKADKEKVGDYVFGLKAQGLYNGEPLTGTEKIGGMLALRGEGTPFPVQADFRSGNTHVAFDGVVNDPMKMGGVHLQLKFSGDSLGDLYELTGVLLPDTPPVETDGRLVQKIDTPRRTLARTLPILPQPFGQGINSTLDGSRLFRKPGHFKRTGCHTPLFSNGFRHITLLALNAVMQELCASAHGFADSFSGDITGIRGQQFRRVELCQICQRNEVLHHLNIALHFQLTTANQCGKLLAIAKFRQHTGVGDNGAVSIACPFAQYINLAFAEHQNQGELEKGNHILAKEVLAKHDENYTPPEVEELVANDADSYRYLAESKRMHPDQDTLKAMMQNTGFESGD

SEQ ID NO: 37168 - protein, 330 aa, Homo sapiens
  DOMAIN (108)..(127): FLAGELLAR BIOSYNTHETIC PROTEIN FLHA FAMILY SIGNATURE domain identified by eMATRIX, accession number PR00949E, p-value=6.400e- 20, raw score of 12.26
  DOMAIN (108)..(168): FHIPEP family domain identified by PFam, accession name FHIPEP, E-value=3e-28, PFam score of 99.0
IPGIAFLFGRITSCAYITLRLTPCVASVTYRSCHLVEGPFKKFSCSMASPPSMMTNVFPRVAHLASTHDCRMRRKRLIRPTVQAQVCRPDKTRKRRIRQWCSDAGCGAQIPALVISTAAGVIVTRVSTDQDVGEQMVNQLFSNPSVMLLSAAVLGLLGLVPGMPNLPLPKQHCSLILVFSERQVDVLGEWAGDADCTVIAYASVLPKLRDRQQLFTRQHPELPAAGKGEEAEGVELGRVPRGPPRRAPCRAHPRRERKELGRSGQGRTEQPQCYDTTTLPPYVAAHQTACCWLTCRLWRMPRRNKPSKTPQRLCVPVLRHKSISEKRSTN

SEQ ID NO: 37169 - protein, 137 aa, Homo sapiens
  DOMAIN (33)..(68): Retroviral aspartyl protease domain identified by PFam, accession name rvp, E-value=1.1e-05, PFam score of 25.3
  misc_feature (1)...(137): Xaa = X or * as defined in Table 2
PSFQGPVSLPSITVVSIDSQASKPLKTPQLWCQLRQYSFKHSFLVVPTCPVPLLGXDTLTKLSASLTIPGLQPHLIATHLNPQVEDTSIPSLATYHAPLTISLKPNHPYPSQCQYPIPQHALKGLKPVITHLLQHSC

SEQ ID NO: 37170 - protein, 104 aa, Homo sapiens
  misc_feature (1)...(104): Xaa = X or * as defined in Table 2
MXFLRHKIGKLTLFICRVSVNLNISWFGPIPSPDGSRPFPLALKGYYSHXFPSDRYNPPIWPPYFHSFSGSWYSVETSYPLPSSIFRKGRTXEWSFKNTTHQAQ

SEQ ID NO: 37171 - protein, 81 aa, Homo sapiens
MRFLTQPQPRPRHQPPRQVQQNVPRHFTPASCRPPPHLHKKPFSLYQLYSPHIWTSHNTNYYSCGHSFMYLSAKTHWNSPG

SEQ ID NO: 37172 - protein, 340 aa, Homo sapiens
  DOMAIN (253)..(271): RNase H domain identified by eMATRIX, accession number PF00075J, p-value=5.125e-14, raw score of 15.78
  DOMAIN (158)..(312): Integrase core domain identified by PFam, accession name rve, E-value=5.1e-41, PFam score of 145.9
LYSLFVESPTITIVSGPDFNPASHIIPDTTPDPHDCISLIHLMLSPFPHISFFPISHPDHTWFIDGSSTRPNRHSPAKAGYAIISSTSIVEATTLPPSTTSQQAKLVALTQALTLAKGLRVNILLILNMPFIFGTTMQSYGLKEGLFRSPPFPTHQARGFAPAQDWQIDFTHMPRVRKLKYLLVWVDAFTGWVEAFPTGSEKATAVISSLLSDIIPRFGLPASTQSDNGPAFTSQITQAVSQALGIQWNLHIIYRPQSSGKVERTNGLLKTHLTKLSLQLKKDWTVLLTLALLRIRACPRDATGYSPFELLYGHTFLLGPNLIPDTSPLGNYLPVLQQAR

SEQ ID NO: 37173 - protein, 42 aa, Homo sapiens
  DOMAIN (1)..(35): Integrase core domain identified by PFam, accession name rve, E-value=1e-06, PFam score of 27.2
GPAFTSQITQAVSQALGIQWKLHIPYHPQSSGKSEGRLERGY

SEQ ID NO: 37174 - protein, 318 aa, Homo sapiens
  DOMAIN (289)..(300): RNase H domain identified by eMATRIX, accession number PF00075F, p-value=6.727e-09, raw score of 12.87
  DOMAIN (226)..(318): RNase H domain identified by PFam, accession name rnaseH, E- value=0.042, PFam score of -25.9
MAGALPPASLPPCSLISDCCASNERSSMGIGPSEPCAGYNLLVCRLTKKKRIRSTNKVWDYVKRPNLRIIGVPEEEENSKSCENILGEIIEENFPSLATDLDIQIQEAQRTPQKFITERSLPRYIVIRLSKVKTKERILRAVRQKHQIFLTQRLKTNTAQSPQKLPGPSQTLLVTLTREITIVPGLDFNPASHIIADTTPDPHDCISLIHLTFIQFPHISFFPVPHPDHTWFINGSSTRPNRHSPAKAGYAIVSSTSIIEATTLPSSTTSQQAEFIALTQALILAKGLCINIYADSKYAFHILHHHAVIWAERDTFTG

SEQ ID NO: 37175 - protein, 423 aa, Homo sapiens
  DOMAIN (369)..(403): Ribosomal protein L11 proteins domain identified by eMATRIX, accession number BL00359C, p-value=5.929e-16, raw score of 22.18
  DOMAIN (295)..(402): Ribosomal protein L11 domain identified by PFam, accession name Ribosomal_L11, E-value=1.7e-29, PFam score of 110.2
IICSRTGVPNPQAADWYQSEACQEPGSTAGGERWHALKGLKPVIARLLQHGLLKPINSPYNSPILPSKNRTSLTGYTLLARLLESLISFPSWKSILKEITSQCSICYSTTPEGLFRPPLFPTHQARGFAPVQDWQIDFTHMPRVRKLKYLLVWVDTFTGWVEAFPTGPEKATVVISSLPSDIIPGFGLPTSIIQSDNGLAFISQIAQAVSQALGIQWLLVLPQTTTLKSLLKWIKDLQWQGLTNKLLFQESLQKTATRLSAFSWEEAKVQLSWVVLNLATSAMLPKFYPNEIKVTYLRCTGDEVGATSVLAPKISPLGLSSEKNREAQIEVVTSASALIIKALKEPPRDRKKQKNIKHSGNITFDEIVNVAQHMWHRSLARELSGIIKEILGTPQSVGCNVDGCHPHDIIDDINGGAVECPAN

SEQ ID NO: 37176 - protein, 247 aa, Homo sapiens
MGKEEHRSPHFLNVSHMLGMFMSVNSFDHHKNCSVKYNSTPSLATDHAPLTIPLKPNHPYPTQRQYHIPQHALKGLKPVITRLLQHGLLKPLNSPYNSPILPVLKPDKAYSLVMNRPLLGQITQAVSQALGIQWNLHIPYRPPSSGKTFSPAQVSQQCQTHIKGYLALVSSESANLVNVEISRLPEKMKAEWGPESAGGTLLIYTDWQERRTWQSDISVESVLSEGDTLQTSGGRALLEEAPQFGRP

SEQ ID NO: 37177 - protein, 283 aa, Homo sapiens
  DOMAIN (206)..(217): RNase H domain identified by eMATRIX, accession number PF00075F, p-value=4.750e-11, raw score of 12.87
  DOMAIN (143)..(283): RNase H domain identified by PFam, accession name rnaseH, E- value=5.8e-19, PFam score of 76.4
  misc_feature (1)...(283): Xaa = X or * as defined in Table 2
XEVAGAEGSQDDRERVFSLAQSHADNHRLHEPDLQEGSRVVPQEDPQWNSQANSPDLLGLATEDRRCPIASEAPWTITDAELQLLQLCSLFVESPTITIVPGPDFNPASHIIPDTTPDPHDCISLIHLTFTPFPHISFFPVSHPDHTWFIDGSSTRPNCHSPAKAGYAIVSSTSVIDATALPPSTTSEQAELVALTQALTLAKGLCINIYTDSKYAFHILHHRVVTWAERGYLTTQGSSIINASLIKTLLKAALLPKEAGVIDCKGHQKASEPIALGNAYADK

SEQ ID NO: 37178 - protein, 1186 aa, Homo sapiens
  DOMAIN (1055)..(1105): ENV polyprotein (coat polyprotein) domain identified by eMATRIX, accession number PF00429, p-value=2.500e-19, raw score of 31.08
  DOMAIN (935)..(1182): ENV polyprotein (coat polyprotein) domain identified by PFam, accession name ENV_polyprotein, E-value=4.4e-48, PFam score of 165.2
  misc_feature (1)...(1186): Xaa = X or * as defined in Table 2
SPLPHSTPISHPAACFKKIKACYHLPATAWPFKAYKLSLQFPHFTCPKTRQGLQHNSHKNTRALPDYRLRLISQTPIPSTKQQLLSFLGMVSKVRILTQELGPRPIAFLSKQLDLTVLTQPSCLHAAAAAALILLKALKITKYAQLTLYSSHNFQNLFSSSYLMHILSAPWLLQLYSLFVESPTITIVPGTDFNPASHIILDTTPDPHDCISLIHLTFTPFPRISFFPVPHPNHIWFIDGSSTRPKCHSPAKAGYAIVSSTSIIEATALPPSTTSQQAELVALTQALTLAKGLCVNIYTDSKYAFHIVHHHAVIWAERGFLTTQGSSIINASLIKTLLKAALLPKEAGVIHCKGHQKASDPIALGNAYVDKVARQAASSPTSVPHGQFFSFTSVTPTYSPTETSTYQSLPTQGKWFLDQGKYLLPASQSPFYSVIISXPLLXDIIPRFGLPTSIQSDNGPAFTSQITQVVSQALGIQWNLHTPYRPQSSGKVERTNGLLKAHLTKFSLQLTKDWTALLPLALLKIRACPRDATGYSPFELLYGRTFLLGPNLIPDTSPLGDYLPVLQQARQEIRQAANLLLPTPDPQPYEDNLAGRSVLVKNLTPQTLQPRWTGPYLVIYSTPTAVCLQNPPHWVHHSRIKLCPSDSQPNPSSSSWKSQVLSPTSLKLTHISEEHAYTAVPALQTDWATSPISLHLRTSFNSPHLYPPEELIYFLDRSSKTSPDISHQQAAALLRTYLKNLSPYINSTPPIFGPLTTQTTIPVAAPLCISWQRPTGIPLGNLSPSRCSFTLHLRSPTTNINETIGAFQLHITDKPSINTDKLKNISSNYCLGRHLPCISLHPWLSSPCSSDSPPRPSSCLLIPSPENNSERLLVDTRRFLIHHENRTFPSTQLPHQSPLQPLTAAALAGSLGVWVQDTPFSTPSHLFTLHLQFCLAQGLFFLCGSSTYMCLPANWTGTCTLVFLTPKIQFANGTEELPVPLMTPTQQKRVIPLIPLMVGLGLSASTVALGTGIAGISTSVMTFRSLSNDFSASITDISQTLSVLQAQVDSLAAVVLQNRRGLDLLTAEKGGLCIFLNEECCFYLNQSGLVYDNIKKLKDRAQKLANQASNYAEPPWALSNWMSWVLPIVSPLIPIFLLLLFGPCIFRLVSQFIQNRIQAITNHSIRQMFLLTSPQYHPLPQDLPSA

SEQ ID NO: 37179 - protein, 86 aa, Homo sapiens
DKPQPCLQHTRTSKRLNLSGQAFLQNLLPQELATSARNPATRPRNACSPGFLLSHVPSVRDPTGNWTVQLTWHPLPEPLELWPKAL

SEQ ID NO: 37180 - protein, 59 aa, Homo sapiens
  misc_feature (1)...(59): Xaa = X or * as defined in Table 2
PAPEFWVHGXNVSPLSLXSKEQEDRGFISQGRSPDLSHGTKFHVRPCEETTKQALCEQH

SEQ ID NO: 37181 - protein, 292 aa, Homo sapiens
SGDLPWEINPPSSYTLLCEKDPPTTSGPQTNQPKKHLTNFKSETKETRFIRGPTTPAPVTDWEGSLPLVFNHSRDTSLIIHPGFRGVRPRRDACLGPSPLAASPTFLGKGPAAPRQTELGPNSSSASAPPPYNPFIASPPHTWSGLQFPSMTSPPPPAQQFTLKKVAGAKGIVKDLINLTFKVYNNRKKLQFLASTVRQTPATSPAHKNFQTPELQQPGVPPEPPPRGACYKFQKSGHRAKECLQPRIPPKPHPICVGPHWKSDCPTHLAATPRAPGTLAQGSLTPSQIFLA

SEQ ID NO: 37182 - protein, 63 aa, Homo sapiens
  misc_feature (1)...(63): Xaa = X or * as defined in Table 2
DTSTPSLVTDHASLTISLKPNHFYPDXCQYPIPQHALKGLKPVITCLLQHGLLKPINSPYPRA

SEQ ID NO: 37183 - protein, 261 aa, Homo sapiens
  DOMAIN (182)..(193): RNase H domain identified by eMATRIX, accession number PF00075B, p-value=1.346e-09, raw score of 12.56
  DOMAIN (115)..(248): Reverse transcriptase domain identified by PFam, accession name rvt, E-value=0.0001, PFam score of -2.6
MGFRHVAQAGLFLLGSSDLPAVAPQVLGLQVIKSFIAHTKPVWWSLHTDAHEIWCRDSDRGTSLGRSIPCPPALCSVKKIHLRPQVLRPTSPRNISPILNRHALKRLKPVITRLLQHGLLKPINSPYNSPILPVLKPDKPYKLVQDLYLINQIVLPIHPMVPNPYTLLSSIPPSTTHYSVLDLKHAFFTIPLHPSSQPLFAFTWTDPDTHQAQQITWAVLPQAFTDSPHYFSQAQISSSSVTYLGIILIKTHVLSLLFVFD

SEQ ID NO: 37184 - protein, 127 aa, Homo sapiens
  misc_feature (1)...(127): Xaa = X or * as defined in Table 2
WRHALKGLKPVITRLLQHGLLRPINSPYNSPFLLVLEPDKPYRKRKXISPPNRHILASVEVLKNQVNSHEFERSALIHTLTSGLAPCSLHKMCSKLPRSFLSVGSGTGKEARSKILTFRTASRHLVL

SEQ ID NO: 37185 - protein, 559 aa, Homo sapiens
  DOMAIN (7)..(54): kw TRANSCRIPTASE REVERSE II ORF2 domain identified by eMATRIX, accession number DM01354V, p-value=1.000e-40, raw score of 12.97
  misc_feature (1)...(559): Xaa = X or * as defined in Table 2
MSELPFTIASKRIKYLGIQLTRDVKDLFKENYKPLLKEIKEDTNKWKNIPCSWVGRINIVKMAILPKVIYRFNAIPIKLPMTFFTELEKTTLKFIWNQKRARIAKSILSQKNKAGGITLPDFKLYYKPTETKTAWYWYLNRDIDQWNRTEPSEITPHTYNYLIFDKPEKNKQWGKDSLFNKWCWENWLAICRKLKLDPFFTPYTKINSRWIKDLNVRPETIKTLEENLGITIQDIGVGKDFMSKTPKAMATKDKTGKWDLIKLKSFCTAKETTIRVNRQRVAALLNSAVFQNAVEVVVWPSSEVHVKFLFCKIISCAGQKQPIKFDGSSSLSGVATAMMSATIAHLKRIKACYRSPVTAWTFKAYKLSLQFPHFTCPKTGQALQXHTXKGLKPVIAHLLQHGLLKPINSPYNSLILPVQKPDKPYRKLESFTSKAIKWHQIPSPGKHLCXXGSXRSPVTAWTFKAYKLSLQFPHFTCPKTGQALQEAGVIHFKGHQMASDPITQGNTYANKVAKEAASVLTSVPHGQFFSFSSVTPTYFPTEIDFTYMPQVRKLKHLMV

SEQ ID NO: 37186 - protein, 53 aa, Homo sapiens
LLESRYTLNGLKPVITCLLQHGPLKPINSPYNSPILPVQKKLDKPYSKLNSLT

SEQ ID NO: 37187 - protein, 714 aa, Homo sapiens; identical to SEQ ID NO: 35628
  DOMAIN (553)..(598): kw TRANSCRIPTASE REVERSE II ORF2 domain identified by eMATRIX, accession number DM01354N, p-value=1.720e-40, raw score of 13.17
  DOMAIN (427)..(461): Integrase core domain identified by PFam, accession name rve, E-value=6e-07, PFam score of 28.0

SEQ ID NO: 37188 - protein, 64 aa, Homo sapiens
  misc_feature (1)...(64): Xaa = X or * as defined in Table 2
LSQWRHALKGLKSVITRLLXHGLLKPINSPYNSPIVPVLKPDKTYRKVESFTAKTIKRCQIPLL

SEQ ID NO: 37189 - protein, 94 aa, Homo sapiens
PLVLRPTSPRNTSPILNLHALKGLKPVIIRLLQHGLLKPINSPYNSPILPVQKPDKPYRLVQDLSLINQIVLPIHPMVSQPWIPAPALVEVAVK

SEQ ID NO: 37190 - protein, 735 aa, Homo sapiens
  DOMAIN (623)..(634): RNase H domain identified by eMATRIX, accession number PF00075F, p-value=2.588e-10, raw score of 12.87
  DOMAIN (560)..(707): RNase H domain identified by PFam, accession name rnaseH, E- value=2.4e-20, PFam score of 81.0
MGNLQPGLLRGPGWLEVIAPLPLENFSEDEDELINFGAKPKMTDLDLQWYEGPTPAPWASSGRDHAPQYQQTQHRQLDEGSPLGLLGLTHLPLWLVPFLSNSVSAAVGILRAMTPGVETPQVNVTFVFLLGSPVPQAQSPQSLLSGARLQSAPTLTDIYQNKQKLRKQHSDPVCPSHTGAGYSYSPQPSRPGSLGTSPTKHLGSSPRSSDWFFKTPLPTIIGSPTKVCLLNPFVDHSSFQIPKTQASSNLLALVTRHGPAEEQSKDGNEPRECAHALLVQGSERQRAEQQSKAVFGRSVSTGKLSDQQGKTPICRHQGSTDSLNTERPMDIVETRRHILSMDPKLQCRSRTREDSLPLWLKTDTARSPWKPTGPSQTLWVTYSGGSKPSSHPPLVSPHLNPQVWDTSTPSLVTDHARLTIPLKPNHPYSNQRQYPIPWHALKGLKPVITRLLQHGLLKPINSPYNSPILPVQKPDKSYSSHNFQNLFSSSHLTHILSAPQLLQLCSVFVESPTITIVPGPDFNPNSHIIMDIRTDPHDCISLIHLTVTTFPHISVFPVSHHDHTWFIDGSSTRPNHHSPAKAGYAIVSSTSIIEATALPASTTSQQAKLIALTWALTLAKGLHVNIYTDSKYAFRILHHHAVTWAERNFLTTQESSIIIASLIKTLLKVALLPKEAGVIHCKGHQKASDVIAQGNAYADKQSLNIIISISTDGTEAQRGEGKPKVLQPGCGTIWN

SEQ ID NO: 37191 - protein, 693 aa, Homo sapiens
  DOMAIN (643)..(687): Bacterial type II secretion system protein C proteins domain identified by eMATRIX, accession number BL01141B, p-value=7.061e- 29, raw score of 19.48
  DOMAIN (1)..(156): Transposase domain identified by PFam, accession name Transposase_15, E-value=1.2e-63, PFam score of 224.9
MANLLEQHQLARQLFKTINRWLAEAGVMMTQGTLVDATIIEAPSSTKNKEQQRDPEMHQTKKGNQWHFGMKAHIGVDAKSGLTHSLVTTAANEHDLNQLGNLLHGEEQFVSADAGYQGAPQREELAEVDVDWLIAERPGKVRTLKQHPRKNKTAINIEYMKASIRARVEHPFRIIKRQFGFVKARYKGLLKNDNQLAMLFTLANLFRADQMIHLNYYHDPHSTEIEEDGSTISDDAVKQRGEIKVGVTGNISQRVSLRGSVAWQKGSDDFAQTAGFLSMTVKCHSPDYYSKACYHSPATAWPFKAYKLSLPFPHFTCPKTRQALQVSSESAPYQPNCFACPPRVFIQVLNPMNIAYRKREADKVLATRLALRTHRISYITLIAVILFFAFSFTFSISHEEAVSAFEQNISALALAAQVIPGHIIHITSTVLNIFAVLTAFFGIYLGFHEAIKGIILNLLSRIIDTKKINSRVLTLAICAFIVITLTIWVSFRVSVLVFFQLGSPLYVKNGQIINQPTNAFQSDFSLAALWRNENHAGVKDANPVAVNQETPKLSIALNGIVLTSNDETSFVLINEGSEQKRYSLNEALESAPGTFIRKINKTSVVFETHGHYEKVTLHPGLPDIIKQPDSESQNVLADYIIATPIRDGEQIYGLRLNPRKGLNAFTTSLLQPEDIDLRINNLSLTQPDEVHRH

SEQ ID NO: 37192 - protein, 537 aa, Homo sapiens
  DOMAIN (450)..(468): RNase H domain identified by eMATRIX, accession number PF00075J, p-value=5.125e-14, raw score of 15.78
  DOMAIN (355)..(509): Integrase core domain identified by PFam, accession name rve, E-value=5.1e-41, PFam score of 145.9
MGLVHLQRQSYWTVQRSSINHFLGCNPHTGKDKTLYMRWTKSFRKVEDPPTTSGPQTDQPKKHLTKFKSETKETRFIHGPKTPAPVMDWEGSLPLVFNHCRDASLIIHSHFKGVRPRRDACLGPSPLAASPAFLGKRQHALKRLKPVITHLLQHGLLKPKNSPYNSPILPVLKPDKPYKFVQDLCLINQIVLPIHPMLYSLFVESPTITIVSGPDFNPASHIIPDTTPDPHDCISLIHLMLSPFPHISFFPISHPDHTWFIDGSSTRPNRHSPAKAGYAIISSTSIVEATTLPPSTTSQQAKLVALTQALTLAKGLRVNILLILNMPFIFGTTMQSYGLKEGLFRSPPFPTHQARGFAPAQDWQIDFTHMPRVRKLKYLLVWVDAFTGWVEAFPTGSEKATAVISSLLSDIIPRFGLPASTQSDNGPAFTSQITQAVSQALGIQWNLHIIYRPQSSGKVERTNGLLKTHLTKLSLQLKKDWTVLLTLALLRIRACPRDATGYSPFELLYGHTFLLGPNLIPDTSPLGNYLPVLQQAR

SEQ ID NO: 37193 - protein, 689 aa, Homo sapiens
  DOMAIN (269)..(282): PROTEIN ZINC-FINGER METAL-BINDI domain identified by eMATRIX, accession number PD00066, p-value=2.286e-12, raw score of 13.92
  DOMAIN (46)..(141): SCAN domain identified by PFam, accession name SCAN, E-value= 5.1e-64, PFam score of 226.1
MSAKLGKSSSLLTQTSEECNGILTEKMEEEEQTCDPDSSLHWSSSYSPETFRQQFRQFGYQDSPGPHEALSRLWELCHLWLRPEVHTKEQILELLVLEQFLAILPKELQAWVQKHHPENGEETVTMLEDVERELDGPKQIFFGRRKDMIAEKLAPSEITEELPSSQLMPVKKQLQGASWELQSLRPHDEDIKTTNVKSASRQKTSLGIELHCNVSNILHMNGSQSSTYRGTYEQDGRFEKRQGNPSWKKQQKCDECGKIFSQSSALILHQRIHSGKKPYACDECAKAFSRSAILIQHRRTHTDSARLHPGEINSLVAHTKPVWWSLHMDAHEIWCRDSDWGTSLGRSIPCPPALCSMRKIHLRPRVLRPTSPRNISPISNPMKTDPTQSPWKPTGPSQTLWVTITVEVQNLLHILPLYLPTLTHKYDTSTPSLVTDHAPLTIPLKPNQPYPDECQYPIPQHTLKGLKPVITHLLQHGLLKPRNSPYNSPILPVLEPNKPYWLVQDLRLINQIVLPIHPMLLQLYSLFVESPTVTIFPGPDFSPASHIIPDATPDPHNCISLIQLTFTPFPHISFFPVPHPDHTWFIDGSSTRPNRYTPTKAGYAISILEAGGLLLSGFRSRGLSYVLGVCHGGFFQGFFAQDQKNLHRIGQYEDPWSPFLELFTGKALSEREDCNQLMTKLEEQKGGIK

SEQ ID NO: 37194 - protein, 384 aa, Homo sapiens
  DOMAIN (350)..(361): RNase H domain identified by eMATRIX, accession number PF00075B, p-value=2.385e-09, raw score of 12.56
MGDFNTPLSILDRSTREKINKDIQDLNSALDQVDLIDIYRTLHLQSTEYTFFSARHHTFSKINHMIRRNQKRARIAKALLSKKNKAGGIMLPDFKLHYKAMVTKTACDMDEAGNHHSQQTNTETETQTPRVLTHKWELDNEITWTQGGEHHTPGPVPQLHGCALYHSWGLPSIWTAESEETLELYAVLASHRQALGYYCSETKETRFIRGPKTPAPVTDWEGSLPLVFNHCRDASLIIHPRFKGVRPRRDACLGPSPFAASPAFLGKGKHALKGLKPVITRLLQHGLLKPINSPYNSPILPVVKPDKPYKLVQNLRLINQIVLPIHPMVPNPYTLLSSIPASTTHYSVLDLKRAFFTIPLHPSSQPLFAFTWTDPDTHQAQQIT

SEQ ID NO: 37195 - protein, 266 aa, Homo sapiens; identical to SEQ ID NO: 30968
  DOMAIN (232)..(243): RNase H domain identified by eMATRIX, accession number PF00075B, p-value=1.346e-09, raw score of 12.56

SEQ ID NO: 37196 - protein, 100 aa, Homo sapiens
  DOMAIN (8)..(77): Integrase core domain identified by PFam, accession name rve, E-value=2.2e-10, PFam score of 39.9
MPRVRKLKYLLVWVDTFTGWVEAFPTGPEKATVVISSLPSDIIPGFGLPTSIIQSDNGLAFISQIAQAVSQALGIQWLLVLPQTTTLKSLLKWIKDLQWQ

SEQ ID NO: 37197 - protein, 225 aa, Homo sapiens
  DOMAIN (197)..(208): RNase H domain identified by eMATRIX, accession number PF00075B, p-value=9.182e-13, raw score of 12.56
  DOMAIN (2)..(51): F-box domain identified by PFam, accession name F-box, E- value=0.031, PFam score of 20.9
  misc_feature (1)...(225): Xaa = X or * as defined in Table 2
NTVFGLVVLPLELKLRIFRLLDVRSVLSLSAVCRDLFTASNDPLLWRFLYLRDFRGDFRNDIYSWTTKDFEYYINLVDKTEARFEKVDSDFESFTVGKMPSNSIACTEKSFMKGRVSQCDKKPVITRLLQHGLLKPINSPYNSPILPVLKPDKPYKLVQDLHRINQIVLPIHPCGAQPHTLFCPQYLPPQLTIPVPDLKDAFFTIPLQPSSQPLFAFTXTDPDTH

SEQ ID NO: 37198 - protein, 154 aa, Homo sapiens
  misc_feature (1)...(154): Xaa = X or * as defined in Table 2
PRVLRPNSPRNISPISNRIFSDXRCPIASEASWTITDALGRLLQWRHGLLNPINSPYNSPILPVQKPDKPYRLVQALLSLPQLPLFLAWTSIWPPTLFRITLLNPMTVSLXSTXHSLHFPMFPSFLFLTLITLGLLMAVPLGLIATHQQRRAML

SEQ ID NO: 37199 - protein, 119 aa, Homo sapiens
  DOMAIN (70)..(81): RNase H domain identified by eMATRIX, accession number PF00075B, p-value=4.115e-09, raw score of 12.56
  misc_feature (1)...(119): Xaa = X or * as defined in Table 2
LSQWTDGLLKPMNSPYNSPILPVLKPDKPYKXVQDLRLINQIVLPIHPVVPNPYTLLSSIPPSTTHYSVLDLKLAFFTIPLHPSSQPFFAFTWTDPDTHQAQQITXAVLPQSFSDSPHE

SEQ ID NO: 37200 - protein, 64 aa, Homo sapiens
  misc_feature (1)...(64): Xaa = X or * as defined in Table 2
IHGCKFIQCKRILSNFTEVADHVHDQIRLXTGIRLLTQPQPRLSCRHQVAQHSVCRYLCQLPLL

SEQ ID NO: 37201 - protein, 480 aa, Homo sapiens
  DOMAIN (87)..(112): 7 kw REVERSE TRANSCRIPTASE RNA POLYMERASE domain identified by eMATRIX, accession number DM00895E, p-value=3.333e-11, raw score of 15.72
  DOMAIN (60)..(312): Reverse transcriptase domain identified by PFam, accession name rvt, E-value=1.8e-67, PFam score of 237.5
LNQEEGESLNRPITGSEIEAIINSLPTKKSPGPDGITAEFYQRYKEELVPFLVKLFQSTEKEGILPNSFYEASIILIPKPGRDTTKKENFRPISLMNIDAKILNKILANRIQQHIKKLIHNGQHINRTNDKSHIIISIDAEKTFGKIQQPFMLKTLNKLGIDGTYLKIIRAIYDKPTANIILTGQKLEAFPMKTGTREGCPLSPLLFNIVLEVLARAIRQEKEIKGIQLGKEEVKLSLFADDMIVYLENPIVSAQNLLRLISTFSKVSGYKINVQKSQAFLYTNNRQTESQILSELPFTIASKRIKYLGIQLTRDVKDLFKENYKALLNEIKEDINKWKNIPCSWVGRINIVKMAILPKVIYRFNAIPIKLPMTFFTELEKTTLKFIWNQKSARIAKSILSQKNKAGGIMLPDFKLYYKATVTKTAWYWYQNRDIDQWNTTEPSEIMLHIYNYLIFNKPEKNKKWGKDSLFNKWCWENWL

SEQ ID NO: 37202 - protein, 782 aa, Homo sapiens
  DOMAIN (136)..(182): kw TRANSCRIPTASE REVERSE II ORF2 domain identified by eMATRIX, accession number DM01354O, p-value=1.000e-40, raw score of 8.73
  DOMAIN (170)..(445): Reverse transcriptase domain identified by PFam, accession name rvt, E-value=2.2e-80, PFam score of 280.4
DKTSRGTIRQQRLRFTNIRCSAATAADIQANRVWRGPPANSNRPAARVLTVRRKTNKQKGHPHQKPICTSPSSNTKEIQTTIREYYKHLYANKLENAEERDKFLNIYTLPRLNQKEVESLNRPITGSEIEAIIKSLPTKKSPGPDGFTAKFYQRYKEELVPFLLKLFQSIEKEGILPNSFYEASIILIPKPGRDTTKKENFRPISLMNIDARILNKILANLIQQHIKKLIHHDQVGFIPGMQGWFNICKSINIIQHMNRTKDKNHMIISIDAEKPFDKIQQPFMLKTLNKLDIDGTYLKIVRAKYDKPTANIILNGQKLEAFPLKTGTRQGCPLSPLLFNIVLEVLAREIRQEKEIKGIQLGKEEVKLSLFVDDMIIYLENPIVSAQNLLKLISNFSKVSGYKISVQKSQAFLYTNNRQTESQTMSELPFTIASKRIKYLGIQLTRDVKDRFKENYKSLLSEIKEDTNKWKNIPCSWVGRINIVKMAILPKVIYRFNAIPIKLPMTFFTELEKTTLKFIRNQKRARIAKSILSQKNKAGGITLLDFKLYYKATVTKTAWYWYQNRHVDQWNRTEPSEIMLHIYNYLIFEKPDINKQWGKDSLFNKWCWENWLAICRKLKLDPFLTSYTKINSRWIKDLNVRPKTIKTLEENLGNTIQDIGMGKDFMSKTPKAMATKAKLDKWDLIKLKSFCTAKETTIRVNRQPTGWEKIFATYSSDKGLISRIYNEHKQIYKKKTNNPIKKWAKDMNGHFSKEDIYAANRHMKKCSSSLAIREMQMKTTMR

SEQ ID NO: 37203 - protein, 786 aa, Homo sapiens; identical to SEQ ID NO: 36620
  DOMAIN (686)..(741): kw TRANSCRIPTASE REVERSE II ORF2 domain identified by eMATRIX, accession number DM01354Q, p-value=1.000e-40, raw score of 9.23
  DOMAIN (641)..(784): Reverse transcriptase domain identified by PFam, accession name rvt, E-value=5.5e-05, PFam score of 1.2

SEQ ID NO: 37204 - protein, 480 aa, Homo sapiens
  DOMAIN (37)..(83): kw TRANSCRIPTASE REVERSE II ORF2 domain identified by eMATRIX, accession number DM01354O, p-value=1.000e-40, raw score of 8.73
  DOMAIN (72)..(344): Reverse transcriptase domain identified by PFam, accession name rvt, E-value=4.3e-14, PFam score of 60.3
MDKFLDTYTLPRLNQEEFESLNRQIAGSEIEAIINSLPTKKSPGPDGFTAEFYQRYKEELVPFLLKLFQSTEKEGMLPNSFYEASIILIPKPGRDTTKKENFRPISLMNIDAKILNKILANRIQQHIKKLIHHDQVGFIPGMQGWFNICKSINVIQLINRTKDKNHMIISIDAEKAFDKIQQPFMLKTLNKLAASKRIKYLGIQLRRDVKDLFKENYKPLLNEIKEDTYKWKNIPCSWVGRINIVKMAILPTVIYRFSAILIKLPMTFFTELEKTTLKFTWNQKRARIAKSILSQKNKAGGITLPDFKLYYKATVTKTAWYWYQNRNIDQWNRTEPSEIMPHIYNYLIYDKPDKIKQWGKDSLFNKWCWENWLAICRKPKLDPFLTPNTKINSRWIKDLNVRLITVKTLEENLGNTIQDIGMGKDFRSKTPKAMATKAKIDKWDLIKLKSFCTAKETTIRVNRQPTEWEKFLQSTHLTKG

SEQ ID NO: 37205 - protein, 821 aa, Homo sapiens
  DOMAIN (215)..(261): kw TRANSCRIPTASE REVERSE II ORF2 domain identified by eMATRIX, accession number DM01354O, p-value=1.000e-40, raw score of 8.73
  DOMAIN (249)..(524): Reverse transcriptase domain identified by PFam, accession name rvt, E-value=2.3e-82, PFam score of 287.1
KMGLAREWILRFLVLILQEIRSMRQKENKDIQDLNSALHQADLIDIYRTLHPKSTEYTFFSAPHCIRTYSKIDHTLGSKALLSKCKITEIITDSQTTVLSELRIKKLTQNRSATWKLNMLLNDYWVHNEMKAEIKMFFETNENKDTTYQNLWDTFKAVCRGKFIALNAHKRKQERSKIDTLMSQLKELEKQEQTHSKVSRRPIPSSEIEAIINSLPTKKSPGPDGFTAEFYQRYKEELVPFLLKLFQSIEKEGILPNSFYEASIILIPKPGRDTTEKENFRPISLMNIDAKILNKILANRIQQHIKKLLHHDQVGFIPGMQGWFNICKSINVIQHINRTSDKNHTIISIDAEKAFNKIQQLFMLKTLNKLGTNGMYLKIVRAIYDKPTANIILNGQKLEAFPLKTGTRQGCPLSPLLFNIVLEVLARAIRQEKEIQGIQLGKEEVKLSLFADDMIVYLENPIVSAQNLLKLISNFSKVSGYKINLQKSQAFLYTNNRQTESQIMSELPFTTASKRIKYLGIQLTRDVKDLFKENYKPLLNEIKEDTNKWRNIPCSWVGRINIVKMAILPKVTYRFNAIPIKLPMTFFTELEKTILKFRWNQKRAHIAKTILSQKNKAGGIRLPDFKLFYKATVTKTARYWYENRDIDQWNRTEPLEIMPHIYNHLIFDKPDKNKQWGKDSLFNKWCWENWLAICRKLKLDPFLTSYTKINSRWIEDLNVRPKTIETLEENLGNTIQDIGMGEDFMTETPKAMATKAQIDKWDLIKLKSLCTAKETTIRVNRQPTEWEKLFIVYPSDKGLISRIYKELKQIYKKKSNHPIEK

SEQ ID NO: 37206 - protein, 559 aa, Homo sapiens
  DOMAIN (514)..(539): 7 kw REVERSE TRANSCRIPTASE RNA POLYMERASE domain identified by eMATRIX, accession number DM00895E, p-value=4.889e-11, raw score of 15.72
  DOMAIN (40)..(226): AP endonuclease family 1 domain identified by PFam, accession name AP_endonucleas1, E-value=5.2e-05, PFam score of -40.6
MARELRDDCTSFSSRFDQLEERVSVTGDQMNEMKPEEKFREKRVKRNEQSLQEIWDYVKRPNLRLIGVPESDWENGTKLENTLQGIIQESFPNLARQANIHIQEIQRMPQRYTSRRATPRHIIVRFTKVEMKEKILRVAREKDRSTRQKVNKDIQELNSALHQADLIDIYRSLHPKSAEHTFFSAHHTYSKIDHTVGSKALLSKCKRTEIVTNCLSDHSAIKLELRIKKLTQNRSTTWKLNNLLLTDYWVHNKMKAEIKMFFETYENKDTTYQNLWDTFKAVCRGKFIALNAHKRMQERSKIDTLISQLKELEKQEQTHSKAGRRQEITKIRAELKEIEIQKTLQKINESRSWFFEKINKIDRLLATLIKKKREKNQIDAIKNDKADITTDPTEIQTTIREYYKHLYANKLENLEEMDKFLDTYTLPRLNQEEVESLNRPITGSEIEAIINSLPTKKSPGPDGFTAEFYQRYKEELVPLLPKLFQSIEKEGILPNSFYEASIILIPKPGRDTTKKNFRPISLMNIDAKILNKILANRIQQHIKKLIRHDQVGFISGMQG

SEQ ID NO: 37207 - protein, 800 aa, Homo sapiens
  DOMAIN (194)..(240): kw TRANSCRIPTASE REVERSE II ORF2 domain identified by eMATRIX, accession number DM01354O, p-value=1.000e-40, raw score of 8.73
  DOMAIN (228)..(503): Reverse transcriptase domain identified by PFam, accession name rvt, E-value=2.3e-82, PFam score of 287.1
SMRQKENKDIQDLNSALHQADLIDIYRTLHPKSTEYTFFSAPHCIRTYSKIDHTLGSKALLSKCKITEIITDSQTTVLSELRIKKLTQNRSATWKLNMLLNDYWVHNEMKAEIKMFFETNENKDTTYQNLWDTFKAVCRGKFIALNAHKRKQERSKIDTLMSQLKELEKQEQTHSKVSRRPIPSSEIEAIINSLPTKKSPGPDGFTAEFYQRYKEELVPFLLKLFQSIEKEGILPNSFYEASIILIPKPGRDTTEKENFRPISLMNIDAKILNKILANRIQQHIKKLLHHDQVGFIPGMQGWFNICKSINVIQHINRTSDKNHTIISIDAEKAFNKIQQLFMLKTLNKLGTNGMYLKIVRAIYDKPTANIILNGQKLEAFPLKTGTRQGCPLSPLLFNIVLEVLARAIRQEKEIQGIQLGKEEVKLSLFADDMIVYLENPIVSAQNLLKLISNFSKVSGYKINLQKSQAFLYTNNRQTESQIMSELPFTTASKRIKYLGIQLTRDVKDLFKENYKPLLNEIKEDTNKWRNIPCSWVGRINIVKMAILPKVTYRFNAIPIKLPMTFFTELEKTILKFRWNQKRAHIAKTILSQKNKAGGIRLPDFKLFYKATVTKTARYWYENRDIDQWNRTEPLEIMPHIYNHLIFDKPDKNKQWGKDSLFNKWCWENWLAICRKLKLDPFLTSYTKINSRWIEDLNVRPKTIETLEENLGNTIQDIGMGEDFMTETPKAMATKAQIDKWDLIKLKSLCTAKETTIRVNRQPTEWEKLFIVYPSDKGLISRIYKELKQIYKKKSNHPIEK

SEQ ID NO: 37208 - protein, 505 aa, Homo sapiens
  DOMAIN (280)..(305): 7 kw REVERSE TRANSCRIPTASE RNA POLYMERASE domain identified by eMATRIX, accession number DM00895E, p-value=9.111e-11, raw score of 15.72
  DOMAIN (251)..(498): Reverse transcriptase domain identified by PFam, accession name rvt, E-value=1e-64, PFam score of 228.4
MVREGFPEEVTFELKNELEISKGQQMGKNIPDTGASSAKALGERELGTLDKMKNSPSDGSKKDIRTHRKEAKNLEKRLDEWLTRINSVEKTLNDLMQLKTMARELHDACTSFNSQFDQVEERINKIDVRLARLIKKKREKNQIDAIKNDKGDISTDPTEIQTTIREYYKHLYANKLENLEEMDKFLDTYTLPRLNQEEFESLNRPIIGSEIEAVSNSLPTKKSPGPDGFTAEFYQRYKEELVPFLLKLFQSIEKEGILPNAFYEASIILIPKPGRDTTKKENFRPVSLMNIDAKILNKILANRIQQHIKKFIHHDQVSFIPRMQGWFNICKSINIIHHINRTNDKNHMIISIDAEKAFDRIQQPFMLNTLNKLGIDGMYLKIIRTIYDKPTANIILNGQKLEAFPLKTGTRQGCPLSPLLFNIVLEVLTRAVRQEKEIKGIQLENEEVKLSLFADDMIVYLENPIVSAQNLLKLISKFRKVSGYKINVQKSQAFLYSINRQRAKS

SEQ ID NO: 37209 - protein, 476 aa, Homo sapiens
  DOMAIN (143)..(188): kw TRANSCRIPTASE REVERSE II ORF2 domain identified by eMATRIX, accession number DM01354N, p-value=1.000e-40, raw score of 13.17
  DOMAIN (227)..(424): Reverse transcriptase domain identified by PFam, accession name rvt, E-value=3e-11, PFam score of 50.8
MFFETNENKDTTYQNLWGTFKAVCRGKFIALNAHKRKQERSKIDTLTSQLKELEKQEQTHSKASRRQEITKIKAELKKIETQKTLQKINESRSWFFEKINKIDRLLARLIKKKREKNQIDAIKNVKGDITTYPTEIQTNIREYYKHLYANKLENLEEMDKFLDTYTLPRLNQEEVQSLNRPITGAEIEAIINSLPTKKSPGPDGFTAEFYQRYKEELLPSLLKLFQSIEIEGILPNSFYEASSIMIPKPGRDTTKKENFRPISLMNIDAKILNKILANRIQQHIKKLIHHDEVGFIPGMQGWFNIRKSINVIQHINRTNDKNHMIISIDEEKAFDKIQQHFILKTLNKLSIDGTYLKIVRENKYLGIQLTRDVKDLFKENYKPLLNEIKEDTNKWKNIPCSWEGRINIVKMAILPKVIFTTVNVRSTGVDLILKSIMVTVQRTCSLPSHAERASRKQLLYEVKFIALILQKETLRF

SEQ ID NO: 37210 - protein, 590 aa, Homo sapiens
  DOMAIN (441)..(487): kw TRANSCRIPTASE REVERSE II ORF2 domain identified by eMATRIX, accession number DM01354O, p-value=1.000e-40, raw score of 8.73
  DOMAIN (22)..(240): AP endonuclease family 1 domain identified by PFam, accession name AP_endonucleas1, E-value=4.6e-42, PFam score of 153.2
  misc_feature (1)...(590): Xaa = X or * as defined in Table 2
NYQCREVLKGPDGAENHGTRTTXRMHKLSSQFSQLEERVSGMEDQTNETKDTHRLKIKGWRKIYQANGKQKKAEAAILVLDKTDFKPTKIKGDKQGHYIMVKGSIQQGQLTILNIYAPNTGASRLIKQVLRDLQRDLDSHTIIMGDFNTRLSTLDRSTRQRLNKDIQELNSALHQVDLIDIYRILHTKSTEYTFFSAPHHTYSKIDHTVGSKALLSKGKRTEIITNRLSDHSAIKLELRIKELTQNRSTTWKLNNLLLNDYWNLWDTFKAVCRGKFIALNIQKRKQERSKIDTLTSQFKELEKQEQTHSKASRRQEITKIRAELKERETQKSLQKISESRSWFFEKINNIDTPLARLIKKKREKNQIDTIKNDKGDITTDPTEIQTTIRQYYKHLYANKQENLEEMNKFLDTYTLPRLNWEEAESLNRPITGSEFEAIINSLPIKKSPGPDGFTAKFYQSYKEELVPFLLKLFQSIEKEGILPNSFYEASIILIPKPGRDTTKKDNFRPISLMNIDAKILNKILANKIQQHSKKLIHHNQVGFIPGMQGWFNTCKSINIIQHINRTKDKNHMIISIDAEKAFDKIQQPSC

SEQ ID NO: 37211 - protein, 599 aa, Homo sapiens; identical to SEQ ID NO: 36635
  DOMAIN (112)..(153): kw TRANSCRIPTASE REVERSE II ORF2 domain identified by eMATRIX, accession number DM01354I, p-value=1.000e-40, raw score of 15.55
  DOMAIN (318)..(499): Reverse transcriptase domain identified by PFam, accession name rvt, E-value=7.3e-26, PFam score of 99.3

SEQ ID NO: 37212 - protein, 626 aa, Homo sapiens
  DOMAIN (255)..(280): 7 kw REVERSE TRANSCRIPTASE RNA POLYMERASE domain identified by eMATRIX, accession number DM00895E, p-value=3.444e-11, raw score of 15.72
  DOMAIN (225)..(501): Reverse transcriptase domain identified by PFam, accession name rvt, E-value=2.1e-81, PFam score of 283.8
APNTGAPRFIKQVLSDLQRDLDSHTIIMGDFNTPLSTLDRSMRQKVNKDIQELNSALHQADLIDIYRTLHPKSTEYTFFSATHHTYSKIDHIVGSKALLSKCKRTEIITNCLSDHSAIKLELRIKKLTENRSTTWKLNNLLLNDYWVHNEMKAEIKMVFETNDTLPRLNQEEVESLNRPKTGSEIEAIINSLPTKKSPGPDGFTAEFYQRYKEELVPFLLKLFQSIEKERILPNSFYEASIILIPKPGRDTTKKEENFRPISLMNIDAKILNKILANRIQQHIKKLIHHDQLGFIPGMQGWFNICKSMNVIQHINSPKDKNHMIISVDAEKAFDKIQQPFMLKTLNKLGIDGTYLKIIRAIYDKPTASIILNGQKLEAFTLKTGTRQGCPLSPLLFNIVLEVLARAIRQEKEIKGIQLGKEEVKLSLFADDMIVYLENPIISAQNLLKLIGNFSKVSGYTINVQKSQAFLYTNNRQTESQIMSELPFTIASKRIKYLGIQLTRDVKDFFKENYKPLLNEIKEDKNKWKNIPCSWVGRINIVKMAIPPKVIYRFNAIPIKLPMTFFGMIFLSQKYGHVTLLFRLLQWLLNVARNNNKVFYKIYKVGHKLSSAYVLCLTCSHFSVSFL

SEQ ID NO: 37213 - protein, 497 aa, Homo sapiens
  DOMAIN (404)..(450): kw TRANSCRIPTASE REVERSE II ORF2 domain identified by eMATRIX, accession number DM01354O, p-value=1.000e-40, raw score of 8.73
MEQDEVYKEMSINHKNEGTRVEKPNRYRIIHIQPDAINHVSRKKDVPSASGAGHSRSSTGSRPGVRRLWPLLLRSAPSGPLNNAVPAPGKGPGRWGGSPSLSRSGGKASTRVAPGLSAHSQAASGVPEPAEPQHQRTKASGSRRRSLRVVPEAPKPRTRTAREGKGAGAGHTGGAQEQRRRRRWACRGLRGRPGAVSPGGAEAINQLASEHCGNPAAALHRCIASLPRNLLVWAGRMLMPKKNRIAIYELLFKEEVTVVKKDVHMPKHLELADKNSRGYYVKEQFAWRHVYWYLTNEDIQYLRDYLHLPLEIVPATLRRSRPGTGRPRSKGLEAFPVLFSNGICDSHHPKPNKRRKERPSLSIGQRIWRIKEERLAEVVSEENRRLSGSRPITGSEIEAIINSLPTKKSPRPDGFTAEFYQRYKEELVPFIPKLFQSIEKEGILPNSFYEASIILIPKPGRDTTKKENFRSISLMNIDAKILNKILANEIQLLLDPP

SEQ ID NO: 37214 - protein, 2211 aa, Homo sapiens
  DOMAIN (333)..(372): PROTEIN ZINC FINGER ZINC-FINGER METAL-BINDING NU domain identified by eMATRIX, accession number PD01066, p-value=1.247e-17, raw score of 19.43
  DOMAIN (459)..(908): Zinc finger, C2H2 type domain identified by PFam, accession name zf-C2H2, E-value=4.8e-75, PFam score of 262.7
MTPESRDTTDLSPGGTQEMEGIVIVKVEEEDEEDHFQKERNKVESSPQVLSRSTTMNERALLSSYLVAYRVAKEKMAHTAAEKIILPACMDMVRTIFDDKSADKLRTIPLSDNTISRRICTIAKHLEAMLITRLQSGIDFAIQLDESTDIASCPTLLVYVRYIPLKLRLGGLLQPEKPIVLKVESRDGTIQYNSQQHINLSAAWLKTAVQGREAPGKQPSKQQHSAKRKTHRTQLKKESGDGPHPKFGGGNLASPGCQPGAPLSRYFTYRGSELTAFWLTTLKKMSVPGTVLLRYGTRTHGLFKRLGIPGPTPLPLLGNVLSYRQKLVKIEEVADVAVSFILEEWGHLDQSQKSLYRDDRKENYGSITSMGYESRDNMELIVKQISDDSESHWVAPEHTERSVPQDPDFAEVSDLKGMVQRWQVNPTVGKSRQNPSQKRDLDAITDISPKQSTHGERGHRCSDCGKFFLQASNFIQHRRIHTGEKPFKCGECGKSYNQRVHLTQHQRVHTGEKPYKCQVCGKAFRVSSHLVQHHSVHSGERPYGCNECGKNFGRHSHLIEHLKRHFREKSQRCSDKRSKNTKLSVKKKISEYSEADMELSGKTQRNVSQVQDFGEGCEFQGKLDRKQGIPMKEILGQPSSKRMNYSEVPYVHKKSSTGERPHKCNECGKSFIQSAHLIQHQRIHTGEKPFRCEECGKSYNQRVHLTQHQRVHTGEKPYTCPLCGKAFRVRSHLVQHQSVHSGERPFKCNECGKGFGRRSHLAGHLRLHSREKSHQCRECGEIFFQYVSLIEHQVLHMGQKNEKNGICEEAYSWNLTVIEDKKIELQEQPYQCDICGKAFGYSSDLIQHYRTHTAEKPYQCDICRENVGQCSHTKQHQKIYSSTKSHQCHECGRGFTLKSHLNQHQRIHTDRDCGRGRGTSNQWRSVKGRLGLFRHLPDRGGRAEDLEEKRPAPSTSLNSFLQLPVKDSRPDFIGRNCFQPQLEGLWKFDTECYKKYGKMWGTYEGQLPVLAITDPDVIRTVLVKECYSVFTNRRMFPIIAQYGDVLVRNLRREAEKGKPVTLKDIFGAYSMDVITGTSFGVNIDSLNNPQDPFVESTKKFLKFGFLDPLFLSIILFPFLTPVFEALNVSLFPKDTINFLSKSVNRMKKSRLNDKQKRPAEGCLQVRETGPGNPAVTEDYIEFENVGIFENAPPKKLLMSSGNVRRLIYTDTAEEKALSDLELAAQSIIFIFAGYETTSSVLSFTLYELATHPDVQQKLQKEIDAVLPNKERSSAPATESWMENDFDELREEGFRRSNYSELKEEVRTHGKEVKNLEKRLDKWLTRIINAEKSLKDLMELKTMARELRDECTSLSSQFNQLEERVSVMEDQMNEMKKEEKFRRKRIKRKEQSLQEIWDYVKRPNLRLIGVPESDGENRTKLENTLQDIIQENFPNLARQANIQIQEIQRTPQRYSSRRATPRHIIVRFTKVEMKEKMLRAAREKEIQTTIREYYKHLYANKLENLEEMDKFLDTYTLPRLNQEEVETLNRPITGSEIEAIINSLPTKKSPGPDGFTAEFYQRYKEDLVPFFLKLFQSIEKEGILPNSFYEASIILIPKPGRDTTKKENFRPISLMNSDTKILNKILANRIQQHIKKLIHHDQVGFIPGMQGWFNIRKSINIIQHINRTNDKTHMIISIDAEKAFNKIQQPFMLKTLNKLVLEVLARAIRQEKEIKGIQLGKEEVKLSLFADDMIVYLENPIVSAQNLLKLINNFSKVSGYKINVQKSQIFLYTNNRQTESQIMSELPFTIASKTIKYLGIQLTRDVKDLFKENYKPLLNEIKEDTNKWNNIPCSWVGRINIMKMAILPKVIYRFSAIAIKLPMTFFTELEKTTLKFIWNQKRARIAKSILSQKNKAGGIMLPDFKLYYKATVTKTAWYWYQNRDIDQWSRTEPSEVMPHIYNYLIFDKLDKNKKWGKDSLFNKWCWENWLAICRKLKLDPFLTPYTKINSRWIKYLNVRPKTRKTLEENLGNTIQDIGMGKDFMSETPKAMATKAKIDKWDLIKLKSFCTAKETIIRVNRQPTEWEKIFATYSSDKGLISRIYNELQQIYKKKTNNPIKKWAKDMNRHFLKEDTYAAKKHVKKRSSSLAIREMQIKSTMRYHLTPVRMVIIKKSGNDRCWRGYGEIGTLLHCWWDCQLVQPLWKSVWRFLRDLELEIPFDLAIPLLDIYPKH

SEQ ID NO: 37215 - protein, 1014 aa, Homo sapiens
  DOMAIN (380)..(421): kw TRANSCRIPTASE REVERSE II ORF2 domain identified by eMATRIX, accession number DM01354I, p-value=1.000e-40, raw score of 15.55
  DOMAIN (626)..(901): Reverse transcriptase domain identified by PFam, accession name rvt, E-value=1.1e-83, PFam score of 291.4
MGKKQSRKTGNSKNQSASPPPKERSSSPAMEQSWMENDFDDLREEGFRQSNYSELKEEVRTHGKEVKNLEKKLDEWLTRITNAEKSLKDLMELKTTARELHDECTSLKRVSVTEDQMNEMKREEKFREKRIKRNEQSLQEIWDYVKRPNLHLIGVPESDRENGTKLENTLQDIIQENFPNLVRQANIQIQEIQRTPQRYSSRRATPRHIIVRFTKVEMKEKMLRAAREKGRVTHKGKPIRLTADLLAETLQARREWGPIFNILKEKNFQPRISYPAKLSFIDRSTRQKVNKDTQELNSALHQADLIDIYRTLHPKSTEYTFFSAPHHTYSKIDHIVGSKALLSKCKRTEIITNCLSDHSAIKLELRIKKLTRNHSTTWKLNNLLLNDYWVHNEMKAEIKMFFETNENKDKTYQNLWDTFKTVCRGKFIALNAHKRKQERSKIDTLTSQLKGLEKQEQTHSKASRRQEITKIRAELKEIETQKTLQKINESRSWFFEKINKIDRPLARLIKNKREENQIDAIKNDKGDITTDPTEIQTAISEYYKHLYANKLENLEEMDKFLDTYTLPRLNQEEVESLNRPITGSEIEAIINSLPTKKSPGPDGFMAEFYQRDKEELVPFLLKLFQSIEKEGILPNSFYEASIMLIPKPGRDTTKKENFRPISLMNIDAKILNKILANRIQQHIKKLIHHDQVGFIPGMQGWFNLRKSLNVIQHINRTNDKNHMIISIDAEKAFDKIQQPFMLKTLNKLGIDGMYLKIIRAIYDRPTANIILNGQKLEAFPLKTGTRQGCPLSPLLFNIVLEVLARAIRQEKEIKGIQLGKEEVKLSLFADDMTVYLENAIVSAPNLLKLIGNFSKVSGYKINVQKSQAFLYTNNRQTESQIMSELPFRIASKRIKYLGIQLTRDVKDLFKQNYKPLLNEIKEDTNKWKNIPCSWVGRINIVKMAILPKGTQRPYAKVRVQLNSGEELHFLGLLDTSTQVTVIPTNPCIKMRRKQIVFSDFGLLLTSVVMAPTTE

SEQ ID NO: 37216 - protein, 919 aa, Homo sapiens
  DOMAIN (202)..(248): kw TRANSCRIPTASE REVERSE II ORF2 domain identified by eMATRIX, accession number DM01354O, p-value=1.000e-40, raw score of 8.73
  DOMAIN (235)..(518): Reverse transcriptase domain identified by PFam, accession name rvt, E-value=1.1e-57, PFam score of 205.0
MARELHDKCTSFSSRFDQLEESLSAMEDQMNEMMREEKFREKRRKRNEQSLQEIWDYVKRPNLHLIGVPESDRENGPKLENTLQDIIQENFPNLARQGNIQIQEIQRMPQRYSSRRATPRHIIVRFTKVEMKEKMLRAAREKEIQTTIREYYKHFYANELENLEEMDKFFETYTLPRLNQEEVESLNRPITGSAIEAIINSLPTKKSPGPDGFTAEFYQRYKEELVPFLLKLFQSIEKEGILPNSFHEASIILIPKPGRDTTKKENFIPISLMNIDAKILNKILANRIQQHIKKLIHHDQVSFIPGMQGSFNIHKSINVIQHINGTKDKNHMVISIDAGKGPFDKIQQPFMLKTLNKLVIDGTYLKIIRAIYDKPTANIILNGQKLEAFPLKTGTRQGCPLSPLLFNIVLEVLARAIRQEKEIKGIQLGNEEVNLSLFADDKIVYLENPIVSAQNLLKLISNFSKVSGYKINVQNSQAFLYTNNRQTESQIMSELPFTIASKRIKYLGIQLTRDVKDLFKENYIPLLNEIKEDTKKWKNIPWSWVGRINIMKMAILPKVIYRFNAIPIKLPMTFFTELEKSTLKFIWNQKRARIAKSILSQKNKAGGITLPDFKLYYKATVTKTAWYWYQNRDIDQWNRTEPSEITLHVYNYLIFDKPDKNKQWGKDSLFNKWYWENWLAICRKLKLDPFLTPYTKINSRWLKDLNVRPKTIKTLEENLGITIQDIGMGKDFMSKTPKAMATKAKIDKWDLIKLKSFCTAKETTIRVNRQPTIWEKIFATYSSDKGLISRIYNELKQIYKKKSNNPIKKWVKDMNRHFSKEDIYAAKKHMKKCSSSLAIREMQIKTTMRYHLTPVRMAIIKKSGNDRCWRGCGEIGTLLHCWWDCKLVQPLWKSLCQAGSRIFFVSEVEAVEVTSAIGQ

SEQ ID NO: 37217 - protein, 958 aa, Homo sapiens
  DOMAIN (488)..(529): kw TRANSCRIPTASE REVERSE II ORF2 domain identified by eMATRIX, accession number DM01354I, p-value=1.000e-40, raw score of 15.55
  DOMAIN (244)..(791): Reverse transcriptase domain identified by PFam, accession name rvt, E-value=3.8e-38, PFam score of 140.1
MQLEIRECTDCLLKWPPLLILRQTGSGVDLQQTPTDLQLRVLTVRRKTNKQKRHPHQNPICTSPSSKTKELEKQEQTHSKASRRQEITKIRAELKDIETQKTLQKIHESRSWFSEKINKIDRPLARLIKKKEKNQIDAIQNDKGDITTDPTEIQTTIREYYKHLYANKLENLEEMDTFFDTYTLPSLNQEEVESLNRPTTGSEIEAIINSLPTKKSPGPDGFTAEFYQRYKEELVPFLLKLFQSIEKEGILPNTFYEASIILILKPGRDTTKKENFRPISLMNIDAKILNKILAKQIQQHIKKLIDHDQVDFIPGMQGSFNTCKSINVIQHINRIKDKNHMIISIDAEKAFDKIQQVFLLKTLSKLASASDTPANRVRGGPLADSNRSADRSTRQMVNKDIQDLNSALHQADLIDIYRTLHPKSTEYTFFSAPHHTYSKIDHIVGSKALLSKCKRTEITTNCLSDNSAIKLEPRIKKLIQNRTTTWKLNNLLLNDYWVNNEVKAEIKMFFETNENKDTTYQNLWDTFKAVCRGKFIALNAHKRKQERSKIDTLTSQLKELEKQEQTHSKASRRQEITKIRAGLKEIETQKNLQKINESRSWFLMNIDAKILNKILANRIQQHIQKLIHHDQVGFIPGMQGWFNIRKSINIIQHINRTNDKNHMIISIDEEKAFDKIQQRFMLKTLNELVLEVLARAIRQEKEIKGIQLGKEEVKLSLFADDMIVYLENPIVSPQNLLKLIGNFSKVSGYKINVQKSQAFLYTNNRQTESQIMSELPFTIASKRIKYLGIQLTRDVKDLFKENYKPLLKEIKEDTNKWKNIPCSWVGRINIVKMAILPKLIYGFNAIPIKLPMTFFTELEKTTLKFIWNQKRAPIAKTIPCQKNKAGGITLPDFKLYYKATVTKTAWYWYQNRDIDQWNRTEASEIMPHIYNYLIFDKPDKNKKWGRIPYLINGAGKTG

SEQ ID NO: 37218 - protein, 51 aa, Homo sapiens
VWQAQSPGADEGNHGDTGIPSLGKVPVENVSRQTCSFHVGLGDFERLAWAS

SEQ ID NO: 37219 - protein, 181 aa, Homo sapiens
  DOMAIN (101)..(127): Ribonucleotide reductase small subunit proteins domain identified by eMATRIX, accession number BL00368B, p-value=7.750e- 22, raw score of 22.06
  DOMAIN (44)..(163): Ribonucleotide reductases domain identified by PFam, accession name ribonuc_red, E-value=2.7e-70, PFam score of 206.5
ESPRAGCCRSWRWPEELSSLSARIFGGVCAMGDPERPEAAGLDQDEVDLSKDLPHWNKLKADEKYFISHILAFFAASDGIVNENLVERFSQEVQVPEARCFYGFQILIENVHSEMYSLLIDTYIRDPKKREFLFNAIETMPYVKKKADWALRWIADRKSTFGLLGLWISQGLLDHTEEPVI

SEQ ID NO: 37220 - protein, 100 aa, Homo sapiens
RRCKVRPSARGVLRYAVCVCVCVCVYPCVHVCTCVRMCLCVCVCVCECSVEIHCGGQGCARCICLQPQEGGCTEQAVALHCAAQLWRNRLKLMKQPVARV

SEQ ID NO: 37221 - protein, 246 aa, Homo sapiens
  DOMAIN (31)..(157): PH domain identified by PFam, accession name PH, E-value=1.6e -09, PFam score of 39.0
KMERTEMIFSINSQLEFKRKPFPLGSSSRRLVKRGELTAYVEDTVLFSRRTSKQQVYFFLFNDVLIITKKKSEESYNVNDYSLRDQLLVESCDNEELNSSPGKNSSTMLYSRQSSASHLFTLTVLSNHANEKVEMLLGAETQSERARWITALGHSSGKPPADRTSLTQVEIVRSFTAKQPDELSLQVADVVLIYQRVSDGWYEGERLRDGERGWFPMECAKEITCQATIDKNVERMGRLLGLETNV

SEQ ID NO: 37222 - protein, 189 aa, Homo sapiens
  DOMAIN (81)..(122): PH domain identified by PFam, accession name PH, E-value= 0.029, PFam score of 13.2
MQDKALPIFSSRLLKQKEGVSFGAPAVLASTHLAATAGVSLVRLCNEGARKMERTEMMYTINSQLEFKIKPFPLVSSSRWLVKRGELTAYVEDTVLFSRRTSKQQVYFFLFNDVLIITKKKSFLQLLYQSATNKCYWGGMSEPLNSSEGFNARQSRRGSWRVSPKKNDLEMSQKALEDRVSGFTVAQCH

SEQ ID NO: 37223 - protein, 472 aa, Homo sapiens
MIETVSYECGEVVGSSYYVSDCSVSYGSTDAHQYSAARVWCVSVVDEERWESTWRRCRLLVIGSLESKCKSGEKKVDALLKEKRRLEAELETVSRKTHDASGQLVLISQELLRKERQGLTQLPKLGVQWYDQSSLQPQSSKLQLTTVAEKSRVLQLEEELTLRRGEIEELQQCLLHSGPPLRDHPDAAEILRLRERLLSASKEHQRESGVLRDKYEKALKAYQAEVDKLRAANEKYAQEVAGLKDKVQQATSENMGLMDNWKSKLDSLASDHQKSLEDLKATLNSGPGAQQKEIGELKAVMEGIKMEHQLELGNLQAKHDLETAMHVKEKEALREKLQEAQEELAGLQRHWRAQLEVQASQHRLELQEAQDQRRDAELRVHELEKLDVEYRGQAQAIEFLKEQISLAEKKMLDYERLQRAEAQGKQEVESLREKLLVAENRLQAVEALCSSQHTHMIESNDFSEETIRTLVQ

SEQ ID NO: 37224 - protein, 421 aa, Homo sapiens
TYTVPGLHTGKEETITNETRSLPSIRRLQLEAPLSSWELQNIKAGSGESVSARGSLFVDINNRLKVMSPILSEEAEATQTDNERGRLSQPQVHSSLLNFPVSWKRGGSSKEMKTEDPGLMVWGKGEELTGQDYPEDTTLCPNPMKHFTLFSSPDRVETVATYRLKTCLPYTVACPCTDQASPSTDRDGILMFIPGSYTKRDDPSLSVDFFWSHMTPGAAAQEEPVDKCRQYSEDIEGTRVINTIVQPACHVETAHCVQKRPVARLAWNLQHLPTQQQAALDDQVSQKVKKTTEATLQTIQDMVTIEDYDVSECFQHSRSTESVKSTVSETYLSKPSIAKRRANQQETEQFYFMKLREYLEGSNLITKLQAKHDLLQRTLGEAKQMSYGLGAHGEFPEESYIPGIAQWTPCCLRSTEPEGDN

SEQ ID NO: 37225 - protein, 183 aa, Homo sapiens
  DOMAIN (137)..(157): FORMIN SIGNATURE domain identified by eMATRIX, accession number PR00828A, p-value=3.200e-23, raw score of 11.86
NALPGRKSRVFSGCVSADTWKPPSSAKVTETKGASPAFLRAGQPRLVPGETLEKSLGPGKDPQVEPQHPVHLPGISSEGFPWDGFNEQTPKDLPNRDGGAWVLGYRAGPACPFLLHEEREKSNRSELYLDLHPDHSLTEQDDRTPGRLQAVWPPPKTKDTEEKVGLKYTEAEYQAAILHLKRE

SEQ ID NO: 37226 - protein, 187 aa, Homo sapiens
MHNDSVPRNEDEQGTVPALENTHISDLAQMTLFRNCISSEGFPWDGFNEQTPKDLPNRDGGAWVLGYRAGPACPFLLHEEREKSNRSELYLDLHVEARCCLHFKDVENEYNEDADQEEGLRLVSGLLDMNSNNFSEVIKQDECCHVFVTQGPHVEHCALDSWCSTSEPASMATSVLSSVTPSRRSYS

SEQ ID NO: 37227 - protein, 374 aa, Homo sapiens
  misc_feature (1)...(374): Xaa = X or * as defined in Table 2
RRLCHTQPTLGMRERSELVNVCVHSVFSLPSVQAMQEKDEAKAETIQALYHQTLEALQTLLKALFIEDPTPAGLKSILEALGPWMNSGKAHERARAVNTNVSVLNHMLLTLPFFMPLGFPALGLLLGRLILHIGDPDEEIGCEALDGIIILYTILELQKRARDKEETNKKELYESNKHFLGPYNPVSPCQNILRVIEEFGDFLGPQQIKDLLLAALEGLKGSSEAPGKDSREMMQLASEVMLSSVLEWYRHRALEVIPEIMQGIYMQLSHIQEPRARQVALLPVSLLASSFMTEVVVALLMCPLPLNRQPAACASSCPSTAAWAVXGASTLSCSWPCSFRSITTSASTCLAAWLLPRTPRRVHSPLPSYLCAGW

SEQ ID NO: 37228 - protein, 242 aa, Homo sapiens
RHELNPFIRHRSREGLVLGHCISRPSSKALLIPTSNSSLDLDSNPLLNMGSRNTSKLNLNVAPDSHGTLIPDTNETITLASHNISESVSKGAFSTTWSTSSKETMNVASSGHSRSDLSVTITQASYVTLIPGSSYGISLHSSTHGPNSTISPPSCMTLILGSNETLSLDSSLLFSDTSTLTLSSQQDDAKDNSIHTVPLEENLESWSEMASIKVGQFPLGFPISNPAGKDAVTLQGIPEGLK

SEQ ID NO: 37229 - protein, 405 aa, Homo sapiens
ERKCMQGKYAGAMESEPCVCTEADFDCDYGYERHSNGQCLPAFWFNPSSLSKDCSLGQSYLNSTGYRKVVSNNCTDGVREQYTAKPQKCPGKAPRGLRVVTADGKLTAEQGHNVTLMVQLEEGDVQRTLIQVDFGDGIAVSYVNLSSMEDGIKHVYQNVGIFRVTVQALVRLPPHISQCDEVFRFFEARPEDVNPPKDQALLLGELGPAVELCLKEERFADAIILAQAGGTDLLKQTQERYLAKKKTKISSLLACVVQKNWKDVVCTCSLKNWREALALLLTYSGTEKFPELCDMLGTRMEQEGSRALTSEARLCYVCSGSVERLVECWAKCHQALSPMALQDMHVISTDENQVFAAVQEWNQNDTYNLYISDTRGVYFTLALENVQSSRGPEGNIMIDLYEVTI

SEQ ID NO: 37230 - protein, 553 aa, Homo sapiens
  DOMAIN (222)..(352): BNR repeat domain identified by PFam, accession name BNR, E- value=0.0014, PFam score of 25.3
MPEKGDEEGRIEDSNLILEVASPGLDRLKHLRAIPIFGNGSGVKEDDSHYLTCRMQNCTEANRNQPFPGYIDPDSLIVQDHYVFVQCNTIKLEFSAQRLARASYSLVFMIQLTSGGRPHYYVSYRRNAFAQMKLPKYALPKDMHVISTDENQVFAAVQEWNQNDTYNLYISDTRGVYFTLALENVQSSRGPEGNIMIDLYEVAGIKGMFLANKKIDNQVKTFITYNKGRDWRLLQAPDTDLRGDPVHCLLPYCSLHLHLKVSENPYTSGIIASKDTAPSIIVASGNIGSELSDTDISMFVSSDAGNTWRQIFEEEHSVLYLDQGGVLVAMKHTSLPIRHLWLSFDEGRSWSKYSFTSIPLFVDGVLGEPGEETLIMTVFGHFSHRSEWQLVKVDYKSIFDRRCAEEDYRPWQLHSQGEACIMGAKRIYKKRKSERKCMQGKYAGAMESEPCVCTEADFDCDYGYERHSNGQCLPAFWFNPSSLSKDCSLGQSYLNSTGPKASRPETQEEPIFRFKTEGRKRGQCSNMNAIRQKEFSLTLGTVNLLNSGLQLIG

SEQ ID NO: 37231 - protein, 95 aa, Homo sapiens
KPRLENYVKNAEASGADAINWKKGYLVMEDEMNEMKREGKFREKRIKRNEQSLQEIWDYVKDQIYVRLVYLKVTGRMEPSWKTLCRILSRRTSPI

SEQ ID NO: 37232 - protein, 313 aa, Homo sapiens
MTVCNLKVEKKELTKEVEISGWRSIERTSEVYHIINAKRRECFTEEFINRRKGKRKLSPTSKKKKRKKERKKERLKTGFMISTNIMKALRDNGLSVTESETYRFGSNLIHKMLECFLVFSTELDTDEKLGWRRSQDGQTGTALVYSSQRERRRRRVISAFPSEGTDKQKDSSNFCRLKCPCLTALKRAVVLPARRWRSENGQTASSRTQFLTSKGTSWMENDFDELREEVFRRSNYSELREDIQTKGKEVENFEKNLEECITRITNTEKCLKELMELKTKARELREECRSLRSQCDQLEERVSAMEDEMNEMK

SEQ ID NO: 37233 - protein, 57 aa, Homo sapiens
  misc_feature (1)...(57): Xaa = X or * as defined in Table 2
QVFSQLEGRIALGKFQRPSSLPTGKWTQRCWWGAQWEXDXLFGLHGWWVRPVIAGFP

SEQ ID NO: 37234 - protein, 46 aa, Homo sapiens
WKKTEWDICSKGCWWVLHVGPHSSCLLSQPLWQLGPSLFEEEDCDI

SEQ ID NO: 37235 - protein, 56 aa, Homo sapiens
MRLLPNRYVSDSVTLNPLSLSAFMMFVLIMKPVFNLSFFLSFFLFFFFEVGLSFLF

SEQ ID NO: 37236 - protein, 85 aa, Homo sapiens
LIPCPATVNNVSDIMGMYMKECSASLITREMQIRTTIMRHHLTSIGTEMIRKSKNNECWSGRECQTVGAGQCVRAPCASRSRARH

SEQ ID NO: 37237 - protein, 130 aa, Homo sapiens
WLLVDLCSVSSSDSELSSSARVGALRSFFRCAGTCCEVLNPFSFVCDVKPPFTIDDSTRFFVDSGVVTSNLLRLISSGDTGRSFLSALISSNILSWEAPWPWWELVSVFWAETGILKGGLDLMKSEGWIS

SEQ ID NO: 37238 - protein, 173 aa, Homo sapiens
  misc_feature (1)...(173): Xaa = X or * as defined in Table 2
XTTDFHEPRMLLSDRSSGSFVSEEYLAIPSEKRSIRVGVARFSRKGNSRTPCASRVMRCHALLRLAHGALHPLSCTYCLALPSEMNPVSQMEMQKSPVFCVAHTGSCRPELFLFGHLGSSHFFLYKTVGHMEAYTLSEKGINQIFCPLAQGDEEEVCLPWPGKSPISIYATLQ

SEQ ID NO: 37239 - protein, 60 aa, Homo sapiens
  misc_feature (1)...(60): Xaa = X or * as defined in Table 2
TQYLRWKCRNHRLLRRSCWELXTRAVPIRPSWLQNRYQGTSRFCVCFEESSGTPSTQLEI

SEQ ID NO: 37240 - protein, 122 aa, Homo sapiens
  misc_feature (1)...(122): Xaa = X or * as defined in Table 2
FVLHEKCLGPFIWTGNTNVEMVKKICAPTXTKHVVWXLESXMWEEPRWPNGKAPVYSSQREQRRRRVISAFPSEGVLPSTFKNKKFTVKQPQVGRSVGIPEEGIVIIGDGQLQGCLLPLKTF

SEQ ID NO: 37241 - protein, 65 aa, Homo sapiens
  misc_feature (1)...(65): Xaa = X or * as defined in Table 2
LKEMQINTTMRYHSTPSRTSXIKKTDNNKFWMRMTEKLETSYCWWECETMQPRWKVSLQYLLPLI

SEQ ID NO: 37242 - protein, 688 aa, Homo sapiens
  DOMAIN (49)..(136): ADP-ribosyl cyclase domain identified by PFam, accession name Rib_hydrolayse, E-value=1.2e-68, PFam score of 219.7
MALASAWLLGHPQGAFTRGRVSLSAVSLIHGQPQSENIKWNIPELNNSHVDCQSVWDAFKGAFISKHPCNITEEDYQPLMKLGTQTVPCNKILLWSRIKDLAHQFTQVQRDMFTLEDTLLGYLADDLTWCGEFNTSSEALGPVGLPRDVEGFPDILKDSDVVIYVVSAVGGPASLVMLWVLYTLMERLMPGSHHKRAGIDYKQKEYSIFLQEYLQPEKAMSILQQLDRKTERMNEGATVKAILRRRSQDGRIGTAPVYSSQRERRRRRVISAFPSEGTDKQKDSSNLCRLKCPCLTALKRAVVLPARSWRSENGQTASSKGKLTTRKDIYTENPSVHHHHQRPKVDKTTKMGKKQNRKTGNSKTQSASPPPKERSSSPATEQSWMENDFDELREEGFRRSNYSELREDIQTKGKEVENFEKNLEECITRITNTEKCLKELMELKTKARELHEECRSLRSRCDQLEERVSAMEDEMNEMKREGKFREKRIKRNEQSLQEIWDYVKRPNLRLIGVPESDVENGTKLENTLQDIIQENFPNLARQANVQIQEIQRTPQRYSSRRATPRHIIVRFTKVEMKEKMLRAAREKGQVTLKGKPIRLTADLSAETLQARREWGPIFNILKEKNFQPKISYPAKLSFISEGEIKYFIDKQMLRDFVTTRPALKELLKEELNMERNNRYQPLQNHAKM

SEQ ID NO: 37243 - protein, 219 aa, Homo sapiens
  DOMAIN (138)..(183): kw TRANSCRIPTASE REVERSE II ORF2 domain identified by eMATRIX, accession number DM01354N, p-value=1.000e-40, raw score of 13.17
WPARSSVHSSTQSVHPERASDSELSSSARVGALRSFFRCAGTCCEVLNPFSFVCDVKPPFTIDDSTRFPKLYTDPIESPRKSWGGAKMAEQEQLRSTAPSVSDAEDGCFLHFHLRYRVHLTRECQTVGAEIQTTIREYYKHIYANELENLEEMDKFLDTYTLPRLNQEEVDSLNRPITGSEIVAIINSLPPKKSPGPDGFTAEFYQRYKEELIFQGGIN

SEQ ID NO: 37244 - protein, 945 aa, Homo sapiens
  DOMAIN (422)..(467): kw TRANSCRIPTASE REVERSE II ORF2 domain identified by eMATRIX, accession number DM01354N, p-value=1.000e-40, raw score of 13.17
  DOMAIN (17)..(247): AP endonuclease family 1 domain identified by PFam, accession name AP_endonucleas1, E-value=2.8e-89, PFam score of 310.0
  misc_feature (1)...(945): Xaa = X or * as defined in Table 2
RAKSPANIIMTGSNSHITILTLNVNGLNSPIKRHRLASWIKSQDPSVCCIQETHLMCRDTHRLKIKGWRKIYQANGKQKKAGVAILVSDKTDFKPTKIKRDKEGHYMMVKGSIQQEELTILNMYAPNTGAPRFIKQVLSDLQRDLDSHTLIMGDFNTPLSTLDRSTRQKVNKDTQELNSALHQADLIDIYRTLHPKSTEYTFFSAPHHSYSKIDHILGSEALLSKCKRTEIITNYLSDHSAIKLELRIKNLTQSRSTTWKLNNLLLNDYWVHNEMKAEIKMFFETNENKDTTYQNLXDAFKAVCRGKFIALNAHKRKQERSKIDTLTSQLKELEKQEQTHSKASRRQEITKIRAELKEIETQKTLQKINESRSWFFERINKIDRPLARLIKKKREKNQIDTIKNDKGDITTDPTEIQTTIREYYKHLYANKLENLEEMDTFLDTYTLPRLNQEEVESLNRPITGAEIVAIINSLSTKKSPGPDGFTAEFYQRYKEELVPFFLKLFQSIEKEGILPNSFYEASIILIPKPGRDTTKKENFRPISLMNIDAKILNKILANQIQQHIKKLIHHDQVGFIPGMQGWFNIRKSINVIQHINRAKDKNHMIVSIDAEKAFDKIQQPFMLKTINKIGIDGMYFKIIRAIYDKTTANIILNGQKLEAFPLKTGTRQGCPLSPLLFNIVLEFLARAIRQEKEIKGIQLGKEEVKLSLFADDMIVDLENPIVSAQNLLKLISNFSKVSGYKINVQNSQAFQYTNNRQTESQIMSELPFTIASKRIKYLGIQLTRDVKDLFKENYKPLLKEIKEDTKKWKNIPCSWVGGINIVKMAILPKVIYRFNAIPIKLPMPSFTELEKSTLKFIWNQKRARIAKSILSQKNKAGGIMLPDFKLYYKATVTKTAWYWHQNRDIDQWNRTEPSEITPHIYNYLIFDKPEKNKQWGKDSLFNKWC

SEQ ID NO: 37245 - protein, 109 aa, Homo sapiens
KKRFTEEVIEYFQKKVSPVHLKILLTSDEAWKRFVRVAELPRRRPRSDMEGAALLKVFVLCIWAARYFQNGLHNQVRDVELGVTTQHGSLLKAEHLASSSESQPRKSQP

SEQ ID NO: 37246 - protein, 163 aa, Homo sapiens
ARPTMTKEDREGWVRLITSVGAHQNHPGWTVAGQFQEKKRFTEEVIEYFQKKASPAHLKILLTSDETWKRFVRVAELPREEADALYEALKNLTPYVGIEDKDMQQKEQQVMEWLLKEFPQIRWKIQESIERLRVIANEIEKVHRGCVIANVVSGSTGILSVIG

SEQ ID NO: 37247 - protein, 176 aa, Homo sapiens
  misc_feature (1)...(176): Xaa = X or * as defined in Table 2
RPRVRELVGGSAIQALKEWNTTGKLRINHXKRCGSTQHHGSKYATDKEERPDACPLQPQPPQIQNGPMNGCEKDSSSTDSANEKPALIPREKKISILEEPSKALRGVTGPNIEKSAKDLQRCTVSLTRYRVMIKEEVDSSVKKITAAFAELHNCIIDKEASLMAEMGTVNEQAMRC

SEQ ID NO: 37248 - protein, 151 aa, Homo sapiens
  DOMAIN (47)..(67): HISTONE H5 SIGNATURE domain identified by eMATRIX, accession number PR00624G, p-value=6.900e-09, raw score of 4.08
ISILEEPSKALRGVTEGNRLLQQKLSLDGNPKPIHGTTERSDGLQWSAEQPCNPSKPKAKTSPVKSNTPAAHLEIKPDELAKKRGPNIEKSVKDLQRCTVSLTRYRVMIKGEVDSSVKNIKAACAEFPICIIDKEVSLMAEMDKVKGRKPW

SEQ ID NO: 37249 - protein, 210 aa, Homo sapiens
LPNIYPQGKKGGREWAVICKYISHPLEQKSKPFKGKEEDLEFLNASSKMPCWLLTTQSGVYRESQQHKWSLDVSDSKALQFVIEYNDDSLLPKSAGDKRTPDGPVRDPTGEIITASGPNIEKSVKDLQRCTVSLTRYRVMIKEEVDSSVKKIKAAFAELHNCLFPLGQGSLQYHPFMVCQEDVIGKRPDPDPKRGFLDLTQERIQGKSLK

SEQ ID NO: 37250 - protein, 150 aa, Homo sapiens
TKQLLCTAKETINRVHRQPTEWETIFANYASDRSLISSIYNSKADGQVVSSEKKANVNLKDLSKIRGRKRGKPGTRFTQSDRAAQKRVRSRVLRYTCRMCRFYNPSSTLGISPNAILPLTPKSRQAPVCDVLSLCPCVLIVRLPLMSESM

SEQ ID NO: 37251 - protein, 692 aa, Homo sapiens
  DOMAIN (148)..(177): Apple domain proteins domain identified by eMATRIX, accession number BL00495O, p-value=5.557e-15, raw score of 13.75
  DOMAIN (142)..(563): Trypsin domain identified by PFam, accession name trypsin, E- value=6.3e-32, PFam score of 103.2
MPMHCEDPVSLAVQLQDEPTETRGSRRGISTPNRPDTKRPGPTGKPHPQPNTPQPRSRDAYQPPTPNDHPLPTTTTTTHKEPPQPNHHTGEGRATTDGNPRAKLSEQKNNTGQKRKRISKQKRATPTKTRPASPNKEEGRTAGITSFGFGCGRRNRPGVFTAVATYEAWIREQVMGSEPGPAFPTQPQKTQSDPQEPREENCTIALPECGKAPRPGAWPWEAQVMVPGSRPCHGALVSESWVLAPASCFLDPNSSDSPPRDLDAWRVLLPSRPRAERVARLVQHENASWDNASDLALLQLRTPVNLSAASRPVCLPHPEHYFLPGSRCRLARWGRGEPALGPGALLEAELLGGWWCHCLYGRQGAAVPLPGDPPHALCPAYQEKEEVGSCWTHGPWISHVTRGAYLEDQLAWDWGPDGEETETQTCPPHTEHGACGLRLEAAPVGVLWPWLAEVHVAGDRVCTGILLAPGWVLAATHCVLRPGSTTVPYIEVYLGRAGASSLPQGHQVSRLVISIRLPQHLGLRPPLALLELSSRVEPSPSALPICLHPAGIPPGASCWVLGWKEPQDRVPVAAAVSILTQRICDCLYQGILPPGTLCVLYAEGQENRCEMTEGSWILVGMAVQGSRELFAAIGPEEAWISQTVGEANFLPPSGSPHWPTGGSNLCPPELAKGSGSPHAVYFLLLLTLLIQS

SEQ ID NO: 37252 - protein, 157 aa, Homo sapiens
  misc_feature (1)...(157): Xaa = X or * as defined in Table 2
RRSLESVLSRKLNPFXKATGTSRSESAVWAIIDAVSSPQKRLLDSEFIDPLMNKKARISHLTNRVPPTLNGHLNPTSEKSAAGLPLPPAAAAIPTPPPLPSTYLPISHPPQIADSHSPAAPVQGIQPFLTADQYWLENRYPSQHLSRVTASRARHQT

SEQ ID NO: 37253 - protein, 214 aa, Homo sapiens
MLPCLRALCCRLAGRVFETPPPPEDTNNDTPHTLTLYGPAGAPIIMSINNRTRPEQCNVAKTRALPGYRNADNAIVMRNWQICATALPRLRKHINGISTPRAAAPPPTAALAALLCTASASAPPPPPVSPQRRPPPVPPYSRRCSRPYITRKKKIDGLCLFHLKKSGKTNPSQNAAGTSRSESPVCSSRDAVSSPQEIWWLYLQNTSRSPIFPI

SEQ ID NO: 37254 - protein, 135 aa, Homo sapiens
  DOMAIN (52)..(83): Protein kinases ATP-binding region proteins domain identified by eMATRIX, accession number BL00107A, p-value=4.500e-19, raw score of 18.39
  DOMAIN (58)..(82): Eukaryotic protein kinase domain identified by PFam, accession name pkinase, E-value=1.2e-08, PFam score of 35.1
MALTLFNSMKVERGKKTAEKFKTSRGWFMSFKEKAISGGGSQGETANANGEAVARHMVVHRDLKPENVLLDAHMNAKIADFGGHLGVVEVTKETPKLGVSKTSSISEGEYEEVQYSTKEGEGTFQSFTKRMGKEL

SEQ ID NO: 37255 - protein, 65 aa, Homo sapiens
  DOMAIN (23)..(51): Granins proteins domain identified by eMATRIX, accession number BL00422C, p-value=8.054e-13, raw score of 16.18
SQGLRVEYNTPLSSREEEEEEEEEEEEEEEEEEEEEEEEEEEEEEERKKECSKAQCKHFPLSEVL

SEQ ID NO: 37256 - protein, 78 aa, Homo sapiens; identical to SEQ ID NO: 35716
  DOMAIN (36)..(71): Matrix protein (MA) p15. domain identified by eMATRIX, accession number PF01140D, p-value=3.093e-09, raw score of 15.54
  misc_feature (1)...(78): Xaa = X or * as defined in Table 2

SEQ ID NO: 37257 - protein, 67 aa, Homo sapiens
  DOMAIN (10)..(61): Neuromodulin (GAP-43) proteins domain identified by eMATRIX, accession number BL00412D, p-value=4.273e-14, raw score of 16.54
DRLGKKEEDEEEEEEEEEEEEEEEEEEEEEEEEEEEEEEEEEEEEEEEEEEEEEEEEEEEEEEEEEI

SEQ ID NO: 37258 - protein, 76 aa, Homo sapiens
  DOMAIN (32)..(60): Granins proteins domain identified by eMATRIX, accession number BL00422C, p-value=9.757e-13, raw score of 16.18
  misc_feature (1)...(76): Xaa = X or * as defined in Table 2
LKECNCIVCNSKNKCLKGXKKKEEEEEEEEEEEEEEEEEEEEEEEEEEEEEEEEEEGRRGRGRGRRRRRRRRRKKK

SEQ ID NO: 37259 - protein, 363 aa, Homo sapiens
  DOMAIN (302)..(330): Granins proteins domain identified by eMATRIX, accession number BL00422C, p-value=9.775e-12, raw score of 16.18
  misc_feature (1)...(363): Xaa = X or * as defined in Table 2
MVSRIWSWISEAQCPLCRPSGTYGPGEAALLLWLCIEAAAAAAAARSTTTPIITNHQSNTIAEQNPPRHENGDPKTYIIHVLAEQVLERLPHGVALRHDPLAPVVSRAGGVGHQRCAADDALQPLLQGRPEPGLAERHGVQDNLILKVSHTHTQKSAEKRAVSDPSSTVHRPQPLPPSTVHQSTIPSNPDSSSAYCLPSTRHGFSSYTDSFVPPSGPSNPMNPTIGNGLSPQRVHYQHLPTHAGGKRNAALEYGVPRKYYHMLKITASDYEKTKPFQVGDKVMGSGWRKVGMQTXFLXLKKEEEEEREEEEEEEEEEEEEEEEEEEEEEEEEEEEEEEEEEEEEEEEEEEEEEEEENSLSLTE

SEQ ID NO: 37260 - protein, 53 aa, Homo sapiens
  DOMAIN (1)..(52): Neuromodulin (GAP-43) proteins domain identified by eMATRIX, accession number BL00412D, p-value=1.964e-12, raw score of 16.54
MIQRKRASIGAPCAWVRKKEEEEEEEEEEEEEEEEEEEEEEEEEEEEEEEGEN

SEQ ID NO: 37261 - protein, 102 aa, Homo sapiens
  DOMAIN (36)..(64): Granins proteins domain identified by eMATRIX, accession number BL00422C, p-value=1.900e-12, raw score of 16.18
MTKPKSEEEEEEEEEEEEEEEEEEEEEEEEEEEEEEEEEEEEEEEEEEEEEEEEEQEEEEGEGEGEGEEEEEEEEEGGEEREEKLCQILGRLQWENHLSSGS

SEQ ID NO: 37262 - protein, 425 aa, Homo sapiens
  DOMAIN (344)..(383): Ribosomal protein S7e proteins domain identified by eMATRIX, accession number BL00948C, p-value=1.000e-35, raw score of 11.15
  DOMAIN (254)..(425): Ribosomal protein S7e domain identified by PFam, accession name Ribosomal_S7e, E-value=6.7e-102, PFam score of 351.9
  misc_feature (1)...(425): Xaa = X or * as defined in Table 2
MWLARELEESLAVSLQGEPGLLAGAGRLQGSPFSHPMEPGRQSETLSQKKKKKEEEEEEEEEEEEEEEEEEEEEEEEEEEEEEEEEEEEEEEEEEEEEEEEGEEEEGEEEEDQLDTMFGTHQQTSPTQRSARRRPCSVQGPRSXSPFSHPMEPGRQSETLSQKKKKKEEEEEEEEEEEEEEEEEEEEEEEEEEEEEEEEEEEEEEEEEEEEEEEEGEEEEGEEEEDQLDTMLWDSSTNLTNTALSKEKTMFSSRAKIVKPNGEKPDEFESGISQALLELEMNLDLKAQLWELNITAAKEIEVGGGRKAIIIFVPVPQLKSFQKTQVQLRRILPKPTQKSCTNNKQKLPRSCTLTAVHDAILEDLVFPSEIVGKRIHVKLDGSHLIKIHLDEAQQNNVEHKVEPFSGVYKKLMGKDVNFEFPEFQL

SEQ ID NO: 37263 - protein, 455 aa, Homo sapiens
  DOMAIN (247)..(298): Neuromodulin (GAP-43) proteins domain identified by eMATRIX, accession number BL00412D, p-value=5.909e-14, raw score of 16.54
MRSTSLQDVNALIGYGQYIPHLRKWGNYRSDKATGGREGIVGWTDLQKAASEQGVEGWQKEEGSEALRVDRRVNPVIPCEKNPPLDLNALYWHLLDRNPIGYFIKASHSSFKCGSMRFINKTKAEKRYKETNREERREDENFSSMPRTVGLDVPCTKVSSLYLADLAVRRYKIKEVTAFPNSLKQRKLSEKARGCEYSFTMISMAAMKALISYKWVDARMTLLISWSLLDLDLDLDLVSREEQRPGERVPHEEEEEEEEQEEEEEEEEEEEEEEEEEEEEEEEEEEEEEEEEEEEEEESLSDKHHPTTSSMEAWFQVAVMTAPPESRHLPWVPFRKEAEKEQTVHVCTEVQLAKGRTWSLFSCFCAVNGSSEQFLEIRKPKAFVRLKNVCGGVQGPAGMQTRDSLTGACVRCAREDRVMNVKGRNCFAHTALPSKAMTLCLGGTGYREQKTDACN

SEQ ID NO: 37264 - protein, 65 aa, Homo sapiens
  misc_feature (1)...(65): Xaa = X or * as defined in Table 2
EFKKPVLEGGAXRGEGGSPCVWSFFDPVHFNYQAGLFRVALPGEQCRTGRLVARVYTGISGASFT

SEQ ID NO: 37265 - protein, 282 aa, Homo sapiens
  DOMAIN (95)..(114): Eukaryotic  RNA-binding region RNP-1 proteins domain identified by eMATRIX, accession number BL00030A, p-value=8.714e- 09, raw score of 14.39
MSSLWPLPVGVTCLAWVGVMPSSPIIDRVSMWTVALLSPKKVAMEMARKPREECVTLGFSASRVPHQNANCGAGHSPFGSHAGSILKMVTRTKKIFVGGLSANTVVEDVKQYFEQFGKLNPPLSNAQGDSETMRGLYLSAFSDLNVCETAVKLPPGLCFWNRLGPTQEPHSSQETECEKDESSHHQQDFGDQKEAFKLNEFSASSRMEPFRTFQLFPGMIGQLSAELARPWADYGDRAVSKCLPLAKPNRKPGDHSREVSLARHKQGGKEQMMVLEGQAESN

SEQ ID NO: 37266 - protein, 204 aa, Homo sapiens
  DOMAIN (142)..(186): Phosphatidate cytidylyltransferase proteins domain identified by eMATRIX, accession number BL01315C, p-value=1.000e-40, raw score of 18.61
  DOMAIN (1)..(204): Phosphatidate cytidylyltransferase domain identified by PFam, accession name Cytidylyltrans, E-value=4.6e-51, PFam score of 183.1
HVTLLIVVTQSHLVIHNLFEGMIWFIVPISCVICNDIMAYMFGFFFGRTPLIKLSPKKTWEGFIGGFFATVGFGLLLSYVMSGYRCFVCPVEYNNDTNSFTVDCEPSDLFRLQEYNIPGVIQSAIGWKTVRMYPFQIHSIALSTFASLIGPFGGFFASGFKRAFKIKDFANTIPGHGGIMDRFDCQYLMATFVNVYIACVLRPL

SEQ ID NO: 37267 - protein, 168 aa, Homo sapiens
AKVLKMPIPKHPWERKRRMRKFFLTSPHLAVPQRSKLMNVFSMYHLSCGKEHGFQVPACFQTLCGSCRWHSTSFSGLSYVMSGYRCFVCPVEYNNDTNSFTVDCEPSDLFRLQEYNIPGVIQSVIGWPGGLSISGSPPLDALVRMVPLTQQFPYQSAYLVLSRSLNKA

SEQ ID NO: 37268 - protein, 60 aa, Homo sapiens
MDKFLDTNTLPRLNKEEAESLNRPITGSEIMATINSLPTKKSPGPDGFTAKFYQRYKVEL

SEQ ID NO: 37269 - protein, 716 aa, Homo sapiens
  DOMAIN (510)..(555): kw TRANSCRIPTASE REVERSE II ORF2 domain identified by eMATRIX, accession number DM01354N, p-value=1.000e-40, raw score of 13.17
  DOMAIN (84)..(334): AP endonuclease family 1 domain identified by PFam, accession name AP_endonucleas1, E-value=1.6e-13, PFam score of 58.4
ECSSSPATEQSWTENDYDKLREEGFRRSNYSELQEDIQTKGKDVENFEKNLEECITRITNTQKCLKELMELKTKARELREECRSLRSRCDQLEERVSVMEDEMNEMKQEGKFREKRIKRNEQSLQEIWDYVKRPNLRLIGVPESDGENGTKLKNTLQDIIQENFPNLARQAKVQIQEIQRMPQRYSLTRATPRHIIVRFTKVEMKEKMLRAAREKGAPRFIKQVLSDLQRDLDSHTLIMGDFNTPLSTLDRSTRQKVNKDTQELNSALHQVDLIDIYRTLHPKSTEYTFFSAPHHTYSKIDHILGSKALLSKCKRTEIITNYLSDHSAIKLELRIKNLTQNRSTTWKLNNLLLNDYWVHNEMKLEIKMFFETNENKDTTYQNLWDAFKAVYRGKFIALNAHKRKQERSKIDTLTSQLKELEKQEQTHSKASRRQEITKIRAELKEIETQKTLQKINESRSWFFERINKIDRLLARLIKRKREKNQIDAIKNDKGDITTNPTEIQTTIREYYKHLYANKLENLEEMDKFLDTYTLPRLNQEEVESLNRPITGSEIVAIINSLPTKKSPGPDGFTAEFYQRYKKELVPFLLKLFQSIEKEGILPNSFYEASIILIPKPGRDTTKKENFRPISLMNIDAKTLNKILADRIQQHIKKLIHHDQVGFIPGMQGWFNIHISINVIQHINRAKDKNHMIICIDAERAFDKIQQPFMLKTLNKL

SEQ ID NO: 37270 - protein, 568 aa, Homo sapiens
  DOMAIN (353)..(394): kw TRANSCRIPTASE REVERSE II ORF2 domain identified by eMATRIX, accession number DM01354I, p-value=1.000e-40, raw score of 15.55
  DOMAIN (114)..(339): AP endonuclease family 1 domain identified by PFam, accession name AP_endonucleas1, E-value=1.3e-69, PFam score of 244.7
HTKNPSVHHHRQRPKVDKTTKMGKKQNRKTGKSKTQSAFPPPKERSSSPAMEQSWMENDFDELREEGFRRSNYSELREDIQTKGKEVENFEKNLEECITRITNTEKCLKELMELKTKARELREECRSLRNWIKSQDPSLCCIQETHLMCRDTHRLKIKGRRKIYQANGKQKKAGVAILVSDKTDFKPTKIKRDKEGHYIMVKGSIQQEELTILKIYAPNTGSPRFMKQVLSDLQRDLDSHTLIMGDFNTPLSTLDRSTRQKVNKDTQELNSALHQADLIDIYRTLHPKSTEYTFFSAPHHTYSKIDHILGSKALLSKCKRTEIITNYLSDHSAIKLELRIKNLTQNGSTTWKLNNLLLNDYWVHNEMKAEIKMFFETNENKDTTYQNLWDAFKAVCRGKFIALNAHKRKQERSKIDTLTSQLKELEKQEQTHSKASRRQEITKIRAELKEIETRKTLQKINESRSWFFERINKIDRPLARLIKKKREKTQIDTIKNDKGDITTDPTEIQTTIREYYKHLYANKLENLEEMDTFLDIYTLPRLNQEEVESLNRPITGAEIVAIINSLPT

SEQ ID NO: 37271 - protein, 617 aa, Homo sapiens
  DOMAIN (297)..(338): kw TRANSCRIPTASE REVERSE II ORF2 domain identified by eMATRIX, accession number DM01354I, p-value=1.000e-40, raw score of 15.55
  DOMAIN (78)..(283): AP endonuclease family 1 domain identified by PFam, accession name AP_endonucleas1, E-value=1.6e-32, PFam score of 121.5
MGKKQNRKTGNSKMQSASPPPKERSSSPATDQSWMENDFDELREEGFRRSNYSELREDIQTKGKEVENFEKNLEECITRITNTEKCLKELMELKTKARELREECRSLRSRCDQLEERVSAMEDEMNEMKQEGKIKRDKEGHYIMVKGSIQQEELTILNIYAPNTGAPRFIKQVLSDLQRDLDSHTLIMGDFNTSLLTLDRSMRQKVNKDTQELNSSLHQADLIDIYRTLHPKSIEYTFFSAPHHTYSKIDHIVGSKALLSKCKRTEIITNYLSDHSAIKLELRIKNLTQSRSTTWKLNNLLLNDYWVHNEMKAEIKMFFETNENKDTTYQNLWDAFKAVCRGKFIALNAHKRKQERSKIDTLTSQLKELEKQEQTHSKASRRQEITKIRAELKEIETQKTLQKINESRSWFFERINKIDRPLARLIKKKREENQIDTIKNDKGDITTDPTEIQTTIREYYKHLYANKPENLEEMDKFLDTYTLPRLKQEEVESLNRPITGAEIVAIINSLPTKKSPGPDGFTAEFYQRYKEELVPFLLKLFQSIEKEGILPNSFYEASIILIPKPGRDTTKKENFRPISLMNIDAKILNKILANRIQQHIKKLIHHDQVGFIPGMQG

SEQ ID NO: 37272 - protein, 811 aa, Homo sapiens
  DOMAIN (316)..(361): kw TRANSCRIPTASE REVERSE II ORF2 domain identified by eMATRIX, accession number DM01354N, p-value=1.000e-40, raw score of 13.17
  DOMAIN (313)..(516): AP endonuclease family 1 domain identified by PFam, accession name AP_endonucleas1, E-value=2.2e-15, PFam score of 64.6
  misc_feature (1)...(811): Xaa = X or * as defined in Table 2
MVKGSIPQEELTILNIYALNTGAPRFIKQVLRDLQRDLDSHTIIMGDFNTPLSTSDRSTRQKVNKDIQELNSALHQADIIDIYRTLHPKSTEYTFFSAPHHTYSKIDHIVGSKALLSKCQRIEIITNCLSDYSAIKLELRIQKLTQNCSTIWKLNNLLLNDYWVHKEMKAEIKMFFETNENKDTTYHHLWDTFKAVCRGKFIALNAHKRKQERFEMDTLTSQLKELKKQEQTHSKASRRQEITKIRAERKEIETQKTLQKINESGSWFVEKINKIDRPLARLIKKKREKNQIDAIKNDKGVITTDPTEIQTTIREYYKHLYANKLENLEEMDKFLDTYNLRRLNQGEVESLNRPITGSEIEAIINSLPTKKSPGPNGFTAKFXQEELTILNIYALNTGAPRFIKQVLRDLQRDLDSHTIIMGDFNTPLSTSDRSTRQKVNKDIQELNSALHQADIIDIYRTLHPKSTEYTFFSAPHHTYSKIDHIVGSKALLSKCQRIEIITNCLSDYSAIKLELRIQKLTQNCSTIWKLNNLLLNDYWVHKEMKAEIKMFFETNENKDTTYHHLWDTFKAVCRGKFIALNAHKRKQERFEMDTLTSQLKELKKQEQTHSKASRRQEITKIRAERKEIETQKTLQKINESGSWFVEKINKIDRPLARLIKKKREKNQIDAIKNDKGVITTDPTEIQTTIREYYKHLYANKLENLEEMDKFLDTYNLRRLNQGEVESLNRPITGSEIEAIINSLPTKKVQDQMDSQPNSSRVLEVLARAIRQEKEIKGIQLGKEEFKLSLFADDMPVYLENPIVSAQNLLKL

SEQ ID NO: 37273 - protein, 642 aa, Homo sapiens
  DOMAIN (272)..(317): kw TRANSCRIPTASE REVERSE II ORF2 domain identified by eMATRIX, accession number DM01354N, p-value=1.000e-40, raw score of 13.17
  DOMAIN (356)..(595): Reverse transcriptase domain identified by PFam, accession name rvt, E-value=3.8e-65, PFam score of 229.8
MGDFNTPLSTLDRSTRQKANKDTQELNSALHQVDLIDIYRTLHPKSTEYTFFSAPHHTYSTTDHILGSKALLSKCRRTEIITNYLSDHSAIKLELRIKNLTQNRSTTWKLNNLLLNDYGVHNEMKAEIKMFFETNENKDTTYQNLWDTFKAVCRGKFIALNAHKRKQERSKIDTLTSQLKELEKQEQTHSKASRRQEITKIRAELKEIETQKTLQKINESRSWFFERINKIDRLLARLIKKKREKNQIDAIKNDKGDITTDPTEIQTTIREYYKHLYANKLENLEEMDKFLHTYTLPRLNQEEVESLNRPITGSEIVAIINSLPTKKSPGPDGFTAEFDQRYKEELVPFLLKLFQSIEKEGILPNSFYEASIILIRKPGRDTTKKENFRPISLMNTDAKILNKILAKRIQQHIKKLIHHDQVGFIPGMQGWFNIHKSINVIQHINRAKDKNHMIISIDAEKAFDKIQQPFMLKTLSKLGIDGTYFKIIRAIYDKPTANIILNGQKLEAFPLKTGTRQGCPLSPLLFNIVLEVLARAIRQEKEIKGNFSKVSGYKINVQKSQAFLYTNNRQAESQIMSELPFTIASKRIKYLGIQLTRDVKDLFEENYKPLLNEIKEDTNKWKNIPCSWVGRINIVKMAILPK

SEQ ID NO: 37274 - protein, 341 aa, Homo sapiens
  DOMAIN (197)..(238): kw TRANSCRIPTASE REVERSE II ORF2 domain identified by eMATRIX, accession number DM01354I, p-value=7.511e-34, raw score of 15.55
  DOMAIN (1)..(184): AP endonuclease family 1 domain identified by PFam, accession name AP_endonucleas1, E-value=2.2e-27, PFam score of 104.4
  misc_feature (1)...(341): Xaa = X or * as defined in Table 2
WRRIYQANGKXKNKQKKAGVVILVSDKTDFKPTKIKRDKEGHYIMVKGSIQQEELTVLNIYAPNTGAPRFMKQVLRDLQRDLDPHTTIMGDFNTPLSTLDRSARQKVNKDIQELNSALHQADLINIYRILHPKSTEYTFISAPHRTYSKIDHIVGRKALLRKYKRTEIITDCLSDHSAIKLELRIKKLTQNSSTTWKLNNLLLNDYWIHNKTKAEIKMCFETSENKDTTYQNLWDTCKAVCREKFIALNAHKRKQERSKIDTLTSQLKELEKQEQTHSKASRRNLEEMDKYLDTYTLPRLNQEEFESLNRPITGSEIEAIINSLPTKKSSGPDGFTAKFYQ

SEQ ID NO: 37275 - protein, 553 aa, Homo sapiens
  DOMAIN (323)..(364): kw TRANSCRIPTASE REVERSE II ORF2 domain identified by eMATRIX, accession number DM01354I, p-value=1.000e-40, raw score of 15.55
  DOMAIN (94)..(309): AP endonuclease family 1 domain identified by PFam, accession name AP_endonucleas1, E-value=1.6e-64, PFam score of 227.7
MENDFDELREEGFRRSNYSELQEEIQTKGKEVENFEKNLDECITRITNTEKCLKELMELKAKARELREQCRSLRSLCDQLEERVSVMEDEMNEMKHRLANWIKSQDPSVCCIQEAYLTCRDTHRLKIKGWRKIYQANGKQKKAGVAILVSDKTDFKPTKIKRDKEGLYIMVKGSIPREELTILNIYAPNPEAPRFTKQVLSDLQRDVDSHTIILGDFNTPLSALDRSMRQKVNKDTQELNSALHQADLIDIYRTLHPKSTEYTFFSAPHHTYSKIDHRVGSKALLSKCKRSEIITNCLSDHSAIKLELRIKKLTQNCSTTWKLNNLLLNDYWVHNEMKAEIKMFFETNENKDTTYHNLWDTFKAVCRGKFIALNAHKRKQERSKIDTLTSQLKELEKQEQTHSKASRRQEITKIRAELKEIETQKTLQKINESRSWFFKKINKIDRPLARLIKKKREKNQLDSIKNDKGDITTYPTEIQTTIREYYKHLYTNKLENLEKMDKFLDTYTLPRLNQEEVESLNRPITGSEIVALINSLPTKKSPGPDGFTAEFYQ

SEQ ID NO: 37276 - protein, 544 aa, Homo sapiens
  DOMAIN (257)..(303): kw TRANSCRIPTASE REVERSE II ORF2 domain identified by eMATRIX, accession number DM01354O, p-value=1.000e-40, raw score of 8.73
  DOMAIN (290)..(543): Reverse transcriptase domain identified by PFam, accession name rvt, E-value=1.2e-66, PFam score of 234.8
WRKIYQANGKHKKAGVAIRVSDKTDFKPTKIKRDKEGHYLMVKGSIQQEELTILNIYATNTGAPGFIKQVLSDLQRDLDSHTIIMEDFNTPLSTLDISMRQKVNKDTQELNSALHQEDLIDIYRTLHPKSTEYTFFSAPHHTYSKIDHILGSKALLSKCKRTEIITNYLSDHSAIKLELRIKNLTQSRSTTWKLNNLLLNDYWVHKEMKADIKMFFETNESKDTTYQNLWDAFKAEELESLNRPITASEIVAIINSLPSKKSPGPDGFTAKFYQRYKEELVPFLLKLFQSIEKEGILPNSFDEASIILIPKLGRDTTKKENFRPISLMNIDAKILNKILANQIQQHIKKLIHHDQVGFIPGMQGWFNIHKSINVIQHINRTKDKNHMIISIDAEKAFDKIQQSFMLKTRNKLGIDGTYLKIIRAIYDKPTANIILNGQKLEAFPLKTGTRQGCPLSPLLFNIVLEVLARAIRQEKEIKGIQLGKEDVKLSLFADDMIVYLENPIVSAPNPLKLISNFSKVSGYKINVQKSQAFLYTNNRQRAKS

SEQ ID NO: 37277 - protein, 723 aa, Homo sapiens
  DOMAIN (588)..(633): kw TRANSCRIPTASE REVERSE II ORF2 domain identified by eMATRIX, accession number DM01354N, p-value=1.000e-40, raw score of 13.17
  DOMAIN (198)..(412): AP endonuclease family 1 domain identified by PFam, accession name AP_endonucleas1, E-value=7.2e-10, PFam score of 34.2
MGKKQSRKTGNSKNESTSPPPKERSSSPATEQSWTENDFDELREEGFRRSNYSELKEEVRTHGKEVKNLKNKLDEWLTRITNAEKSLKDLMELKTTARELRDECTSLSSRFDQQEESDYVKRPNLPLIGVPESDGDNATKLENTLQDIIQENCPNLARQANIQIQEIQRTPQRYSSRRATPRHIIVRFTKVEMKEKMLRAAREKGRVTHKGKPIRLTAALSAETLQARRDRRPIFNILKEKNFQPRISYPAKLSFVSEGEIEYFTDKQMLRDFLMTRPALKELLKEALNMETTGAPRFIKQVLRELQRDLDTHTIITGDFNTPLSTSDRSTRQKVNKDIQELNSALHQADLIDICRTLHPKSIEYTFFSAPHHTYSKIDHIVGSKALLSKCKRTEIITNCLSDHSAIKLELRIKKLTQNRSTTWKLDNLLLNDYWVHNEMKTEIKMFFETNENKDTTYQNLWDTFKAVCRGKFIALNAHKRKKTRSKIDTLTSQLKELEKQEQTHSKASRRQEITKIREELKEIETQKTLQKINESRSWFFEKINKIDRPLARLVKKKREKNQIDVIKNDKGDITTDPTEILTTIREYHKHLYTNKLENLEEMDKFLNTYTLPRLNQEEVESLNSPITGSEIEAIINSLSMKKSTGPDGFTAEFYQRYKEELVPFLLKLFQSIEKEGILPNSFYEASIILIPKPGRDTTKKENFGPIFLMNINAKILNKILAN

SEQ ID NO: 37278 - protein, 417 aa, Homo sapiens
  DOMAIN (282)..(323): kw TRANSCRIPTASE REVERSE II ORF2 domain identified by eMATRIX, accession number DM01354I, p-value=3.302e-37, raw score of 15.55
  DOMAIN (60)..(269): AP endonuclease family 1 domain identified by PFam, accession name AP_endonucleas1, E-value=2.5e-47, PFam score of 170.7
  misc_feature (1)...(417): Xaa = X or * as defined in Table 2
EGKFRENRIKRNEQSLQEIWDYVKRTNLRLIGVPESDWENGTKLENTLQDIIQENFPNLARXAKIQRIRSQDPSTHLTSRDTHRLKIKGWRKIYQANGKQKKAAVTILVSDKTNFKPTKIKRDNEGHYIMVKGSNQQEELTILNIYAPNTGAPRFIKQVLRDLQRDLDSHTIITGDINIPLSTLDRSTKQKVNKDTQELNSALHQVDLIDIYRTLHPKSIEYTFFSAPHHTYSKVDHILGSKALLSKCERIEIITNCLSDHSAIKLELRIKNLTQNHSITWKLNNLFLNDYWVHNEMKAEIKMFFETSENKDTTYQNLWDAFKAVCRGKFIALNAHKRKQERSKIYTLTSQLKELEKQEQTHSKASRRQEIIKIRAELKEIETQKTLQKLNESISHQLEWQSLKSQKTTGAGEDVEK

SEQ ID NO: 37279 - protein, 374 aa, Homo sapiens
  DOMAIN (179)..(220): kw TRANSCRIPTASE REVERSE II ORF2 domain identified by eMATRIX, accession number DM01354I, p-value=1.000e-40, raw score of 15.55
  DOMAIN (1)..(165): AP endonuclease family 1 domain identified by PFam, accession name AP_endonucleas1, E-value=3.8e-13, PFam score of 57.1
MPILVYDRTDFKPTKIKRGKEGHYVTVKGSIQQEELTTLNIYAPNTGAPRFIKQVLSDLQRDLDSHTITMGDFNTPLSTLDRSTRQKVNKDIQELNSALHQEDLIDIYRTLHPKSTEYTFFSAPHHTNSKIDHIVGSKALLSKCKRTEIITNCLSDHSAIKLELRIKKLTHNRSTTWKLNNLLLNDYWVHNEMKAEIKRFFETNENKDTAYQNLWDTFKAVCRGKFIALNAQKTKQERLNQEEAESVNRPITGSEMEAIINSLPTKKSARPDGFTDEFYQRYKEELVPFLLKLFQSIEKEGIFPNSFYEASIILIPKHGRDTTKKENFIPISLMNIDAKILNKILANRIQQHIKKLIHHDQVGFIPGMQGWFNV

SEQ ID NO: 37280 - protein, 329 aa, Homo sapiens
  DOMAIN (236)..(277): kw TRANSCRIPTASE REVERSE II ORF2 domain identified by eMATRIX, accession number DM01354I, p-value=1.000e-40, raw score of 15.55
  DOMAIN (11)..(224): AP endonuclease family 1 domain identified by PFam, accession name AP_endonucleas1, E-value=1.3e-48, PFam score of 174.9
  misc_feature (1)...(329): Xaa = X or * as defined in Table 2
EILSPPGLPYKSSXKKHXTWKGTTGTSCCINHAKIVTHRLKIKGWRKIYQANGKQKKAGVANLVSDKTDFKPTKIKRDKEGHYIMVKGSIQQEELTTLNIYAPNTGAPRFIKQVLSDLQRDLDSHTLIMGDFNTPLLTLDRSTRQKVNKDTQELNSALHQADLIDIYRTLHPKSTEYTFFSAPHHIYSKTDHILGSKALLSKCKRTEIITNYLSDHSAIKLELRIKNLTKNRSTTWKLNNLLLNDYWVHNEMKAEMKMFFETNENKDTTYQNLWDTFKAMCRGKFIAVNAHKRKQERSKIDTLTSQLKELEKQEQTHSKASRRQEITKI

SEQ ID NO: 37281 - protein, 393 aa, Homo sapiens
  DOMAIN (221)..(262): kw TRANSCRIPTASE REVERSE II ORF2 domain identified by eMATRIX, accession number DM01354I, p-value=7.300e-39, raw score of 15.55
  DOMAIN (39)..(207): AP endonuclease family 1 domain identified by PFam, accession name AP_endonucleas1, E-value=6.7e-07, PFam score of -11.6
MPSCSITLENIGAREREEQKQPPEWVRGLIKHLNVPFGDGLNMLQERSSSPATEQSWMENDFDELREEGFRRLDFLTRAPEGSTKHGKEKPGPATAKTCQIVKAIDARKKLHQLMSKITSGNIRSTKQKVNKDTQELNSALHQADLIDIYRTLHPKSTEYTFFSAPHHTYSKIDHIVGSKALLSKCKRTEIITNCLSDHSAIKLELRIKKLTQNCSTTWKLNNLFLSDYWVHNEMKAEIKIFFETNENKDTTYRNLWDTCKAVCKGKFIALNNHKRKQERSKIDTLTSQLKELEKQEQIYSKAGRRLEITKIRAELKEIETQKTLQKKINESRSWCFEMINKIDRPLARLIKKKREKNQIDTIKNDKGDITTDPTEVQTTIREYYKNTSIQIN

SEQ ID NO: 37282 - protein, 428 aa, Homo sapiens
  DOMAIN (328)..(369): kw TRANSCRIPTASE REVERSE II ORF2 domain identified by eMATRIX, accession number DM01354I, p-value=9.550e-39, raw score of 15.55
  DOMAIN (102)..(314): AP endonuclease family 1 domain identified by PFam, accession name AP_endonucleas1, E-value=6.6e-50, PFam score of 179.2
MVTAPPCTSGTIRLRIHLVLDFFWLPPLLIPRQKGSGVDFQQTPTDLQLRVLTVSRKTNKQKGHPHQKPICMSPSSKTKEKSLKDLMELKIMAQELCDEWTSLSSRCNQLEERVSVMEDEMNEMKDKHRPKIKEWRKIYQANGQQKKTRVANLVSDKTEFKPTKIKRDKEGHYIMVKGSIQQEELTIVNIYAPNTGAPRFIKKVLSDLQRALDSHTIIMGDFNTPLSTLDRSTRQKVNKDIQELNSALHQADLIDIYRTLHPKSTEYTFFSAPHYTYPKIDHIVGSKALLSKCKRTEIITNCLSDHSAIKLELKIKKLTQNLSTTWKLNNLLLKDYWVHKEMKAEIKMFFETNKNKDTTYQNFWDTFKAVCRGKFIALNAHKRKQEGFKIDTLTLQLKELEKQEQTHSKASRRQEVTKIRAELKEIET

SEQ ID NO: 37283 - protein, 351 aa, Homo sapiens; identical to SEQ ID NO: 32465
  DOMAIN (236)..(272): kw TRANSCRIPTASE REVERSE II ORF2 domain identified by eMATRIX, accession number DM01354F, p-value=7.943e-37, raw score of 14.56
  DOMAIN (106)..(329): AP endonuclease family 1 domain identified by PFam, accession name AP_endonucleas1, E-value=1.1e-58, PFam score of 208.4

SEQ ID NO: 37284 - protein, 279 aa, Homo sapiens
  DOMAIN (107)..(148): kw TRANSCRIPTASE REVERSE II ORF2 domain identified by eMATRIX, accession number DM01354I, p-value=7.300e-39, raw score of 15.55
MSKITSGNIRSTKQKVNKDTQELNSALHQADLIDIYRTLHPKSTEYTFFSAPHHTYSKIDHIVGSKALLSKCKRTEIITNCLSDHSAIKLELRIKKLTQNCSTTWKLNNLFLSDYWVHNEMKAEIKIFFETNENKDTTYRNLWDTCKAVCKGKFIALNNHKRKQERSKIDTLTSQLKELEKQEQIYSKAGRRLEITKIRAELKEIETQKTLQKKINESRSWCFEMINKIDRPLARLIKKKREKNQIDTIKNDKGDITTDPTEVQTTIREYYKNTSIQIN

SEQ ID NO: 37285 - protein, 386 aa, Homo sapiens
  DOMAIN (341)..(366): 7 kw REVERSE TRANSCRIPTASE RNA POLYMERASE domain identified by eMATRIX, accession number DM00895E, p-value=5.966e-10, raw score of 15.72
  DOMAIN (1)..(155): AP endonuclease family 1 domain identified by PFam, accession name AP_endonucleas1, E-value=4.9e-14, PFam score of 60.1
FKPTKIKRDKEGHYIMVKGSIQQEELTILNIYTPNTGAPRFIKQVLRDLQRDLDSHTIIVGDFNTPLSTLDSSKRQKVDKDIQELNSALYQADLTDIYRTLHPKSTEYTFFSAPHHTYSKIDHIVGSKALLSKCNRTEIITNCLSDHSAIRLELRIKKLTENRSTTWKLNNLLLKDYWVHNEMKAEIKMFFETNENKDTTYQNLWDTGKAACRGIFIAINAHKRNQKRSKMDTLTSQLKELEKQEQRHSKASRRLNQEEVESLNKPRTGSEIEAIINSLPTKKSPGADGFTAEFYQRYKEELGPFLLKLFQSIEKEGILPNSFYEASIILIPKPDRDTTKKENFRPICLMNIHAKIINKILANQIQQHIKKLIHHDQVGFIPRMQG

SEQ ID NO: 37286 - protein, 454 aa, Homo sapiens
  DOMAIN (316)..(361): kw TRANSCRIPTASE REVERSE II ORF2 domain identified by eMATRIX, accession number DM01354N, p-value=1.000e-40, raw score of 13.17
  DOMAIN (389)..(453): Intermediate filament proteins domain identified by PFam, accession name filament, E-value=7.5e-09, PFam score of 37.1
MVKGSIQQEELTILNIYAPNTGAPRFIKQVLSDLQRDLDSHTLIMGDFNTPLSTLDRSTRQKVNKDTQELNSALHQADLIDVYRTLHPKSTEYTFFSAPHHTYSKIDHIVGSKALLSKCKRTEIITNYLSDHSAIKLELRIKNLTQSRSTTWKLNNLLLNDYWVHNEMKAEIKMFFKTNKNKDTTYQNLWDAFKAVCRGKFIALNAYKRKQERSKIDTLTSQLKELEKQEQTHSKASRRQEITKIRAELKEIETQKTLQKINESKSWFFERINKIDRLLARLIKKKREKNQIDTIKNDKGDITTDPTEIQTTIREYYKHLYANKLENLEEMDTFLDTYTLPRLNQEEVESLNRPITGSEIVAIINSLPTKKSPGPDGFTAEFYQRVGGLETENRRLEIKIWEHLEKKGPQVRDWGHYVKTTEDFRAQTFANSVDNACIVLQIGKAYLAADDFRV

SEQ ID NO: 37287 - protein, 334 aa, Homo sapiens
  DOMAIN (154)..(195): kw TRANSCRIPTASE REVERSE II ORF2 domain identified by eMATRIX, accession number DM01354I, p-value=3.302e-37, raw score of 15.55
  DOMAIN (1)..(140): AP endonuclease family 1 domain identified by PFam, accession name AP_endonucleas1, E-value=3e-05, PFam score of -37.0
MVKGSIQQEELTILNIYAPNTGAPRFIKQVLRDLQRDLDAHTIIIADFNTPLLILDRSMRQKVNRDIQDLNSALHQVDLIDIYRTLHPKSTEYTFFSAPHHTYSKTYHIVGSKALLSKCKRTEVTTNCLSDHSAMKLELRIKKLTQNRTTTWKLNNLLLNDYWVNNEMKAEIKMFFETNEKKDTTYQNVWDTFKAVCRGKFIGLNAHKRKQERSKIDTLTSQLKELEKQEQTNSKASRSQKIDEKTDSDSIPPKIVFGSAEIETKRDYTLNQYTKMLLSDSCLGQLSFSKSIISAIFNPVFTIVVYSFAKAAKPSGHRLWSQIKEIYMPGHCTQ

SEQ ID NO: 37288 - protein, 377 aa, Homo sapiens
  DOMAIN (110)..(151): kw TRANSCRIPTASE REVERSE II ORF2 domain identified by eMATRIX, accession number DM01354I, p-value=1.000e-40, raw score of 15.55
  misc_feature (1)...(377): Xaa = X or * as defined in Table 2
MGDFNTPLSTLDRSTRQKVNKDTQELNSALHQVDLIDIYRTLHPKSTEYTFFSAPHHTYSKIDHMVGSKALLSKCKRTEIITNYLSDHSAIKLELRIKNLTQSRSTTWKLNNLLLNDYWVHNEMKAEIKMFFETNENKDTTYQNLWDTFKAVCRGKFIALNAHKRKQERSKIDTLTSQLKELEKQEQTHSKASRRQEITKIRAELKEIETQKTLQKISESRSWFFERINKIDRPLARLIKKKREKNQIDTIKNDKGDITTDPTEIQTTIREYYKHLYANKLENLEEMDKFLNTYTLPRLNQEDVESLNRPITGAEIVAIINSLPTKKSPGPDGFTAEFYQRYKEELARAAACSTEPVELRARQHPRSRAGRTCGGTX

SEQ ID NO: 37289 - protein, 638 aa, Homo sapiens
  DOMAIN (154)..(195): kw TRANSCRIPTASE REVERSE II ORF2 domain identified by eMATRIX, accession number DM01354I, p-value=1.000e-40, raw score of 15.55
  DOMAIN (400)..(591): Reverse transcriptase domain identified by PFam, accession name rvt, E-value=4.3e-09, PFam score of 43.7
  misc_feature (1)...(638): Xaa = X or * as defined in Table 2
MVKGSIQQEELTILNTYAAHTGAPRLIKQVLSDLQRDLDSHTIIMGDFNTPLSTLDRSTRQKVNKDTQELKSALHQADLTDIYRTLHHKSTEYTFFSAPHHIYSKIDHILGSKALLSKCKRTEIITNYLSDHSAIKLELWIKNLTQNHSTTWELNNLLLNDYWVHNEMKAEIKMFFETNENKDTTYHNLWDTFKAVCRGKFIPLNAHKRKQERSKIDTLTSQLKELEKQEQTHSKASRRQEITKIRAELKEIETQKTLQKINESRSWFFERINKIDRLLARLIKKKREKNQIDAIKNDKGDITTDPTEIQTTIREYCKHLYANKLENLEEMDKFLDTYTLPRLNQEEVESLNRPITGAEIVAIINSLPTKKSPGPDGFTAKFYQRYKEELVPFLLKLFQSIEKEGILPNSFYEASIILIPKPGRDTTKKENFRPISLMNIDAKILNKKLAKRIQQHIKKLIHHDQVGFIPGMQGWFNIRKSINVIQHINRAKDKNHMIISIDAEKAFDKIQQPFMLKTLNKLGIKYLGIHLTRDVKDLFKENYKPLLKEIKEDTNKWKNIPCSWVGRINIVKMAILPKMCLXRRWTPLCLLTAAASLNREXERLVQPLLWRQMYCGPRHCRQVPQHRRLNWSPSLRLS

SEQ ID NO: 37290 - protein, 891 aa, Homo sapiens
  DOMAIN (471)..(516): kw TRANSCRIPTASE REVERSE II ORF2 domain identified by eMATRIX, accession number DM01354N, p-value=1.000e-40, raw score of 13.17
  DOMAIN (555)..(726): Reverse transcriptase domain identified by PFam, accession name rvt, E-value=1.4e-11, PFam score of 51.9
DYVKRPNLPLIGVPESDGDNATKLENTLQDIIQENCPNLARQANIQIQEIQRTPQRYSSRRATPRHIIVRFTKVEMKEKMLRAAREKGRVTHKGKPIRLTAALSAETLQARRDRRPIFNILKEKNFQPRISYPAKLSFVSEGEIEYFTDKQMLRDFLMTRPALKELLKEALNMETTGAPRFIKQVLRELQRDLDTHTIITGDFNTPLSTSDRSTRQKVNKDIQELNSALHQADLIDICRTLHPKSIEYTFFSAPHHTYSKIDHIVGSKALLSKCKRTEIITNCLSDHSAIKLELRIKKLTQNRSTTWKLDNLLLNDYWVHNEMKTEIKMFFETNENKDTTYQNLWDTFKAVCRGKFIALNAHKRKKTRSKIDTLTSQLKELEKQEQTHSKASRRQEITKIREELKEIETQKTLQKINESRSWFFEKINKIDRPLARLVKKKREKNQIDVIKNDKGDITTDPTEILTTIREYHKHLYTNKLENLEEMDKFLNTYTLPRLNQEEVESLNSPITGSEIEAIINSLSMKKSTGPDGFTAEFYQRYKEELVPFLLKLFQSIEKEGILPNSFYEASIILIPKPGRDTTKKENFGPIFLMNINAKILNKILANRIQQHIKKLIHYDQVGFIPGMQGRAIRQEKEIKGIQLGKEEVKLSLFADDMIVYLENPIVSAQNLLKLISNFSKVSGYKINVQKPQAFLYTNNRQTESQIMSELPFTIASKRIKNLGIQLTRDVKDLFKENYKPLLNEIKEDTNKWKNIPCSWVGRINIMKMVILPKGLAPADKLGAVLKERVTFPTQLIKWHAQDAGKGAQCDCGVVICSRVALLTSRHHPILPSDSQNCKEFQVFTKLNANSKKRSAQQKHYKDEVLALLLPLAPAHLAGCHDAQTQSQQQQG

SEQ ID NO: 37291 - protein, 803 aa, Homo sapiens
  DOMAIN (371)..(416): kw TRANSCRIPTASE REVERSE II ORF2 domain identified by eMATRIX, accession number DM01354N, p-value=1.000e-40, raw score of 13.17
  DOMAIN (5)..(195): AP endonuclease family 1 domain identified by PFam, accession name AP_endonucleas1, E-value=9e-20, PFam score of 79.1
TWCSGRYMVGCRDWHLLLVKGLRKLTIVAEGEGGAGMSLGESGNKIKRDKEGHYIMVNGSIQQEELTILNIYAPNTGAPRFIKQVLRDLQRDLDSHTIIMRDFNTPLSALERSTREKVNKDIQELNSALHQADLVDIYRTLHPKSTEYTFFSAPHRTYSNIDHIVGSKALLSNCKRTEIITKCLSDHSTIKLELRIKKLTQNRSTTWKLNNLLLNDYWVHNEMKAEIKMFFETIENKDTTYQNLWDTFKAECRGKFIALNAHKRKQERSKIDTLTSQLKELEKQEQTHSKASRRQEITKIRAELKETETQKTLQKINESRSWFFERINKIDRPLARLIKKKREKNLIDAIKNDKGDITTDPTEIQTTIREYYKHLYANKLENLEEMDKFLDTYTLPRLNQEEVESLNRPITGSEIVAIINSLPTKKSPGPDGFTAEFYQRHTVSILISYCQGGSLMSQVYWNQQEKPPSSSNAPPGLSVNKAQHRHVCCRGEMLKRVQVHYVRAGESDSASFHCVAQGPRAFGKPLILSKENHLLTVTAIAKLNHKLCEIKSMGVFINTEPLYDSCLEQKHALFASPPATTHSTTMISKAKVIPMLSLTPGSFQTVESSLAPSAGKFQGTETSSLKTLINLCCPKLPSPSPAHLGGLPGGSQERPSRQYLYESARTTVLLGLGCPLKQIQLRSQHSSPLEYLESLPKKDRKKREKIQINKVRDEKGDITTNSAEIQRMVIGYHEQLYANKLENLEEMDKFLDTYDLPRLNHEEIQKLDRPITSNKIEAVKKSLPVKKSLEPDGFTAEFHQTFR

SEQ ID NO: 37292 - protein, 562 aa, Homo sapiens
  DOMAIN (244)..(289): kw TRANSCRIPTASE REVERSE II ORF2 domain identified by eMATRIX, accession number DM01354N, p-value=1.000e-40, raw score of 13.17
  DOMAIN (259)..(511): Reverse transcriptase domain identified by PFam, accession name rvt, E-value=4.2e-34, PFam score of 126.7
  misc_feature (1)...(562): Xaa = X or * as defined in Table 2
MLKGSIQQEELTVLNIYAPNTGAPRCIKQVLSDVQRDLDSNTLIMGDFNTPLSTLDRSTRQKVNKDTQELNSALHQADLIDIYRTLHPKSTEYTFFSAPHHTYSKIDHILGSKALLSKCKRTEIITNSLSDHSAIKLELRIKNLTQNRSTTWKLNNLLLNDYWVHNEMKAEIKMFFETKENKDTTYQNLWDAFKAVCRGKFIALNAYKRKQERSKIDTLTSQLKELEKQEQTHSKEIQTTIREYYKHLYTNKLENLEEMDKFLDTYTLPRLNQEEVESLNRPITGSEIVAIINSLPTKKSPGPDGFTAEFYQRYKEEMHINRAKDKNHMIISIDAEKAFDKIQQPFMLKTLNKLGIDGTYFKIIRAIYDKPTVNIILNGQKLEAFPLKTGTRQGCPLSPLLFNIVLEVLARAIRQEKEIKGIQLGKEEVKLSLFADDMIVYVENPLPSQPQNLLXGWLSNFSKMSSGYKINVQKSQAFLYTNNRQTESQIMSELPFTIASKRIKYLGIQFTRDVKDLFKENYKPLLNEIKEDTNKWKNIPCSWVGRINIVKMAILPKVIYRF

SEQ ID NO: 37293 - protein, 738 aa, Homo sapiens
  DOMAIN (460)..(485): 7 kw REVERSE TRANSCRIPTASE RNA POLYMERASE domain identified by eMATRIX, accession number DM00895E, p-value=5.111e-11, raw score of 15.72
  DOMAIN (431)..(683): Reverse transcriptase domain identified by PFam, accession name rvt, E-value=4.5e-53, PFam score of 189.7
MEERDAFEACSCSVQLGLISSYRFGPDVLLMSSSPSLDQQANQDISSHGRSKRRASPTAQVHLQALLISSLLVFYRAKQVTGPNPTSMKQRDFKPTKIKRDKEGHYIMLCTKRTLIDIYRTLHPKSTEYTFFSAPHHTYSKIDHILGSKGLLSKCKRTEIITNYLSDHSAIKLELRIKNLTQNRSTSWKLNNLVLNDYWVHNEMKAEIKMFFETNENKDTTYQNLWDAFKAVCRGKFIALNAHKRKQEISKIDTLTSQLKELEKQEQTHSKASRSQEITKIRAELKEIETQKTLQKINESRSWFFERINKIDRPLARLIKKKREKNQIDTIKNDKGDITTNPTEIQTTIREYCKHLYANKLENLEEMDKFLDRLNQEEVESLNRPITGAEIVAIINSLPTKKSPGPDGFTAKFYQRYKEELVPFLLKLFQSIEKERILPNSFYEASIILLPKPGRDITKKENFRPISLMNIDAKILNKILANRVQQHKKLIHHDQVGFIPGMQGWFNIHKSINVIQHINRTKDKNHMIISVDAEKACDKIQQPFMLKTLNKLGIDGTYLKIIRAIYDKPTASIILNGQKLEAFPLKTGTRQGCPLSPLLFNIVLEVLARTIGQEKEIKGIQLGKEEVKLSLSADDMIVYLEKPIISAQNLFKLISNFSKVSDTKSIATSTKNTPQCTNMPQCTNILKLASSNQCGSSQESSLSQSKVYLPGAPSTHMTAPCASSSSSSSAGATASNFI

SEQ ID NO: 37294 - protein, 640 aa, Homo sapiens
  DOMAIN (493)..(538): kw TRANSCRIPTASE REVERSE II ORF2 domain identified by eMATRIX, accession number DM01354N, p-value=1.000e-40, raw score of 13.17
  DOMAIN (113)..(317): AP endonuclease family 1 domain identified by PFam, accession name AP_endonucleas1, E-value=2e-25, PFam score of 97.9
MGESVQSLLTLAQKRSMMIQVAVAPRTPTLLLKLYKEKASKTQLKKVNLVVQDGQSLESIEVHDHEPADTYKLLSLVKEPAEEIPRVIQNVFGHRSKKENLKDSYGLRQSSTMVATTWNNVSLMQHHSLRRPNRHLTASYPHFHFQEIPVNFFHSGRDSESFGWNQHIKKDKEGHHIMVKGSIQQEELTMLNIYAPNTGAPRFINQVLSDIERDLDSHKIIMGDFNTPLSTLDRSTRQKVNKDTQELNSALHQADLTDIYRTLHPKSTEYTLFSAPHHTYSKIDHIVGSKALLSKWKRTEIITNCLSDPRAIKLELRIKKLTQNRSSIWKLNNVLLNDYWVHNEMKAEIKIFFETNENKDTSCQNLWDTFKAVCRGKFIALNAHRRKQERSKIDTLTSQLKELEKQERTHSKASRRQEITKIRAEMKEIETQKTLQKINESRSWFFEKINKIDRPLARLIKKKREKNQIDAIKNNKGDITTDPTEIETTIREYYKHLYTNKLENLEEMDKFLDTYTLPRLNQEEVESLNRPITGSEVVAIINSLPTKKSPGPDGFTAEFHQRYKEKLISELLPMPNHTALKKQTQDLSDCKAMFLYYQSVSVQTAIINYHRLRGLNNRNLFLTVLEYSSLRSGCEHSRVL

SEQ ID NO: 37295 - protein, 615 aa, Homo sapiens
  DOMAIN (397)..(438): kw TRANSCRIPTASE REVERSE II ORF2 domain identified by eMATRIX, accession number DM01354I, p-value=1.000e-40, raw score of 15.55
  DOMAIN (126)..(385): AP endonuclease family 1 domain identified by PFam, accession name AP_endonucleas1, E-value=4.2e-41, PFam score of 150.0
MSLTKMLICAALLGLFCMLLGLRWQVAELIGMTLALSSTAIAMQAMNERNLMVTQMGRSAFAVLLFQDIAAIPLVAMIPLLATSSASTTMGAFALSALKVAGALVLVVLLGRYVTRPALRFVARSGLREVFSAVALFLVFGFGLLLEEVGLSMAMGAFLAGVLLASSEYRHALESDIEPFKGLLLGAVFTPRVVVNIYSSELRTAKNYQANGKQKKPGVAILVSDKTAFKPTEIKRDKEGHYIMVKGSIQQEELTILNIYAPNTGAPRFIKQVLSDLQRDLDSHTLMMGDFNTPLSTLDRSTRQKVNKDTQELNSALHQADLIDIYRILHPKSTEYTFFSAPHHTYSKIDHIVGSKALLSKCKRTEIITNYLSDHSAIKLELRIKNLTQSRSTTWKLNNLLLNDYWVHNEMKAEIKMFFETNENKDMTYQNLWDTFKAVCRGKFIALNAHKRKQERSKIDTLTSQLKELEKQEQTHSKASRRQEITKIRAELKEIETQKAIQKINESRSWGPPGNCQQNYRNSESGEKSAPEGQAQHAGPTEGKVPTFLYVGKEKFPPSYLLTRKSSHLPTCGDPICGEKCWRVPTTSGQGNKADQWGGVGIGDTDHDSAGTLCQ

SEQ ID NO: 37296 - protein, 745 aa, Homo sapiens
  DOMAIN (7)..(54): kw TRANSCRIPTASE REVERSE II ORF2 domain identified by eMATRIX, accession number DM01354V, p-value=1.000e-40, raw score of 12.97
  DOMAIN (663)..(742): Ribosomal protein L23 domain identified by PFam, accession name Ribosomal_L23, E-value=1.3e-25, PFam score of 90.4
MSELPFIIATKRIKYLGIQLTRDVKDLFKENYKPLLKEIREDTNKWKNIPCSWIGRIDIVKMAILPEVIYRFNAIPIKLPMTFFTELEKTTLNFIWNQKRVCIAKTILSKKNKAGGIMLPNFKLYYKATVTKTAWASYPMAAQFFAPQKYLNLTSMLTHLPPTSQISTGTPTINRYTENRLHPFPPTRLQDPVLKLQSLQSRNPRTSYEIHSNGRSRQWTNMKLEQPGDRARSHLRKKKKKKKEDEKEKEEKEEEKEKKEEEKEKKEKEKKEEEKEKKEKEKKEGEKEKSTGARQTFLRQSRLQCGYNDEKPFLALELTTSHATGPDIGTAVIMTLQVSGVSVVTTWQELLPLLSDARPTVEGDAKFRYALEASGKQRPCQGVQRGPTSSKAHPGLTSQAVRKGGTDAIVSNTKITEVCQALFTTLQAGTMPYNFLFLAESGTVLSTRTVLEYLCSGLLAKHQNPGTKVLRRPKQVQQALSLGVPSALNWCRLQHVCKVAGRPVFAQQGPGSRGPNQGEVIGLHAMTLPASGTHTPQAQGPGWHHGKILKRSLGVNKEPKNLPTCLAHHYWYLNCCPICCLRNADPFHKTVLKAKKEVPAPPKAKAKAKALKAKKAVLKGVHNHKKKKIHTSPTFRRPKTLQLRRQPKYPWKSTPRRNKLDHYAIIKFPLTTESAMKKTGDNNTRVFMVDVKANKHQIKQAVKRLYDIDMIKVNTLIWPDGEKKAYVPLAPDYDALDVANKIGII

SEQ ID NO: 37297 - protein, 985 aa, Homo sapiens
  DOMAIN (479)..(524): kw TRANSCRIPTASE REVERSE II ORF2 domain identified by eMATRIX, accession number DM01354N, p-value=1.000e-40, raw score of 13.17
  DOMAIN (563)..(838): Reverse transcriptase domain identified by PFam, accession name rvt, E-value=4.7e-88, PFam score of 306.0
MELKTKARELREECRSLRSRRNQLEERVSAMEDEMNEMKREGKFREKRIKRNEQSLQEIWDYVKRPNLRLIGVPESDAENGTKLENTLQDIIQEDFPNLARQANVQIQEIQRTPQRYSSRRATPRHIIVRFTKVEMKQKMLRAAREKDFKPTKIKRDKEGHYIMVKGSIQQEELTILNIYAPNTGAPRFIKQVLSDLQRDLDSHTLIMGDFNTPLSTLDRSTRQKVNKDTQELNSALHQADLIDIYRTLHPKSTEYTFFSAPHHTYSKIDHIVGSKALLSKCKRTQIITNYLSDHSAIKLELRIKNLTQSRSTTWKLNNLLLNVYWVHNEMKAEIKMFFETNENKDTTYQNLWDTFKAVCRGKFIALNAHKRKQERSKIDTLTSQLKELEKQEQTHSKASRRQEITKIRAELKEIETQKTLQKLNESRSWFFERINKIDRPLARLIKKKREKNQIDTIKNDKGDITTDPTEIQTTIREYYKHLYAYKLENLEEMDTFLDTYTLPRLNQEEVESLNRPITGSEIVAIINSLPTKKSPGPDGFTAKFYQRYKEELVPFLLKLFQSIEKEGILPNSFYDASIILIPKPGRDTTKKENFRPISLMNIDAKILNKILANRIQQHIKKLIHHDQVGFIPGMQGWFNIRKSINVIQHINRAKDKNHMIISIDAEKAFDKIQQPFMLKTLNKLGIDGTYFKIIRAIYDKPTANIILNGQRLEAFPLKTGTRQGCPLSPLLFNIVLEVLARAIRQEKEIKGIQLGKEEVKLSLFADDMIVYLENPIVSAQNLLKLISNFSKVSGYKINVQKSQAFLYTNNRQTESQIMSELPFTIASKRIKYLGIQLTRDVKNLFKENYKPLLKEIKEDTNKWKNIPCSWVGRINIVKMAILPKVIYRFNAIPIKLPMTFFTELEKTTLKFIWNQKRARIAKSILSQKNKAGGITLPDFKLYYKATVTKTARPHDWYRTESKSSWTYEGFLSPFVDEFEWHWNK

SEQ ID NO: 37298 - protein, 717 aa, Homo sapiens
  DOMAIN (378)..(423): kw TRANSCRIPTASE REVERSE II ORF2 domain identified by eMATRIX, accession number DM01354N, p-value=1.000e-40, raw score of 13.17
  DOMAIN (463)..(710): Reverse transcriptase domain identified by PFam, accession name rvt, E-value=3.4e-60, PFam score of 213.4
KSLKDLMELKIMAQELCDEWTSLSSRCNQLEERVSVMEDEMNEMKDKHRPKIKEWRKIYQANGQQKKTRVANLVSDKTEFKPTKIKRDKEGHYIMVKGSIQQEELTIVNIYAPNTGAPRFIKKVLSDLQRALDSHTIIMGDFNTPLSTLDRSTRQKVNKDIQELNSALHQADLIDIYRTLHPKSTEYTFFSAPHYTYPKIDHIVGSKALLSKCKRTEIITNCLSDHSAIKLELKIKKLTQNLSTTWKLNNLLLKDYWVHKEMKAEIKMFFETNKNKDTTYQNFWDTFKAVCRGKFIALNAHKRKQEGFKIDTLTLQLKELEKQEQTHSKASRRINKIDRPLARLIKKKREKNQIDTIKNDKGDITTDPTEIQTTIREYYKHLYANKLENLEEMDKFLDTYTLPRLNQEEVESLNRPITGAEIVAIINSLPTKKSPGPDGFTAKFYQRYKEELVPFLLKLFQSIEKEGILPNSFYEASIILIPKPGRDITKKENFRPISLMNIDAEILNKILASQMQQHIKKLIYHNQVGFIHGMQGWFNIHKSINVIQHINRTKDKNHTIISLDAEKAFDKIQQPFMLKLKTLNKLGIDGMYLKIIRAIYDKPTANIILHWQKLEAFPLKTGTRQGCPLSPLLFNIVLEVLARAVRKEKEIKRTQIGREEIKLSLFADDMIVYLENPIVSAQNLLKLISNFTKVSGYKINVKKSQAFLYNNSRQTDS

SEQ ID NO: 37299 - protein, 1658 aa, Homo sapiens
  DOMAIN (522)..(547): 7 kw REVERSE TRANSCRIPTASE RNA POLYMERASE domain identified by eMATRIX, accession number DM00895E, p-value=7.828e-10, raw score of 15.72
  DOMAIN (515)..(798): Reverse transcriptase domain identified by PFam, accession name rvt, E-value=9.6e-71, PFam score of 248.4
  misc_feature (1)...(1658): Xaa = X or * as defined in Table 2
MLPIKRHRLANWIKSQDPSVCCIEETHLTCRDAHRHKIKGWRKIYQANGKQNKTKQQKKQGLQILVSDKRDFKPTKIKRDKEGHYIMVKGPIQQEELTILNIYAPNTGAPRFIKQVLSDLQRDLDSHTLIMGDFNTPLSTLDRSMRQKVNKDTQELNSALHQADLIDIYRTLHPKSTEYTFFSAPHHTYSKIDHILGSKALLSKCKRTEIITNYLSDHSAIKLKLRIKNLTQNHSTTWKLNNLLLNDYWVYNEMKAEIKKDVLXNQKRTKDTTYQNLWDAFKAVCRGKFIALNAHKRKQERSKIDTLTSQLKKTREAKSKQTHSKASRRQEITKIRAELKEIETQKALQPFKKNQXIQGAGFFEKINKIDRXPLARLIKKKREKNQIDAIKNDKGDITTTDPTEIQTTIREYYKHLYANKLENLEEMDKFLDTYTLPRLNQEEVESLNRPITGAEIVAIINSLPTKKSPGPDGFTAEFYQRYKEELVPFLLKLFQSIEKERILPNSFYEASIILIPKPGRDTTKKENFRPISLMNIDAKILNKILANQIQQHIKKLIHHDQVGFIPGMQGWFNIRKSINVIQHINRAKDKNHMIVSIDAEKAFDKIQQPFMLKTINKIGIDGMYFKIIRAIYDKTTANIILNGQKLEAFPLKTGTRQGCPLSPLPLLFNIVLLPHSVLARAIRQEKEIKGIQLGKEEVKLSLFADDMIVDLENPIVSAQNLLKLISNFSKVSGYKINVQKSQAFLYTNNRQTESQIMSELPFTLTTTRIKYLGIQLTRDVKDLFTENYKPLLNEIKEDTNKWKNIPCSWVGRINIVKMAILPKVIYRFNAIPIKLPMTFFTELEKTTLKFIWNQKRARIAKTILSQKNKAGGITLPDFKLYYKATVTKTAWYWYQNRYIDQWNRTENHSLPPIRRHTYNYLTFDKLDKNKQXRKNSLFNKWSXDNWLAIWRRLKVDPFLTPYTKINSRWIKDLNVRPKTIKTLEENLGITIQDIGVGKDFMSKTPKAMATKAKIDKWDLIKLKSFCTAKETTIRVNRQPTTWETIFTTYSSDKGLISRIYNELKQIYKKKTNNPIKKWAKDMNRHFSKEDIYAAKKHMKKCSSSLAIREMQIKTTMRYHLTPVRMAIIKKSGNNRCWRGCGEIGTLLHCWWDCKLVQPLWKSVWRFLRDLELEIPFDPAIPLLGIYPNDYKSCCYKDTCTRMFIAALFTIAKTWNQPKCPTMIDWIKKMWHIYTMEYYAAIKNDEFMSFVGTWMKLETIILSKLSSSLKHGHSWEVLSVPQAQLFSYLQLLLLHSHLLEGARAREIQGSSVAKGKMPAKNAELLVKNQMISWIGQINSRPKEQKNPKTETEAVRSERRCGCCCPSVWKPEHSHDLLQSHREPAAELWVQVSGHLAHISVCERMCMMWSQSSGPVLLLYSCREQQAREARKQVGQRNLQAHEKMMCRDYSHQMASELFTECNRPVEKGVHICQKGTLSSSKIRGETCCTQLCRTFHTPQWRKELAPSRRGLRIWKVLSSHSYWHVYLHADLTPTEDLSSQRHEVESNKASAIQQEELTILNIYAPNTGGPRFIKQVLSDLQGDVDSHTIIMGDFNTPLSTLDRSTRQKVNKDTQELNSALHQADLIDIYRTLHPKSKEFTFFFSTTPHLFPKLDHHSWK

SEQ ID NO: 37300 - protein, 159 aa, Homo sapiens
NPRAWEKQQPPTSPQEFCLVCFVVHLQKSTREALNNKNIKPLLSTFSQVPGSINHSSCENVLAIISLAIGGVTEGICTASTPFVLLGDVLDCLPLDQCDTIFTFVEKNVATWKSGTASLPAAFMAGVEHLWLFQVNGANCQWIYPSGVWRTVALFSQLH

SEQ ID NO: 37301 - protein, 104 aa, Homo sapiens
MAWCLGTGEWELERDVCGPGICTASTPFVLLGDVLDCLPLDQCDTIFTFVEKNVATWKSGTASLPAAFMAGVEHLWLFQVNGANCQWIYPSGVWRTVALFSQLH

SEQ ID NO: 37302 - protein, 160 aa, Homo sapiens
  misc_feature (1)...(160): Xaa = X or * as defined in Table 2
QSRALLWPMLVDVIQPKPWKAPGSLGLPSCISAITVQSSPGLRLCSCGQGPRVNTPGTKLPQPNRPVSLSFSQMKLLTSSHWKSFHCPAXINPAQSSPGPWPXPQLSGCPAFQFLSFGXKSLLSSGNTASSSPLWFLCWCFLNLVLQAKLPDGFRPAHRV

SEQ ID NO: 37303 - protein, 56 aa, Homo sapiens
  misc_feature (1)...(56): Xaa = X or * as defined in Table 2
ELKICSCDPITVRYNADDSTVSLSFSQMKLLTSSHWKSFHCPAXINPAQSSPGPWP

SEQ ID NO: 37304 - protein, 673 aa, Homo sapiens
  DOMAIN (588)..(670): Death domain identified by PFam, accession name death, E- value=8.6e-24, PFam score of 92.5
PTRPAAAQWRARAAEKMSPTPPLFSLPEARTRFTKSTREALNNKNIKPLLSTFSQVPGSENEKKCTLDQAFRGILEEEIINHSSCENVLAIISLAMGEVTEGICTASTHFVLLGDVLDCLPLDQCDTIFTFVEKNVATWKSNTFYSAGKNYLLRMCNDLLRRLSKSQNTVFCGRIQLFLARLFPLSEKSGLNLQSQFNLENVTVFNTNEQESTLGQKHTEDREEGMDVEEGEMGDEEAPTTCSIPIDYNLYRKFWSLQDYFRNPVQCYEKISWKTFLKYSEEVLAVFKSYKLDDTQASRKKMEELKTGGEHVYFAKFLTSEKLMDLQLSDSNFRRHILLQYLILFQYLKGQVKFKSSNYVLTDEQSLWIEDTTKSVYQLLSENPPDGERFSKMVEHILNTEENWNSWKNEGCPSFVKERTSDTKPTRIIRKRTAPEDFLGKGPTKKILTGNEELTRLWNLCPDNMEACKSETREHMPTLEEFFEEAIEQADPENMAENEYKAMNNSNYGWRALKLLARRSPHFFQPTNQQFKSLQEYLENMVIKLAKELPPPSEEIKTGEDEDEEDNDALLKENESPDVRRDKPVTGEQIEVFANKLGEQWKILAPYLEMKDSEIRQIECDSEDMKMRAKQLLVAWQDQEGVHATPENLINALNKSGLSDLAESLTNDNETNS

SEQ ID NO: 37305 - protein, 218 aa, Homo sapiens
  misc_feature (1)...(218): Xaa = X or * as defined in Table 2
EFYRTGKVHRAPGVQEVTEDPRDPLAQLATRDRKERRGSLDHLALRVREAQLDQLVPPESVAAKDLKAPRAPKAPVVPLGSPALRAPVGTQAPRAHQAKRDSPALRALLASRDFRAPLGSLGCLDLGDCQACLGYQACQAPRAPPALLAHQERWCPWPCRMSQPQHRRTMAARLTGRTSQTNATIFQLRKKFLRMQSFSVKTSLHILFSXTLERNSNG

SEQ ID NO: 37306 - protein, 276 aa, Homo sapiens
  DOMAIN (206)..(220): C-type lectin domain proteins domain identified by eMATRIX, accession number BL00615B, p-value=1.857e-10, raw score of 12.25
  DOMAIN (150)..(219): Lectin C-type domain identified by PFam, accession name lectin_c, E-value=0.074, PFam score of -6.3
RGGRVCTKQHCEQNHGRMNMAWCLGTGEWELERDVCGPGICTASTPFVLLGDVLDCLPLDQCDTIFTFVEKNVATWKSHTEDREEGMDVEEGEMGDEEAPTTWIPKKAFTPKYMPVLGLMLLSTFDIDLITRDVTVFLRISPNALEALLFLCPRDLICKEKLCITVQITFNFCFAKRNWKAGQPDNWGHGHGPGEDCAGLIYAGQWNDFQCEDVNNFICEKDRETGRWDPQSSGPKLLKPATQGGHGIPTPLQAQQPLEATLSPLFHALPGFQVSN

SEQ ID NO: 37307 - protein, 60 aa, Homo sapiens
  misc_feature (1)...(60): Xaa = X or * as defined in Table 2
CSTSSRTYXIPSRCFSKGXHWRHTVNSNFGPMGNPSHPTTSSAHHTVPLIESQPSSTSKK

SEQ ID NO: 37308 - protein, 161 aa, Homo sapiens
PPERSPASSPCQPIYECELASQAPEKQPDVRHHHLPKTKPLPSIDSLGPPPPKPSRPPIVNLQAFQRQPAAVPKTQGEVTVEEGSLSPERLFNAEFEEPHNYEATISYLRHSGNSINLCTAKEIADLLEVKKLATQKHQWAQQQLQLKPALSSQTTRKRAT

SEQ ID NO: 37309 - protein, 40 aa, Homo sapiens
QKQGPLYTHGPRFHSLESMRPRTPGQRTKGLQPFCEQLPP

SEQ ID NO: 37310 - protein, 144 aa, Homo sapiens
  misc_feature (1)...(144): Xaa = X or * as defined in Table 2
RLQNRTILASDLSGSDRWRRTYRCLXRHGPRFSSCRLSCRRPFDKTCRLMCHQRLSGFPQEQTQRDSRCIQLLFRQRFAAASCPTHQVHVHRWRKPMVFLILESDLKYTVLSLPEECHTGAHEQSSHCLLLSLASVDVHCSQRP

SEQ ID NO: 37311 - protein, 115 aa, Homo sapiens
  DOMAIN (9)..(62): Clathrin light chain proteins domain identified by eMATRIX, accession number BL00224B, p-value=1.082e-09, raw score of 16.94
KKKRKKKIEEEEEEEEEEEEEEREEEGDEEQEEEEEEEEEEEEEEEEEEEEEEEDDDDDNGLLQTLPGLHEMRVNLTRSDGIISVWHFPFWHFSFLMPYEEGALLRLHLPPYTMI

SEQ ID NO: 37312 - protein, 64 aa, Homo sapiens; identical to SEQ ID NO: 34745
  DOMAIN (1)..(52): Neuromodulin (GAP-43) proteins domain identified by eMATRIX, accession number BL00412D, p-value=2.370e-10, raw score of 16.54

SEQ ID NO: 37313 - protein, 169 aa, Homo sapiens
  DOMAIN (57)..(110): Clathrin light chain proteins domain identified by eMATRIX, accession number BL00224B, p-value=1.736e-09, raw score of 16.94
MEKNEKEQEEEEKKEKNSKKKEEEEEEEGGGEEEEEEGEGGEEEEEEEEEEEEEEEEEEEEEEEEEEEEDKEEEEEEEEEEEEEEEEEEEEEEEEEEEEEEEEEEEKVVEEEDEFIWFLGNSLYFPSFSHFAWSQIPSREDEGERRLRVNSMIMDFTSNTNHVQLIVAR

SEQ ID NO: 37314 - protein, 106 aa, Homo sapiens
  DOMAIN (49)..(84): Troponin domain identified by eMATRIX, accession number PF00992A, p-value=3.418e-11, raw score of 16.67
MGPIHKISHYVYANISKSEKVLKSEHFRSQAFQPGQQSETVSEKEEEDEEEEEEEEEEEEEEEEEEEEEEEEEEEEEEEEEEEEEEEEEEEEEEEEEEEEEEEEEI

SEQ ID NO: 37315 - protein, 58 aa, Homo sapiens; identical to SEQ ID NO: 34743
  DOMAIN (3)..(38): Troponin domain identified by eMATRIX, accession number PF00992A, p-value=7.188e-12, raw score of 16.67

SEQ ID NO: 37316 - protein, 253 aa, Homo sapiens
  DOMAIN (188)..(241): Clathrin light chain proteins domain identified by eMATRIX, accession number BL00224B, p-value=8.529e-10, raw score of 16.94
  misc_feature (1)...(253): Xaa = X or * as defined in Table 2
MIANLKKKAMKELLKLPCPWISQCLEKGVCHLHLARGNSERDIDTKRLHNEGDRIVPAQNMPLWHKDYFELKAIKKQQEEKRNSFFGVTLTVYLCRYIDKLMIFFLNQDFWLPGKLTAQSVSATSTPSSYLPSGLGDKSETPSEEEEEEEEEEEGEGEGEGEGEGEEEERRRRRRGRRRRKKKKKKKEEEERRRRRRKKKKKKEEEEEEEEEEEEEEEEEEEEEEERKKERKKERKKERRQIHSSFMPFVRKX

SEQ ID NO: 37317 - protein, 109 aa, Homo sapiens; identical to SEQ ID NO: 36874
  DOMAIN (67)..(95): Granins proteins domain identified by eMATRIX, accession number BL00422C, p-value=8.054e-13, raw score of 16.18

SEQ ID NO: 37318 - protein, 408 aa, Homo sapiens
  DOMAIN (353)..(406): Clathrin light chain proteins domain identified by eMATRIX, accession number BL00224B, p-value=6.885e-10, raw score of 16.94
  misc_feature (1)...(408): Xaa = X or * as defined in Table 2
MPSSKGVHVHSPPRYLAAKDFKMINKELTAATFMEVIAEDNRFIYDGIDSNFEPELVFLEFFEALLSFAFICVTDQMTKSYTNVPADDVSGNKHETIYTILNQDAQNKSPSAVMSHESDAAHSDSARSSSSKLELSPDVNKIRKSEAMVKEKKKADKKGEKSARSPSSLSDNLDFSKQDGNTTRQEMSPAGVPLLGMQLNEVKPKKDRQNVQQNEGCHPIRRVHSDQTHSGKLXRGKGSWDCMREKASQPFKAVVPIVXVVPFENLQEGEEGRLCEECPDEPRRVHVAGRSMYEGEVVNGMRNGFGMFKCSTQPVSYIGHWCNGKRHGKVGEVATWRAEKKKKEEEEEEEEEEEEEEEEEEEEEEEEEEEEEEEEEEEEEEEEEEEEEEEEEEEEEEEEEEEEEKIRP

SEQ ID NO: 37319 - protein, 60 aa, Homo sapiens; identical to SEQ ID NO: 34324
  DOMAIN (1)..(52): Neuromodulin (GAP-43) proteins domain identified by eMATRIX, accession number BL00412D, p-value=4.273e-14, raw score of 16.54

SEQ ID NO: 37320 - protein, 186 aa, Homo sapiens
  DOMAIN (6)..(50): PROTEASE IMMUNOGLOBULIN PRECURSO domain identified by eMATRIX, accession number PD01781B, p-value=2.320e-09, raw score of 27.55
KHIQKKEEEEEEEEAEEEEEEEEEEEEEEEEEEEEEEEEEEEEEEEEEEEEEEEEEEEEEEEEEEEEEEEEEEEEEEEEEEEEEEEEEEEEEEEEEEEKCSLKHTEAPCVKGIETIFWNKFSLCDITKSYLSGVQKLEERAHKVKLALKFKKEIKMALHGGNPIWLSSVTLVFGVLMYWEMEECDD

SEQ ID NO: 37321 - protein, 65 aa, Homo sapiens; identical to SEQ ID NO: 34287
  DOMAIN (4)..(55): Neuromodulin (GAP-43) proteins domain identified by eMATRIX, accession number BL00412D, p-value=2.688e-13, raw score of 16.54
  misc_feature (1)...(65): Xaa = X or * as defined in Table 2

SEQ ID NO: 37322 - protein, 51 aa, Homo sapiens
MACAIAIEVQLTSAEPASIGFPVQKSPCGHLQLNGYKSSSKQGFPTPALFF

SEQ ID NO: 37323 - protein, 704 aa, Homo sapiens
  DOMAIN (528)..(545): 3'5'-CYCLIC NUCLEOTIDE PHOSPHODIESTERASE SIGNATURE domain identified by eMATRIX, accession number PR00387F, p-value=1.900e- 21, raw score of 14.79
  DOMAIN (356)..(600): 3'5'-cyclic nucleotide phosphodiesterase domain identified by PFam, accession name PDEase, E-value=2.1e-187, PFam score of 538.3
LLKQESWNSSVKITTCNVGDKKNINDRRSANMMHVNNFPFRRHSWICFDVDNGTSAGRSPLDPMTSPGSGLILQANFVHSQRRESFLYRSDSDYDLSPKSMSRNSSIASDIHGDDLIVTPFAQVLASLRTVRNNFAALTNLQDRAPSKRSPMCNQPSINKATITEEAYQKLASETLEELDWCLDQLETLQTRHSVSEMASNKFKRMLNRELTHLSEMSRSGNQVSEFISNTFLDKQHEVEIPSPTQKEKEKKKRPMSQISGVKKLMHSSSLTNSSIPRFGVKTEQEDVLAKELEDVNKWGLHVFRIAELSGNRPLTVIMHTIFQERDLLKTFKIPVDTLITYLMTLEDHYHADVAYHNNIHAADVVQSTHVLLSTPALEAVFTDLEILAAIFASAIHDVDHPGVSNQFLINTNSELALMYNDSSVLENHHLAVGFKLLQEENCDIFQNLTKKQRQSLRKMVIDIVLATDMSKHMNLLADLKTMVETKKVTSSGVLLLDNYSDRIQVLQNMVHCADLSNPTKPLQLYRQWTDRIMEEFFRQGDRERERGMEISPMCDKHNASVEKSQVGFIDYIVHPLWETWADLVHPDAQDILDTLEDNREWYQSTIPQSPSPAPDDPEEGRQGQTEKFQFELTLEEDGESDTEKDSGSQVEEDTSCSDSKTLCTQDSESTEIPLDEQVEEEAVGEEEESQPEACVIDDRSPDT

SEQ ID NO: 37324 - protein, 237 aa, Homo sapiens
  DOMAIN (193)..(237): Involucrin proteins domain identified by eMATRIX, accession number BL00795C, p-value=7.100e-09, raw score of 17.06
MKKCKTSVIGIATFYLSIPHIYTPPNQTSSFMACAIAIEVQLTSAEPASIGFPVQKSPCGHLQLNGYKSSSKQGFPTPLLKQESWNSSVKITTCNVGDKKNINDRRSANMMHVNNFPFRRHSWICLDRVQSETLPQEKKEEEEERRRRRRKKKEEEERRRRRKKKKKEEEEEEEEEEEEEEEEEEEEEEEEEEEEEEEEEEEEEEEEEEEEEEEEEEEEEEEEEEEEEEERKKELVH

SEQ ID NO: 37325 - protein, 254 aa, Homo sapiens
  DOMAIN (107)..(160): Clathrin light chain proteins domain identified by eMATRIX, accession number BL00224B, p-value=5.582e-09, raw score of 16.94
MQVRDFILEVSETKNPPEGTSYGHIKRMILSIMISRQHKEEEEEEERRRRKEKKGEERRRKEKKGEEEEEEEEEEEEEEEEEEEEEEEEEEEEEEEEEEEEEEEEEEEEEEEEEEEEEEEEEEEEEEEEEEEEEEEEEEEEEEEEEEEEEEEEEGLSIKYMTSTKTLSDINGFEKLLPVHPILAVLEDAFSSSGKHDNKGKEEKQNRKQGIQDDREQKDVPQMMTMQAVQGDRTVGKSPKEKNIIEHLELRLNL

SEQ ID NO: 37326 - protein, 227 aa, Homo sapiens
  DOMAIN (167)..(219): Ubiquitin domain proteins domain identified by eMATRIX, accession number BL00299, p-value=5.424e-15, raw score of 28.84
  DOMAIN (70)..(227): Ubiquitin family domain identified by PFam, accession name ubiquitin, E-value=9.2e-29, PFam score of 93.5
MIQRKRASIGAPCAWVRKKEEEEEEEEEEEEEEEEEEEEEEEEEEEEEEEEEEEEEGENNLAMGKSFNVITVHVRSEEWDLMTFDANPYDSVKKIKEHVRSKTKVPVQDQVLSLGSKILKPRRSLSSYGIDKEKTIHLTLKVVKPSDEELPLFLVEPGDEGKRHLLQVRRSSSVAQVKAMIETKTGIIPETQIVTCNGKRLEDGKMMADYGIRKGNLLFLASYFIGG

SEQ ID NO: 37327 - protein, 142 aa, Homo sapiens
TRFQGVYLPLLWEQSFCWKSPIALGYTRGHFSALVAMENDGYGNRGAGANLNTDDDVTITFLPLVDSERKLLHVHFLSAQELGNEEQQEKLLREWLDCCVTEGGVLVAMQKSSRRRNHPLVTQMVEKWLDRYRQIRPCTSLF

SEQ ID NO: 37328 - protein, 266 aa, Homo sapiens
SCSSGNSQRRSPPATKRDSEVKMDFQRIELAGAVGSKEELEVDFKKLKQIKNRMKKTDWLFLNACVESTMVHLNLEKEPGASLEQTHIFVLAHILRRPIIVYGVKYYKSFRGETLGYTRFQGVYLPLLWEQSFCWKSPIALGYTRGHFSALVAMENDGYGNRGAGANLNTDDDVTITFLPLVDSERKLLHVHFLSAQESWDAAGWYEGPWENAESLRPLGRRSSLTYGTAEGTWFEPNHRPQDAALPVAAEPYLYREAVYNSVAAR

SEQ ID NO: 37329 - protein, 311 aa, Homo sapiens
DHNSSPAMEQNWMENAFDELTEVGFRRWVITNFSKLKEHVLTQCKEAKKLEKRLEELLTRITSLEKNINDLMELKNTSQELREAYTTEERISEIEDQLNEIKHEDRIREKRVKRNEQSLQEIWDYVKRPNLHLTGVPESDGENGTKLENTLQDIIQENFPNLARQANIQIQEIQRTPQRYSSRRATPRHIIIRFTKVEMKEKMLRAAREKGQVTHKGKPIRLTADPLAETLQARREWGPIFNILKEKNFQHRMSYPAKLSFISVGEIKYFTDKQMLRDFVTTRPALQELLKDALNMERNNQNQSLQKHAKL

SEQ ID NO: 37330 - protein, 290 aa, Homo sapiens
DHNSSPAREQNWMENEFDELTEVGFRRWVITNSSELKEHVLTQCKEAKNLDKRLDKLLPRITSVEKNINDLMELKNTAQELHEAYTSINTQIDQAEEKISEIEDQLNEIKPNLRLIGVPESDGENGTKLENTLQDIIQENFSNLAKQANIQIQEIQRTPQRYSSRRTTPRHIIIRFTKVGMKEKMLRAAREKSRVTHKGKPIRLTVDLSAETRKEWGPIFSICKEKNFQPRISYPAKLSFISEGEIKSFTNKQMLRDFVTTRPALQELLKEALNMEKNNRYQPLQKHTKL

SEQ ID NO: 37331 - protein, 195 aa, Homo sapiens
HQRPKVDKSTKMRKNQRKKSEHSKNQNASSPKDHNSSLAREQNWIEIEFDELTEVGFRRWVITNSSELKEHVLTQCKEAKNLEKRLDELLTRITNLEKNINDLMELKKDITQENFPNLARQANIQIQEIQRTPQRYSSRSATPRHIIIRFTKVEMKEKMLRPAREKDRVTHKGKPIRLTVDLSAETLQARREWGP

SEQ ID NO: 37332 - protein, 344 aa, Homo sapiens
MEYYAAIKNDEFMSFVGTWMKLEIIILSKLSQEQKTKHRIFSLIEHLGEGAAVGAASADFLLALKRTFLPASSEENSRSQSRVLGFWRHLTAGVNRHLIRESSGWHLVGAPLGRSFQRKEQAAVFAVLQTLLVIPRQTGSGMDLQQSPADLQQRGLSVRRKTNKQKGIASTSTKRTSTQKPHPKGTIIKNQRDRRRLQKLGNNKPSELQEHVLTQCKEAKNLEKGLEELLTRITSLEKNTNDLIELKNTAQELHEAYTSINSPIDQAEERISEIEDQLNKIKCEDKFGEKEMKRKEQSLQEIWDYVKRPNLRLIGVLENDRDNGTKWKNTLQDIMQKNFPNLAR

SEQ ID NO: 37333 - protein, 256 aa, Homo sapiens
REHLAEGMAVGTASADLNISACWLRREQQISQHSARALLRDRLPPQENSSWHPAGAPLGRNFQRKEQAAIFAVLQPPLVIPRKTGSGVDLEQTPADLQKRGLTVTRKTNKQKAIASTSTERTPTQKPPFKSHQHQRPNVDKSAKMRKNQSKKAENSKNQNTSSPPKDHNSSPAREQNWTENEFDELTEVGFRRWVITNSSKLKEHVLTQCKETKKLDKRLEELLTIITSLEKNINDLMELKNTAGELRDAYTSINS

SEQ ID NO: 37334 - protein, 970 aa, Homo sapiens
  DOMAIN (194)..(235): kw TRANSCRIPTASE REVERSE II ORF2 domain identified by eMATRIX, accession number DM01354I, p-value=1.000e-40, raw score of 15.55
  DOMAIN (363)..(603): Reverse transcriptase domain identified by PFam, accession name rvt, E-value=4.8e-36, PFam score of 133.2
MEEDLPSKWKTKKAGVAILVSDKTDFKPTKIKRDKEGHYIMVKGSIHQEELTILNIYAPNTGAPRFIKQVLSDLQRDLDSHTIIMGDFNTPLSTLDRSMRQKVNKDTQEFNSALHQADLIDIYRTLHPKSTEYTFFSAPYHTYSKIDHIVQSKALLSKCKRSEIITNCLSDHSAIKLDLRIKKLTQNHSTTWKLNNLLLNNYWVHNEMKAEIKMFFETNENKDTTYQNLWDTFKAVCRGIFIALNAHKRKQETSKIDTLTSQLKELEKQEQTHSKASRRQEITKIRAELKEIETQKTLQNINESRSWFFERINKIDRPLARLIKKKREKKQIDTIKNDKGDITTDPTEIQTTIREYYKHLYTNKLKNLEEMDKFLDTYTLPRLNQEEVESLNTPITGSEIVAIINSLPTKKSPGPDGFTAEFYQRYKEELMQKRPFDKIQQPFMLKTLNKLGIDGTYLKIIRAIYDKPTANIILNGQKLEAFPLKTGTRQGCPLSPLLFNIVMEVLARAIRHDKEIKGIQLGKEEVKLSLFADDMIVYLENPIVSAQNLKLISNFSKVSGYKINVQKSQAFLYTNNRQTESQIMSELPFTIASKRIKYLGIQLTRDGKDLFKENYKPLLNEIKEDTNKWKNIPCSWVGRINIMKMAILPKVIYRFNAIPIKLPMTFFTELEKTTFKFIWNQKRAHIAKSILSQKNKAGGITLPDFKLYYKATVTKTAWYWYQNRDIDQWNRTEPSEITPRLKRAADLPAQYLSSAEGQTASSRGSLTPLAPDEETPLSRGQQTPHTGELQLALGGCPSGTNLPEEGTGNNLCCSAASAGDTRQQDLEWSSSELQQTCSRGNPSEGHQHQRSKVDKSMKMRKNQCKKAENSKNQNTSSPPKDQNSLPAREQNWTENWFDEFSEVGFRRWVITNSSELKEHVLSQCKEAKNLEKRLEELLTGIISVEKNINVLMELKSTAQELREACTSINS

SEQ ID NO: 37335 - protein, 75 aa, Homo sapiens
MRKNQCKKAENSKNQTASSPLKDHNSSPAREQSWTENEFNELTEVGFRRWVITNSYVLKEHVLNQCKEAKNLEKS

SEQ ID NO: 37336 - protein, 230 aa, Homo sapiens
LKRAADLPAQYLSSAEGQTASSRGSLTPLAPDEETPLSRGQQTPHTGELQLALGGCPSGTNLPEEGTGNNLCCSAASAGDTRQQDLEWSSSELQQTCSRGNPSEGHQHQRSKVDKSMKMRKNQCKKAENSKNQNTSSPPKDQNSLPAREQNWTENWFDEFSEVGFRRWVITNSSELKEHVLSQCKEAKNLEKRLEELLTGIISVEKNINVLMELKSTAQELREACTSINS

SEQ ID NO: 37337 - protein, 404 aa, Homo sapiens
MKEPMKSSKESAANELVKYLFAISSNEQEKTFSAAVRYHFFADSPIGQCNHLHISELKLRILSERNSTRFLRTLCTIGFTETGPRKWAAKLCPYKAGKASPEAVAAAVVREKISSLQWTDEGLKGSGRGALPSSQVKRETLFKSHLKSAFSGVWVDLRPTDNTMAPIPLGKSYCRSRSSSELIVEQAEKRSFRVQESKGNNGKMMQNYEILINIGQIKSKFIFTPEHVHIGEMWLKSTSREKEIIDSNEKKEEEETLSKGHQHRRPKVDKSMKMGRNQCKKTENSKNQNTSSPPKDHNSSPAREQNWIENEFDELTEVGFRRWIINSSELKEHVLIQCKEAKNLEKRLDELLTRITSLEKNINDLMELKNIARELHDAYTSINSQIDQAEERISEVADQLCEIK

SEQ ID NO: 37338 - protein, 380 aa, Homo sapiens
MAKGQGESWLLDQEALAEIEKQQQKYKSLEARAVSPVLDAGWTLPSGSLQSAEESAERELNIDHGAARPSLLHDQADHQAFGAPIFLDQQSESPKPSYAEVLRISEKKAAARQGLADKIPTFLGQSTWGKVALKRAADLPVQRSNSDTGQTASSSGSLTPVYPDWETPPSRGRPCIYHLTQESSGWHLAGAPFGQSFQRKEQAAIFAVMQPLLVIPRQTGSGVDLQQTPVDLKQRERNNININKKDVLSETSSEDHRLQRSKVDKSTKMGRNQCKKAENSKNQNAYSPTKDHNFLPAREQNWTESEFDELTEVGFRRWVITNSSELKEHVLTQCKEAKNLEKRLDELLIRITSSEKNINDLMEVKNTAQELREAYTGINS

SEQ ID NO: 37339 - protein, 190 aa, Homo sapiens
MDGDLHKGVAVFWPPDAAGGHTCCRSMVCRSLLGGAQWKFHSFRCRIRFELILHMIQERNSINISQKDVHTETPSETHHHQRPKVDKSMKMRRNQCKKAENSKNQKASSPPKEHNSWRAREQNWTENEFDKLTEVGFRRWVITNSSELKEHILTQCKEAKNLEKTLEELLTRITSLEKNINDLMKLKNTA

SEQ ID NO: 37340 - protein, 162 aa, Homo sapiens
MRNPGLRPCLWQLSIDDEIGEALRKCELVNRVWSGPQQTPADLQQRGLTVRRKTNQTERNSININKKDIPTKTPSEGHQHQRPKDHNSLPAREENWTENEFDELAEVGFRRWVMTNSSELKEHILIQCREAKNLEKRLEELLTKITSLEKNINDLMKLKNTA

SEQ ID NO: 37341 - protein, 492 aa, Homo sapiens
  DOMAIN (105)..(157): Sulfate transporters proteins domain identified by eMATRIX, accession number BL01130B, p-value=8.541e-15, raw score of 23.34
  misc_feature (1)...(492): Xaa = X or * as defined in Table 2
MEVNREKQLNELEVIGSEEQNLEEEGLMIGGVAVRLVPDDIVIPGGVNATNGTEARDALRVKVAMSVTLLSGIIQYLLSALGWSYYTVDGVSQKNPRALGVTADQLHAIFTTMSDEQASFRFGFVAIYLTEPLVRGFTTAAAVHVFTSMLKYLFGVKTKRYSGIFSVVYSTVAVLQNVKNLNVCSLGVGLMVFGLLLGGKEFNERFKEKLPAPIPLEFFADHNSSPAREQKWMENEFDEWTEVSFRRWVITNSSELKEHILTQCKEAKNLEKRLEELLTRITSLEKNINDLMELKNTAQEFHEAYTSINSRNQTEERVSEIEDQLNEIXCKDKIREKKRMKRNEQSLQEIWDCVKRPNLRLTGVPESDGENGTKLENTLQDIIQENFHNLARQANSQIQEIQRTPQRYSSRRATPRHIIIRFTKVEMKEKMLRAAREKGRVTHKGNPIRLIADLSADTLQARRQWEPIFNILKENFQTRISHPAKLSFISKG

SEQ ID NO: 37342 - protein, 360 aa, Homo sapiens
MPEPPIPSMGSCAARASPTSASPAPRRPVPSTTQRLRSAGAWHGTGRQLHLQPRCWINWVKPSGLLSLVGPRRTFMSSSGIVNTPVGTLSVAQANLVGTWRTFVSSSGIENAPISALSDHWALPISRMWSCIPIFAALKIFFNIIASQLTHNNADIGTAGDCDLKQLKMSAYTTSCLMGVQGGLPLPPSAPSLNCPLFRRSGKVGSRKDRRPEPWSRYQVIRSPSRCPLRTPLLPSGVRRSVKPAGLPVPKAELKAKISQEHSRRRQRRWRPDLALSPLGEPDHNSSQAREQNWMENEFDELTEVGFRTWVIANSSELKKHVLTQCQEAKNLEERLDEFLTRITRLEKNINDLMELKNTA

SEQ ID NO: 37343 - protein, 1167 aa, Homo sapiens
  DOMAIN (753)..(773): DYNAMIN SIGNATURE domain identified by eMATRIX, accession number PR00195F, p-value=8.500e-20, raw score of 16.20
  DOMAIN (751)..(979): Dynamin central region domain identified by PFam, accession name dynamin_2, E-value=1e-08, PFam score of -30.9
MIVYLENPIVSAQNLLKLISNFSKVSGYKIYKIDVQKSQAFLYTNNRQTESQIMSELPFTIASKRIKYPGIQLTRNVKDLFKENYKPLLNEIKEDTNKWKNIPCSWIGRINIVKMAILPKVIYRFNAIPIKLPMTSFTELEKTTLKFIWNQKGARIAKTILSKKNKVGGITLPDFKLYYKATVTKTAWYWYQNRDIDQWNRTEASEITPPIYNHLIFDKPDKNKKWGKDSLFNKWCWENWLAICRKLKLDPFLTSYTKINSRWIKDLNVRPKTIKTLEENLGNTIQDIGMGKDFMTKTPKAMATKAKIDKWDLIKLKSFCTAKETTIRVNRQPTKWEKNFAIYPSDKGLISRIYKELKQIYKKKIKKSHQKHYSQQQNHGINLSPPTVDWIKKTGDTYTIEYYAAIKKNEIMSFTATWTELEAIILREITEIGNKIPHIHTYKCELNSGFFEANENKDTTYQNLWDTFKEVCRGKFIALNAHKRKQERSKIDTLTSQLKELEKQEQTHSKASRRQKITKIRAELKEIETQKTLQKINESRSWFFERINKIDRLLARLIKKKREKNQIDAIKNDKGDITTDPTEIQTTIREYYKHLYANKLENLEEMDKFLDTYTLPRLNQDEVESLNRPITGSEIVAIINSLPTKKSPGPDRFTAKFYQRYKEELNQRQKPHDYPNRCRKAYKIQHPFMLKTLNKLGIDGTYLKIIRAIYDKPTANVILNGQKLEEFPLKTGLRTIGVITKLDLMDEGTDARDVLENKLLPLRRGYVGVVNRSQKDIDGKKDIKAAMLAERKFFLSHPAYRHIADRMGTPHLQKVLNQVLGKVFIVLSLRCLLISVEMPSRWLCQAFNSRESFPLLSHGVALGSRDGSMRVDRHLIRESSGWHLVGAPLGRNFQRKEQTAVFAVLQPPLVIPRQTGSGVDLQQTPADLQQRGLTVRRKTNKSEKNSINVNKKDIHTETPSEDHQPQRPKVDKSMKMRRKQCKKAENSKNQNVSSPPKDHNSSSEREQNWKENEFDELTEIGFTRWVITNSSELKEDGLTQYKEAKNLEKILEELLTRETSLEKNINDLMELKNTARELREAYTSINSQINQAEERISEIEDHLNEIKHEDKIREKRMQRNEQSLQEIWGYVKRPSLHVIGVPESDGKNGTKLENTFQDIIQENFPNL

SEQ ID NO: 37344 - protein, 184 aa, Homo sapiens
IGVNRHLIQESPSWNLAGAPLEQIFQRKEQAAIFAILQPLLVISRQTGSGVDPQQTPADLQKSGSDSREQNKTENEFDELTEIGCRRWVITNSSELKEHVVTQCKEAKNLEKMLQELLTRITSLEKNINDLMELKNTAQELREAYTIINSQTDQAEERISEIEDQLNEIKGEDNIREKTVKRNE

SEQ ID NO: 37345 - protein, 193 aa, Homo sapiens
MGKKQCKKAKNSKNQNASSPPKDHNSSPAGEQNWMENELTEVGFRRWVVTDSSKLKEHVLTQCKEAKNLEKRLQELLTRITSLEKNIYDLMELKNTARELRDAYISISSRIDQAEKRISEIEDQLNEIKREDKIREKNEKDEQGLQEIWDYVKRPNLHLIGVPGLLYSDMCRLLPSPRNQPALQALERGVILE

SEQ ID NO: 37346 - protein, 309 aa, Homo sapiens
MKVYGSHPLKQRPKLYLEPFEPRLGPDLPGCEEQPPRVAQGSCDLGLAPETNQSSWTFVIILVNPEQTLTLFNSMKAERGKEAADEKLEVRRGYPEDLAKIIDEASTSDTQANRVWSKAPAKSSRPAEQQPYFRRKTSKQKGIVATSTIKDIHSQTPSKGHQHQRPKVDKSTKMGRNQCNKAENSKNQNASSPSKDHNSSPAKEQDWMENEFDELTEVGFRRWVITNSSELEEHVLTQCKEAKNLEKRLDELLTIITSLEKNTNDLMELKNIAEELYEAYTSFNSRIDQAEERISKKGRISEIEEQLMQ

SEQ ID NO: 37347 - protein, 453 aa, Homo sapiens
  misc_feature (1)...(453): Xaa = X or * as defined in Table 2
MAAGRHLPVGADRHLIQESTGWHLAGAPLGWSFQRKEQTAIFAVLQPLLVIPRQTGYGVDLQQMPADLQQRFLTVRRKTNKQKGIVSTSTKRTSSEGHQHQRRKVDKFTEMGRNQHKKAENSKNQNASSPPKDHNSLPAREQNWTENEFDELTEIDFRRWVITNSSQTKGSMFXPXCKEAKNLEKRLDELLTRITSLEKNINDPMELKNTARELREANKSINSXIDQGRKERVSEIEDQLNEIKREDKIREKRMQRNKQTLQEIWDYVKRPNLHLIGVPESDRENGTKLENTLQDIIQENFPNLARQANIQIQEIQRTPQRYSSRRATPRHIIVRFTKVEMKEKMLRAARKKGQVTHKGKSIRLSADFSAETLQARREWGPIFNILKEKNFQPKISYPAKLSFISEEEITSFTDKQTLRDFVTTRPALQELLKEAVNMERKNQYQPLQKHTKM

SEQ ID NO: 37348 - protein, 199 aa, Homo sapiens
MAVVIPAALGTAALVPWSILRGKAPRYWLLPLLLDPDKVPIISARDLTSPDAALASLTAQSGGLEELHLKLVHEVAVMANTECQLDWIEGCKVLILACRLWDLVIMTHPAFYQSVQWGKGNDQTFQGRLDTGCELMLIPGDPNCGPPVKVGVYGGIIYHCDLTKEELEPRVFREVTVKGIDASDYQTVQLPKGTESSRN

SEQ ID NO: 37349 - protein, 261 aa, Homo sapiens
  DOMAIN (1)..(25): Gag P30 core shell protein domain identified by PFam, accession name Gag_p30, E-value=3.7e-05, PFam score of 21.5
DCQQLLLTLFTSEKNERIRKEAKNNSSHQPIDRKKTLETSLKRSFPLPGLTGTQIPQCFNPATLLPDSECTIPAHDCQELLETIETGRSDLQDVPLEKADAAVFTDSSRFLKQEVGKASAAVTMKTDVLWNNFEMCSTSPPKGPQWGQILVAWSERFHTVLQICGTLLHSGLFVPQQNWAELLMWTLFNNGLKREKPMNSDQDVDTPKLDRQAGESLKAKYLMPPFVTMTSPSHFTAIPAKHHSAHFTRCPSKPQHPSFLE

SEQ ID NO: 37350 - protein, 75 aa, Homo sapiens
RLLEPQGPLRAGSSPAGKIGGTLERRGMPWPGPHSEGGLSPLLLGASLAAAPHGEMPSVRVHPVRPSSRDCSSRV

SEQ ID NO: 37351 - protein, 237 aa, Homo sapiens
  DOMAIN (173)..(191): GLIADIN AND LMW GLUTENIN SUPERFAMILY SIGNATURE domain identified by eMATRIX, accession number PR00208A, p-value=3.219e- 09, raw score of 12.59
MVTVAGDKVFKEAIMVIWQLKGGTLIQQDWCPPENGKTLKTTHTEKTRAKNASTCNCPSITSAWLFAEGNQRRKFSPTAPTQLMEQSPTWHSPKLGSDATYFQNTGKILKPAGELSGPACTHSSTPQAFVPGAPGMHVKEEPRAQRDGKTARSNHEVGEQKEAQVRESPWELAGQQQQQQQQQQQQQRSPCGRNRSPYLSTEAPSHLSRYSEDWATEAAHPSNQLLPAPSRPLSRCC

SEQ ID NO: 37352 - protein, 379 aa, Homo sapiens
  DOMAIN (315)..(333): GLIADIN AND LMW GLUTENIN SUPERFAMILY SIGNATURE domain identified by eMATRIX, accession number PR00208A, p-value=3.219e- 09, raw score of 12.59
MPLTYSQILAGVGAHMSADVKRPAPPGAEDPMEQVSQCPRCCLPFHLHVSFNAGVRTSRVPPSCLRDSNLPSTAPEVLAAFRAQHDHLGTLQSTNTCNKVLKTSCSELSYLAGTRDLHNAGVPSGVNVDWCFRGTCRRGSHPKVTVAGDKVFKEAIMVIWQLKGGTLIQQDWCPPENGKTLKTTHTEKTRAKNASTCNCPSITSAWLFAEGNQRRKFSPTAPTQLMEQSPTWHSPKLGSDATYFQNTGKILKPAGELSGPACTHSSTPQAFVPGSPGMHVKEEPRAQRDGKTARSNHEVGEQKEAQVRESPWELAGQQQQQQQQQQQQQRSPCGRNRSPYLSTEAPSHLSRYSEDWATEAAHPSNQLLPAPSRPLSRCC

SEQ ID NO: 37353 - protein, 221 aa, Homo sapiens
MEYYAAIKKDEFVFFAGTWTKLETIILSKLTQEQKTKHHMFSLWVRGLAGLRSEAADLRDVTALKAVRTQRVSSSKVYCKERKNKASTGSRPGLLCDFRHAPTGGGEEPEPAMVLQEALEPAMCLDRYPHVQLEASELLLEDGGSALATELNTAKLALAYAGMEMNDLVVSCGLGLAPGSVPTWLLDPMRLEEEHTAPGVTLALLPMLNQVARLLAAGRAA

SEQ ID NO: 37354 - protein, 65 aa, Homo sapiens
MWHIYTVEYYATIKKDEFMSFAGTWMKLETIILSKLTQEQKTKHRIFSLSHAPPSLAIETRILFP

SEQ ID NO: 37355 - protein, 97 aa, Homo sapiens
MEYYAAIKNDEFMSFVGTWMKLETIILSKLSQGQKTKHHIFSLIEAQAQVSPPPPYPAPQELTQPLLQQPRAPEAPAQQPQAASSLPQSDFQLLPAQ

SEQ ID NO: 37356 - protein, 113 aa, Homo sapiens
TWNQPECPTMIDWIKKMWHIYTMEYYAAIKNDEFMSFVGTWMKFSLCHLVSTTEALPVTLNLFSHLGLPQLPPHQWVQTHSWTSAPECFKKPPMHPAQTMNSLSCPYLALYAF

SEQ ID NO: 37357 - protein, 146 aa, Homo sapiens
MEYYAAIKKDEFMCFAGTWMKLETIILSKLTQEQKTKHCMFSLKRSAGLPLTSRRTSREKAGGGSHCLRAWVQPHCPTSRTNACELLNNARCGPPASSLTMRGPMPDLLCSDRIRGIESALRLQSPILMPPPGRGFCCPGTSFRMA

SEQ ID NO: 37358 - protein, 83 aa, Homo sapiens
WHIYTMEYYAAMKKDEFMSFAGTRMKLETIILSKLIQDQKTKHQDLPASGEIQHITSCGGYRAKLLLFEKSRGKVKGSLSCTL

SEQ ID NO: 37359 - protein, 70 aa, Homo sapiens
MWHIYTTEYYAAIKKDEFMSFVGTWMKLETIVLSKLLQGQNPNTACSHSQELELNEKINEEITHIQEEKQ

SEQ ID NO: 37360 - protein, 55 aa, Homo sapiens
MKYYAAIKKDKFMSFSGKWMKLETIILSKLTFYSFFLFSLGPMHVAQFTGVDPGK

SEQ ID NO: 37361 - protein, 115 aa, Homo sapiens
MEYYAAIKKDEFMSFVGTRMKLETIILSKLSQGQKTKHRMFSLIGSGSPSAAVYTAVLTACTAGWVPATHRRAVGTQKGVVARVPEQVKGDLRAGSFLKTAQAFLGSVVSFHQDA

SEQ ID NO: 37362 - protein, 129 aa, Homo sapiens
MEYYAAIKKDEFMSFAGTWMKLEIIILSKLTQEEKTKHCTFSSGFCRFRNHHQTGFSPAGANQRGPLAATLSGPGGEGQSAVARLTGEKKNHPGAQYANRLSPRVGRFINAAGTTGFPTGKRAVSATQL

SEQ ID NO: 37363 - protein, 154 aa, Homo sapiens
MEYYAAIKKDELMSFVGTRMTLETIILSKLTRTENQTLHILTDKRELNNENPWKQGGEHHTPGPVEELGARGGIALGEMPNIDDGLMGYVTQWQLRSQGGTRAARALGKRHSSSMTLGVVEHTGKSGTGTRVWHAAQQQLQPHGWCSITVAQIL

SEQ ID NO: 37364 - protein, 602 aa, Homo sapiens
  DOMAIN (156)..(205): kw TRANSCRIPTASE REVERSE II ORF2 domain identified by eMATRIX, accession number DM01354Z, p-value=8.742e-13, raw score of 9.06
  DOMAIN (13)..(337): Protein of unknown function UPF0096 domain identified by PFam, accession name UPF0096, E-value=8e-24, PFam score of 92.6
MDAMKYNDLRDFLTLLEQQGELKRITLPVDPHLEITEIADRTLRAGGPALLFENPKGYSMPVLCNLFGTPKRVAMGMGQEDVSALREVGKLLAFLKEPEPPKGFRDLFDKLPQFKQVLNMPTKRLRGAPCQQKIVSGDDVDLNRIPIMTCWPEDAAPLITWGLTVTRGPHRERQNVGQLEKVGLRIKKMWHIYTMEYYAAIKKDEFMSYAGTWMKLETIILSKLSQGQKTKHRMLSLIGTRMKLETIILSKLLQGQKNQTPYILTHRISFEDVRNYMPLAVIHSDESPILPLHEQQDASENGWIKDTERDADLEIYIVSGIGSFRWVLGLADFKSEAADPCGMKLQTFAVSVTALKGGASRVVHSSWWVCVLTDFRSEAAYLSVTALEGGASRVAHSSRFVVSLTSGVKLQTFTVNATAHKGSADPKSEQHQDLLQRAKKHTFHSMKGEPRRVVAAGWGGAIKADSNNLILLFQTIEKYCPWFPDKGSVDLLDWDRVGTTLCQLMRDGVLLPISVWTDWALIRVALLPFQSGDTLQLPQVNADVEPLPLPRCIGGITGPEGGDPPGPSFHYLVGVYYFLTCRSTWEQRKSPVALRAAGQIPQ

SEQ ID NO: 37365 - protein, 383 aa, Homo sapiens
  DOMAIN (136)..(181): kw TRANSCRIPTASE REVERSE II ORF2 domain identified by eMATRIX, accession number DM01354N, p-value=7.000e-38, raw score of 13.17
  DOMAIN (222)..(382): Reverse transcriptase domain identified by PFam, accession name rvt, E-value=4.2e-06, PFam score of 17.0
EHMDTGRGRSHNHTLGPVVGIVTPKPLLVLILGQFWQFNCQGRSMSALTQALAQCVHQTVEDCRWDSHYNRCPQLQGHGAVVVPGPLGTRPHSRSSYPMHSGHFLSSILDTLSSTHRNRMNKRKEEHQIQTTFREYYKHLYLNKLENLAEIDKFLDTNTLPRLNQEEVESLNKPQTSSEIEAIINSLPTKKSPGPERFTAKFNQRYNEELVPFLLKLCRTLEKEGLLPNSFYEASIILIPKPGRDTTKKENFRPISLMNINAKILYKILANRIQQHIKKLIHHDQVGFIPGMQGWFNIHNIHKLINVIHHINRTNDKNYMIISRDAEKAFDKIQHPFMLKTLNELGTDVTYLKIIRAIYDKPTASIILNGQKLEALPLKIGTR

SEQ ID NO: 37366 - protein, 65 aa, Homo sapiens
NFTGQSGTPLKFQNLPVYTHNWKKENTKPPRDNGKPFSAGTLKVLNGIKAVIISLLENNYKVSEH

SEQ ID NO: 37367 - protein, 253 aa, Homo sapiens
MRQHQDLQSIKPHACHVRDCPRASCQPENDTPPDSAFPIPTPCPGFRIAHPLGLLPYFGESFTSFLKKTGTPLKFQNLPVYTHNWKKENTKPPRDNGKPFSVGTLKVLNGIKAVIISLRENNYKVVNAALFLLVLEKACFRAADMRPKKLLFKQPPDLLLTSSQRDILCDVRDNCVRCQENQEKGKPGVGIKCKQTPPCNMVFQCLLIEGENCGEDALREAERFVIGDEEFERFLERHKEVSCLVPESNQKVV

SEQ ID NO: 37368 - protein, 561 aa, Homo sapiens
  DOMAIN (354)..(409): kw TRANSCRIPTASE REVERSE II ORF2 domain identified by eMATRIX, accession number DM01354Q, p-value=1.000e-40, raw score of 9.23
  DOMAIN (320)..(560): Reverse transcriptase domain identified by PFam, accession name rvt, E-value=1e-53, PFam score of 191.8
MPLGLSPNGCRRIPQNEDPTVPTMILERNKFNSAGSNGKPLIKVLFSAVWVGLTRPTRVTGSQRQATDYSITAFRTGGKGRKWHHRSPVRAGARLRDCSWGYDTTVKAGVEGKPLLPSALQSQVPPVVQTQAESSCQGSLKSDIHRVNLWGTEKVWGCIRGEGKVERRDSWHFSDTRSYWELMEREQRVMSPPGSCQWRHRQENQAQSLPATCSVTSLADYDLEFRSPDLQFTWGSPRSLHPTRARAEHFWSVSPWCLPPLCKVDGHDGIQLSHPDSLGVDIHFTRTQTQATLKQFSVFPPPPRILITTLISTLPKSMSLAQVGLHFQLPVRHNKKENFRPISLMNIDAKILNKILANRIQQHIKKLIHHDQVGFIPGMQGSFNIRKSINVIQYINRTNEKNHMIISIDAEKAFDKIQQCFMLKTLNKLGIDGMYLKIIRAIYDKPTASIILNGQKLEAFPLKTGTRQGCPLSPLLFNIVLEVLARAIRQEKEIKGIQLRKEEVKLSLFADDMIVYLENPIVSAQNLLKLIGNFSKVSGYKINVQKSQAFLYTNNRQTAKS

SEQ ID NO: 37369 - protein, 324 aa, Homo sapiens
  DOMAIN (204)..(262): Integrase core domain identified by PFam, accession name rve, E-value=0.0012, PFam score of 16.7
MDIETETIDSGNYRKWQGGRGTRAEQLPVGYYSHYLGAGINHTPNLSVTQYTHDKNLHTFPSRKSKKTSKCDIIIKQKRHKSPKEKALQQVQAAVQAVLPLGPYDPADPMVLEVPVADRDAVWSLCQAPIATPVIAQWAHEQSGHGGRDGGYTWAQQHGLPSSKAKLATATAECPICQQQRATLSPRCGTIPRGDQPATWWQKGKRFVLTGIDTYCGYGSAYSARNASAKTTIHGLTECLFHCLGIPHSIASDRGTHFMDKEAPSASVLGLALALLAPQLADSLLEDPVIVKADPLILGPVNCPLAQVTKTTLAQVHLGNDARK

SEQ ID NO: 37370 - protein, 143 aa, Homo sapiens
WGPEQEKALQLVQAAVQAALPLGSYDPADPMVLEVSVADRDAVCSLWQAPIGESHHKVGRAQQHSIIKWKWYICDRARASPEGTSKLHEEVAQMPMVSTPATLPSLPKPALMALWRVPYDQLTEEEKTRDWFTDGSAGYAGTT

SEQ ID NO: 37371 - protein, 250 aa, Homo sapiens
DQTFWGLLETGSELMLIPGDPKCHCGPPVKVGAYGGQEIKGVLAQVQITVGPVGTRTHPVVISPVPECIIGIDILSSWQNPHTGSLTGRVRVIMVEKAKWKPLELPLPRKIVNQKQYCIPGGIAEISATIKDLKDTGVMIPTTSPFNSPIWPVQKTDGSWRITVDYQVVTPIAAAVPDVVSLLEQINTSPGTWQHITHLDVLLWRIYQVTQKAASFEWGPEQEKALQQVQAAVQALCHLGHMTQQIQWCL

SEQ ID NO: 37372 - protein, 143 aa, Homo sapiens
FPSRKSKKTSKCDIIIKQKRHKSPKEKALQQVQAAVQAVLPLGPYDPADPMVLEVPVADRDAVWSLCQAPIATPVIAQWAHEQSGHGGRDGGYTWAQQHGLPSSKAKLATATAECPICQQQRATLSPRCGTIPRGDQPATWWQ

SEQ ID NO: 37373 - protein, 505 aa, Homo sapiens; identical to SEQ ID NO: 34632
  DOMAIN (159)..(343): Reverse transcriptase domain identified by PFam, accession name rvt, E-value=7.9e-07, PFam score of 27.3

SEQ ID NO: 37374 - protein, 507 aa, Homo sapiens
  misc_feature (1)...(507): Xaa = X or * as defined in Table 2
MGEERRWRPSSNGKHGAFAELDKGWLVWLEGKGVIGARRSWRAHSALIKICVQQIKDSLPGKMSKGLLQQQQKPKHLLHDLYKAMSTRWGVQKARLNCTALPPTGCVTLDPSFLTEPQFPRQLSEDLLLTREALEKEVQLRRQLQQEKEELLYRVLGANASPAFPLAPVTPTEVEKERELELRDRLDEQQRVLEGKNEEALQDPRLVDPLTSCTVHFEKPQMLNARLWKHAGREAVACKVRGSELPKTMGTYPLHQHDLDVRHGVKGDHFGALRFDCPAGFWTCMGPLAPSFWPISPIWNGPPLDISGYPATSTQKSTMCLRIIDTRLHPESRLKQQSNFALNAREKALQQVQAAVQAALPLGPYDPADPMVLEVSLADRDAVWSLWQAPIGESQQRPLGFWGKALPSSADNNSPLERQLLARYWALVETEYLTMGHQVTMXPELPIMNWVLSDPSSHKVVYAWQHSIIKWKDRAXAGLAGTSKLHEEVAQMPIVSTPATLPSCRIL

SEQ ID NO: 37375 - protein, 730 aa, Homo sapiens
  DOMAIN (190)..(207): RNase H domain identified by eMATRIX, accession number PF00075A, p-value=8.759e-10, raw score of 14.44
  DOMAIN (457)..(516): Integrase core domain identified by PFam, accession name rve, E-value=1.7e-07, PFam score of 30.0
MSYIRKELLEFSNLYKQKSGYLWPFTRVTVHWGKGNDQTFRGLLDIGSELMMVPGDPKCHCGPPVKAGAYGSHIINSVLAQVQLTVGPVGPRTCLVVISPVSEGIIGIDILSSWQNPHIGSLTGRVRAIMVGKAKWKPLELPVPRKIVNQKQYCISRGIVEIRATTKDLKDAGLVIPTKYPFNSPIWPLQKTGGSWRMTMNYRELNQVVTPIAAAVPDVYQPSGFAALCHHLIHRDLDHFSLPQDMTLVNCIDDIMLIGSSEQEVANSLDLLERHLHDRGWEINLTQIQELSTLVKFLGVQWCGACPDIPSKVKDKLLHLAPPTAKKETQHLVGLFGFWRQHIPHLGVFLWPIYQVTQKAASFEWGPEQEKALQQVQDAVQAALPLGPYDPAYGSTHVIAQWAHKQSGHGGRDGCDIRAQQHGLPLTKADLAAATAECPICQQQRPTVSPRYGTISQGDQPATWWQLDYTEPLPPWKGQRFVLTRIDTYSRYGFAYPAGNASAKTINRGFIECLIHSPARIHGYRNQRVEVEVAPLTITLRDSLAKFLLPVPETLCSPGLEILVPEGGILPPGETTIPLNYKLRLPSGHFGLLLPLSQQAKKEVTMLIGVIHPDYQDEIILLLHNGGEIDTSQLGDSRTSDKESDQDTLGQRLSHQDSWWLQAHGFAGYCRYHSHGLEESSCSSSRLVLHAGGSTGLESQSHPISPGPLGFALVAALCSSLDPIIPLSIA

SEQ ID NO: 37376 - protein, 48 aa, Homo sapiens
ESLMEKAKKCSAGLAERSGIPPTPSLISGSFFLDISGLRPASRSWSTQ

SEQ ID NO: 37377 - protein, 184 aa, Homo sapiens
  DOMAIN (93)..(108): OESTROGEN RECEPTOR SIGNATURE domain identified by eMATRIX, accession number PR00543E, p-value=5.950e-09, raw score of 5.40
  misc_feature (1)...(184): Xaa = X or * as defined in Table 2
LWSLCAPVLQVPCLRAAFPVFTRRHAPSAGRGFTRSYVSAGSWTETQQGLWGSLTKLGADGLLLGISKHLVEFLQIFQISGCWGHYCYLQILFFALNSISPSYHVLLFNVQFGFIFNFMVLCVPXAGTHIAPCKSSSRTRGMSSCENWKGCSKARHLQYWSTKTPQSLSFFCCGIHFVTAVCQP

SEQ ID NO: 37378 - protein, 162 aa, Homo sapiens
  DOMAIN (66)..(86): TRANSFERRIN SIGNATURE domain identified by eMATRIX, accession number PR00422B, p-value=1.614e-15, raw score of 8.85
  DOMAIN (67)..(93): Transferrin domain identified by PFam, accession name transferrin, E-value=0.027, PFam score of 10.8
MYCKCLALEQPFQFSQEDMPRVRKRIYKELYFQLFYLSMLDVEREAKSRIKSIWLLFWLKNDAEQVDAVTLSGEDIYTAGKTYGLVPAAGEHYAHALFPERQHTHVSAVAPDPPRAAVLSVHTHYPASWPKSSRDTPPGLLRTGLHPPPRTRSAPRSLRVLG

SEQ ID NO: 37379 - protein, 404 aa, Homo sapiens
  DOMAIN (7)..(54): kw TRANSCRIPTASE REVERSE II ORF2 domain identified by eMATRIX, accession number DM01354V, p-value=1.000e-40, raw score of 12.97
MSEFPFTIASKRIKYLEIQLTRDVKDLFKENYKPLLKEIKEDTSKWKNIPCSWVGRINIMKMAILPKAIYRFNAIPIKLPKTFFTELEKTALRFIWNQRRARIAKSILSQKNKAGGITLPDFKLYCKATVTKTACQEVAVVTNGKILRHCLYQLLIVLRTLPGSNLMLMKVISFFRKHQAQTKTNFILQIKTVSGQSQTSEMSFLTVSSTAFLQLPPQFRPPEGSNSSPVRLPSPRLPPLQHWMSTVSWAKVDLSQTLTFSSISGPHSSSPSSVFLLSGSCGLQHPETVRLSSSCTEWFCLSMACQPAVGHYQSALTPTSSISTPWEFVEFLDTNPDLLNQNPQFSRTAQALLLRYLSIAGIHTASPISPRDSCSQNHPAAEQQDEQNFPCEQETRLKLHVCQS

SEQ ID NO: 37380 - protein, 104 aa, Homo sapiens
FSKQILSTVNDGSPSCIDPTAIMTSLQSLCPGTPPLPVISLAQDSASLSLWERQGSPGLVKMTLVHFLVTREATSPSSNDLVASSPSSSLQTVLGPPCQAMKED

SEQ ID NO: 37381 - protein, 1113 aa, Homo sapiens
  DOMAIN (470)..(517): kw TRANSCRIPTASE REVERSE II ORF2 domain identified by eMATRIX, accession number DM01354V, p-value=1.000e-40, raw score of 12.97
  DOMAIN (32)..(239): AP endonuclease family 1 domain identified by PFam, accession name AP_endonucleas1, E-value=3.5e-26, PFam score of 100.4
MGKKQNRKTGNSKNQSASPPPKERSSSPATEQSWMENDFDELREEGFRLSNYSELPEDIQTKGKEVENFEKNLEECITRITNKRNFKPTKIKRDKEGHYIMVKGSIQQEELTILNIYAPTGAPRFIKQVLSDRQRDLDFHTLIMGDFNTPLSTLDRSTRQKVNKDTQELNSALHQADLIDIYRTLHSKSTEYRFFSAPHHTYSKIDHLLGSKAFLSKCKRTEIITNYLSDHSAIKLELRIKNLTQNRSTTWKLNNLLLNDYWVHNEMKAEMKMFFETNENKDTTYQNLWDAFKAVCRGKFIALNAHKRKQERSKIDTLTSQLKELEKQEQTHSKASRRLNQEEVESLNRPITGSEIVAIINSLPTKKSPGPDGFTAKFYQMLEVLARAIRQEKEIRGIQLGKEEVKLSLFADDMIVYLENPIVSAQNLLKLISNFSKVSGYKINVQKSQAFLYTNNRQTESQIMSELPFTIASKRIKYLGIQLTRDVKDLFKENYKPLLKEIKEDTNKWKNIPCSWVGRINIVKMAILPKVIYRFNAIPIKLPMTFFTELEKTTLKFIWNQKRARIAKSILSQKNKAGGITLPDFKLYYKATVTKTAWYWYQNREIDQWNRTEPSEITPHIYNYLIFDKPEKNKQWGKDSLFNKWCWENWLAICRKLKLDPFLTPYTKINSRWIKDLNVRPKTIKTLEENLGITIQDIGMGKDFMSKTPKAMATKSKIDKWDLIKLKSFCTAKKTNIRVNRQPTKWEKIFATYLSDKGLISRIYNELKQIYKKKTNNPIKKWAKDMNRHFSKEDIYAAKKHMKKCSPSLAIREMQIKTTMRYHLTPVRMVIIQKSGNNRSLMYPRRLRIQPRQCTDNNEKSTWNNHRQKDYKLCNKYKGIGFIRWPAGYGPAQSSGKCGMPGDVQKNQVSWYKVQNALSRVVQEVLSGTATHWLGRFCSLSSCVEDDKDGFVQLLLYALLFNPLDEILIQGTKNLKKFSDDPKRLIEGFPKLALTFRLIWKDINVLLGQALLQEERQTICGAAIHCRNDLHLENANYPGGATAVPQLDPNQDYNAKAGIWARNHRLLCLIETTTQQPTNAHSPQTQRQQHDTDKPQPNPPAKTTGVPVSFLAF

SEQ ID NO: 37382 - protein, 594 aa, Homo sapiens
  DOMAIN (142)..(187): kw TRANSCRIPTASE REVERSE II ORF2 domain identified by eMATRIX, accession number DM01354N, p-value=9.348e-29, raw score of 13.17
MPINDRLDKENVARIYHGILCSHKKGEFMSLAGTWVKLETIILSKLTQEQKTNTACSELDNENIWTQAGEHHTLGPVVACFVACHMVYPGECWFFEKINKIDSPLARLTKKRREKIHITSLRNKTGDIKTDTTAIQKIIQGCNEHLYAHKLEKLEDMDKFLEKYNPPSLNQEELDTLNRPITSREIEMLVDSILDSTESLAEYSVAEIECCRNILLDSAVLESKTFTSMCLQNSLNPFEHTESGMQIPQFILVGDSRGGGLQSLYRVDLSHCGPFGQESTGGMTRGLRCRFSSVPLTIYILNIYWDLQCYVQRKEGPVPLQLLARDKILTYLKGYGEWEFERKENHFIAGMLQTKVTVRSQCQRKNLKKFSDDPKRLIEGFPKLALTFRLIWKDINVLLGQALLQEERQTICGAAIHCRNDLHLENANYPGGATAVPQLDPNQDYNAKAGIWARNHRLLCLIEESQQSYLRVLEMPHTYLDKTQQRNLTKLYLEWGQLLLYVDGLLICSPSIKLAQQYAVQTLNFLAKSLAQDSASLSLWERQGSPGLVKMTLVHFLVTREGDRACGTSLDIMKFKTNVTLTPTVTYSGSSWLF

SEQ ID NO: 37383 - protein, 380 aa, Homo sapiens
  DOMAIN (178)..(193): LIM domain proteins domain identified by eMATRIX, accession number BL00478B, p-value=7.652e-14, raw score of 14.79
  DOMAIN (153)..(275): LIM domain containing proteins domain identified by PFam, accession name LIM, E-value=7.9e-25, PFam score of 92.7
  misc_feature (1)...(380): Xaa = X or * as defined in Table 2
MVTWNFIQERNGSGMDQCDDGGGKILDPVYILTVELTGFAKGWKMFSVKDQSVNVLGFAGYPLITQTARKGAGKIPTWASLRQYQKGLGSKYQLRRALRPDCALGNGQGVRYCNSLDEEEKRELKLFSSQRKRENLGRGNVRPFPVTMTGAICEQCGGQINGGDIAVFASRAGHGVCWHPPCFVCTVCNELLVDLIYFYQDGKIYCGRHHAECLKPRCAACDEIIFADECTEAEGRHWHMKHFCCFECETVLGGQRYIMKEGRPYCCHCFESLYAEYCDTCAQHIGHAGSFIKECSRRLLPGEAEISRRATVICLVRVSVRPEAASKSPNMRRKRKRKGACPLSSVGPVIPSVPXNTQRTXRPQSRPLGAPWNPWPCLMQ

SEQ ID NO: 37384 - protein, 795 aa, Homo sapiens
  DOMAIN (107)..(122): LIM domain proteins domain identified by eMATRIX, accession number BL00478B, p-value=7.652e-14, raw score of 14.79
  DOMAIN (82)..(267): LIM domain containing proteins domain identified by PFam, accession name LIM, E-value=1.3e-24, PFam score of 92.0
  misc_feature (1)...(795): Xaa = X or * as defined in Table 2
VHQYYSCLPEEKVPYVNSPGEKLRIKQLLHQLPPHDNEVRYCNSLDEEEKRELKLFSSQRKRENLGRGNVRPFPVTMTGAICEQCGGQINGGDIAVFASRAGHGVCWHPPCFVCTVCNELLVDLIYFYQDGKIYCGRHHAECLKPRCAACDEIIFADECTEAEGRHWHMKHFCCFECETVLGGQRYIMKEGRPYCCHCFESLYAEYCDTCAQHIGIDQGQMTYDGQHWHATETCFCCAHCKKSLLGRPFLPKQGQIFCSRACSAGEDPNGSDSSDSAFQNAGPRSPGAVPKLARTRARRGAHAEPAQPAASEFXPAVSRRRPPVTADGHAQPVQPDTQPQPGPHLEEPGRALPLWEQDGAEPDPEPSAAPRQCNIRTSYSPGGQGAGAQPEMWGKHFSNPKRSSSLAMTGHAGSFIKECREDYYPGRLRSQESYSDMSSQSFSETRGSIQVPKYEEEEEEEGGLSTQQCRTRHPISSLKYTEDMTPTEQTPRGSMESLALSNATGLSADGGAKRQEHLSRFSMPDLSKDSGMNVSEKLSNMGTLNSSMQFRSAESVRSLLSAQQYQEMEGNLHQLSNPIGYRDLQSHGRMHQSFDFDGGMAGSKLPGQEGVRIQPMSERTRRRATSRDDNRRFRPHRSRRSRRSRSDNALHLASEREAISRLKDRPPLRAREDYDQFMRQRSFQESMGHGSRRDLYGQCPRTVSDLALQNAFGDRWGPYFAEYDWCSTCSSSSESDNEGYFLGEPIPQPARLRYVTSDELLHKYSSYGLPKSSTLGGRGQLHSRKRQKSKNCIIS

SEQ ID NO: 37385 - protein, 269 aa, Homo sapiens
  DOMAIN (152)..(167): LIM domain proteins domain identified by eMATRIX, accession number BL00478B, p-value=7.652e-14, raw score of 14.79
  DOMAIN (127)..(198): LIM domain containing proteins domain identified by PFam, accession name LIM, E-value=8.3e-11, PFam score of 43.3
MTSKQSFFGSLKASKSTEELAENADSWASQKFWFTRSGTGLGNLQVHQYYSCLPEEKVPYVNSPGEKLRIKQLLHQLPPHDNEVRYCNSLDEEEKRELKLFSSQRKRENLGRGNVRPFPVTMTGAICEQCGGQINGGDIAVFASRAGHGVCWHPPCFVCTVCNELLVDLIYFYQDGKIYCGRHHAECLKPRCAACDEPTHGLLAFCTEESHRQLHFLALTLLGEKPHPSLVSRMSGVAACFTERGGLIASCWEGSFCIHEDPQVTYNWP

SEQ ID NO: 37386 - protein, 721 aa, Homo sapiens
  DOMAIN (99)..(114): LIM domain proteins domain identified by eMATRIX, accession number BL00478B, p-value=7.652e-14, raw score of 14.79
  DOMAIN (75)..(424): LIM domain containing proteins domain identified by PFam, accession name LIM, E-value=1.9e-22, PFam score of 84.4
  misc_feature (1)...(721): Xaa = X or * as defined in Table 2
YCLRLAQVGIFPAPSRAWPVDLDPESRLCCFPSLGSLANPTAVGLEEDREQDVGTSSRGGAWDTRIKRELEKMSEKCGGQINGGDIAVFASRAGHGVCWHPPCFVCTVCNELLVDLIYFYQDGKIYCGRHHAECLKPRCAACDEIIFADECTEAEGRHWHMKHFCCFECETVLGGQRYIMKEGRPYCCHCFESLYAEYCDTCAQHIGEAIFGSQLGPSVMRSPLFWGVGIAAAALDAVLIRAHQRTQGCHHELSALLAFEKGSEKKEEEEGGQVSRSSSLKVQAQELSATEDKGHISPFFWEAVYHYASGECRGPGPPYSHSLRLYSQQALPTGRGPSSSQFPFCQFYCCYKKSLLCDCLSKSPALEKAMRGIDQGQMTYDGQHWHATETCFCCAHCKKSLLGRPFLPKQGQIFCSRACSAGEDPNGSDSSDSAFQNAGPRSPGAVPKLARTRARRGAHAEPAQPAASEFXPAVSRRRPPVTADGHAQPVQPDTQPQPGPHLEEPGRALPLWEQDGAEPDPEPSAAPRQCNIRTSYSPGGQGAGAQPEMWGKHFSNPKRSSSLAMTGHAGSFIKECREDYYPGRLRSQESYSDMSSQSFSETRGSIQVPKYEEEEEEEGGLSTQQCRTRHPISSLKYTEDMTPTEQTPRGSMESLALSNATGTKTCSVTFQAKETCRYQDAQFGKVKARVKERQSLWSKFQGSCGICLYSHKYILKSSSSS

SEQ ID NO: 37387 - protein, 746 aa, Homo sapiens
MGFSMLARILMQNASLRTSDSGMYRTGIPNCLGQFGLLQQKYHRLGGLNNKHLFLAVLEAGKSKIKAPADSVSDGLVDCLDPDCCLQSACQNSLLCRGSRDPLDIIQQGQTDWPAVKSFYDRIKLLAGKDSTHIIPGENPFNSSEHLSPGHASHVLHRSLSRHAWVHGRNLLSIDYDRNIRTEKIYDDHRKFTLRIIYDQVGRPFLWLPSSGLAAVNVSYFFNGRLAGLQRGAMSERTDIDKQGRIVSRMFADGKVWSYSYLDKDGCGKKSTGCLRKSRLCYQRQKSDSGHIAFIQYEAASPGEQQLYVFNADGIHQYTVSLVTGEYLYIFTYSTDNDVTELIDNNGNSLKIRRDSSGMPRHLLMPDNQIITLTVGTNGGLKVVSTQNLELGLMTYDGNTGLLATKSDETGWTTFYDYDHEGRLTNVTRPTGVVTSLHREMEKSITIDIENSNRDDDVTVITNLSSVEASYTVVQDQVRNSYQLCNNGTLRVMYANGMGISFHSEPHVLAGTITPTIGRCNISLPMENGLNSIEWRLRKEQIKGKVTIFGRKLRVHGRNLLSIDYDRNIRTEKIYDDHRKFTLRIIYDQVGRPFLWLPSSGLAAVNVSYFFNGRLAGLQRGAMSERTDIDKQGRIVSRMFADGKWWQIIAESGIKQIHTALHNEVIRHAPHLVTLEDRITGPRFAVAAGVDQNINQGIDITITKIHSLAPPADGWYARHSPPAQALAARTATHGDASAETHQRQAV

SEQ ID NO: 37388 - protein, 94 aa, Homo sapiens
  DOMAIN (58)..(83): Sodium:sulfate symporter family proteins domain identified by eMATRIX, accession number BL01271B, p-value=3.746e-13, raw score of 12.02
METGLEKVADNSEIRMLVLLMMTVAGLGAFMSSTGVVAIFIPVVLSVAMRMQTSPSRLMMPLSFAGLISGMMTLVATPPNLVVNSELLREGYHA

SEQ ID NO: 37389 - protein, 143 aa, Homo sapiens
  DOMAIN (13)..(60): Methylmalonyl-CoA mutase proteins domain identified by eMATRIX, accession number BL00544C, p-value=1.000e-40, raw score of 21.04
  DOMAIN (1)..(143): Methylmalonyl-CoA mutase domain identified by PFam, accession name MM_CoA_mutase, E-value=0.00056, PFam score of -184.7
GFGAQDPKSLALRTHCQTSGWSLTEQDPYNNVIRTTIEALAATLGGTQSLHTNVFDEALGLPTDFSARIARNTQIIIQEESELCRTVDPLAGSYGGAIIQQIDVAGGLAKRIEAGLSKRMIEEASAREQALIDQGKRVIVGVT

SEQ ID NO: 37390 - protein, 519 aa, Homo sapiens
  DOMAIN (45)..(417): Methylmalonyl-CoA mutase domain identified by PFam, accession name MM_CoA_mutase, E-value=4.8e-09, PFam score of -58.5
MVTLILYFRFYRLNGDTLRRIQIHLLDKYRKVPPEPVHADIPVGARRFSRPCSWFLRITKRGYRRTVHAMAGQKEKLLGAGMSDYLAKPIEEERLHNLLLRYKPGSGISSRVVTPEVNEIVVNPNATLDWQLALRQAAGKTDLARDMLQMLLDFLPEVRNKVEEQLVGENPEGLVDLIHKLHGSCGYSGVPRMKNLCQLIEQQLRSGTKEEDLEPELLELLDEMDNVAREASKILGPDKTHLRRIRRDVLATDPRPARDRRKACLHACVLRTPPLGAARAIIQQIDEAGGMAKAIEAGLPKRMIEEASAREQSLIDQGKRVIVGVNKYKLDHEDETDVLEIDNVMVRNEQIASLERIRATRDDAAVTAALNALTHAAQHNENLLAAAVNAARVRATLGEISDALEVAFDRYLVPSQCVTGVIAQSYHQSEKSASEFDAIVAQTEQFLADNGRRPRILIAKMGQDGHDRGAKVIASAYSDLGFDVDLSPMFSTPEEIARLAVENDVHVVGASSLAAGRSR

SEQ ID NO: 37391 - protein, 118 aa, Homo sapiens
MAKAIEAGLPQRMIEEASAREQSLIDQGKRVIVGVNKYKLDHEDETDVLEIDNVMVGPVSLLAIGVLTVHCMVILLNCAQHLSQRAPVFLSHISFPGCVIVLAASEGLELRKSTRHYF

SEQ ID NO: 37392 - protein, 372 aa, Homo sapiens
  DOMAIN (148)..(195): Methylmalonyl-CoA mutase proteins domain identified by eMATRIX, accession number BL00544C, p-value=1.000e-40, raw score of 21.04
  DOMAIN (1)..(367): Methylmalonyl-CoA mutase domain identified by PFam, accession name MM_CoA_mutase, E-value=1.2e-152, PFam score of 520.5
MKAAVQPVPPFYIVAAEEQGVTPDKLTATIHHDILTEYLCRNTYIYPPKPSMRIIADIIACISGYHMGEAGANCVQQVAFTLADGIEYIKAAISAGLKIDDFAPRLSFFFGIGMDLFMNVAILRAARYLWSEAVSGFGAQDPKSLALRTHCQTSGWSLTEQDPYNNVIRTTIEALAATLGGTQSLHTNVFDEALGLPTDFSARIARNTQIIIQEESELCRTVDPLAGSYYIESLTDQIVKQARAIIQQIDEAGGMAKAIEAGLAKRMIEEASAREQSLIDQGKRVIVGVNKYKLDPEDETDVLEIDNVMVRNEQIGSLERIRATRDDAASDTREIVDLTNGNIKTFNGSIIIYARFDTGRHLFSGGNTVKTA

SEQ ID NO: 37393 - protein, 150 aa, Homo sapiens
MVMLLGIAITHDLRHRDENDIDASGLSVFEERTSRIIKNLPYIAIVGALIAAVASMKIFAGSEVSIFTLEKAYSTTIEVFEQGKDYNELQSRNISAMTVSHPPFASSDNSEEVRTDASSQQLRILDGEWGLMRIFYLRICRRCHTAYGAL

SEQ ID NO: 37394 - protein, 84 aa, Homo sapiens
MDEFKPEDELKPDPSDRRTGRSRQSSERSERTERGEPQINFDDIELDDTDDRRPTRAQKERNEEPEIEEEIDESEDETVDEERV

SEQ ID NO: 37395 - protein, 80 aa, Homo sapiens
  DOMAIN (3)..(80): Bacterial extracellular solute-binding prot domain identified by PFam, accession name SBP_bac_5, E-value=3.6e-29, PFam score of 107.4
EEAKALLKEAVLEKGFSIDLWAMPVQRPYNPNARRMAEMIQADWAKVGVQAKIVTYEWGEYLKRAKDGEHQTVMMGWTGD

SEQ ID NO: 37396 - protein, 80 aa, Homo sapiens; identical to SEQ ID NO: 37395
  DOMAIN (3)..(80): Bacterial extracellular solute-binding prot domain identified by PFam, accession name SBP_bac_5, E-value=3.6e-29, PFam score of 107.4

SEQ ID NO: 37397 - protein, 3076 aa, Homo sapiens
  DOMAIN (1430)..(1480): Aldehyde dehydrogenases glutamic acid proteins domain identified by eMATRIX, accession number BL00687E, p-value=1.000e- 28, raw score of 25.37
  DOMAIN (1127)..(1547): Aldehyde dehydrogenase family domain identified by PFam, accession name aldedh, E-value=1.4e-69, PFam score of 244.6
MACVLRNCVPCYVYRLDNQQENIWPAGTTATVVVTGKQIATKARIRSFTWKRHRWAVLTAAIVAAGPAFAAGGEPYSGAIRYRGFLRIIGTFIGCIAGLVIIIAMIRAPLLMILVCCIWAGFCTWISSLVRIENSYAWGLAGYTALIIVITIQPEPLLTPQFAVERCSEIVIGIVCAIMADLLFSPRSIKQEVDRELESLLVAQYQLMQLCIKHGDGEVVDKASGRPETKPGLPQDGAFYALGVHTMDQIISLFGRPDHVAYDIRSLRNKANPDDTFEAQLFYGDLKAIVKTSHLVKIDYPKFIVHGKKGSFIKYGIDQQETSLKANIMPGEPGFAADDSVGVLEYVNDEGVTVREEMKPEMGDYGRVYDALYQTITHDLRYRHKNLYRRKLASQRVTEHVNRAGLRYSYQYEKDCITITDSLAHNKVLHTQGEAGLKRVVKKKHADGSVTQSQFDAVGRLRAQTDAAGRTTEYSPDVVTGLITRITTPDGRASAFYYNHHNQLTSATGPDGLELRREYDELGRLIQETAPDGDITRYRYDNPHSDLPCATEDATGSRKTMTWSRYGQLLSFTDCSGYVTRYDHDRFGQMTAVHRGWETGHLVEGLGEAQAWQAPLWKALVEYTHQLGQPRWHRANLYQRFIETLESATTCPPGLPSRVFICGISALPPVYLQALQALGKHIEIHLLFTNPCRYYWGDIQDPAYLAKLLTRQRRHSFEDRDLPLFRDSENAGQLFNSDGEQDVGNPLLASWGKLGRDYIYLLSDLESSQELDAFVDVTPDNLSASTCQCSTLHGHWKTAPLHGVNMRQSFPVAITNARLIHLDSQYSPSTYCHSPQREPLKSYTIACVVDVTLNADNFIVRDNGPGVTPEALARIGERFYRPPGQTATGSGLGLSIVQRIAKLHGMNVEFGNAEQGGFEAKILLIAKYKPSPKKPPTTNQTNTEREYIYPKTIDGHRVVNDQVDRIAAEAFNRFAHCRQINNGRYAGKVLHQHPCRAVGNFTVSMGIFQPSCQRVDILFGNRVTILPAQQQFGIAQGGPVLPLLGLPESSCADRQFWEALTQRVDHIRRVIHRQRDLGHKGELLFVFDRQFPHIVRRFDQIHSPFRVTVLAHCPFHFRVPGVTDENRFFATATGAGDFHMHFGHQRTGGIKHRQIATFCFVTYRLRNTVCGENQDRAVRYFANLLNKDSPTLTQAIDHIAVMYHFVTDIYRCAVNGQRVFNNADSAVYPGTKTTRRTSQGKGRYHVREPGGPTMLRVAELPSEAGIPDGVFNVVTGSGAVCGAALTSHPHVAKISFTGSTATGKGIARTAADHLTRVTLELVGKNPAIVLKDADPQWVIEGLMTGSFLNQGQVCAASSRIYIEAPLFDTLVSGFEQAVKSLQVGPGMSPVAQINPLVSRAHCDKCVHSSDDAQAQQAELIRGSNGPAGEGYYVAPTLVVNPDAKLRLTREEVFGPVVNLVRVADGEEALQLANDTEYGLTASVWTQNLSQALEYSDRLQAGTVWVNSHTLIDANLPFGGMKQSGTGRDFGPDWLDGWCETKSVAVYAPLALAFRQRSSMVSAEYVPTSVGIIGHSSARATCVVPVVIQTTASVLSSDSPVFPNPIQALLHAAYANASLYALRSAAHKLLNYAQQAREYLDFRAHGLNVACEQLRQNIHQIEESLQLLQLNQAQVSGEIKHEIELALTSANHFLRQQQDALKVQLAALFQDDSEPLSEIRTRCETLLQTAQNTISRDFTLRFAELESTLCRVLTDVIRPIEQQVKMELSESGFRPGFHFPVFHGVVPHFNTRQLFSEVISRQEATDEQSTRLGVGCEMKISLVVPVFNEEEAIPIFYKTVREFEELKSYEVEIVFINDGSKDATESIINALAVSDPLVVPLSFTRNFGKEPALFAGLDHATGDAIIPIDVDLQDPIEVIPHLIEKWQAGADMVLAKRSDRSTDGRLKRKTAEWFYKLHNKISNPNGQSRFLMHSRSVLWLRRGNRGTSPWTGVFVVIENGGRAVEWLGELLIVSCRMRRKRLITAYKIMQIQHIATHPVGLISAAQSGRDPLESLTHELLLGDRVVFSAPGSPSGSNNVDHDRPAIPLPFTQSCLLKCCVRICIRLSTYQKIILRQVQKYRATVTECIPMMIRTLMVQPPSANDQQHRLREVMFYLNLSEQEKDAFCERFGVRLLTSYGMTETIVGIIGDRPGDKRRWPSIGRVGFCYEAEIRDDHNRPLPAGEIGEICIKGIPGKTIFKEYFLNPQATAKVLEADGWLHTGDTGYRDEEDFFYFVDRRCNMIKRGGENVSCVELENIIAAHPKIQDIVVVGIKDSIRDEAIKAFVVLNEVNALLDDAELAALIAEHDLVLDCTDNVAVRNQLNAGCFAAKVPLVSGAAIRMEGQITVFTYQDGEPCYRCLSRLFGENALTCVEAGVMAPLIGVIGSLQAMEAIKMLAGYGKPASGKIVMYDAMTCQFREMKLMRNPGCEQFMRMQNVRLNRRSAKRSLPVLLKLRHSGINRRIANHLLCHIQWQTKVLRFPEVQMHEILSDFARMIPAALDNVKTSLPTDFPENVVTAVESNVLRLHGRLSREYGNIYTETPVKVSGFKRVIDEQDWTITKVTHFLNNSGFTTSLELEHAAHARTSRYITDTTKERYHQCQNVNCSATFITYESVQRYIVKPGEVHVAAWIGTVHTAVFADQPFQFVVLLHFREAHYRPRRTLYGEKMRGILCTSGPDETPAVHATEAFGPVATLMPALNQRHALQLACAGGGSLAGTLVTADPQIARQFIADAARTHGRIQILNEESAKESTGHGSPLPQLVHGGPGRAGGGEELGGLRAVKHYMQRTAVQGSPTMLAAISKQWVRGAKVEEDRIHPFRKYFEELQPGDSLLTPRRTMTEADIVNFACLSGDHFYAHMDKIAAAESIFGERVVHGYFVLSAAAGLFVDAGVGPVIANYGLDSLRFIEPVKPGDTIQVRLTLVRELGLPLDDVKVRQALTYAVNKDAIIKAVYQGAGVSAKNLIPPTMWGYNDDVQDYTYDPEKAKALLKEAGLEKGFSIDLWAMPVQRPYTLLREPQCCFPAGVTEFVAPHRVIL

SEQ ID NO: 37398 - protein, 220 aa, Homo sapiens
  DOMAIN (151)..(178): phosphoenolpyruvate-dependent sugar phosph domain identified by PFam, accession name PTS_EIIA_1, E-value=2.2e-10, PFam score of 41.1
RSGLALDLPNFLPSQMIAQRARGEEEAHHHSSPEGAIEVDESEVDLDAISAQSLRLVRSILMLIALLSVIVLWSEIHSAFGFLENISLWDVTSTVQGVKSLEPITLGAVLIAILVFIITTQLVRNLPALLELAILQHLDLTPVVALDQVPDEAFASKAVGDGVAVKPTDKIVVSPAAAGPRKAEQAQTCGPAPWAAHTGSGSKNRVVQIGTQLPTSQPSL

SEQ ID NO: 37399 - protein, 238 aa, Homo sapiens
ALTMITRFMSVPGDHESCDTPLCLPLYPLGQIMNHDIPLKYFDIADEYATECAEPVAEAERTPLAHYFQLLLTRLMNNEEISEEAQHEMAAEAGINPVRIDEIAEFLNQWEMIKHRQIHEGERQLLFQQATNHASFKGTVLPAMNQQMYRAAATQHNLEVLASRGLLIWGPDSGSQACGDIGPGRMLDPLTIVDMAVAHFSPVNDLKHLNIMITAGPTREESPLLSPEMTREFLQSLI

SEQ ID NO: 37400 - protein, 220 aa, Homo sapiens
  DOMAIN (103)..(135): ABC transporters family proteins domain identified by eMATRIX, accession number BL00211B, p-value=7.353e-24, raw score of 13.37
  DOMAIN (18)..(169): ABC transporter domain identified by PFam, accession name ABC_tran, E-value=5.2e-08, PFam score of 34.0
WTRWRASAADNLAHGRWGEQKLVVTTGASGAPDRQAARCAASAKISWYRSKGSKHPLTPKEVEKTGWGLKIPGMGQQQLPERVKEAARILELDGLLKRRPRELSGGQRQRVAMARAIVRDPAVFLFDEPLSNLDAKLRVQMRLELQQLHRRDQVEAMTLAQRVMVMNGGVAEQIGTPVEVDGDDTLEILGADNLAHDAGRAEAGGDWRIRSARRSSTCAH

SEQ ID NO: 37401 - protein, 180 aa, Homo sapiens
  DOMAIN (104)..(136): ABC transporters family proteins domain identified by eMATRIX, accession number BL00211B, p-value=7.353e-24, raw score of 13.37
  DOMAIN (20)..(170): ABC transporter domain identified by PFam, accession name ABC_tran, E-value=6.2e-08, PFam score of 33.1
WTRWRASAADNLAHGRWGEQKLVVTTGASGAPDRQAARCGCIWRKISWYRSKGSKHPLTPKEVEKTGWGLKIPGMGQQQLPERVKEAARILELDGLLKRRPRELSGGQRQRVAMARAIVRDPAVFLFDEPLSNLDAKLRVQMRLELQQLHRRDQVEAMTLAQRVMVMNGGVAEQIGTPVE

SEQ ID NO: 37402 - protein, 86 aa, Homo sapiens
MCILECKIKVNEKEEGEKQEEEEEEEGERGGGGGGRWRRKRRVILHGTMLAAAESARYIVHGSRGSYVKYGTCKHWQKPFLGATLG

SEQ ID NO: 37403 - protein, 68 aa, Homo sapiens
  DOMAIN (1)..(61): DEAD/DEAH box helicase domain identified by PFam, accession name DEAD, E-value=1.7e-05, PFam score of 20.3
GFIKDIRWLFRRMPPANQRLNMLFSATLSYRVRELAFEQMNNAEYIEVEPEQKTGPRIKVERKALIDG

SEQ ID NO: 37404 - protein, 30 aa, Homo sapiens
GCLENVTFQKQRIVEALNRYHGRNLLVVPD

SEQ ID NO: 37405 - protein, 131 aa, Homo sapiens
  DOMAIN (49)..(78): 2-oxo acid dehydrogenases acyltransferase component lipoyl bi domain identified by eMATRIX, accession number BL00189C, p-value= 3.571e-25, raw score of 17.57
  DOMAIN (1)..(131): 2-oxo acid dehydrogenases acyltransferas domain identified by PFam, accession name 2-oxoacid_dh, E-value=3.1e-05, PFam score of -64.2
MPCSTPRGPGEPPLLGEVEPLGMADIEKKIKELAVKGRDGKLTVEDLTGGNFTITNGGVFGSLMSTPIINPPQSAILGMHAIKDRPMAVNITPRESDNPSPAVPVVLSLSPCPGARMPLGGLVLGPSVITQ

SEQ ID NO: 37406 - protein, 229 aa, Homo sapiens
  DOMAIN (38)..(74): Nickel-dependent hydrogenases large subunit proteins domain identified by eMATRIX, accession number BL00507G, p-value=8.800e- 37, raw score of 16.46
  DOMAIN (2)..(116): Nickel-dependent hydrogenases domain identified by PFam, accession name NiFeSe_Hases, E-value=1.2e-69, PFam score of 229.3
MVAPVYIRDQYSALITNIGKGDHTTFVKPNIPATGEFKGVGFLEAPRGMLSHWMVIKDGIISNYQAVVPSTWNSGPRNFNDDVGPYEQSLVGTPVADPNKPLEVVRTIHSFDPCMAWVGNILLTDEAIGVRIVEALEQRYILPDYVEILDGGTAGMELLGDMANRDHLIIADAIVSKKNAPGTMMILRDEEVPALFTNKISPHQLGLADVLSDLRFTGEFPKKLPWVQA

SEQ ID NO: 37407 - protein, 47 aa, Homo sapiens
  DOMAIN (14)..(27): HYDROGEN UPTAKE PROTEIN SIGNATURE domain identified by eMATRIX, accession number PR00446A, p-value=2.184e-12, raw score of 8.37
RQRSGFSEGSVMRILVLGVGNILLTDEAIGVRIVEALEHRSILPAYV

SEQ ID NO: 37408 - protein, 79 aa, Homo sapiens
  DOMAIN (29)..(46): HYDROGEN UPTAKE PROTEIN SIGNATURE domain identified by eMATRIX, accession number PR00446E, p-value=1.978e-13, raw score of 9.36
  DOMAIN (1)..(78): Hydrogenase maturation protease domain identified by PFam, accession name HycI, E-value=1.1e-05, PFam score of 26.6
DGGTAGMELLVDMANRDHLIIADAIVSKKNAPGTMMILRDEEVPALFTNKISPHQLGLADVLSALRFTGEFPKKLTLVG

SEQ ID NO: 37409 - protein, 354 aa, Homo sapiens
  DOMAIN (180)..(195): AMINOMETHYLTRANSFERASE GLYCINE domain identified by eMATRIX, accession number PD01543D, p-value=7.632e-15, raw score of 10.61
MEGKQSSLGSAGQPERNSVALISGGKHELAGGRKKDEKGFSLFEGRRTGRHEMLQGVKTPGGLPRSRADAGTVPPVHRYLYFHKQYRLQKVHQMGSLVPWLRGGSLSMGGGGWRWWRVGETLTNAELIGPQDLGSLTQDKRILPLVKSNQGPGSYLFCKKGLWFGGTRNLWHAYDLFIATTGYTGEAGYEIALPNEKAADFWRALMVTTSVGITKNPQITQSPFLQAECLLKMLLDKLNALNVCDMVEVDFAEQVYFQCYLSCIDRGSLRVPLLEPLLLGPLSISSTAFINSNWSNGNASCRQCIMFTLGSLVSSMVPLQTIGTQYTSACARGKRKGKVTGPLTFHGPHKKQNL

SEQ ID NO: 37410 - protein, 73 aa, Homo sapiens
  DOMAIN (24)..(43): Aminotransferases class-III pyridoxal-phosphate attachment si domain identified by eMATRIX, accession number BL00600G, p-value= 2.909e-14, raw score of 12.43
  DOMAIN (2)..(73): Aminotransferases class-III pyridoxal-pho domain identified by PFam, accession name aminotran_3, E-value=5.5e-30, PFam score of 87.8
AGGFPLAGVTGRAEVMDAVAPGGLGGTYAGNPIACVAALEVLKVFEQENLLQKANDLGHKLKNVFLAIAEPLP

SEQ ID NO: 37411 - protein, 355 aa, Homo sapiens
  DOMAIN (37)..(83): kw TRANSCRIPTASE REVERSE II ORF2 domain identified by eMATRIX, accession number DM01354O, p-value=1.000e-40, raw score of 8.73
  DOMAIN (70)..(241): Reverse transcriptase domain identified by PFam, accession name rvt, E-value=3.3e-18, PFam score of 73.9
MDKFLDTDTLPRLNQEEVESMNRPITGSEIVAIINSLPTKKRPGPDGFTAKFYQRYKEKRVPFLLKRFQSIEKEGILPNSFYEASNILIPKPGRDTTKKENFRTISLMNIDAKILNKILAKRIQQHIKKLIHHDQVGFIPGMQGWAIRQKKEIKGIQLGKEEVKLSLFADDMIVYLENPIVSAQNLLKLISNFSKVSGYKINVPKSQAFLYTNNRQTQSQIMSELPFTIASKRIKYLGIQLTRDVKDLFKENYKPLLNEIKEDTNKWKNIPCSWVGRINIVKMAILPKVIYRFNAIPIKLPMTFFTELEKTTLKFIWNQKRARIAKSILRQKNKAGGITLPDFKLYYKATVTKTA

SEQ ID NO: 37412 - protein, 515 aa, Homo sapiens
  DOMAIN (272)..(317): kw TRANSCRIPTASE REVERSE II ORF2 domain identified by eMATRIX, accession number DM01354N, p-value=1.000e-40, raw score of 13.17
  DOMAIN (212)..(399): Reverse transcriptase domain identified by PFam, accession name rvt, E-value=0.024, PFam score of -36.2
MGDFNTPLSTLDRSMRQKVNKDTQELNSALHQADLIDIYRTLHPKSTEYTFFSAPHHTYSKIDHILGSKALLSKCKRTEIITNYLSDHSAIKLELRIKNLTQNHSTTWKLNNLLLSDYWVHNEMKAEIKMFFETNENKDTTYQNLWDAFKAVCRGKFIALNAHKRKQERSKIDTLTSQLKELEKQEQTHSKASRRQEITKIRAELKEIETQKTLQKINESRSWFFERINKIDRPLARLIKKKREKNQIDTIKNDKGDITTDPTEIQTTIREYYKHLYANKLENLEEMDKFLDTYTLPRLNQEEVESLNRPITGAENVAIINSLPTKKSPGPDGFTAEFYQRYKEELLISNFSKVSGYKINVRKSQAFLYTDNRQTESQIMSELPFTIASKRIKYLGIQLTRDVKDLFKENYKPLLKEIKEDTNKWKNIPWSWVGRINIVKMAILPKVIYRFNAIPIKLPMTFFTELEKTTLKFIWNQKRARIAKAILSQKNKAGGITLPDFKLYYKATVTKTAWY

SEQ ID NO: 37413 - protein, 940 aa, Homo sapiens
  DOMAIN (138)..(183): kw TRANSCRIPTASE REVERSE II ORF2 domain identified by eMATRIX, accession number DM01354N, p-value=1.000e-40, raw score of 13.17
  DOMAIN (222)..(469): Reverse transcriptase domain identified by PFam, accession name rvt, E-value=1.1e-68, PFam score of 241.7
MRTKTQHTRISWDAFKAVCRGKFIALNAHKRKQERSKIDTLTSQLKELEKQEQTHSKASRRQEITKIRAELKEIETQKSLQKINESRSWFFERINNIDRPLARLIKKKREKNQIDTIKNDKGDITTDPTEIQTTIREYYKHLYANKLKNLEEMDKFLDTYTLPRLNQEEVESLNRPITGSEIVTIINSLPTKKSPGPDGFTAEFYQRYKEELVPFLLKLFQSIEKEGILPNSFYEASIILIPKPGRDTTKKENFRPISLMNIDAKILNKILANRIQQHIKKLIHHDQVGFIPGMQGWFNIRKSINVIQHVNRAKDKNHMIISIDAEKDFDKIQQPFMLKTLNKLGIDGTYLKIIRAIYDKPTANIILNGQKLEAFPLKTGTRQGCPLSPLLFNIVVEVLASAIRQEKEIKAQNLLKLISNFSKVSGYKINVQKSQAFLYTNNRQTESQIMSELPFIIASKRIKYLGIQLTRDVKDLFKENYKPLIKEIKEDTNKRKNIPCSRVGRINIVKMAILPKVIYRFNAIPIKLPMTFFTELEKTTLKFIWNQKRAHIAKSILSQKNKAGGITLPDFKLYYKATVTKTAWYSYQNRDIDQWNRTEPSEITPHIYNYLIFDKPEKNKQWGKDSLFNKWGWENWLAIWRKLKLDPFLTPYTKINSRWIKDLNVRPKTIKTLEENLGITIQDIGMGKDFMSKTPKAMATKDKIDKWDLMKLKSFCTAKETTIRVNRQPTEWEKIFATYSSDKGLISRIHNELKQIYKKKTNNPNKTWAKDMNRHFSKEDIYAAKKHMKKCSSSLAIREMQIKTTMRYHLTPVRMAVIKKSGNNRDMDETGNHHSQQTVTRTKNQTPHILTHTWELNNEITWTQEGEYHTLGTVTSELQVLWSLDSGTYSSGPLVFSGLGLESYTICCPESETLGLGLNHTTNFLSSPTCRQLNMGLLSF

SEQ ID NO: 37414 - protein, 407 aa, Homo sapiens
  DOMAIN (171)..(214): kw TRANSCRIPTASE REVERSE II ORF2 domain identified by eMATRIX, accession number DM01354T, p-value=1.000e-40, raw score of 9.48
  DOMAIN (46)..(293): Reverse transcriptase domain identified by PFam, accession name rvt, E-value=1.7e-52, PFam score of 187.8
MELKTKARELREECRSLRSRCDQLEERVSAMEDEMNEMKREGKFREKRIKRNEQSLQEIWDYVKRPNLRLIGVPESDVENGTKLENTLQDIIQENFPNLAKQANHINRAKDKNHMIISIDAEKAFDKIQQPFMLKTLNKLGIDGTYFKIIRAIYDKPTANIILNGQKLEAFPLKTGTRQGCPLSPLLFNIVLEVLARAIRQEKEIKGIQLGKEEVKLSLFADDMIVYLENPIVSAQNLLKLISNFSKVSGYKINVQKSQAFLYTNNRQTESQIMGELPFTIASKRIKYLGIQLTRDVKDLFKENYKPLLKEIKEDTNKWKNIPCSWVGRINIVKMAILPKVIYRFNAIPIKLPMTFFTELEKTTLKFIWNQKRARIAKSILSQKNKAGGITLPYFKLYYKATVTKTA

SEQ ID NO: 37415 - protein, 1029 aa, Homo sapiens
  DOMAIN (514)..(539): 7 kw REVERSE TRANSCRIPTASE RNA POLYMERASE domain identified by eMATRIX, accession number DM00895E, p-value=4.103e-10, raw score of 15.72
  DOMAIN (485)..(760): Reverse transcriptase domain identified by PFam, accession name rvt, E-value=1.1e-82, PFam score of 288.2
MEQSWMENDFDQLREEGFRGSNYSELREDIQTKGKEVENFEKNLEECITRITNTEKCLKELMELKTKARELREECRSLRSRCDQLEERVSVMEDEMNEMKPNLRLIGVPETNGENGTKLENTLQDIIQENFPNLARQANVQNQEIQRTPQRYSSRRATPRHIIVRFTKVEMKEKMLRAAREKAPHHTYSKIDHILGSKALLSKCKRTEIITNYLSDHSAIKLELRIKNLTQNRSTTWKLNNLLLNDYCVHNEMKAEIKMFFETNENKDTTYQNLWDAFKAVCRGKLIALNAHKRKQERSKIDTLTSQLKELEKQEQTHSKASRRQEITKIRAELKEIETQKTLQKINESRSWFFERINKIYRPLARLIKKKREKNQIDAIKNDKGDITTDPTEIQITIREYYKHLYANKLENLEEMDKFLNTYTLPRLNQEEVESLNRPITGSEIVAIINSLPTKKSPGPDGFSAEFYQRYKEELVPFLLKLFQSIEKEGILPNSFYEASIILIPKPGRDTTKKENFRPISLMNIDAKILNKILAKRIQQHIKKLIHHDQVGFIPGMQGWFNICKSINVIQHINRAKDKNHMIISIDAEKAFDKIQQPFLLKTLNKLGIDGSYFKIIRAIYDKPTANIILNGQKLEAFPLKTGTRQRCPLSPLLFNIVLEVLARAIRQEKEIKGIQLGKEEVKLSLFADDMIVYLENPTVSAQNLLKLISNFSKVSGYKINVQKSQEFLYTNNIQTESQIMSELPFTIASKRIKYLGIQLTRDVKNLFKENYKPLLNEIKEDTNKWKNIPCSWVGRINIVKMAILPKVIYRFNAIPIKLPMPFFTELEKATLKFIWNQKRARIAKSILSQKNKAGGITLPDFKLYYKATVTKTAWLQHAVPANDGTTRSPSIDSIQKDPSEFAWRDPELPEVIHILQHQFPSVQANAAAYLQHLWFGDNNVKMKVCRLWGIKLLVYLLGHRVLEVQKNACDALRNLFFGKSTGENKITMKDVATLDLSFILSKLTQEQKTKYLIVLTHKWELNNENTWT

SEQ ID NO: 37416 - protein, 393 aa, Homo sapiens
  DOMAIN (37)..(83): kw TRANSCRIPTASE REVERSE II ORF2 domain identified by eMATRIX, accession number DM01354O, p-value=1.000e-40, raw score of 8.73
  DOMAIN (70)..(251): Reverse transcriptase domain identified by PFam, accession name rvt, E-value=1.7e-22, PFam score of 88.2
MDKFLDTYTLPRLNQEEVESLNRPITGSEIVAIINSLPTKKSPGPDGFTAEFYQRYKEELVPFLLKLFQSIEKEGILPNSFYEASIILIPKPGRDTTKKENFRPISLMNIDAKILYKILAKRIQQHIKKLIHHDQVGFIPGMQGWFNIRKSINVIQHINRAKDKNHMIISIDAEKAFDKIQQPFMLKTLNKLAQNLLKLISNFNKVSGYKINVQKSQAFLYTSNRQTESQIMSELPFTIASKRIKYLGIQLTRDVKDLFKENYKPLLKEIKEDTNKWKNIPCSWVGRINIVKMAILPKVIYRFNAIPIKLPMTFFTELEKTTLKFIWNQKRAHIAKSILSQKNKAGGITLPDFKLYYKATVTKTAWYCYQNRHIDQWNRPSEITPHIYNYLIF

SEQ ID NO: 37417 - protein, 573 aa, Homo sapiens
  DOMAIN (41)..(66): Hypothetical cof family proteins domain identified by eMATRIX, accession number BL01228B, p-value=4.130e-19, raw score of 19.42
  DOMAIN (18)..(251): Cof family DUF3 domain identified by PFam, accession name DUF3, E-value=9.5e-70, PFam score of 245.1
MDWYLDTQQRFKFLMYQVVASDLDGTLLSPDHTLSPYAKETLKLLTARGINFVFATGRHHVDVGQIRDNLEIKSYMITSNGARVHDLDGNLIFAHNLDRDIASDLFGVVNDNPDIITNVYRDDEWFMNRHRPEEMRFFKEAVFQYALYEPGLLEPEGVSKVFFTCDSHEQLLPLEQAINARWGDRVNVSFSTLTCLEVMAGGVSKGHALEALEHRADIKIGGDFEFQYPPRDNTNNQLRHCDDLVTKFLTRMSPLAPRIGQYWLQLPATFGPRELPALWHFLDSLPGEFNYGVEVRHPQFFAKGEEEQTLNRGLHQRGVNRVILDSRPVHAARPHSEAIRDAQRKKPKVPVHAVLTATNPLIRFIGSDDMTQNRELFQVWLQKLAQWHQTTTPYLFLHTPDIAQAPELRSEQFRLFHSNLLFSEFATYHRQVPSAILKGVCMVSALYAVLSALLLMKFSFDVVRLRMQYRVAYGDGGFSELQSAIRIHGNAVEYIPIAIVLMLFMEMNGAETWMVHICGIVLLAGRLMQYYGFHHRLFRWRRFGMSATWCALVLMVLANLWYMPWELVSPWLI

SEQ ID NO: 37418 - protein, 1171 aa, Homo sapiens
  DOMAIN (336)..(377): kw TRANSCRIPTASE REVERSE II ORF2 domain identified by eMATRIX, accession number DM01354I, p-value=1.000e-40, raw score of 15.55
  DOMAIN (582)..(768): Reverse transcriptase domain identified by PFam, accession name rvt, E-value=3.2e-22, PFam score of 87.3
MGKKQSRKTANSKKQSTSPPPKEHSSSPATEQSWTENDFDELREEGFRRSNYSELREDIQTKGKEVENFEKNLEECITTITNTEKCLKELMELKAKAQELREECRSLRSRCNQLEERVSAMEDEMNEMKREGKFREKRIKRNEQSLQEIWDYVKRPNLRLTGVPESDGENGTKLENTLQDIIQENFPNLARQANIQIQEIQRMPQRYSSRRATPRHIIVRFTKVEMKEKMLRAAREKDRSTRQKVNKNTQELNSALHQADLIDIYRTLHPKSTEYTFFSAPHHTYSKIGHIVGSKALLSKCKRTEIITNYLSDHSAIKLELRIKNLTQNRSTTWKLNNLLLNDYWVHNEMKAEIKMFFETNENKDTTYQNLWDTFKAVCRGKFIALNAHKRKQERSKIDTLTSQLKELEKQKQTHSKASRRQEITKIRAELKEIETQKTLQKINESRSWFFERINKIDRPLARLIKKKREKNQIDAIKNDKRDITTNPTEIQTTIREYYKHVYANKPENLEEMDKFLDTYTLPRLNQEEVESLNRPITGAEIVAIINSLPTKKSPGPDGFTAKFYQRYKEELVPFLLKLFQSIEKEGILPNSFYEASIILIPKPGRNTTKKENFRPISLMNIDAKILNKILANRIQQHIKKLIHHDQVGFIPGMQGLVQYTQINKLLEILARTIRQEKEIKSIQLGKEEVKLSLFADDMTVYLQNPIVSAQNLLKLISNFSKVSGYKINVQKSQAFLYTNNRQTESQIVSELPFTIASKRIKYLGIQLTRDVKDLFKENYKLLLKEIKEDTNKWKNIPCSWVGRINIVKMAILPKVIYRFNAIPIKLPMTFFTELEKTTLKFIWNQKRARIAKSILSQKNKAGGITLPDFKLYYKATVTKTAWYFSKAVLLPPLNTTAIVSIHDEQWNARRSSLASHKEADATICVTTKVWRRRRQKRFCGLGRGSLCCVQPRDLVPCVLATPVVAESGQCKTQTMASESVLLFPDFLMIAILTGVRWYLIVVLICISLMASDGVVAPNVDKILSDREQEFGILATEEGKTEKAATYTRCMDEIGNRHSQQTITRTKNQTPHVLTHRWELNNENTWTQEGEHHTLGTVVGWGAFYTEWNCMEVHTGPTLAVYWNEHNQPIQIFANKVPGKYNYVHFSITEMEGIQFLHGIPEIESQHGRKK

SEQ ID NO: 37419 - protein, 848 aa, Homo sapiens
  DOMAIN (293)..(336): kw TRANSCRIPTASE REVERSE II ORF2 domain identified by eMATRIX, accession number DM01354T, p-value=1.000e-40, raw score of 9.48
  DOMAIN (162)..(415): Reverse transcriptase domain identified by PFam, accession name rvt, E-value=4.9e-35, PFam score of 129.8
MSELPFTIATKRIKYLGIQLKSDVKDLFKENYKPLLNEIREDTYKWKNTPCSWIGRINIMNMAILPKVIYGFNAILIKLPLTFFTELEKTTLKFTQSLKRAHIAKTILSKKNKAGGIMLPDFKLYYKATVTKTACTIHNSKDLEPTEMPSNDTLDKENVAYIHHGILCSHSKGRVHILCRDMDEAGNHHSRQTNTGTENQTLHVLTHKWELNDENTWTQGGEHHISGPVRTNNKNHMIISIGAEKAFDKIQQPFMLKTLNQLGIDGTYLKIIRDIFDRPIANILLNGQKREASPLKTGTRQGCPLPPLLFNIVLEILARAIRQEKEIKGIQLGKEEVKLSLFADDMIIYLENPIVSAQNLLKLISNFSKVSGYKINVQKSQAFLYTNNRQTESQILSELPFTIASKRIKYLGIQLTRDVKDLFKENYKPLLNEIKEDTNKWKNIPCLSIGKINIMKMAILPKVIYRFNAIPIKLPMTFFTELEKTTLKFIWNQKRARIAKTILSQKNKDGGITLPDFKLYYKATVTKTAWYQYQNRDIDQWNRTEPSEIIPHVYNHLIFDKPDKNKKWGKDSLFNKWCWENWLAICGKLKLDPFLTPYTKINSRWIKDLNVRPKTIKTLEENLGNTIQDIGMGKDFMSKIPKAMATKAKIDKWNLIELKSFCTAKETTISVNRQPTEWEKIFAICLSDKGLISRIYKELKQRHKKKTNNPIKKWAKDMNRHFSKEDIYAANRHMKKCSSSLAIREMPIKTTMRYHLTPVRMAIIKKSGNNRCWRGCGEIGTLSHCWWDCNLVQPLWKAVWRFLKDLELEIPFDPAISLLGIYPKDYKSCCYKDTCTQSTFTCRQHLPL

SEQ ID NO: 37420 - protein, 858 aa, Homo sapiens
  DOMAIN (123)..(164): kw TRANSCRIPTASE REVERSE II ORF2 domain identified by eMATRIX, accession number DM01354I, p-value=1.000e-40, raw score of 15.55
  DOMAIN (369)..(646): Reverse transcriptase domain identified by PFam, accession name rvt, E-value=1e-84, PFam score of 294.8
MSSEWEWLRCSEVKGQRDVRPGCLGWDFRVYIVEDTQDEDRTWSVKEACELVLRVQEMIITRVVDAAPHHTYSKIDHIVGSKALLSKCKRTEIITNCLSDHSAIKLELRIKNLTQSRSTTWKLNNLLLNDYWVHNEMKAEIKMFFETNENKDTTYQNLWDAFKAVCRGKFIALNAYKRKQERSKIDTLTSQLKELEKQEQTHSKASRRQEITKIRAELKEIETQKTLQKINESRSWFFERINKIDRPLARLIKKKREKNQIDAIKNDKGDITTDPTEIQTTIREYYKQLYANKLENLEEMDTFLDTYTLPRLNQEEVESLNRPITGSEIVAIINSLPTKKSPGPDGFTAEFYQRYKEELVPFLLKLFQSIEKEGILPNSFYEASIILIPKPGRDTTKKENFRPISLMNIDAKILNKILANRIQQHIKKLIHHDQVGFIPGMQGWFNIRKSINVIQHINRAKDKNHMIISIDAEKAFDKIQQPFMLKTLNKLGIDGTYVKIIRAIYDKPTANIILNGQKLEAFPLKTGTRQGCPLSPLLFNIVLEVLARAIRQEKEIKGIQLGKEEVKLSLFADDMIVYLENPIVSAQNLLKLISNFSKVSGYKKKINVQKSQAFLYTNNRQTESQIMSKLPFTIASKRIKYLGIQLTRDVKDLFKENYKPLLKEIKEDTNKWKNIPCSWVGRINIVKMAILPKVIYRFNAIPIKLPVTFFTELEKTTLKFIWNQKRARIAKSILSQKNKAGGITLPDFKLYYKATVTKTACSQSAPMELGFRPIPVDSGTRTIPEPGLTPWTQASGWTPKTCASGFFLQIQLTSPLWWTPVLGLHHKPRIQVYTEGPSPRPAPLDSDASSTHLLTQAS

SEQ ID NO: 37421 - protein, 291 aa, Homo sapiens
  DOMAIN (7)..(54): kw TRANSCRIPTASE REVERSE II ORF2 domain identified by eMATRIX, accession number DM01354V, p-value=1.000e-40, raw score of 12.97
MSKLPFIIATKRIEYLGIQLTRDVKDLFKENYKPLLNEIKEDTNKWKNIPCSWIGRINIMKMAILPKEIYRFNAIPIKLPLTFFTELEKTTSKFIRNQKRAHIAKTILSKKNKAGGITLPEFKLYYKATVTKTGCVGGSDQKRVRTTARNAGELGLNLVIAEDACSAASAEQHNNSINHIYPRIARVRSVEEILNAFRRPFRIRQHYGHCDDLVTEFLTRMSPLAPRIGQYWLQLPATFGPRELPALWPFSRFSSWRIYLWRGSPPSTSFSPKEKRNKRLIAVYISAALIG

SEQ ID NO: 37422 - protein, 1121 aa, Homo sapiens
  DOMAIN (611)..(636): 7 kw REVERSE TRANSCRIPTASE RNA POLYMERASE domain identified by eMATRIX, accession number DM00895E, p-value=3.333e-11, raw score of 15.72
  DOMAIN (582)..(857): Reverse transcriptase domain identified by PFam, accession name rvt, E-value=4.6e-77, PFam score of 269.4
  misc_feature (1)...(1121): Xaa = X or * as defined in Table 2
MGKKQNRKTGNSKTQSASPPPKERSSSPATEQSWMENDFDELREEGFRRSNYSELREDIQTKGKEVENFEKNLEECITRITNTEKCLKELMELKTKARKLREECRSLRSRCDQLEERVSAMEDEMNEMKREGKFREKRIKRNEQSLQEIWDYVKRPNLRLIGVPESDVENGTKLENTLQDIIQENFPNLARQANVQIQEIQRTPQRYSSRRATPRHIIVRFTKVEMKEKMLRAAREKDRSTRQKVNKDTQELNSALHQADLIDIYRTLHPKSTEYTFFSAPHHTYSKIDHIVGSKALLSKCKRTEIITNYLSDHSAIKLELRIKNLTQSRSTTWKLNNLLLNDYWVHNEMKAEIKMFFETNENKDTTYQNLWDALKAVCRGKFIALNAHKGKQERSEIDTLTSQLKELEKQEQTHSKASRRQEITKIRAELKEIETQKTLQKINESRSWFFERINKIDRPLARLIKKKREKNQIDTIKNDKGDITTDPTEIQTTIREYYKHLYANKLENLEEMDTFLDTYTLPRLNQEEVESLNRPITGSEXVAIINSLPTKKSPGPDGFTAEFYQRYKEELVPFLLKLFQSIEKEGILPNSFYEASIILIPKPGRDTTKKENFRPISLMNIDAKILNKILANRIQQHIKKLIHHDQVGFIPGMQGWFNIRKSINVIQHINRAKDKNHMIISIDAEKAFDKIQQPFMLKTLNKLGIDGTYFKIIRAIYDKPTANIILNGQKLEAFPLKTGTRQGCPLSPLLFNIVLEVLARAIRQEKEIKAIQLGKEEVKLSLFADDMIVYLENPIVSAQNLLKLISNFSKVSGYKISVQNLQAFLYTINRQTDSQIVSELPFTMAKKRIKYLGIQHTRDVKDLFKENYKPLLKEIKEDTNKWKNIPCSWIGRISIMKMAILPKNWKKTTLKFIWNQKRARIAKSILRQKNKAGGITLPDFKLYYKATVSKTACGYQKQGADTSEPAGAVRGNLPNFPSPQECRDARSTAMAWLAAAVPKKGKTHILLPNSTRLASDILGAGLEKRCWGFTIQYELCVQYSLSPSLCLVSQCQTAVVQAPKHRGHVQWCLIPSAQSLASQEAPQSRVNRVSDARPHQLTDVSESPFHSGHTYIHSSLLNIR

SEQ ID NO: 37423 - protein, 1261 aa, Homo sapiens
  DOMAIN (479)..(524): kw TRANSCRIPTASE REVERSE II ORF2 domain identified by eMATRIX, accession number DM01354N, p-value=1.000e-40, raw score of 13.17
  DOMAIN (563)..(839): Reverse transcriptase domain identified by PFam, accession name rvt, E-value=3.5e-85, PFam score of 296.4
MELKTKARELREECRSLRSRRNQLEERVSAMEDEMNEMKREGKFREKRIKRNEQSLQEIWDYVKRPNLRLIGVPESDAENGTKLENTLQDIIQEDFPNLARQANVQIQEIQRTPQRYSSRRATPRHIIVRFTKVEMKQKMLRAAREKDFKPTKIKRDKEGHYIMVKGSIQQEELTILNIYAPNTGAPRFIKQVLSDLQRDLDSHTLIMGDFNTPLSTLDRSTRQKVNKDTQELNSALHQADLIDIYRTLHPKSTEYTFFSAPHHTYSKIDHIVGSKALLSKCKRTQIITNYLSDHSAIKLELRIKNLTQSRSTTWKLNNLLLNVYWVHNEMKAEIKMFFETNENKDTTYQNLWDTFKAVCRGKFIALNAHKRKQERSKIDTLTSQLKELEKQEQTHSKASRRQEITKIRAELKEIETQKTLQKLNESRSWFFERINKIDRPLARLIKKKREKNQIDTIKNDKGDITTDPTEIQTTIREYYKHLYAYKLENLEEMDTFLDTYTLPRLNQEEVESLNRPITGSEIVAIINSLPTKKSPGPDGFTAKFYQRYKEELVPFLLKLFQSIEKEGILPNSFYDASIILIPKPGRDTTKKENFRPISLMNIDAKILNKILANRIQQHIKKLIHHDQVGFIPGMQGWFNIRKSINVIQHINRAKDKNHMIISIDAEKAFDKIQQPFMLKTLNKLGIDGTYFKIIRAIYDKPTANIILNGQRLEAFPLKTGTRQGCPLSPLLFNIVLEVLARAIRQEKEIKGIQLGKEEVKLSLFADDMIVYLENPIVSAQNLLKLISNFSKVSGYKINVQKSQAFLYTNNRQTESQIMSELPFTIASKRIKYLGIQLTRDVKDLFKENYKPLLKEIKEDTNKWKNIPCSWVGRINIVKMAILPKVIYRFNAIPIKLPMTFFTELEKTTLKFIWNQKRARIAKSILSKKNKAGGITLPDFKLYYKATVTKTALYLYQNRDVDQWNRTEPSEIMLHIYNYLIFDKPDKNKQWGKDSLCNKWCWENWLAICRNLKLDPFLTPYTKINSRWIKDLHVRPKTIKTLEENLGNPIQDIGMGKDFMSKTPKAMATKAKIDKWDLIKLKSFCTAKETTIRVNRQPTEWEKIFATYSSDKGLISRIYNELKQIYKKKTNNPINKWVKDMNRHFSKEDIYAAKKHMKKCSSSLAIREMQIKTTMRYHLTPVRMAIIKKSGNNRCWRGCGEIDFQQTNTGTENQTLHILTHKWELNNETTRTQGGEHHTLGLVEGWGARGGIALGDIPNAR

SEQ ID NO: 37424 - protein, 58 aa, Homo sapiens
TCIYHEIVDTMLEENVHDILCSALVDDCIERAKSIKQGGAKYDWVSGLQVGRNRRPGK

SEQ ID NO: 37425 - protein, 57 aa, Homo sapiens
  misc_feature (1)...(57): Xaa = X or * as defined in Table 2
RPPRSEVPGPLSPGRPPAAGLRGRXPAGVRGLREPRAFSGVRVERRSLFIGKDMFDS

SEQ ID NO: 37426 - protein, 42 aa, Homo sapiens
  misc_feature (1)...(42): Xaa = X or * as defined in Table 2
VPGEIHALHSADRQHENAXNARTRWQHAQSGRSPLFLALSRE

SEQ ID NO: 37427 - protein, 99 aa, Homo sapiens
  misc_feature (1)...(99): Xaa = X or * as defined in Table 2
SPSLLPDPDAHVGCXSRSRKRPDRIRRFDSRXNGLFYCRKTSXPFHXGXMCQXYQTDPRSNAQCHPVLLRLWWPGDEYDFLCRSGSVGSVRQSGRASGL

SEQ ID NO: 37428 - protein, 218 aa, Homo sapiens
  DOMAIN (121)..(169): Cadherins extracellular repeat proteins domain proteins domain identified by eMATRIX, accession number BL00232B, p-value= 3.132e-14, raw score of 32.79
  DOMAIN (38)..(129): Cadherin domain identified by PFam, accession name cadherin, E-value=0.00055, PFam score of 26.7
MDIENEKLDSEYLERTCEDVVLHSKSNFADVIKVKTLKQGIIPDYQELFFSTSLKLHTDQDKGDGNLKYILTGDGAGSLFVIDENTGDIHAAKKLDREEKSLYILRAKAIDRKTGRQVEPESEFIIKIHDINDNEPKFTKDLYTASVPEMSGVELMLNIAIMWPPVRRHFATDKAHLFCQIRTRTCGLVMNTISCVDLALWDLFGKVRNNLSGTKYNE

SEQ ID NO: 37429 - protein, 901 aa, Homo sapiens
  DOMAIN (619)..(636): 3'5'-CYCLIC NUCLEOTIDE PHOSPHODIESTERASE SIGNATURE domain identified by eMATRIX, accession number PR00387F, p-value=1.000e- 23, raw score of 14.79
  DOMAIN (447)..(691): 3'5'-cyclic nucleotide phosphodiesterase domain identified by PFam, accession name PDEase, E-value=5.1e-188, PFam score of 540.1
VGRARAPGAQVGAGAMEPPTVPSERSLSLSLPGPREGQATLKPPPQHLWRQPRTPIRIQQRGYSDSAERAERERQPHRPIERADAMDTSDRPGLRTTRMSWPSSFHGTGTGSGGAGGGSSRRFEAENGPTPSPGRSPLDSQASPGLVLHAGAATSQRRESFLYRSDSDYDMSPKTMSRNSSVTSEAHAEDLIVTPFAQVLASLRSVRSNFSLLTNVPVPSNKRSPLGGPTPVCKATLSEETCQQLARETLEELDWCLEQLETMQTYRSVSEMASHKFKRMLNRELTHLSEMSRSGNQVSEYISTTFLDKQNEVEIPSPTMKEREKQQAPRPRPSQPPPPPVPHLQPMSQITGLKKLMHSNSLNNSNIPRFGVKTDQEELLAQELENLNKWGLNIFCVSDYAGGRSLTCIMYMIFQERDLLKKFRIPVDTMVTYMLTLEDHYHADVAYHNSLHAADVLQSTHVLLATPALDAVFTDLEILAALFAAAIHDVDHPGVSNQFLINTNSELALMYNDESVLENHHLAVGFKLLQEDNCDIFQNLSKRQRQSLRKMVIDMVLATDMSKHMTLLADLKTMVETKKVTSSGVLLLDNYSDRIQVLRNMVHCADLSNPTKPLELYRQWTDRIMAEFFQQGDRERERGMEISPMCDKHTASVEKSQVGFIDYIVHPLWETWADLVHPDAQEILDTLEDNRDWYYSAIRQSPSPPPEEESRGPGHPPLPDKFQFELTLEEEEEEEISMAQIPCTAQEALTAQGLSGVEEALDATIAWEASPAQESLEVMAQEASLEAELEAVYLTQQAQSTGSAPVAPDEFSSREEFVVAVSHSSPSALALQSPLLPAWRTLSVSEHAPGLPGLPSTAAEVEAQREHQAAKRACSACAGTFGEDTSALPAPGGGGSGGDPT

SEQ ID NO: 37430 - protein, 108 aa, Homo sapiens
  DOMAIN (14)..(41): Protamine P1 proteins domain identified by eMATRIX, accession number BL00048, p-value=7.638e-09, raw score of 6.39
  misc_feature (1)...(108): Xaa = X or * as defined in Table 2
TVLPERPYNRKSSRRNRCGNGPPARSFCPSSGRSRRRSSSPATGPHTAIASALPRIAFGKISDSSTQHTGPQDMAKAATXNSLRGSMRYSFKPMVGRWIKSCLRPVWC

SEQ ID NO: 37431 - protein, 322 aa, Homo sapiens
  misc_feature (1)...(322): Xaa = X or * as defined in Table 2
SVLLMCAADYLPRPPDVQTCNAVRVWLRYHRSNHGTPPDFSPGPVSAWYYAHQPKIPIWSQQRGFTDRXTRHKCPQRFAVPDKXISSPDXAMNYYRKIHRPAPRHTAPTQKARLMADKSSLRHRHNSANKRRSASPLSSAGYPGKRIRAQNLIPASTTNGQLRIRQRRISQARXXTKRMARKGSISPISAVSNSLNSSXASIIVSSCIRCSALSPLSNIHKSXTAGPWGASSRKTNIGLSRQRIFPAWQSPCSRRTVKSSRQCAVTAAISSSVAFRNAAFNPEGISVASSNSLRGSMRYSFKPMVGRWIKSCLRPVWCIRPK

SEQ ID NO: 37432 - protein, 241 aa, Homo sapiens
  DOMAIN (147)..(164): Malic enzymes proteins domain identified by eMATRIX, accession number BL00331G, p-value=5.091e-14, raw score of 12.26
  DOMAIN (124)..(166): Malic enzyme domain identified by PFam, accession name malic, E-value=4e-11, PFam score of 48.3
MEPPTVPSERSLSLSLPGPREGQATLKPPPQHLWRQPRTPIRIQQRGYSDSAERAERERQPHRPIERADAMDTSDRPGLRTTRMSWPSSFHGTGTGSGGAGGGSSRREASAETQLGPIMGAMPAGSAGCGIAEMIISQTQREGLSEEAARQKVFMVDRFGLLTDKICSDLSMPAGPWKPNGPAVQDLWMLLNGDKAEQRMQLETIIEAYEEFSEFDTAEIGLIEPLRAMQSYGLGSPIWSF

SEQ ID NO: 37433 - protein, 46 aa, Homo sapiens
DTATRQTLLGNSLVVVAPKASVQKDFTIDSKTNWTSLLNGGRLAVG

SEQ ID NO: 37434 - protein, 25 aa, Homo sapiens
STSAQQTTANMSPAGHPSDQRFSAG

SEQ ID NO: 37435 - protein, 507 aa, Homo sapiens
  DOMAIN (57)..(104): kw TRANSCRIPTASE REVERSE II ORF2 domain identified by eMATRIX, accession number DM01354V, p-value=1.000e-40, raw score of 12.97
MIVYLENPIVSAQNLLKLIGSFSKVSGYKINVQKSQAFLYTNNRQTESQIMSELPFTIASKRIKYLGIQLTRDVKDLFKENYKPLLNEIKEDTKKWKNIPCSWVGRINIVKMAILPKVIYRFNAVPIKLPMTFFTELKKTTLKFIWNQKRARIAKSILSQKNKAGGITLPDFKLYYKATVTKTAWDWYQNRDIDQCNRTEPSEITPHIYNYLICDKPEKNKQWGKVSLFNKWCWENWLAICRKLKLDPFLTPYTKINSRWIKDLNVRPKAIKTLEENLGNTIQDIGMDKDFMSKTPKAMATKAKIDKWDLIKLKSFCTAKETTIRVNRQPTQWEKIFATYSSDKGLISRIYNALRQIYKKKTNNPIKKDMDETGNHHSQHTIARTKNQTPHVLTHGWELNNENTWTQEGEHHTLGTVVWNQKSPSPSLMQKHKHNAEGGILTEKRPDRGWKTKAANVTSIPSKTERAWGIRRRWISDNQSHPASPIKQLELYPEGYGTPIKAVNTGQ

SEQ ID NO: 37436 - protein, 506 aa, Homo sapiens
  DOMAIN (211)..(258): kw TRANSCRIPTASE REVERSE II ORF2 domain identified by eMATRIX, accession number DM01354V, p-value=1.000e-40, raw score of 12.97
  DOMAIN (2)..(224): Reverse transcriptase domain identified by PFam, accession name rvt, E-value=1.7e-05, PFam score of 8.3
MWYMHMYVWNTVRPLKRNEVDPFQDGRTGTALVCSSQHDRCRRWVISAFPTEDRSSSPAMEQSWMENDFDELTEVGFRRLNQAEAESLNRPITGSEIEAIIKPTNQKESRTRRIHSQILGAVLEVLARAIRQEKEIKGIQLGKEEVKLSLFADDMIVYLENPIVSAQNLLKLISNFSKVSGYKINVQKSQAFLYTNNRQTESQIMSELPFTIASKRIKYLGIQLTRDAKDVFKENYKPLLNEIKEDTNKWKNIPCSWIGRINIVKMAILPRNWKKLLQSSYGTKKARITKTILSKKNKAGGITLPNFKLYYKATVTKTAWYWYQHRDIDQWNRTEASEVTPHIYNHLIFDKPDKNKKWGKDSLFNKWCWENWLAICRKLKLDLFLTPYTKINPRWIKDLNLRPRTIKTLEENLGSIFRDIGMSKGFMTKTPKAKATKAKTDKWDLIKLKSFCTAKETTIRVNRQPTEWEKIFAIYPSDKGLISRIYKELKRIYKKKTTPSKSGQRV

SEQ ID NO: 37437 - protein, 498 aa, Homo sapiens
  DOMAIN (173)..(218): kw TRANSCRIPTASE REVERSE II ORF2 domain identified by eMATRIX, accession number DM01354N, p-value=1.000e-40, raw score of 13.17
  DOMAIN (188)..(427): Reverse transcriptase domain identified by PFam, accession name rvt, E-value=3.9e-40, PFam score of 146.7
MGKKQSRKTGNSKKQSASPPPKECSSSPAMEQSWTENHFDELREGFRQPNYSELKEEIQTNGKEVKNFEKKIDKWITRMTNAEKSLKELMELKAKARELREECRSLRSRCDQLEERVSVMEDEMNKMKFNKIGIPLARLIKKKREKNQIDTIKNDKGDITTNRTEIQTTIREYYKHLYANKVENLEEMDKFLDTYPLPRLNQEEIESLNRPITGSEIVAIINSLTTKKSPGPHGFTAKFYKRTKDKNHVSISIDAEKTFDKIQKPFMLKTLNKLGIDGTYLKIITAIYDKPTANITLNGQKLEAFPLKTGTKQGCPLSPLLFNIVLEVLARAIRQEKEIKGIQLGKEEVKLSLFADDMIVYLENPIVSAQNLLKLISNFSKVSGYKTNVQKSQAFLYTNKRQSESQIMSELPFTIASKRIKYLGIQLTRDMKDLFKENYKPLLNEIKEDTSKWKNIPCSWLGRINMVKMAIQPKVIYRFNAIPIKLPMTFFTELEKLL

SEQ ID NO: 37438 - protein, 564 aa, Homo sapiens
  DOMAIN (253)..(300): kw TRANSCRIPTASE REVERSE II ORF2 domain identified by eMATRIX, accession number DM01354V, p-value=1.000e-40, raw score of 12.97
  DOMAIN (35)..(266): Reverse transcriptase domain identified by PFam, accession name rvt, E-value=0.017, PFam score of -34.2
MGDFNTPLSTLDRSMRQKVNKDIQELNSALHHMDLIDIYRTLHPKSTEYTFFSAPQRTYSKIDHIVGSKALLSKCKRTEIITNCLSDHSAIKLELRIKKLTQNHSITWKLNNWLLNDYWVHNEMKAEIKMFFETNEIKDTTYQNLWDTFKATLNQEEVESLNRPITGSEIQAMINSLGTKKLQDQTDSQPSSTRDDMIVYLENPIVSAQNLLKLISNFSKVSGYKINVQKSQAFLYTNNRQTESQIMSKLPFTIASKIIKYLGVQLTRDVKDPFKENYKPLLNEIKEDTNKWKNIPCSWIGRINIMKMAILPKVIYRFNAIPIKLPMTFFTELEKSTLKFIWNQKRACIARSILSQRNKAGGITLPDFKLYYKATVTKTAWYWYQNRDIDQWNITEPSETMPHIYHYLIFEKPDKNKKWGKDSLFNKWCWENWLATCRKLKLDPFLTPYTKINSRWIKDLNVRPKTINTLEENLGNTIQDIGMGKDFMSKTPKAMATKAKIDKWDLIKLKSFCTAKETTTRVNRQPTEWEKIFAIYSSDKGLISRIYKELKQIYKKKTTPSTSG

SEQ ID NO: 37439 - protein, 574 aa, Homo sapiens
  DOMAIN (410)..(457): kw TRANSCRIPTASE REVERSE II ORF2 domain identified by eMATRIX, accession number DM01354V, p-value=1.000e-40, raw score of 12.97
  DOMAIN (185)..(423): Reverse transcriptase domain identified by PFam, accession name rvt, E-value=1.6e-06, PFam score of 23.1
MELKTKARELREECRSLRSRCDQLEERPNLRLIGVPESDGENGTKLENTLQDIIQENFPNLAKQVNVQIQEIQRTPQRYSLRRATPRHIIVRFTKVEMKEKMLRAAREKGRVTLKGKPIRLTADLSAETLQARREWGPIFNILKEKNFQPRISYPAKLSFISEGEIKSFTDKQMLRDFVTTRPALQELLKEALNMERNNRSWFFEKINKIDRPLARVIKKKREKNQIDAIKNDKEDITTNPTEIQTIIREYYKHLYPNKLENLEEMDTFLDTYTFPRLNQEEVESLNTSITGSEIVAIISIAYQPKKVQDQMDPQPNSTRVLEVLARAIRQEKEIKGIQLGKEEVKLSLFADDMIVYLENPIVSAQNLLKLISNFSKVSGYKINVQKSQAFLYTNNRQTESQIMSELPFTIASKRIKCLGIQLTRDVKDLFKENYKPLLKEIKEDTNKWKNIPCSWVGRINIVKMAILPKVIYRFNAIPIKLPMTFFTDLEKTTLNFIWNQKRARITKSILSQKNKAGGITLPDFKLYYTATVTKTAWYWYQNRWYWYQNRDIDQWNRTEPSEITPHVYNYLIF

SEQ ID NO: 37440 - protein, 826 aa, Homo sapiens; identical to SEQ ID NO: 34822
  DOMAIN (465)..(511): kw TRANSCRIPTASE REVERSE II ORF2 domain identified by eMATRIX, accession number DM01354O, p-value=1.000e-40, raw score of 8.73
  DOMAIN (498)..(773): Reverse transcriptase domain identified by PFam, accession name rvt, E-value=3e-80, PFam score of 280.0

SEQ ID NO: 37441 - protein, 581 aa, Homo sapiens
  DOMAIN (65)..(110): kw TRANSCRIPTASE REVERSE II ORF2 domain identified by eMATRIX, accession number DM01354N, p-value=1.000e-40, raw score of 13.17
  DOMAIN (108)..(360): Reverse transcriptase domain identified by PFam, accession name rvt, E-value=9.2e-53, PFam score of 188.7
METQKTLQKINESRSWFFEKINKIDRPLARLIKKKREKNQIDTIKNDKGDITTDPTEIQTTIREYYKHLYANKLENLEEMDKFLDTYTLPRLNQEEAESLNKPITGPEIEAIINSLPTKKIPGPDGFTAEFYQRYKEELQHIKKLIHHDQVGFIPGMQGWFNIHKLINVIQYINRTKDKNHMIISIDAEKASDKIQQPFMLKTLNKLGIDGTYLKIIRAIYDKPTANIILNGQKLEAFPLKTGTRQGCLLSPLLFNIVLEVLARAIRQEKEKKCIRLGKEEVKLSLFADDMIVYLENPIVSAQNLLKLISNFSKVSGYKINVQKSQAFLYTNNRQIESQIMSELPFTIASKRIQYLGIQLTRDVKDLFKENYKPLLNEIKEDTNKWKNIPCSWIGRINIMKMAMLPKVIYRFDAIPIKLPMTFFTELEKTTLKFIWNQKRARIAKSILSQKNKAGGITLPDFKLYYKAIVTKTAWYWYQKRDVDQWNRIEPSETIPHICNHLIFDKPDKNKQWGKDSLFNKWCWEIWLAIGRKRKLDPFLTPYTKINSRWIKDFNIRPKTIKTLEESLGIQDISMGKKFTS

SEQ ID NO: 37442 - protein, 636 aa, Homo sapiens
  DOMAIN (285)..(326): kw TRANSCRIPTASE REVERSE II ORF2 domain identified by eMATRIX, accession number DM01354I, p-value=1.000e-40, raw score of 15.55
  DOMAIN (63)..(271): AP endonuclease family 1 domain identified by PFam, accession name AP_endonucleas1, E-value=6.2e-06, PFam score of -26.4
MANKNNQCREVLKGPDELKTMAREPHDKCTSFSSQFDQLEERVSAMEDQMNEMKREEKFREKRIKRNEQRLQEIWDYVKRPNLCLIGVPESDGENGTKLENTLQDIIQENFPNLARQANIQIQEIQRMPQRYSLRRTTPRHIIVRFTKVEMKEKMLRAAREKGRVTHKGKPIRLTADLSAETLQARRESTRQKVNKDIQELNSAQHQADLTDNYRTLHPKSTEYTLFSAPHHTYSKIDHIVGSKALLSKCKRTEIITNCLSDHSAIKLELRIKKLTQNLSTTWKLNNLLLNDYWVHNEMKAEIKMLFETNENKDTTYQNLWDTFKAVCRGKYIALNAHKRKQERSKIDTLTSQLKELEKQEQSHSKASRRQEITKIRAELKEIETQKTLQKINESRDWFFEKINKIDRQLARLIKKKREKNQIDTIKNVLEFLAKAIRQDKEIKGIQLGKEEVKLFLFAEDMIVYLENPIVSAQNLLKLISNFSKVSGYKINVQKSQAFLYTNNRQTESQIMSELPFTIASKRIKYLGIQLTRDMKDLFKENYKPLLNKIKEDTKKWKNIPCSWVGRINIMKMAILPKVIYRFNAIPIKLPMTFFTELEKTTLKFTWNQKRARIAMSILTQKNKIGGIMLPDFKLY

SEQ ID NO: 37443 - protein, 498 aa, Homo sapiens
  DOMAIN (143)..(188): kw TRANSCRIPTASE REVERSE II ORF2 domain identified by eMATRIX, accession number DM01354N, p-value=1.000e-40, raw score of 13.17
  DOMAIN (186)..(466): Reverse transcriptase domain identified by PFam, accession name rvt, E-value=2e-62, PFam score of 220.8
MFFETDENKDTTYQNPWDTFKAVCRGKFIALNAHKRKQERSKIDNLTSQLKELQNPEQTHSKASRRQEITKIRAELKEIETQKTLQKINESRSWYFEKINKIDRPLARLIKKKREKNQIDAIKNDKGDITTDPTEIQTTITGYYKHIYANKLENLEEMDKFLNTYTLPRLNQEELESLNRPITGSEIETIINSLPTKKSPGSDGFTAEFYQRPGRDTTKKENFRPIFLMNIDVKILNKILANQIQQHIKKLMHQDQVGFIPGMQGWSNIHKSINVIRHINRTEDKNHMIISLDAEKAFDKIQQPFMLKTLNKLGIDGTYLKIIRAIYDKPTANIILNGQKLEAFPLKTSTRQGCPLSPLLFYIVLEVLAKAIRQEKEIKDIQLGKEEVKLSLFADDMIVYLENPIVSAQNLLKLISKFSKVSGYKINVQKSQAFLYTNNRQTESQIMSELPFTIASKRIKYPGIQLTRDVKDLFKENYKPLLNKIKENTNKWKNIPCS

SEQ ID NO: 37444 - protein, 520 aa, Homo sapiens
  DOMAIN (167)..(212): kw TRANSCRIPTASE REVERSE II ORF2 domain identified by eMATRIX, accession number DM01354N, p-value=1.000e-40, raw score of 13.17
  DOMAIN (251)..(520): Reverse transcriptase domain identified by PFam, accession name rvt, E-value=6.1e-75, PFam score of 262.4
ITNAEKSLKDLMELKTMAQELRDECTSLSSRFDQLEEKVSVMEDEINEMKQEEKVREKRIKRNEQSLQEIWDYVKRPNLHLIGVPESDRENGTKLENTLQDIIQENFPNLARQANIQIQEIQRMPQRYSSRRATPRHIIVRFTKVEMKEKMLRAAREKEIQTTIREYYKHLYTNKLENLEEMDKFLDTYSLPRLNQEEVESLKRPITGSEIGAIINSLPTKKSPGPDGFTAEFYQRYKKELVPFLLKLFQSTEKERILPNSFYEASIILIPKPGRDTTKKENFRPISLMNINAKILNKILANQIQQHIEKLIHHDQVGFIPGMQGWFNIRKSINVIQHINRTNEKNHMIISIDAEKAFDKIQQPFMLKTLNKLGIDGTYLKIVRAIYDKLTANIILNGQKLEAFPLKTGTRQGCPLSPLLFNIVLEVLARAIRQEKEIKGIQLGKEQVKLSLFADDMIVYLENPIVSAQNLLKLISNFSKVSGYKINVQKSQAFLYTNNRQTESQIMSELPFTIASKRIK

SEQ ID NO: 37445 - protein, 522 aa, Homo sapiens; identical to SEQ ID NO: 34635
  DOMAIN (37)..(83): kw TRANSCRIPTASE REVERSE II ORF2 domain identified by eMATRIX, accession number DM01354O, p-value=1.000e-40, raw score of 8.73
  DOMAIN (72)..(247): Reverse transcriptase domain identified by PFam, accession name rvt, E-value=1.1e-17, PFam score of 72.1

SEQ ID NO: 37446 - protein, 531 aa, Homo sapiens
  DOMAIN (10)..(65): kw TRANSCRIPTASE REVERSE II ORF2 domain identified by eMATRIX, accession number DM01354Q, p-value=1.000e-40, raw score of 9.23
  DOMAIN (1)..(238): Reverse transcriptase domain identified by PFam, accession name rvt, E-value=1.1e-48, PFam score of 175.1
MNIDAKILNKILAKRIQQHIKKLIHHDQVGFISGMQGWFNIRKSINVIQHINRTRDKNHMIVSIDAEKAFDKIQQPFMLKTLNKLGIDGTYFKIIRAIYDKPTANIILNGQKLEAFPLKTGTRQGCPLSPLLFNIVLEVLARAIRQEKEIKGIQLGKEEVKLTMFADNMIVYLENPIVSAQNLLKLISNFSKVSGYKINVQKSQAFLYTNNRQTESQIMSELPFTIASKRIKYLGIQLTRDVKDLFKENYKPLLKEVKEDTNKWKNIPCSWVGRNNIVKMATLPKFIWNLKRARIAKSIISQKNKAGGIMLPDFKLYDKATVTKTAWYWYQNRDIDQWNRTEPSEIMPRIYNYLIFDKPEKNKQWGKDSLFNKWWWENWLAICRKLKLDPFLTPYTKINSRWIKDLNVRPKTIKTLEENLGITIQDIGMGKDFMSKTPKAMAAKAKIDKWDLIKLKSFCTAKETTIRVNRQPTKWEKIFATYSSDKGLISRIYNELKQIYKKKTNNPIKKWAKDMNRHFSKEDIYAAQKHM

SEQ ID NO: 37447 - protein, 506 aa, Homo sapiens
  DOMAIN (138)..(185): kw TRANSCRIPTASE REVERSE II ORF2 domain identified by eMATRIX, accession number DM01354V, p-value=1.000e-40, raw score of 12.97
  DOMAIN (1)..(151): Reverse transcriptase domain identified by PFam, accession name rvt, E-value=0.008, PFam score of -29.5
MDKFLDTYTLPRLNQEEVESLNRPITGSEIVAIINSLPTKKSPGPDGFTAEFYQRAIRQEKEIKGIQLGKEEVKLSLFADDMIVYLENPIVSAQNLLKLISNFSKISGYKINVQKSQAFLYTNNRQTESQIMSELPFTIASKRIKYLGIQFTRDVKDLFKENYKPLLKEIKEDTNKWKDIPCSWVRRINIVKMAILPKVIYRFNAIPIKLPMTFFTELEKTTLKFIWNQKRARITKSILSQKNKAGGITLPDFKLYCKATVTKTAWYWYRNRDIGQRNRTEPSEITPDIYNYLIFDKPEKNKQWGKDSLFNKWCWENWLAICRKLKLDPFLTPYTKINSRWIKDLNLRPKTIKTLEENLGITIQDIGMGKDFMSKTPKAMATKAKIDKLDLINLKSFCTAKETIIRVNRQPTKWEKIFTTYSSDKGLISRIYNELKQIYKKKTNNPIKKWAKDMNRHFSKEDIYAAKKHMKKCSSSLAIREMQIKTTMRYHLTPVRMTIIKKSGNN

SEQ ID NO: 37448 - protein, 931 aa, Homo sapiens; identical to SEQ ID NO: 37091
  DOMAIN (323)..(364): kw TRANSCRIPTASE REVERSE II ORF2 domain identified by eMATRIX, accession number DM01354I, p-value=1.000e-40, raw score of 15.55
  DOMAIN (548)..(814): Reverse transcriptase domain identified by PFam, accession name rvt, E-value=5.6e-77, PFam score of 269.2

SEQ ID NO: 37449 - protein, 528 aa, Homo sapiens
  DOMAIN (148)..(195): kw TRANSCRIPTASE REVERSE II ORF2 domain identified by eMATRIX, accession number DM01354V, p-value=1.000e-40, raw score of 12.97
  DOMAIN (1)..(163): Reverse transcriptase domain identified by PFam, accession name rvt, E-value=3.4e-05, PFam score of 4.1
SIAYQPKRVQDQMDSQPNSTRANIILNGQKLEAFPLKTGTRQFSKENFEPLSPLLFNIVLEVLARAIRQEKEIKGIQLGKEEIKLSLFADDMIVYLENPIVSAQNLLKLISNFSKVSGYKINVQKSQAFLYTNNRQTESQIMSELPFTIASKRIKYLGIQLTRDVKDLFKQNYKPRLKEIKEDTNKWKNIPCSWVERIYIVKMAILPKVIYRFSAIPIKLPMTFFTELEKTTLKFIWNQKRARIAKSILSQKNKAGGITLPDFKLYYKDTVTKTAWYWYQNRDIDQWNRTEPSEIMPHIYNYLIFDKPEKNKQWGKDSLFNKWCWENWLALCRKLKLNPFLTPYTKINSRWIKDLNVRPQTIKTLEENLGITIQDIGMGKDFRSKTPKAMATKAKSDKWDLIKLKSFCTAKETTIRMNRQPTKWEKIFATYSSDKGLISRIYNELKQIYKKKTNNPIKKWAKDINRHFSKEDIYAAKRHMKKCSSSLAIRQMQIKTTMRYHLTPVRMAIIKKSGNNRDMDEIGNHPSQ

SEQ ID NO: 37450 - protein, 554 aa, Homo sapiens
  DOMAIN (121)..(168): kw TRANSCRIPTASE REVERSE II ORF2 domain identified by eMATRIX, accession number DM01354V, p-value=1.000e-40, raw score of 12.97
  DOMAIN (1)..(137): Reverse transcriptase domain identified by PFam, accession name rvt, E-value=0.094, PFam score of -44.7
  misc_feature (1)...(554): Xaa = X or * as defined in Table 2
TEPKTKTTXLSQXMQKRPLTKFNNASCXKLSINIVLEVLARAIRQEKEIKGVQLGKEEVKLSLFADDMIVYLENPIVSAQNLLNLISNFSKVSGYKINVQKSQAFLYTNNRQTESQIMSELPFTIASKRIKYLGIQLTRDVKDLFKENYKPLLNERKEDTNKWKNIPCSWVERINIVKMAILPKVIYRFNAIPIKLPMTFFTELEKTTLKFIWNQKRARIAKSILSQKNKAGGITLPDFKLYYKATVTKTAWYSYQNRDIDQWNRTEPSEILPRIYNYLIFDKPEKNKQWGKDSLFNKWCWENWLAICRKLKLDPFLKPYTKIKSGWIKDLNVRPKTIKTLEENLGITIQDIGMGKDFMSKTPKAMATKAKIDKWDLIKLKSFCTAKETTIRVNRQPTEREKIFATYSSDKGLISRIYKELKQIYKKRTNNLIKKWVKDMNRHFSKEDVYAAKKHMKKCSSSLAIREMQIKTTMRYHLTPVRMAIIKKSGNNRITIVLLPGSLIVRSFHVTLNAILLHPGLTLFSPSAGRRDIPRVAFSYLAFSAQPSHNTPVN

SEQ ID NO: 37451 - protein, 758 aa, Homo sapiens; identical to SEQ ID NO: 35813
  DOMAIN (106)..(149): kw TRANSCRIPTASE REVERSE II ORF2 domain identified by eMATRIX, accession number DM01354T, p-value=1.000e-40, raw score of 9.48
  DOMAIN (1)..(228): Reverse transcriptase domain identified by PFam, accession name rvt, E-value=2.9e-37, PFam score of 137.2

SEQ ID NO: 37452 - protein, 782 aa, Homo sapiens
  DOMAIN (203)..(249): kw TRANSCRIPTASE REVERSE II ORF2 domain identified by eMATRIX, accession number DM01354O, p-value=1.000e-40, raw score of 8.73
  DOMAIN (236)..(511): Reverse transcriptase domain identified by PFam, accession name rvt, E-value=3e-80, PFam score of 280.0
AIKLELRIKNLTQNRSTTWKLNNLLLNDYWVHSEMKAEIKMFFETNENKDTTYQNLWDTFEAKSKSKQHSKASRRQEITKIRAELKEIEIQKTLQKINESRSWFFERINKIDRPLARLIKKKREKNLIDAIKTDKGDITTNPTEIQTTIREYYKHLYANKLENREEMDKFLDTYTLPRLNEEEVESLNTPITGSEIVAIINSLPTKKSPGPDGFTAELYQRYKEELVPFLLKLFQSIEKEGILPNSFYEASIILIPKPGRDTTKKENFRPISLMNIDAKILNKILAKGIQQHIKKLIHHDQVGFIPGMQGRFNIRKSINVIQHINRTKDKNHMIISIDAEKAFDKIQQPFMLKTLNKLGIDGTYFKIIRAIYDKPTASIILNGQKLEAFRLKTGTRQGCPLSPLLFNIVFEILARAIRQEKEIKGIQLGKEEVKLSLFAGDMIVYLENPIVSAQNLLKLISNFSKVSGYKINVQKSQAFLYTNNRQTESQIMSELPFTIASKRIKYLGIQLTRDVKDLFKENYKPLLKEIKEDTNKWKNIPCSWVGRINIVKMAILPKVIYRFNAIPIKLPMTFFTELEKTTLKFIWNQKRARIAKSILSQKNKAGGITLPDFKLYYKATVTKTAWYWYQNRDIDQWNRTEPSEITPHIYNYLIFDKPEKMSIIDTGGWYEAPVSSFFKEGLCRTGTENQVNRQPPAASPFKVYVSCTGSLHPRPHYFLEHPYPSFLSFSSTSAATAADDIPGAFNELKPHLPKEASKVTDWFENSYVYGRIRRYSLNDVAV

SEQ ID NO: 37453 - protein, 734 aa, Homo sapiens
  DOMAIN (152)..(199): kw TRANSCRIPTASE REVERSE II ORF2 domain identified by eMATRIX, accession number DM01354V, p-value=1.000e-40, raw score of 12.97
  DOMAIN (1)..(165): Reverse transcriptase domain identified by PFam, accession name rvt, E-value=0.02, PFam score of -35.1
MPAISKLLLVSLMESYGEKGIRQSNSYVPSLERGHTCVGSGTSGQGSGSHYSSGTSVQGTAAHRPATELGSGAWVCMGGPCPGKEEVKLSLFADDMIVYLENPIVSAQNLLKLISNFSKVSGYKINVQKSQAFLYTNNRQTESQIMSELPFTIASKRIKYLGIQLTRDVKDLFKENYKPLLKEIKEDTNKWKNIPCSWVGRINIVKMATLPKAIYRFNAIPIKLPMPFFTELEKTTLKFIWNQKRAHIAKSILSQKNKAGGITLPDFKLYYKATVTKTAWYWYQNRDIDQWNRTEPSEIKPHIYNYLIFDKPEKNEQWGKDSLFNKWCWENWLAICRKLKLDPFLTPYTKIKSRWIKDLNVRPKTIKTLEENLGITIQDIGMGKGFMSKTPKAMATKDKIHKWDLIKLKSFCTAKETTIRVNRQRTTWEKIFATYLSDKGLISSIYNELKQIYKKKTNDPIKKWAKDMNRHFSKEDIYAAKKHMRKCSSSLAIREMQIKTTMRYHLTPVRMAIIKKSGNNSQTVKPQNKAHFAKMDRQCVHGLSPRLEHSPRGRSSPRCAECCLYSCLHAQTSNGAVKINLMTESQELGKRRKLISKEEEHTPKLLVLVMNPDPTQKPLSVQCASVSCCIRRDDDSTDFMDLLGEFKEMKPARHLGQHLTLRFTPVIWAHLTTMAFAIPGACIRSHTPAPTPTVQTALSIRVIAAHNDISTSLFVQEGAFREAKDLSHGHVNTV

SEQ ID NO: 37454 - protein, 941 aa, Homo sapiens
  DOMAIN (149)..(194): kw TRANSCRIPTASE REVERSE II ORF2 domain identified by eMATRIX, accession number DM01354N, p-value=1.000e-40, raw score of 13.17
  DOMAIN (164)..(412): Reverse transcriptase domain identified by PFam, accession name rvt, E-value=8.4e-45, PFam score of 162.3
MKAEIKMFFETNENKDTTYQNLWDTFKAVCRGKFIALNAHKRKQERSKIDTLTSQLKELEKQEQTHSKASRRQEITKIRAELKEIETQKTLQKINESRSWFFERINKIGRPLARLIKKKTEKNQIDAIKNDKGDITTDPTEIQTTIREYYKHLYANKLENLEEIDKFLDTYTLPRLNQEEVESLNRPITGAEIVAIINSLPTKKSPGPDGFTAEFYQRYKEELHINRAKDKNHMIISIDAEKAFDKIQQPFMLKTLNKSGIDGTYFKIIRAIYDKPTANIILNGQNLEAFPLKTGTRQGCPLSPLLFNIVLEFLAKAIRQEKEINGIQLGKEEVKLSLFADDMIVYLENPIVSAQNLLKLISNFSKVSGYKINVQKSQALLYTNNRQTESQIMSELPFTIASKRIKYLGIQLTRDVKDLFKEYYKPLLKEIKEDTNKWKNIPCSWVGRINIVKMAILPKVIYRFNAIPIKVPMTFFTELEKTTLKFIWNQKRARIAKSILSQKNKAGGITLPDFKLYYKAAVTKTAWYWYQNRDIDQWNRTEPSEITPHIYNYLIFDKPDKNKKWGNNSLFNKWCWENWLAICRKLKLDPFLTPYTKINSRWIKDLHVRPKTIKTLEENLSNTIQDIGMGKDFMSKTPKAMATKAKIDQWDLIKLKSFCTAKETTIRVNRQPTEWEKIFATHSSDKGLLSRIYNELKQIYKKKTDNPINKWAKDMNRHFSKEDIYAAKRHMKKCSSSLAIREMQIKTTMRYHLTPVRMAIIKKSGNNRWNISEDPGLALSCIKEASITVPSLRCAVSIIQGILSNWVQKITGSGSMRASVFREAWAKLTISLGAFRTPDPASSILPSKQENLFQGWMHSLNESSMDPPQVLICTSAHVLTPGGICRPLTSSLSGRKLPSYPLSVSSKALPSLPDAGLILIDYINSDPFSLGFQLGLANGRY

SEQ ID NO: 37455 - protein, 925 aa, Homo sapiens
  DOMAIN (64)..(109): kw TRANSCRIPTASE REVERSE II ORF2 domain identified by eMATRIX, accession number DM01354N, p-value=1.000e-40, raw score of 13.17
  DOMAIN (148)..(423): Reverse transcriptase domain identified by PFam, accession name rvt, E-value=8e-85, PFam score of 295.2
RHKKPFKKSMNPGAGFFERINKIDRPLARLTKRKREKNQIHAIKNDKGDITTDPTEIQTTIREYYKHLYANKLENLEEMDKFLDTYTLPRLNQEEIESLNRPITGAEIVAIINSLPTKKSPGPDGFTAEFYQRYKEELVPFLLKLFQSIEKEGILPNSFYEASINLIPKPGRDTTKKENFRPISLMNIDAKILSKILANRIQQHIKKLIHHDQVGFIPGMQGWFNICKSINVIQHINRTKDKNHMIISIDAEKAFDNIQQPFMLKTLNKLSIDGTYLKIIRAIYDKPTANIILNGQKLEAFPLKTGTRQGCPLSPLLFNIVLEVLTRAIRQEKEIKGIQLGKEEVKLSLFADDMIVYLENPIVSAQNLLKLISNFSKVSGYKINVQKSQAFLYTNNRQTESQIMSELPFTIASKRIKYLGIQLTRDVKDFFKENYKPLLNEIKEDTNKWKNIPCSWVGRINIMKMAILPKVIYRFNAIPIKLPMTFFTELEKTTLKFIRNQKRACIAKSILSQKNKAGGIVLPDFKLYYKATVTKAAWYWYQNRDIDQWNRTEPSEITPHIYNYLIFDKPEKNKQWGKDSLFNKWCWENWLAICRKLKLEPFLTPYTKINSRWIKDLNVRPKTIKTLEENLGITIQDIGIGKDFMSKTPKAMATKDKIDKWDLIKLKSFCTAKETTIRVNRQPTEWEKIFATYSSDKGLIARIYNELKHIYKKKTNNPIKKWAKDMNRHFSKEDIYAAKRHMKKCSPSLAIREMQIKTKMRYHLTPVRMVIIKKSGNNRCWRGCGEIGTLLHCWWDCKLVQPLWKSVWRFLRDLELEIPFDPAIPLLGIYPKDYKSCCYKDTCTRMFIAALFTIAKTWNQPKCPTMIDWIKKMWHIYTMEYYAAIKNDEFMSFVGTWMKLETIILSKLSQEQKTKHRIFSLIGGN

SEQ ID NO: 37456 - protein, 109 aa, Homo sapiens
MLKFGISALTDVELVALFLRTGTRGKDVLTLAKEMLENFGSLYGLLTSEYEQFSGVHGIGVAKFAQLKGIAELARRYYNVRMREESPVLSPEMTREFLQSQLKMLGLQV

SEQ ID NO: 37457 - protein, 148 aa, Homo sapiens
  DOMAIN (98)..(132): Eukaryotic RNA polymerase II heptapeptide repeat proteins domain identified by eMATRIX, accession number BL00115T, p-value= 2.165e-19, raw score of 8.45
MIPFADSGGWIYGPRLNDDIGRSKNGANGRRIDSSGTRLAKRHWKLESSQEANLEVIESEDIIQSAGKGRQAGSFLVQRDFLFLLIYEFICNFRLVNKGEAIGVIAAQSIGEPGTQLTMRTFHIGGAASRAGAESSIQPEIRWKPKTK

SEQ ID NO: 37458 - protein, 368 aa, Homo sapiens
  DOMAIN (207)..(241): Eukaryotic RNA polymerase II heptapeptide repeat proteins domain identified by eMATRIX, accession number BL00115T, p-value= 2.165e-19, raw score of 8.45
  DOMAIN (54)..(127): RNA polymerase alpha subunit domain identified by PFam, accession name RNA_pol_A, E-value=1.1e-49, PFam score of 140.1
ITLHFYAIRARRDQTSFFNQHLPGCFSRPEQFSHPFQHAGCQPLHTCRACKVDPITANFREGLNVLQYFISTHGARKGLADTALKTANSGYLTRRLVDVAQDLVVTEDDCGTHEGIMMTPVIEGGDVKEPLRDRVLGRVFAEDVLKPGTADILVPRNTLLHEQWCDLLEENSVDAVKVRSVVSCDTDFGVCAHCYGRDLARGHIINKGEAIGVIAAQSIGEPGTQLTMRTFHIGGAASRAAAESSIQVKNKGSIKLSNVKSVVNSSGKLVITSRNTELKLIDEFGRTKESYKVPYGAVLAKGDGEQVAGGETVANWDPHTMPVITEVSGFVRFTDMIDGQTITRQTDELTGLSSLVVLDSAERTAGGK

SEQ ID NO: 37459 - protein, 126 aa, Homo sapiens
MGGRDKSVKVEEYRRDSGNRDTAPRPLGLQDRLGWPKRLWCLMNYPGTRYTKQMMATVCYPALEEVAQELRLRGSYVELKSLTAGEGQQLGYLDQVLAAIHDRDVNMGVTGHGLGASHWAFDTVVQ

SEQ ID NO: 37460 - protein, 71 aa, Homo sapiens
HRYFIRDKLMERRNRRTGRTEKARIWEVTDRTVRTWIGEAVAAAAADSVTLSVPVTPHTFRHSQGISTWFC

SEQ ID NO: 37461 - protein, 161 aa, Homo sapiens
  DOMAIN (47)..(76): Amino acid permeases proteins domain identified by eMATRIX, accession number BL00218C, p-value=9.163e-16, raw score of 13.41
MCEEYNVYTLIRSTEAISWAHVWFGGLVGNVPVKILVSLDYGTKTTQNKASFVAFGEAEYWFSLIKVTTVIVFIIVGVLMIIGIFKGAQPAGWSNWTIGEAPFAGGFAAMIGVAMIVGFSFQGTELIGQQCMPQLTLRGSPAVFYYLCHQLGTFSSFKFLL

SEQ ID NO: 37462 - protein, 420 aa, Homo sapiens
MVAVVQANFSRRCVYRVHLALHLRHRQAGRCQPAAGFLTHPVSQDFTFQPVEHLHQHRREHHTATVFATGLLKGIRQAAALRFRQLTGGGFNPDEWREAPRLINRLDAGSVVLYRGQAGAVPARHPAREVPFTPSYPFCHPADQRVVKIATFDQRLCILGPRVVHQTVLTVVMVPVGALIIRADNPFRDEGINGVRSYRPRLPFFPDEFELGTRQTVHYPQTNELLWQHETRHAYNAQGLANRCIPDSLPAVEWLTYGSGWLAGMKLADTPVVEYTRDRLYRETLRSFGRYELTTAYTPAGQIQSQHLNSLLSDREYTWNDNGELIRISRPRQTRSYRYSTTGRLTGVHTTAGNMDIRIPNTTDPAGNRLLDPELHPDSALSIGPDNHIGRDAHYLYRYDRHGRLTKKTDLIPEGVIPHG

SEQ ID NO: 37463 - protein, 297 aa, Homo sapiens
RHPAREVPFTPSYPFCHPADQRVVKIATFDQRLCILGPRVVHQTVLTVVMVPVGALIIRADNPFRDEGINGVRSYRPRLPFFPDEFELGTRQTVHYPQTNELLWQHETRHAYNAQGLANRCIPDSLPAVEWLTYGSGWLAGMKLADTPVVEYTRDRLYRETLRSFGRYELTTAYTPAGQIQSQHLNSLLSDREYTWNDNGELIRISRPRQTRSYRYSTTGRLTGVHTTAGNMDIRIPNTTDPAGNRLLDPELHPDSALSIGPDNHIGRDAHYLYRYDRHGRLTKKTDLIPEGVIPHG

SEQ ID NO: 37464 - protein, 59 aa, Homo sapiens
  misc_feature (1)...(59): Xaa = X or * as defined in Table 2
RQGLLVSPRLVQKGEIRTPGLKRSSRLDLQKCXDYRHEPSSLASEAPSVWVLLPPWRQS

SEQ ID NO: 37465 - protein, 638 aa, Homo sapiens
  DOMAIN (301)..(314): PROTEIN ZINC-FINGER METAL-BINDI domain identified by eMATRIX, accession number PD00066, p-value=3.077e-15, raw score of 13.92
  DOMAIN (255)..(601): Zinc finger, C2H2 type domain identified by PFam, accession name zf-C2H2, E-value=1.6e-74, PFam score of 261.0
MTRRVAGWQGPTGPQGQPGGQRTPLPGPCSFIPPLCMLQSQHLNSLLSDRDYTWNDNGELIRISSPRQTRSYSYSTTGRLTGVHTTAANLDIRIPYATDPAGNRLPDPELHPDSTLSMWPDNRIARDAHYLYRYDRHGRLTEKTDLIPEGVIRTDDERTHRVAKRVWRRERDLTGWMSLSRKPQVTWYGWDGDRLTTIQNDRTRIQTIYQPGSFTPLIRVETATVTGENGDPIRHIRSHTGHKPYECQDYGEKPYRCKECGKAFSYFQSFKKHERNHSEEKPYKCKQCGKPFSYRQSVLRHERTHTGEKPYECKKCGKTFSTLTGFQIHERTHTREKPYECKECGKAFIYLASFQRHMIMHSGDGPYKCEECGKAFSCPSSFQVPERIHTREKPYECKQCVHERTHTGEKPCECNECGKAFSVSGSLRVHERIHTGEKPYTCKQCGKAFCHLGSFQRHMIMHSGDGPHKCKICGKGFDFPGSARIHEGTHTLEKPYECKQCGKLLSHRSSFRRHMMAHTGDGPHKCTVCGKAFDSPSVFQRHERTHTGEKPYECKQCGKAFRTSSSLRKHETTHTGEQPYKCKCGKAFSDLFSFQSHETTHSEEEPYECAYAYWSMELEDMISTDDAYVRAFPFCCWD

SEQ ID NO: 37466 - protein, 732 aa, Homo sapiens
  DOMAIN (320)..(371): LIPOPROTEIN-28 domain identified by eMATRIX, accession number DM01922D, p-value=7.873e-30, raw score of 19.59
  DOMAIN (5)..(279): HlyD family secretion protein domain identified by PFam, accession name HlyD, E-value=1.1e-22, PFam score of 88.8
MKLTTHRENMALTNGFCHHIAAQQNLYTNTLLAARIKQRLTEQFELMLRQAQIDFAGKAHSLTEAQANTTQVSAERDRLFKNYQRYLKGSQAAVNPFSERDIDDARQNFLAQDALAQIQSQLDSLVNGEQSQIVSLKAQLAEAKYNLEQTIVRAPSNGYVTQVLIRPGTYAASLPLRPVMVFIPDQKRQIVAQFRQNSLLRLAPGDDAEVVFNALPGKVFSGKLAAISPAVPGGAYQSTGTLQTLNTAPGSDGVIATIELDEHTDLSALPDGIYAQNPKNLKIVELKAPQLPRSLDDAQIALAVINTTYASQIGLTPAKDGIFVEDKESPYVNLIVTREDNKDAENVKKFVQAYQSDEIPCRTRSKHCTPAESGACKTESAARHAGPNLYQCRRIRSANRSAISVKGWRTPCIPDSLPAVEWLTYGSGYLAGMKLGDTPLVEYTRDRLHRETLRSFGRYELTTAYTPAGQLQSQHLNSLLSDRDYTWNDNGELIRISSPRQTRSYSYSTTGRLTGVHTTAANLDIRIPYATDPAGNRLPDPELHPDSTLSMWPDNRIARDDNYLYRYDRHGRLTEKTDLIPEGVIRTDDERTHRYHYDSQHRLVHYTRTQYEEPLVESRYLYDPLGRRVAKRVWRRERDLTGWMSLSRKPQVTWYGWDGDRLTTIQNDRTRIQTIYQPGSFTPLIRVETATGELAKTQRRSLADTLQQSSGEDGGSVVFPPVLVQMLDRLES

SEQ ID NO: 37467 - protein, 285 aa, Homo sapiens
  DOMAIN (26)..(43): FUMARATE LYASE SUPERFAMILY SIGNATURE domain identified by eMATRIX, accession number PR00149D, p-value=5.765e-13, raw score of 14.04
  DOMAIN (183)..(283): Ribosomal protein L15 amino terminal re domain identified by PFam, accession name Ribosomal_L15, E-value=8.1e-46, PFam score of 165.6
STLTVTSGVISPLTTSNRKPLLVRLGSSTMPHKVNPIDFENSEGNLGLSNAVLQHLASKLPVSVVHQNRCIPDSLPAVEWLTYGSGWLSGMKLGDTPLVEYTRDRLHRETLRSFGRYELTTAYTPAGQLQSQHLNSLLSDRDYTWNDNGELIRISSPRQTRSYSYSTTGRLTGVHTTAANLDIRIPYTTDPAGSKKAGKRLGRGIGSGLGKTGGRGHKGQKSRSGGGVRRGFEGGQMPLYRRLPKFGFTSRKAAITAEIRLSDLARVEGGVVDLNPLKAANIIGI

SEQ ID NO: 37468 - protein, 79 aa, Homo sapiens
MEFGEMLKAPNKVLHPLITATQEGNYNGTEGISALPFNGIILAHSNESEWVTFRNNKNNEAFLDRVYIVKVPYCLRISE

SEQ ID NO: 37469 - protein, 244 aa, Homo sapiens
FNDDSPEARKITRRWRIGEAADLVGVSSQAIRDAEKAGRLPHPDMEIRGRVEQRVGYTIEQINHMRDVFGTRLRRAEDVFPPVIGVAAHKELNNDYTSKKVMKPLITSNTVTDEIERANVLKMNGKWYLFTDSRGSKMTIDGINSNDIYMLGYVSNSLTGPYKPLNKTGLVLQMALDPNDVTFTYSHFAVPQTKGNNVVITSYMTNRGFFEDKKATFAPSFLMNIKGNKTSVVKNSILEQGQLT

SEQ ID NO: 37470 - protein, 1456 aa, Homo sapiens
  DOMAIN (235)..(278): 1 kw MIND INHIBITOR DIVISION CONTROL domain identified by eMATRIX, accession number DM01756B, p-value=4.822e-15, raw score of 22.91
  DOMAIN (200)..(311): ParA family ATPase domain identified by PFam, accession name ParA, E-value=7.4e-24, PFam score of 92.7
MKLMETLNQCINAGHEMTKAIAIAQFNDDSPEARKITRRWRIGEAADLVGVSSQAIRDAEKAGRLPHPDMEIRGRVEQRVGYTIEQINHMRDVFGTRLRRAEDVFPPVIGVAAHKGGVYKTSVSVHLAQDLALKGLRVLLVEGNDPQGTASMYHGWVPDLHIHAEDTLLPFYLGEKDDVTYAIKPTCWPGLDIIPSCLALHRIETELMGKFDEGKLPTDPHLMLRLAIETVAHDYDVIVIDSAPNLGIGTINVVCAADVLIVPTPAELFDYTSALQFFDMLRDLLKNVDLKGFEPDDLAILFHVTAVHMFSLEGIENLPFELQRNFQLMRDLDQRTEGVKRATRKNENFGCSPASSFSHLRERRDPGFSHDPGDQRQEAQNLAKAVQTALQHSIREIGLRLMRSKNDGMSQKDIAAKEGLSQAKVTRALQAASAPEELVALFPVQSELTFSDYKTLCAVGDEMGNKNLEFDQLIQNISPEINDILSIEEMAEDEVKNKILRLITKEASLLTDKGSKDKSVVTELWKFEDKDRFARKRVKGRAFSYEFNRLSKEKSKLSNLREYQNRIAGIAKRSKAVLGWASTAQFGTDNQFIKDDAARAASILEAARKDPVFAGISDNATAQIATAWASALADYAAAHKSMPRPEILASCHQTLENCLIESTRNSMDATNKAMLESVAAEMMSVSDGVMRLPLFLAMILPVQLGAATADACTFIPVTRDQSDIYEVFNVAGSSFGSYAAGDVLDMQSVGVYSQLRRRYVLVASSDGTSKTATFKMEDFEGQNVPIRKGRTNIYVNRIKSVVDNGSGSLLHSFTNAAGEQITVTCSLNYNIGQIALSFSKAPDKGTEIAIETEINIEAAPELIPLINHEMKKYTLFPSQFVIAAEHTFRTLKEYLSHEQDMLRLRIMIWRTLATDTFDIALPVNQSFDVWATIIRGKFQTVYRDIIERVKSSGAMGMFAGADAASFFQQLPKISSSQPKTISRLHLLFLPNFLKLTDTFLETIEENGVVLGIHDTAHKGSLAWLAFLLACFLGEGSSFAKTARYETVGKGLLLLLVTAGEVRIVSEHTFSAAATSSHLMCLFNLCQVSQGKNVLKPFPQIEALVRAPNPQEHQEEAKETDTADSLCKLDLGIARTRVRIRRPHTSPALSPQHPTPAVHAHLPVDEPHASAVQTSVSTSVGEPTRWVPGAPSGVAGTAGWRRAGRLKAVATELLPMNGSLWSTQARISPAFLLKVNQTLMDYRTGRVQPAIPQSLPEALRLAADLAEQKQRLEQKMLMDAPKVEFAERVATASGVLIGNYAKVLGLGQNYLFTWLRDNGILIATGERRNVPKQDSISHAGHILSQCANLAATTSEYFIHKPHRLIAAETGYSQSTVVRAFREAVNKGILSVEIVIGDHRERRANLYRFTPSFLAFAQQAKNALIESKLKISSAATKSKVTAWEARARGHYYHKGDSR

SEQ ID NO: 37471 - protein, 484 aa, Homo sapiens
  DOMAIN (213)..(256): 1 kw MIND INHIBITOR DIVISION CONTROL domain identified by eMATRIX, accession number DM01756B, p-value=4.822e-15, raw score of 22.91
  DOMAIN (178)..(281): ParA family ATPase domain identified by PFam, accession name ParA, E-value=1.8e-22, PFam score of 88.1
MTLMETLNQCINAGHEMTKAIAIAQFNDDSPEARKITRRWRIGEAADLVGVSSQAIRDAEKAGRLPHPDMEIRGRVEQRVGYTIEQINHMRDVFGTRLRRAEDVFPPDLALKGLRVLLVEGNDPQGTASMYHGWVPDLHIHAEDTLLPFYLGEKDDVTYAIKPTCWPGLDIIPSCLALHRIETELMGKFDEGKLPTDPHLMLRLAIETVAHDYDVIVIDSAPNLGIGTINVVCAADVLIVPTPAELFDYTSALQFFDMLRDLLKNVDLKGQLYIRRQPYAERPHYVEDKGHKYLVFEANTGTENGYQGEESLFNKAYYGGGTNFFRKESQKLQQSAKKRDAELANGALGIIELNNDYTLKKVMKPLITSNTVTDEIERANVFKMNGKWYLFTDSRGSKMTIDGINSNDIYMLGYVSNSLTGPYKPLNKTGLVLQMVLIPNDVTFTYSPLRSASSQREQCGYPPSYIDKPEASSRLKRQHLRQAS

SEQ ID NO: 37472 - protein, 172 aa, Homo sapiens
MKLMGTLNQCINAGHEMTKAIAIAQFNDDSPVSRKITRRWRISEATDLVGVSSQAIRDAEKAGRLPHPDMENSGRVEQRVGFTIEQINHMRDVFGTPLRRAEDVFPPVIGVAAHKSRRQLNRQLEKRGPCPFDRGGFDANDPILKDHTQEWSGSATFTSDGKIRLFYTDYSG

SEQ ID NO: 37473 - protein, 247 aa, Homo sapiens
  DOMAIN (89)..(116): Mrp family proteins domain identified by eMATRIX, accession number BL01215A, p-value=4.964e-11, raw score of 9.75
MTKAIAIAQFNDDSPEARKITRRWRIGEAADLVGVSSQAIRDAEKAGRLPHPDMEIRGRVEQRVGYTIEQINHMRDVFGTRLRRAEDVFPPVIGVAAHKGGVYKTSVSVHLAQDLALKGLRVLLVEGNDPQGTASMYHGWVPDLHIHAEDTLLPFYLGEKNDVTYAIKPTCWPGLDIIPSCLALHRIETELMGKFDEEATQMRRNQKTNPGNMTEQGSSTPHNNHTSSPAMDPNQEEIPDLPEKESR

SEQ ID NO: 37474 - protein, 580 aa, Homo sapiens
  DOMAIN (326)..(413): ParB-like nuclease domain identified by PFam, accession name ParBc, E-value=1.7e-10, PFam score of 48.3
DSPEARKITRRWRIGEAADLVGVSSQAIRDAEKAGRLPHPDMEIRGRVEQRVGYTIEQINHMRDVFGTRLRRAEDVFPPVIGVAAHKGNDPQGTASMYHGWVPDLHIHAEDTLLPFYLGEKDDVTYAIKPTCWPGLDIIPSCLALHRIETELMGKFDEAQPNLGIGTINVVCAADVLIVPTPAELFDYTSALQFFDMLRDLLKNVDLKGFEPDVRILLTKYSNSNGSQSPWMEEQIRDAWGSMVLKNVVRETDEVGKGQIRMRTVFEQAIDQRSSTDTSLSTPAAPMVDSLIARVGVMARGNAITLPVCGRDVKFTLEVLRGDSVEKTSRVWSGNERDQELLTEDALDDLIPSFLLTGQQTPAFGRRVSGVIEIADGSRRRKAAALTESDYRVLVGELDDEQMAALSRLGNDYRPTSAYERGQRYASRLQNEFAGKYFLRWLMRKIFHIITRCINTAKLPKSVVALFSHPGELSARSGDALQKAFTDKEELLKQQASNLHEQKKAGVIFEAEEVITLLTSVLKTSSASRTSLSSRHQFAPGATVLYKGDKMVLNLDRSRVPTECIEKIEAILKELEKPAP

SEQ ID NO: 37475 - protein, 146 aa, Homo sapiens
  DOMAIN (72)..(117): kw TRANSCRIPTASE REVERSE II ORF2 domain identified by eMATRIX, accession number DM01354N, p-value=1.000e-40, raw score of 13.17
MKLMETLNQCINAGHEMTKAIAIAQFNDDSPEARKITRRWRIGEAADVVGVSSKAIRDAEKAGEIQTTIREYYKHLYANKLENLEEMDKFLNTYTLPRLNQEEVESLNRPITGSEIVAIINSLPTKKSPGPDGFTAEFYQRYKEEL

SEQ ID NO: 37476 - protein, 1072 aa, Homo sapiens
  DOMAIN (677)..(706): kw REPLICATION REPB REPA INITIATION domain identified by eMATRIX, accession number DM00653A, p-value=7.207e-27, raw score of 20.40
  DOMAIN (739)..(900): Chloramphenicol acetyltransferase domain identified by PFam, accession name CAT, E-value=1.5e-122, PFam score of 420.6
MKLMETLNQCINAGHEMTKAIAIAQFNDDSPEARKITRRWRIGEAADLVGVSSQAIRDAEKAGRLPHPDMEIRGRVEQRVGYTIEQINHMRDVFGTRLRRAEDVFPPGFGDFADFGTTIKQDFRLLGQTSVDRLLQLSQGQAVKGNQLLPVSLVKRKTTLAPNTQTASPRALADSLMQLARQVSRLVKRAPTCWPGLDIIPSCLALPRIETELMGKFDEGKLPTDPHLMLRLAIETVAHDYDVIVIDSAPNLGIGTINVKIIKESALPPTPTFINILMNAKTIENGQFPYLLNALALQNFHRYTGIQHVHRIGMAERMWCDRNRERHTVSSSGGNRLPNPGPDRSIRAFSVLPVRRLRRSMSLSRINTSHARSLRRINKSWCPYMIPGSPGPTFGENETLIGTGPNIRFGNQEPCCLCNGVLVGKFENRVLALQNFQRYTGIQHVHRIGMAERMWCDRNRERHTVSSSGGNRLPNPAHAVGISVRCRSFAPSWAVCTNPRFSPTAAPYPVTIVLSPTRCAHSKKLVPLPHGSVMAEPPVINHKKRKNSPRIVQSNDFTERAYSLSRDQKRMLYLFVDQIRKSDGTLQEHDGICEIHVAKYAEIFGLTSAEASKDIRQALKSFAGKEVVFYRPEEDAGDEKGYESFPWFIKRAHSPSRGLYSVHINPYLIPFFLGLQNRFTQFRLSETKEITNPYAMRLYESLCQYPVTKRAPDMPQASSPEGANHKPRQPSCGVKPPVKKNKHKFYPAFIHILARLMNAHPEFRMAMKDGELVIWDSVHPCYTVFHEQTETFSSLWSEYHDDFRQFLHIYSQDVACYGENLAYFPKGFIENMFFVSANPWVSFTSFDLNVANMDNFFAPVFTMGKYYTQGDKVLMPLAIQVHHAVCDGFHVGRMLNEFQQYCDEKQGGAQPISSAANDPILKDQTPRMVPVLHPLHLDGKFRLFYTDYSGKHYGKQSLTTAQNVQQFIDEGNYTSGDNHTLRDPHYVEDKGHKYLVFEANTGTENGYQGEESLFNKAYYGGGTPFFRKESQKLQQSAKKRDAELANGALGIIELNNDYTLKKVMKPLITSNT

SEQ ID NO: 37477 - protein, 171 aa, Homo sapiens
MKLMETLNQSINAGHEMTKAIAIAQFNDDSPEARKITRRWRISEAPDLVGVSSQAIRDAEKARRLPHPDMEIRGRVEQRVGYTIEQINHMRDVFGTRLRRAEDVFPPVIGVAAHKERSNLGVRLYACCGLLLCPAYPQHFAHGYVDKIPGYPSRAGTLTGLHPMQVCRCRR

SEQ ID NO: 37478 - protein, 675 aa, Homo sapiens
  DOMAIN (394)..(421): Mrp family proteins domain identified by eMATRIX, accession number BL01215A, p-value=4.964e-11, raw score of 9.75
  misc_feature (1)...(675): Xaa = X or * as defined in Table 2
MRGHREKAAACKPRTRASEGTTPASTFILDFQPPNCNYTSGDNHTLRDPHYVEDKGHKYLVFEANTGTENGYQGEESLFNKAYYGGGTNFFRKESQKLQQSAKKRDAELANGALGIIELNNDYTLKKVMKPLITSNTVTDEIERANVFKMNGKWYLFTDSRGSKMTIDGINSNDIYMLGYVSNSLTGPYKPLNKTGLVLQMGLDPNDVTFTYSHFAVPQAKGILCEEDNYTAGDNHMMRAPHCEEDRAHKFVVFDANAGTESGHQGESSLFNRACGGGGTFFFSKESQKLQQSAKKRDCINAGHEMTKAIAIAQFNDDSPEARKITRRWRIGEAADLVGVSSQAIRDAEKAGRLPHPDMEIRGRVEQRVGYTIEQINHMRDVFGTRLKRAEDVFPPVIGVAAHKGGVYKTSVSVHLAQDLALKGSLLLPKNDFLFKLGLEGHLPLGKIHSPPTGADVARGSSGLPKSELFLPERNTQELQQDSEEGPLALQVLQSNLMDFADFGTTIKQDFRLLGQTSVDRLLQLSQGQAVKGNQLLPVSLVKRKTTLAPNTQTASPRALADSLMQLARQVSRLESGQNNDGICEIHVAKYVEIFGLTSAEASKDIRQALKSFAGKLVVFYRPEVGCRRXKRLXIFSLVYQTCAQSIQRALQCTYQPISHSLLYRVTEPVYAVSA

SEQ ID NO: 37479 - protein, 250 aa, Homo sapiens
  DOMAIN (51)..(78): Mrp family proteins domain identified by eMATRIX, accession number BL01215A, p-value=4.964e-11, raw score of 9.75
  DOMAIN (146)..(227): ParA family ATPase domain identified by PFam, accession name ParA, E-value=0.00035, PFam score of 12.0
AIRDAEKAGRLPHPDMEIRGRVEQRVGYTIEQINHMRDVFGTRLRRAEDVFPPVIGVAAHKGGVYKTSVSVHLAQDLALKGLRVLLVEGNDPQGTASMYHGWVPDLHIHAEDTLLPFYLGEKDDVTYAIKPTCWPGLDIIPSCLALHRIETELMGKFDEGKLPTDPHLMLRLAIETVAHDYDVIVIDSAPNLGIGTINVFFDMLRDLLKNVDLKGIEPDVREVVHQLTVSCPCSRMLFLTTDVLLPCDVH

SEQ ID NO: 37480 - protein, 241 aa, Homo sapiens
  DOMAIN (105)..(132): Mrp family proteins domain identified by eMATRIX, accession number BL01215A, p-value=4.964e-11, raw score of 9.75
MKLMETLNQCINAGHEMTKAIAIAQFNDDSPEARKITRRWRIGEAADLVGVSSQAIRDAEKAGRLPHPDMEIRGRVEQRVGYTIEQINHMRDVFGTRLRRAEDVFPPVIGVAAHKGGVYKTSVSVHLAQDLALKGLRVLLVEGNDPQGTASMYHGWVPDLHIHAEDTLLPFYLGEKDDVTYAIKPTCWAGLDIIPSCLALLARYPEDKKATFAPSFLMNIKGNKTSVVKNSILEQGQLTVN

SEQ ID NO: 37481 - protein, 386 aa, Homo sapiens
  DOMAIN (157)..(186): kw REPLICATION REPB REPA INITIATION domain identified by eMATRIX, accession number DM00653A, p-value=7.207e-27, raw score of 20.40
  DOMAIN (247)..(361): ParA family ATPase domain identified by PFam, accession name ParA, E-value=2.1e-28, PFam score of 107.8
  misc_feature (1)...(386): Xaa = X or * as defined in Table 2
MKLMETLNQCINAGHEMTKAIAIAQFNDDSPEARKITRRWRIGEAADLVGVSSQAIRDAEKAGRLPHPDMEIRGRVEQRVGYTIEQINHMRDVFGTRLRRAEDVFPPVIGVAAHKGGVYKTSVSVHLAQDLALKGLRVLLVEGNDPQGTASMYHGWNRFTQFRLSETKEITNPYAMRLYESLCQYRKPDGSGIVSLKIDWIIERYQLPQEDQRMPDFRRRFLQDDVTYAIKPTCWPGLDIIGGCLALHRIETELMGKLDEGKLPTDPHLMLRLAIETVAHDYDVIVIDSAPNLGIGTINVVCAADVLIVPTPAELFDYTSALQFFDMLRDLLKNVDLKGFEPDVRILLTKYSNSNGSQSPWMEEQILDAWGSMVLKNVVPETDEVX

SEQ ID NO: 37482 - protein, 333 aa, Homo sapiens
  DOMAIN (249)..(278): kw REPLICATION REPB REPA INITIATION domain identified by eMATRIX, accession number DM00653A, p-value=7.207e-27, raw score of 20.40
MQKVGELELHTRGSTLEDPQFNDDSPEARKITRRWRIGEAADLVGVSSQAIRDAEKAGRLPHPDMEIRGRVEQRVGYTIEQINHMRDVFGTRLRRAEDVFPPVIGVAAHKGGVYKTSVSVHLAQDLALKGLRVLLVEGNDPQGTASMYHGWVPDLHIHAEDTLLPFYLGEKDDVTYAIKPTCWPGLDIIPSCLALHRIETELMGKFDEGKLPTDPHLMLRLAIETVAHDYDVIVIDSAPNLGIGTINVNRFTQFRLSETKEITNPYAMRLYESLCQYRKPDGSGIVSLKIDWDHRALPGWPQSLPSVLPWTSARRFLAGLGFLGINGRTSMPF

SEQ ID NO: 37483 - protein, 175 aa, Homo sapiens
MKLMETLNQCINAGHEMTKAIAIAQFNDDSPEARKITRRWRIGEAADLVGVSSQAIRDAEKAGRLPHPDMEIRGRVEQRVGYTIEQINHMRDVFVAGDEKGYESFPWFIKTCAHPSRGLYSVHINPYLIPSLSGYRTGLRSFGLVKQKKSPIRMPCVYTNPCVSIVSRMAQASSL

SEQ ID NO: 37484 - protein, 346 aa, Homo sapiens
  DOMAIN (235)..(278): 1 kw MIND INHIBITOR DIVISION CONTROL domain identified by eMATRIX, accession number DM01756B, p-value=4.822e-15, raw score of 22.91
  DOMAIN (200)..(306): ParA family ATPase domain identified by PFam, accession name ParA, E-value=6.1e-23, PFam score of 89.7
MKLMETLNQCINAGHEMTKAIAIAQFNDDSPEARKITRRWRIGEAADLVGVSSQAIRDAEKAGRLPHPDMEIRGRVEQRVGYTIEQINHMRDVFGTRLRRAEDVFPPVIGVAAHKGGVYKTSVSVHLAQDLALKGLRVLLVEGNDPQGTASMYHGWVPDLHIHAEDTLLPFYLGEKDDVTYAIKPTCWPGLDIIPSCLALHRIETELMGKFDEGKLPTDPHLMLRLAIETVAHDYDVIVIDSAPNLGIGTINVVCAADVLIVPTPAELFDYTSALQFFDMLRDLLKNVDLKGFEPDDRSSSPSMEQSWTENDFDKLTKVGFRRSVITNFSELKEDVRTHRKEAKKP

SEQ ID NO: 37485 - protein, 366 aa, Homo sapiens
  DOMAIN (235)..(278): 1 kw MIND INHIBITOR DIVISION CONTROL domain identified by eMATRIX, accession number DM01756B, p-value=4.822e-15, raw score of 22.91
  DOMAIN (200)..(302): ParA family ATPase domain identified by PFam, accession name ParA, E-value=3.5e-22, PFam score of 87.1
MKLMETLNQCINAGHEMTKAIAIAQFNDDSPEARKITRRWRIGEAADLVGVSSQAIRDAEKAGRLPHPDMEIRGRVEQRVGYTIEQINHMRDVFGTRLRRAEDVFPPVIGVAAHKGGVYKTSVSVHLAQDLALKGLRVLLVEGNDPQGTASMYHGWVPDLHIHAEDTLLPFYLGEKDDVTYAIKPTCWPGLDIIPSCLALHRIETELMGKFDEGKLPTDPHLMLRLAIETVAHDYDVIVIDSAPNLGIGTINVVCAADVLIVPTPAELFDYTSALQFFDMLRDLLKNVDLKGFEPDSGPSAAGLLEFTGGPLQTLFAWVSAAVAAEQWILVNCKCCYLIVPPEILSQRSTRPCEVSVRPYWGVPPS

SEQ ID NO: 37486 - protein, 278 aa, Homo sapiens
  DOMAIN (105)..(132): Mrp family proteins domain identified by eMATRIX, accession number BL01215A, p-value=4.964e-11, raw score of 9.75
MKLMETLNQCINAGHEMTKAIAIAQFNDDSPEARKITRRWRIGEAADLVGVSSQAIRDAEKAGRLPHPDMEIRGRVEQRVGYTIEQINHMRDVFGTRLRRAEDVFPPVIGVAAHKGGVYKTSVSVHLAQDLALKGLRVLLVEGNDPQGTETMYHGWVPDLHIHAEDTLLPFYLGEKDDVTYAIKPTCWPGLDIIPSCLALHRIETELMGKFDEGSLPTDPHLMYYYQAPCMKSNNALIVILGTVTLDAVGIGLVMPVCRASCGISSIPTASPVTMACC

SEQ ID NO: 37487 - protein, 403 aa, Homo sapiens
  DOMAIN (235)..(278): 1 kw MIND INHIBITOR DIVISION CONTROL domain identified by eMATRIX, accession number DM01756B, p-value=4.822e-15, raw score of 22.91
  DOMAIN (200)..(303): ParA family ATPase domain identified by PFam, accession name ParA, E-value=1.4e-22, PFam score of 88.5
MKLMETLNQCINAGHEMTKAIAIAQFNDDSPEARKITRRWRIGEAADLVGVSSQAIRDAEKAGRLPHPDMEIRGRVEQRVGYTIEQINHMRDVFGTRLRRAEDVFPPVIGVAAHKGGVYKTSVSVHLAQDLALKGLRVLLVEGNDPQGTASMYHGWVPDLHIHAEDTLLPFYLGEKDDVTYAIKPTCWPGLDIIPSCLALHRIETELMGKFDEGKLPTDPHLMLRLAIETVAHDYDVIVIDSAPNLGIGTINVVCAADVLIVPTPAELFDYTSALQFFDMLRDLLKNVDLKGQAPCMKSNNALIVILGTVTLDAVGIGLVMPVLPGLLRDIVHSDSIASHYGVLLALYALMQFLCAPVLGALSDRFGRRPVLLASLLGATIDYAIMATTPVLWIYPLVNSPSC

SEQ ID NO: 37488 - protein, 246 aa, Homo sapiens
  DOMAIN (105)..(132): Mrp family proteins domain identified by eMATRIX, accession number BL01215A, p-value=4.964e-11, raw score of 9.75
MKLMETLNQCINAGHEMTKAIAIAQFNDDSPEARKITRRWRIGEAADLVGVSSQAIRDAEKAGRLPHPDMEIRGRVEQRVGYTIEQINHMRDVFGTRLRRAEDVFPPVIGVAAHKGGVYKTSVSVHLAQDLALKGLRVLLVEGNDPQGTASMYHGWVPDLHIHAEDTLLPFYLGEKDDVTYAIKPTCWPGLDIIPSCLALHRIETELMGKFDEGKLPTDPHLMLRLAIETVAHDYDVIVIDSAPRL

SEQ ID NO: 37489 - protein, 218 aa, Homo sapiens
MKLMETLNQCINAGHEMTKAIAIAQFNDDSPEARKITRRWRIGEAADLVGVSSQAIRDAEKAERLPHPDMEIRGRVEQRVGYTIEQINHMRDVFGTRLRRAEDVLPPVIGVAANKGDALKKAFTDKEELLKQQASNLHEQKKAGVIFEAEEVITLLTSVLKTSSASRTSLSSRHQFAPGATVLYKGDKMVLNLDRSRVPTECIEKIEAILKELEKPAP

SEQ ID NO: 37490 - protein, 148 aa, Homo sapiens
  misc_feature (1)...(148): Xaa = X or * as defined in Table 2
MKLMETLNQCINAGHEMTKAIAIAQFNDDSPEARKITRRWRIGEAADLVGVSSQAIRDAEKAGRLPHPDMEIRGRVEQRVGYTIEQINHMRDVFGTRLRRAEDVFPPVIGVAAHKAGNLSCQLHXXIGQRAGRGGLRIGRQGGFSFHQ

SEQ ID NO: 37491 - protein, 250 aa, Homo sapiens
  DOMAIN (65)..(92): Mrp family proteins domain identified by eMATRIX, accession number BL01215A, p-value=5.929e-11, raw score of 9.75
  DOMAIN (160)..(248): ParA family ATPase domain identified by PFam, accession name ParA, E-value=0.0034, PFam score of 2.7
MSIAKKESCNQVLQAIRDAEKAGRLPHPDMEIRGRVEQRVGYTIEQINHMRDVFGTRLRRAEDVFPPVIGVAAHKGGVYKTSVSVQLAQDLALKGLRVLLVEGNDPQGTASMYHGWVPDLHIHAEDTLLPFYLGEKDDVTYAIKPTCWPGLDIIPSCLALHRIETELMGKFDESKLPIDPHLMLRLAIETVAHDYDVIVIDSAPNLGIGTINVRCAAENLMAPYRNMTGFAEIHVAKYAEIFGLTSAEAT

SEQ ID NO: 37492 - protein, 115 aa, Homo sapiens
MKLMETLNQCINAGHEMTKAIAIAQFNDDSPEAIFITRRWRIGEAADLVGVSSQAIRDAEKAGRLPHPDMEIRGRVEQRVGYTIEQINHMRDVFGTRLRRAEDVFPPVIGVAAHK

SEQ ID NO: 37493 - protein, 172 aa, Homo sapiens
MKLMETLNQCINAGHEMTKAIAIAQFNDDSPEARKITRRWRIGEAADLVGVSSQAIRDAEKAGRLPHPDMEIRGRVEQRVGYTIEQINHMRDVFGTRLRRAEDVFPPVIGVAAHKVPQAKGNNVVITSYMTNRGFFEDKKATFAPSFLMNIRGNKTSVVKNSILEQGQLTVN

SEQ ID NO: 37494 - protein, 663 aa, Homo sapiens
  DOMAIN (105)..(132): Mrp family proteins domain identified by eMATRIX, accession number BL01215A, p-value=4.964e-11, raw score of 9.75
MKLMETLNQCINAGHEMTKAIAIAQFNDDSPEARKITRRWRIGEAADLVGVSSQAIRDAEKAGRLPHPDMEIRGRVEQRVGYTIEQINHMRDVFGTRLRRAEDVFPPVIGVAAHKGGVYKTSVSVHLAQDLALKGLRVLLVEGFEPDVRILLTKYSNSNGSQSPWMEEQIRDAWGSMVLKNVVRETDEVGKAAPMVDSLIARVGVMARGNAITLPVCGRDVKFTLEVLRGDSVEKTSRVWSGNERDQELLTEDALDDLIPSFLLTGQQTPAFGRRVSGVIEIAGVLKQSPGDPSANWSSFISRGEKKLDDTQDGCPAEPGHQCWLCPLPAQTPVLFGENWAGESCAPSQNSGLFSMSEKIHRQAFRSDADFSLACKMQQDVRLLDMSAHPVLKTSRSSLTEQYPGNCVQIVNYLRQNIHKNENLTGFRDFADFGTTIKQDFRLLGQTSVDRLLQLSQGQAVKGNQLLPVSLIPKQQQNEKYQVPQFDQSTIKNIESAKGLDVWDSWPLQNADGTVAEYNGYHVVFALAGSPKDADDTSIYMFYQKVGDNSIDSWKNAGRVFKDSDKFDANDPILKDQTQEWSGSATFTSDGKIRLFYTDYSGKHYGKQSLTTAQVNVSKSDDTLKINGVEDHKTIFDGDGKTYQNVQQYIDEGNYTAAFDLSK

SEQ ID NO: 37495 - protein, 396 aa, Homo sapiens
  DOMAIN (324)..(379): kw TRANSCRIPTASE REVERSE II ORF2 domain identified by eMATRIX, accession number DM01354Q, p-value=1.000e-40, raw score of 9.23
  DOMAIN (178)..(272): ParA family ATPase domain identified by PFam, accession name ParA, E-value=0.0064, PFam score of 0.2
MRQFNDDSPEARKITRRWRIGEAADLVGVSSQAIRDAEKAGRLPHPDMEIRGRVEQRVGYTIEQINHMRDVFGTRLRRAEDVFPPVIGVAAHKGGVYKTSVSVHLAQDLALKGLRVLLVEGNDPQGTASMYHGWVPDLHIHAEDTLLPFYLGEKDDVTYAIKPTCWPGLDIIPSCLALHRIETELMGKFDEGKLPTDPHLMLRLAIETVAHDYDVIVIDSAPNLGIGTINVTNTGFEIVAIIHSFPTKNSTGPDGFTADFTRGQGGTGPTPSETIQSIEKQGILPNSFYEASIILIPKPGRGTTKKENFRPISLMNIDAKILNKILGNRIQQHIKKLIHHDQVGFIPGMQGWFNIRKSINVIQHINRTKDKNHMIISVDAEKAFDKIQQLHAKNSQ

SEQ ID NO: 37496 - protein, 223 aa, Homo sapiens
  DOMAIN (157)..(186): kw REPLICATION REPB REPA INITIATION domain identified by eMATRIX, accession number DM00653A, p-value=7.207e-27, raw score of 20.40
MKLMETLNQCINAGHEMTKAIAIAQFNDDSPEARKITRRWRIGEAADLVGVSSQAIRDAEKAGRLPHPDMEIRGRVEQRVGYTIEQINHMRDVFGTRLRRAEDVFPPVIGVAAHKGGVYKTSVSVHLAQDLALKGLRVLLVEGNDPQGTASMYHGWNRFTQFRLSETKEITNPYAMRLYESLCQYRKPDGSGIVSLKIDWIIERYQLPQEDQRMPDFRRRFLQ

SEQ ID NO: 37497 - protein, 191 aa, Homo sapiens
  DOMAIN (105)..(132): Mrp family proteins domain identified by eMATRIX, accession number BL01215A, p-value=4.964e-11, raw score of 9.75
MKLMETLNQCINAGHEMTKAIAIAQFNDDSPEARKITRRWRIGEAADLVGVSSQAIRDAEKAGRLPHPDMEIRGRVEQRVGYTIEQINHMRDVFGTRLRRAEDVFPPVIGVAAHKGGVYKTSVSVHLAQDLALKGLRVLLVEGFEPDVRILLTKYSNSNGSQSPWMEEQIRDAWGSMVLKNVVRETDEVGK

SEQ ID NO: 37498 - protein, 311 aa, Homo sapiens
  DOMAIN (89)..(116): Mrp family proteins domain identified by eMATRIX, accession number BL01215A, p-value=4.964e-11, raw score of 9.75
MRKAIAIAQFNDDSPKARKITRRWRIGEAADLVGVSSQAIRDAEKAGRLPHPDMEIRGRVEQRVGYTIEQINHMRDVFGTRLRRAEDVFPPVIGVAAHKGGVYKTSVSVHLAQDLALKGLRVLLVEVTRVPSGCSDMIQFEGVLWFTKLNLWAIRDAEKAGRLPHPDMEIRGRVEQRVGYTIEQINHMRDVFGTRLRRAEDVFPPVIGVAAHKGGVYKTSVSVHLAQDLALKGLRVLLVEGNDPQGTASMYHGWVPDLHIHAEDTLKPFYLGEKDDVTYAIKPTCWPGLDIIPSCLALHRIETELMGKFDE

SEQ ID NO: 37499 - protein, 427 aa, Homo sapiens
  DOMAIN (105)..(132): Mrp family proteins domain identified by eMATRIX, accession number BL01215A, p-value=4.964e-11, raw score of 9.75
MKLMETLNKCINAVHEMTKAIAIAQFNDDSPEARKITRRWRIGEAADLVGVSSQAIRDAEKAGRLPHPDMEIRGRVEQRVGYTIEQINHMRDVFGTRLRRAEDVFPPVIGVAAHKGGVYKTSVSVHLAQDLALKGLRPPLVEVDSCSKLEQHSTLSRAILLIYKGFCRFRNHHQTGFSPAGANQRGPLAATLSGPGGEGQSAVARLTGEKKNHPGAQYANRLSPRVGRFINAAGTTGFPTGKRAILKQQQNEKYQVPQFDQSTIKNIESAKGLDVWDSWPLQNADGTVAEYNGYHVVFALAGSPKDADDTSIYMFYQKVGDNSIDSWKNAGRVFKDSDKFDANDPILKDQTQEWSGSATFTSDGKIRLFYTDYSGTHYGKQSLTTAQVNVSKSDDTLKINGVEDHKTIFDGDGKTYQNVQQFIDEGN

SEQ ID NO: 37500 - protein, 108 aa, Homo sapiens
MKLMETLNQCINAGHEMTKAIAIAQFNDDSPEARKITRRWRIGEAADLVGVSSQAIRDAEKAGRLPHPDMEIRGRVEQRVGYTIEQINHMRDVFGTRMRRAEDVFQGV

SEQ ID NO: 37501 - protein, 271 aa, Homo sapiens
  DOMAIN (168)..(195): Mrp family proteins domain identified by eMATRIX, accession number BL01215A, p-value=4.964e-11, raw score of 9.75
EDNYTAGDNHMMRAPHCEEDRAHKFVVFDANAGTESGHQGESSLFNRACGGGGTFFFSKESQKLQQSAKKRDCINAGHEMTKAIAIAQFNDDSPEARKITRRWRIGEAADLVGVSSQAIRDAEKAGRLPHPDMEIRGRVEQRVGYTIEQINHMRDVFGTRLKRAEDVFPPVIGVAAHKGGVYKTSVSVHLAQDLALKGSLLLPKNDFLFKLGLEGHLPLGKIHSPPTGADVARGSSGLPKSELFLPERNTQELQQDSEEGPLALQVLQSNL

SEQ ID NO: 37502 - protein, 195 aa, Homo sapiens
  DOMAIN (145)..(183): Chloramphenicol acetyltransferase proteins domain identified by eMATRIX, accession number BL00100D, p-value=7.677e-36, raw score of 17.22
  DOMAIN (142)..(195): Chloramphenicol acetyltransferase domain identified by PFam, accession name CAT, E-value=3.7e-32, PFam score of 120.2
MKLMETLNQCINAVHEMTNAIAIAQFNDDSPEARKITRRWRIGEAADLVGVSSQAIRDAEKAGRLPHPDMEIRGRVEQRVGYTIEQINHMRDVFGTRLRRAEDVFPPVIGVAAHKSGVYKTSVSVHLAQDLALKGLRVLLVEGFIENMFFVSANPWVSFTSFDLNVANMDNFFAPVFTMGKYYTQGDKVLMPLAI

SEQ ID NO: 37503 - protein, 204 aa, Homo sapiens
  DOMAIN (105)..(132): Mrp family proteins domain identified by eMATRIX, accession number BL01215A, p-value=4.964e-11, raw score of 9.75
  misc_feature (1)...(204): Xaa = X or * as defined in Table 2
MKLMETLNQCINAGHEMTKAIAIAQFNDDSPEARKITRRWRIGEAADLVGVSSQAIRDAEKAGRLPHPDMEIRGRVEQRVGYTIEQINHMRDVFGTRLRRAEDVFPPVIGVAAHKGGVYKTSVSVHLAQDLALKGLRVLLVEGRGWNSLEDSEEDRKMWESLELPRDLLIGFDKNGDNDMDNERIQTEEVSDGDKELVGYWSKX

SEQ ID NO: 37504 - protein, 294 aa, Homo sapiens
  DOMAIN (105)..(132): Mrp family proteins domain identified by eMATRIX, accession number BL01215A, p-value=4.964e-11, raw score of 9.75
MKLMETLNQCINAGHEMTKAIAIAQFNDDSPEARKITRRWRIGEAADLVGVSSQAIRDAEKAGRLPHPDMEIRGRVEQRVGYTIEQINHMRDVFGTRLRRAEDVFPPVIGVAAHKGGVYKTSVSVHLAQDLALKGLRVLLVEASSSGNENDLNMPSGTIEIFCDNLKTCHTSHGSVMAETAVINHKKRKNSPRIVQSNDLTEAAYSLSRDQKRMLYLFVDQIRRSDGTLQEHDGICEIHVAKYAEIFGLTSAEAGPAAPLSILPLLWHFPFGQVIRELYLLQIPKDCAPNPFMH

SEQ ID NO: 37505 - protein, 359 aa, Homo sapiens
  DOMAIN (276)..(290): Phage integrase family domain identified by eMATRIX, accession number PF00589B, p-value=1.621e-11, raw score of 16.17
  DOMAIN (157)..(322): "Phage" integrase family domain identified by PFam, accession name Phage_integrase, E-value=1.2e-05, PFam score of 15.4
MKLMETLNQCINAGHEMTKAIAIAQFNDDSPEARKITRRWRIGEAADLVGVSSQAIRDAEKAGRLPHPDMENSRDRFEQRGFEPDVRILLTKYSNSNGSQSPWMEEQIRDAWGSMVLKNVVRETDEVGKDPRPLPYLGHDEPYTFDINLSVNLKSMVVGGTDMGQEPLKQMGAWGPLSLKAMFGFFIRGYGFFTPFGRTLFPLGFGSTPPFTFPLLTKTIGVFILDKLMERRNRRTGRTEKARIWEVTDRTVRTWIGEAGAAAAADGVTFSVSVTPHTFRHSYAMHMLYAGIPLKDLQSLMGHKSISSTEGYTKDFSLDVGGPAPGAILRCPESDAVGDVETIILRIKNLGLFFVKCGN

SEQ ID NO: 37506 - protein, 139 aa, Homo sapiens
MKLMETLNQCINAGHEMTKAIAIAQFNDDSPEARKITRRWRIGEAADLVGVSSQAIRDAEESRRLPHPDMEIRGRVEQRVGYTIEQINHMRDVFAGIFFAYRNLGLLRPNPLYVKVPMDYRAFIPEFQIAWNGSTSLLP

SEQ ID NO: 37507 - protein, 280 aa, Homo sapiens
  DOMAIN (164)..(207): 1 kw MIND INHIBITOR DIVISION CONTROL domain identified by eMATRIX, accession number DM01756B, p-value=4.822e-15, raw score of 22.91
  DOMAIN (126)..(236): ParA family ATPase domain identified by PFam, accession name ParA, E-value=4.5e-23, PFam score of 90.1
MKLMETLNQCINAGHEMTKAIAIAQFNDDSPEARKITRRWRIGEAADLVGVSSQAIRDAEKAGRLPHPDMDIRGRVEQRVGYTIEQINHMRDVFGTRLRRAEDVFPPVIGVAAHKGGVYKTSVSVHLAQDLALKGLRVLLVEGKLATDPHLMLRLAIETVVHDYDVIVIDSAPNLGIGTINVVCAADVLIVPTPAELFDYTSALQFFDMLRDLLKNVDLKGFEPDLWNNLSTTPPRGIPALLQVLTISTPDPASYSKVLGFSLMETEREHQKRSDVWEPL

SEQ ID NO: 37508 - protein, 111 aa, Homo sapiens
MKLMETLNQCINAGHEMTKAIAIAQFNDDSPEARKITRRWRIGEAADLVGVSSQAIRDAEKAGRLPHPDMEIRGRVEQRVGYTIEQINHMRNVFGSGLRRPTAELKCASQT

SEQ ID NO: 37509 - protein, 380 aa, Homo sapiens
  DOMAIN (105)..(132): Mrp family proteins domain identified by eMATRIX, accession number BL01215A, p-value=4.964e-11, raw score of 9.75
MKLMETLNQCINAGHEMTKALSIAQFNDDSPEARKITRRWRIGEAADLVGVSSQAIRDAEKAGRLPHPDMEIRGRVEQRVGYTIEQINHMRDVFGTRLRRAEDVFPPVIGVAAHKGGVYKTSVSVHLAQDLALKGLRVLLVEGGPPRGSGEKRHLPRGRGTTLTGTTRHGKGKPKNRENQPQGNETSGPQTRTKNPRHPPPHREEDEKRNTNKRQAGAAEHKKQPKNTGRGAPESGRAAAATEKQRHTATSTQSHTNKKHKKAKGQNREQPRTPTDQTRPKTETNKTEATTTERKESREGKTRDGKEKANKDQRMREERRDGKEKKDEKTEPSKTAAKREAAARQSGKNHGNKTKKRNKERDENKEREREPEQTQPPSGW

SEQ ID NO: 37510 - protein, 360 aa, Homo sapiens
  DOMAIN (105)..(132): Mrp family proteins domain identified by eMATRIX, accession number BL01215A, p-value=4.964e-11, raw score of 9.75
MKLMETLNQCINAGHEMTKAIAIAQFNDDSPEARKITRRWRIGEAADLVGVSSQAIRDAEKAGRLPHPDMEIRGRVEQRVGYTIEQINHMRDVFGTRLRRAEDVFPPVIGVAAHKGGVYKTSVSVHLAQDLALKGLRVLLVEGPGGEGQSAVARLTGEKKNHPGAQYANRLSPRVGRFINAAGTTGFPTGKRAVSATQLMDFADFGTTIKQDFRLLGQTSVDRLLQLSQGQAVKGNQLLPVSLVKRKTTLAPNTQTASPRALADSLMQLARQVSRLESGQDFADFGTTIKQDFRLLGQTSVDRLLQLSQGQAVKGNQLLPVSLVKRKTTLAPNTQTASPRALADSLMQLARQVSRLESGQ

SEQ ID NO: 37511 - protein, 390 aa, Homo sapiens
  DOMAIN (83)..(110): Mrp family proteins domain identified by eMATRIX, accession number BL01215A, p-value=4.429e-11, raw score of 9.75
MPQFNDDSPKARKITRRWRIGEAADLVGVSSQAIRDAEKAGRLPHPDMEIGGRVEQRVGYTIEQINHMRDVFGTRLRRAEDVFPPVIGVAAHKGGVYKTSVSVHLEAALCRQLPMEAETLAPVQAAVNPPTMTPDMRSITNNSSDPFLNGDFADFGTTIKQDFRLLGQTSVDRLLQLSQGQAVKGNQLLPVSLVKRKTTLAPNTQTASPRALADSLMQLARQVSRLESGQDFADFGTTIKQDFRLLGQTSVDRLLQLSQGQAVKGNQLLPVSLVKRKTTLAPNTQTASPRALADSLMQLARQVSRLESGQDFADFGTTIKQDFRLLGQTSVDRLLQLSQGQAVKGNQLLPVSLVKRKTTLAPNTQTASPRALADSLMQLARQVSRLESGQ

SEQ ID NO: 37512 - protein, 431 aa, Homo sapiens
  DOMAIN (201)..(230): kw REPLICATION REPB REPA INITIATION domain identified by eMATRIX, accession number DM00653A, p-value=1.771e-24, raw score of 20.40
  DOMAIN (185)..(227): Initiator RepB protein domain identified by PFam, accession name RepB_protein, E-value=0.007, PFam score of 12.7
MKLMETLNQCINAGHEMTKAIAIAQFNDDSPEARKITRRWRIGEAADLVGVSSQAIRDAEKAGRLPHPDMEIRGRVEQRVGYTIERVSLESQCKDSSLVSSVQMRYPGHRKEHDGICEIHVAKYAEIFGLTSAEASKDIRQALKSFAGKEVVFYRPEEDAGDEKGYESFPWFIKRAHSPSRGLYSVHINPYLIPFFIGLQNRFTQFRLSETKEITTPYAMRLYESLCQYRKPDGSGIVSLKIDWIIERYQLPQSYQRMPDFRRRFLQVDFRLPASLPLDAPNPTQPSPHTVIAAILYSRRGPGTHTDPVSSFSGPVVDDYPAFLSHAASSLSWRVREQGFNQMLPTGLGIKPGGAIKSLYGIQDTVGAKSFHSNSLLHPFPHYFFALVNIPTLGIQASSSSPPQMTWLYLISRKASYGGPQVEEEKQQQQQ

SEQ ID NO: 37513 - protein, 393 aa, Homo sapiens
MKLMETLNQCINAGHEMTKAIAIAQFNDDSPQARKITRRWRIGEAADLVGVSSQAIRDAEKAGRLPHPDMEIRGRVEQRVGYTIEQINHMRNVFGNSYDHDYEFELGTQQLAGKKPPKPTKTKMVTRVTSGRPQCYTPISTMAVYKCHVNVRKDFADFGTTIKQDFRLLGQTSVDRLLQLSQGQAVKGNQLLPVSLVKRKTTLAPNTQTASPRALADSLMQLARQVSRLESGQDFADFGTTIKQDFRLLGQTSVDRLLQLSQGQAVKGNQLLPVSLVKRKTTLAPNTQTASPRALADSLMQLARQVSRLESGQDFADFGTTIKQDFRLLGQTSVDRLLQLSQGQAVKGNQLLPVSLVKRKTTLAPNTQTASPRALADSLMQLARQVSRLESGQ

SEQ ID NO: 37514 - protein, 169 aa, Homo sapiens
MKLMETLNQCINAGHEMTKAIAIAQFNDDSPEARKITRRWRIGEAADLVGVSSQAIRDAEKAGRLPHPDMEIRGRVEQRVGYTIEQINHMRDVFGTRLRRAEDVFPPVIGVAAHKGYLWPFTRVTVQCGKKNDQTFQGLLDTGSELTLIPEDPKRHCGPPVKVGAYGGQ

SEQ ID NO: 37515 - protein, 137 aa, Homo sapiens
MKLMETLNQCINAGHEMTKAIAIAQFNDDSPEARKITRRWRIGEAADLVGVSSQAIRDAEKAGRLPHPDMEIRGRVEQRQAVKANQLLPFPWEKEKPPRRPIRKPPSPRAWADSLNAAGTTRYPDWKSGQVGATPNN

SEQ ID NO: 37516 - protein, 264 aa, Homo sapiens
  DOMAIN (105)..(132): Mrp family proteins domain identified by eMATRIX, accession number BL01215A, p-value=4.964e-11, raw score of 9.75
  DOMAIN (226)..(245): Immunoglobulin domain identified by PFam, accession name ig, E-value=0.011, PFam score of 13.7
MKLMETLNQCINAGHEMTKAIAIAQFNDDSPEARKITRRWRIGEAADLVGVSSQAIRDAEKAGRLPHPDMEIRGRVEQRVGYTIEQINHMRDVFGTRLRRAEDVFPPVIGVAAHKGGVYKTSVSVHLAQDLALKGLRVLLVEGNDPQGTASMYHGWVPDLHIHAEDTLLPFYLGEKDDVTYAIKPTCWPGLDLIPSWLALPPIETELMGQFDEGDLAGRAEILGKTSLKIWNVTRRDSALYRCEVVARNDRKEIDEIVIELTVQ

SEQ ID NO: 37517 - protein, 378 aa, Homo sapiens
  DOMAIN (256)..(283): Mrp family proteins domain identified by eMATRIX, accession number BL01215A, p-value=4.964e-11, raw score of 9.75
  DOMAIN (255)..(360): ParA family ATPase domain identified by PFam, accession name ParA, E-value=0.063, PFam score of -9.1
MGCCCKRYPKNVEATLELDNRQRLERFGGLRRRQKNVDLWNFELEREELGHLVEEISKQQSVQKEAEHKSLENLQPDEAIEKKNPFSGEKFKSAAEICISHEELNVNHQDNGEHVSRACQRPLRHALASQAQEARREKWFSGAGRDHPYSMQPLGQVQFVAKRGQGYAWATASGLHVCRSTLEDPENNRRWRIGEAADLVGVSSQAIRDAEKAGHLPHPDMEIRGRVEQRVGYTIEQINHMRDVFGTRLRRAEDVFPPVIGVAAHKGGVYKTSVSVHLAQDLALKGLRVLLVEARLTWVSARLIVVCAADVLIVSTPAELFDYTSALQFFDMLRDLLQNVDLKGFEPDVRILLTNTAIVMALSPVDGGAIRDAGEAWV

SEQ ID NO: 37518 - protein, 369 aa, Homo sapiens
  DOMAIN (271)..(314): 1 kw MIND INHIBITOR DIVISION CONTROL domain identified by eMATRIX, accession number DM01756B, p-value=4.822e-15, raw score of 22.91
  DOMAIN (236)..(339): ParA family ATPase domain identified by PFam, accession name ParA, E-value=3.1e-23, PFam score of 90.6
MACTLWRAVNQFSCVTAYHRISAIHPLIITYSGVATRRLRAPITALKKLRPALPRAELTSDKDMYLDNSSIEEASGVYPIDDDDYASASGSEFMWMKKMPKNIQEKHGKNNHQCLCINAGHEMTKAIAIAQFNDDSPEARKITRRWRIGEAADLVGVSSQAIRDAEKAGRLPHPDMEIRGRVEQRVGYTIEQINHMRDVFEDTLLPFYLGEKDDVTYAIKPTCWPGLDIIPSCLALHRIETELMGKFDEGKLPTDPHLMLRLAIETVAHDYDVIVIDSAPNLGIGTINVVCAADVLIVPTPAELFDYTSALQFFDMLRDLLKNVDLKGFEPDVNDAYPTRFLCGPTLTMCGKYSVNNVVPDPFPEAFII

SEQ ID NO: 37519 - protein, 796 aa, Homo sapiens
  DOMAIN (616)..(663): kw TRANSCRIPTASE REVERSE II ORF2 domain identified by eMATRIX, accession number DM01354V, p-value=1.000e-40, raw score of 12.97
  DOMAIN (520)..(607): ParB-like nuclease domain identified by PFam, accession name ParBc, E-value=1.1e-08, PFam score of 42.2
MKLMETLNQCINAGHEMTKAIAIAQFNDDSPEARKITRRWRIGEAADLVGVSSQAIRDAEKAGCLPHPDMEIRGRVEQRVGYTIEQINHMRDVFGTRLRRAEDVFPPVIGVAAHKGGVYKTSVSVHLAQDLALKGLRVLLVEGNDPQGTASMYHGWVPDLHIHAEDTLLPFYLGEKDDVTYAIKPTCWPGLDIIPSCLALHRIETELMGKFDEGKLPTDPHLMLRLAIETVAHDYDVIVIDSAPNLGIGTINVRILFLPYWSEDSYSSYKGEASWKLVPHFPWTSPNTPLPFADFALYPFAVTDHSCHNECLQVDSRGSPHDKVRVNEVTKLWKSWGTGSVKVLSLKAEPDGKGAYWYRPHKATSWISEQSGEVWRVQLKEPTVNIPQTCSELQLQGPNLLEGNVLKFFDMLRDLLKNVDLKGFEPDVRILLTKYSNSNGSQSPWMEEQIRDAWGSMVLKNVVRETDEVGKDTSLSTPAAPMVDSLIARVGVMARGNAITLPVCGRDVKFTLEVLRGDSVEKTSRVWSGNERDQELLTEDALDDLIPSFLLTGQQTPAFGRRVSGVIEIADGSRRRKAAALTESDYRVLVGELDDEQMAALFRLGNDYRPTSAYERVASKRIKYLGIQLTRDMKDLFKENYKLLLNEIKEDTNKWKTIPCSWVGRINIVKMAILPKVIYRFSAIPLKLPMTFFTELEKTTLTFIWNQKRARIAKSILSQKNKAGGIRLPDFKLYYKTTVTKTAWYWYHSRDRGQWNRTEPSEIMLRIYNHLIFDKPDKTSNWGRIPLFNNDAGKTD

SEQ ID NO: 37520 - protein, 725 aa, Homo sapiens
  DOMAIN (618)..(647): kw REPLICATION REPB REPA INITIATION domain identified by eMATRIX, accession number DM00653A, p-value=7.207e-27, raw score of 20.40
  DOMAIN (173)..(280): ParA family ATPase domain identified by PFam, accession name ParA, E-value=3.2e-23, PFam score of 90.6
MKLMETLNQCINAGHEMTKAIAIAQFNDDSPEARKITRRWRIGEAADLVGVSSQAIRDAEKAGRLPHPDMEIRGRVEQRVGYTIEQINHMRDVFGTRLPRAEDVFSPVIGVAAHKGNDPQGTASMYHEWVPDLHIHAEDTLLPFYLGEKDDVTYAIKPTCWPGLDIIPSCLALHRIETELMGKFNEGKLPTDPHLMLRLAIETVAHDYDVIVIDSAPNLGIGTINVVCAADVLIVPTPAELFDYTSALQFFDMLRDLLKNVDLKGFEPDGTQAKMTQGERRNVPKQEYISRGYFTLKETVIDTSNGSRISFTTRITGKDVVRTTSIVMLAKVTFLSCITMSDFTFSGYELACFVTHSGLSRSAGHILSQCANLAATTSEYFIHKPHRLIAAETGYSQSTVVRAFREAVNKGILSVEIVIGDHRERRANLYRFTPSFLAFAQQAKNALIESKLKISSAATKCDNLKTCHTSHGSVMAETAVINHKKRKNSPRIVQSNDLTEAAYSLSRDQKRMLYLFVDQIRKSDGTLQEHDGICEIHVAKYAEIFGLTSAEASKDIRQALKSFAGKEVVFYRPEEDAGDEKGYESFPWFIKRAHSPSRGLYSVHINPYLIPFFIGLQNRFTQFRLSETKEITNPYAMRLYESLCQYRKPDGSGIVSLKIDWIIERYQLPQSYQRMPDFRRRFLQVCVNEINSRTPMRLSYIEKKKGRQTTHIVFSFRDITSMTTG

SEQ ID NO: 37521 - protein, 355 aa, Homo sapiens
  DOMAIN (235)..(278): 1 kw MIND INHIBITOR DIVISION CONTROL domain identified by eMATRIX, accession number DM01756B, p-value=4.822e-15, raw score of 22.91
  DOMAIN (200)..(317): ParA family ATPase domain identified by PFam, accession name ParA, E-value=4.8e-23, PFam score of 90.0
MKLMETLNQCINAGHEMTKAIAIAQFNDDSPEARKITRRWRIGEAADLVGVSSQAIRDAEKAGRLPHPDMEIRGRVEQRVGYTIEQINHMRDVFGTRLRRAEDVFPPVIGVAAHKGGVYKTSVSVHLAQDLALKGLRVLLVEGNDPQGTASMYHGWVPDLHIHAEDTLLPFYLGEKDDVTYAIKPTCWPGLDIIPSCLALHRIETELMGKFDEGKLPTDPHLMLRLAIETVAHDYDVIVIDSAPNLGIGTINVVCAADVLIVPTPAELFDYTSALQFFDMLRDLLKNVDLKGFEPDGFLDLHWEKMLPTTDPLGIIGHPHHFRFRLAPEEFWLKRKEEEPGGCMLRFAVLAPPSF

SEQ ID NO: 37522 - protein, 301 aa, Homo sapiens
  misc_feature (1)...(301): Xaa = X or * as defined in Table 2
XPGYFPRFRAVIIKLCNGDSLRHFMTSVYALVKCFHEFHSEHPLIIALRFFGGISSEVDSMTFQGFGVESEYPTVDGSYSGRRAAQAAPFARYARYTARRALVIISDEEGATNPRVRLKSYLVSKNLPMEFPFEKLCHSRKLFSVWLANWNMTKSCFFRMGNDYRPPRVNNGVSGKPTECKIDFVEIIFAWVNRKIISGEALQKPFPDKEELLNQQASTFHEQKKAGVIFEAEEVITLLTSVLKTSSASRTSLSSRHQFAPAATVLYKGDKMVLNLDRSRVPTECIEKIEAILKELEKPAP

SEQ ID NO: 37523 - protein, 423 aa, Homo sapiens
  DOMAIN (105)..(132): Mrp family proteins domain identified by eMATRIX, accession number BL01215A, p-value=4.964e-11, raw score of 9.75
MKLMETLNQCINAGHEMTKAIAIAQFNDDSPEARKITRRWRIGEAADLVGVSSQAIRDAEKAGRLPHPDMEIRGRVEQRVGYTIEQINHMRDVFGTRLRRAEDVFPPVIGVAAHKGGVYKTSVSVHLAQDLALKGLRVLLVEGNDPQGTASMYHGWVPDLHIHAEDTLLPFYLGEKDDVTYAIKPTCWPGLDIIPSCLALHRIETELMGKFDEEFCFDSNFKPTTDLNLMSLGGATQAFAKENNQKAYKETYGVSHITRHDMLQIPKQQQNEKYQVPQFDQSTIKNIESAKGLDVWDSWPLQNADGTVAEYNGYHVVFALAGSPKDADDTSIYMFYQKVGDNSIDSWKNAGRVFKDSDKFDANDPILKDQTQEWSGSATFTSDGKIRLFYTDYSGKHYGKQSLTTAQVNVSKSDDTLKINGDL

SEQ ID NO: 37524 - protein, 574 aa, Homo sapiens
  DOMAIN (105)..(132): Mrp family proteins domain identified by eMATRIX, accession number BL01215A, p-value=4.964e-11, raw score of 9.75
  DOMAIN (273)..(405): ParB-like nuclease domain identified by PFam, accession name ParBc, E-value=0.00043, PFam score of 26.0
MKLMETLNQCINAGHEMTKAIAIAQFNDDSPEARKITRRWRIGEAADLVGVSSQAIRDAEKAGRLPHPDMEIRGRVEQRVGYTIEQINHMRDVFGTRLRRAEDVFPPVIGVAAHKGGVYKTSVSVHLAQDLALKGLRVLLVEALHQGFSKSFFLPAYGRTTLDVLQSTEFSPSGSETGSPCEKWGLVPGSGEGAYTGPWAAGVWAVGRGLGLPAVLCLQPLCRSEIPDIQPAKLELREYVRRSTGHHSDALPELLPAKYSNGYELKEALHYIHEPPIDANMVQLNQGSHPAQQRLIFEELVAHQISLLTRRAYIRQIAAPRFSSSKVLAKRLLDALPFQMTNAQKRVSKEILRTPAFGRRVSGVIEIADGSRRRKAAALTESDYRVLVGELDDEQMAALSRLGNDYRPTSAYERGQRYASRLQNEFAGNISALADAENISRKIITRCINTAKLPKSVVALFSHPGELSARSGDALQKAFTDKEELLKQQASNLHEQKKAGVIFEAEEVITLLTSVLKTSSASRTSLSSRHQFAPGATVLYKGDKMVLNLDRSRVPTECIEKIEAILKELEKPAP

SEQ ID NO: 37525 - protein, 638 aa, Homo sapiens
  DOMAIN (235)..(278): 1 kw MIND INHIBITOR DIVISION CONTROL domain identified by eMATRIX, accession number DM01756B, p-value=4.822e-15, raw score of 22.91
  DOMAIN (200)..(314): ParA family ATPase domain identified by PFam, accession name ParA, E-value=2.7e-28, PFam score of 107.5
MKLMETLNQCINAGHEMTKAIAIAQFNDDSPEARKITRRWRIGEAADLVGVSSQAIRDAEKAGRLPHPDMEIRGRVEQRVGYTIEQINHMRDVFGTRLRRAEDVFPPVIGVAAHKGGVYKTSVSVHLAQDLALKGLRVLLVEGNDPQGTASMYHGWVPDLHIHAEDTLLPFYLGEKDDVTYAIKPTCWPGLDIIPSCLALHRIETELMGKFDEGKLPTDPHLMLRLAIETVAHDYDVIVIDSAPNLGIGTINVVCAADVLIVPTPAELFDYTSALQFFDMLRDLLKNVDLKGFEPDVRILLTKYSNSNGSQSPWMEEQIRDAWGSMVLKNVVRETNEVGKAAPMVDSLIARVGVMARGNAITLPVCGRDVKFTLEVLRGDSVEKTSRVWSGNERDQELLTEDALDDLIPSFLLTGQQTPAFGRRVSGVIEIADGSRRRKAAALTESDYRVLVGELDDEQMAALSRLGNDYRPTSAYERGQRYASRLQNEFAGNISALADAENISRKIITRCINTAKLPKSVVALFSHPGELSARSGDALQKAFTDKEELLKQQASNLHEQKKAGVIFEAEEVITLLTSVLKTSSASRTSLSSRHQFAPGATVLYKGDKMVLNLDRSRVPTECIEKIEAILKELEKPAP

SEQ ID NO: 37526 - protein, 893 aa, Homo sapiens
  DOMAIN (235)..(278): 1 kw MIND INHIBITOR DIVISION CONTROL domain identified by eMATRIX, accession number DM01756B, p-value=4.822e-15, raw score of 22.91
  DOMAIN (200)..(307): ParA family ATPase domain identified by PFam, accession name ParA, E-value=1.4e-23, PFam score of 91.8
MKLMETLNQCINAGHEMTKAIAIAQFNDDSPEARKITRRWRIGEAADLVGVSSQAIRDAEKAGRLPHPDMEIRGRVEQRVGYTIEQINHMRDVFGTRLRRAEDVFPPVIGVAAHKGGVYKTSVSVHLAQDLALKGLRVLLVEGNDPQGTASMYHGWVPDLHIHAEDTLLPFYLGEKDDVTYAIKPTCWPGLDIIPSCLALHRIETELMGKFDEGKLPTDPHLMLRLAIETVAHDYDVIVIDSAPNLGIGTINVVCAADVLIVPTPAELFDYTSALQFFDMLRDLLKNVDLKGFEPDAETSQGALGTLANVVTSLANLSESLNNGDTSEIQPEDQSASEITRAFDTLAKALNTTDSSSSPSLADGIDTSGGGSIHVISRDQSTPIIEVEGPLLSDTHVTFKSIREDRNGRSQKTVHTEGDMNMNIKKIVKQATVLTFTTALLAGGATQAFAKENNQKAYKETYGVSHITRHDMLQIPKQQQNEKYQVPQFDQSTIKNIESAKGLDVWDSWPLQNADGTVAEYNGYHVVFALAGSPKDADDTSIYMFYQKVGDNSIDSWKNAGRVFKDSDKFDANDPILKDQTQEWSGSATFTSDGKIRLFYTDYSGKHYGKQSLTTAQVNVSKSDDTLKINGVEDHKTIFDGDGKTYQNVQQFIDEGNYTSGDNHTLRDPHYVEDKGHKYLVFEANTGTENGYQGEESLFNKAYYGGGTNFFRKESQKLQQSAKKRDAELANGALGIIELNNDYTLKKVMKPLITSNTVTDEIERANVFKMNGKWYLFTDSRGSKMTIDGINSNDIYMLGYVSNSLTGPYKPLNKTGLVLQMGLDPNDVTFTYSHFAVPQAKGNNVVITSYMTNRGFFEDKKATFAPSFLMNIKGNKTSVVKNSILEQGQLTVN

SEQ ID NO: 37527 - protein, 402 aa, Homo sapiens
  DOMAIN (242)..(269): Mrp family proteins domain identified by eMATRIX, accession number BL01215A, p-value=4.964e-11, raw score of 9.75
MKLMETLNQCINAGHEMTKAIAIAQFNDDSPEARKITRRWRIGEAADLVGVSSQAIRDAEKAGRLPHPDMEIRGRVEQRVGYTIEQINHMRDVFGTRLRRAEDVFPPGFGDFAHFGNHHQNRIFALLGQTSVDRLLQLSQGQAVKGNQLLPVSLVKRKTTLAPNTQTASPRALADSLMQLARQVSRLESGQAIRDAEKAGRLPHPDMEIRGRVEQRVGYTIEQINHMRDVFGTRLRRAEDVFPPVIGVAAHKGGVYKTSVSVHLAQDLALKGLRVLLVEAARGLKKRGLAGTAQGPGEPGEAPKGKKGKTEPGHERKGNWTGKGPQIREGTSPNPPREHGGECAPPPPSAKRKQPKAQKRKANSNAHPRQPKPKKKRPKRQTNSRTNTRSGKRQNKQPEEPK

SEQ ID NO: 37528 - protein, 919 aa, Homo sapiens
  DOMAIN (266)..(293): Mrp family proteins domain identified by eMATRIX, accession number BL01215A, p-value=4.964e-11, raw score of 9.75
MGTGKKQAANLSFVMSAQRHMSTHHSRGAKMAARVLRGQSGKAPLPSPCDAPSSEYVPSRDPGFSGSPQRGVVKTLARHTLLRHLQNGPLLLPSVRWRVYGKVPGEDTLGTGALGKRKWKNKATSGSMGSREANDRAGLLNFGSADIQGRATPCWGDCSCRAASLISNQECINAGHEMTKAIAIAQFNDDSPEARKITGRWRIGEAADLVGVSSQAIRDAEKAGRLPHPDMEIRGRVEQRVGYTIEQINHMRDVFGTRLRRAEDVFPPVIGVAAHKGGVYKTSVSVHLAQDLALKGLRVLLVEGNDPQGTASMYHGWVPDLHIHAEDTLLPFYLGEKDDVNYAIKPTCWPGLDIIPSCLALHRIETELMGKFDEEWLCTPIVNKTPAFGRRVSGVIEIADGSRRRKAAALTESDYRVLVGELDDEQMAALSRLGNDYRPTSAYERGQRYASRLQNEFAGNISALADAENISRKIITRCINTAKLPKSVVALFSSPRGVVREAAFKVISLHGGYVQIWKAPSQDSVSGSGSAMSRAERIQSKPYEMSNVIFTLQMDKLRSRDETAVARSLRSAPTQLTVGKNPGRVFKDSDKFDANDPILKDQTQEWSGSATFTSDGKIRLFYTDYSGKHYGKQSLTTAQVNVSKSDDTLKINGVEDHKTIFDGDGKTYQNVQQFIDEGNYTSGDNHTLRDPHYVEDKGHKYLVFEANTGTENGYQGEESLFNKAYYGGGTNFFRKESQKLQQSAKKRDAELANGALGIIELNNDYTLKKVMKPLITSNTGFCRFRNHHQTGFSPAGANQRGPLAATLSGPGGEGQSAVARLTGEKKNHPGAQYANRLSPRVGRFINAAGTTGFPTGKRAIRKSDGTYREHDGICEIHVAKYAEIFGLTSAEASKDIRQALKSFAGKEVVFYRPEEDAGD

SEQ ID NO: 37529 - protein, 994 aa, Homo sapiens
  DOMAIN (235)..(278): 1 kw MIND INHIBITOR DIVISION CONTROL domain identified by eMATRIX, accession number DM01756B, p-value=4.822e-15, raw score of 22.91
  DOMAIN (512)..(899): Myosin head (motor domain) domain identified by PFam, accession name myosin_head, E-value=1.7e-119, PFam score of 410.4
MKLMETLNQCINAGHEMTKAIAIAQFNDDSPEARKITRRWRIGEAADLVGVSSQAIRDAEKAGRLPHPDMEIRGRVEQRVGYTIEQINHMRDVFGTRLRRAEDVFPPVIGVAAHKGGVYKTSVSVHLAQDLALKGLRVLLVEGNDPQGTASMYHGWVPDLHIHAEDTLLPFYLGEKDDVTYAIKPTCWPGLDIIPSCLALHRIETELMGKFDEGKLPTDPHLMLRLAIETVAHDYDVIVIDSAPNLGIGTINVVCAADVLIVPTPAELFDYTSALQFFDMLRDLLKNVDLKGFEPDELDKLISDRPESCRRPGKPGEPEAPVLTHATTVAVAHGCLAVSQLPPQPLMTLSLQSVPLHHQVQPQAHLAPDSPAPAQTPPLHALPDLSPSPLPHPAMGRAPVDFINISTDMNTEVDALDPSIMDFALQGNLWEEMKDEGFSLDTLGAFADSPLGCDLGASGLTPASGGSDQSFPDLQASFQAGIVNAIYHSEQRLGEVGLAECVSWSSVAQLSYAIADNAYRMMCAELNNHFILISGESGAGKTEASKKILEYFAVTCPMTQSLQIARDRLLFSNPVLEAFGNARTLRNDNSSRFGKYMDIQFDFQGIPVGGHIISYLIEKSRVVYQNEGERNFHIFYQLLAGGEEERLSYLGLERDPQLYKYLSQYIRTAFKPTGFGEGLICINPSLQGQEQMLLVVREGKFDDFLIRHQIKYLGLMEHLRVRRAGFAYRRKYEHFLQRFRDTGEQMVDIENYEVNLFGIIASVLHLGNIGFEEDDQGCATIPDTHEIKWIAKVICPLTLELSVYARDAMAKAVYGRTFTWLVNKINSSLVNKWEPIKYFNNKIICDLVEERHKGIISILDEECIRPGPATDLSFLEKLEEKVGKHAHFETQAPCMKSNNGLFVHLGHGHLECCRHRFGYAGTAGPLAGYRPFRQHRQSLWRAASAICVDAISMRTRSRSTVRPLWPPPSPARFATWSHVSCPCSRMLFLTTDVL

SEQ ID NO: 37530 - protein, 794 aa, Homo sapiens
  DOMAIN (318)..(347): kw REPLICATION REPB REPA INITIATION domain identified by eMATRIX, accession number DM00653A, p-value=4.293e-21, raw score of 20.40
  DOMAIN (580)..(686): ParA family ATPase domain identified by PFam, accession name ParA, E-value=1.5e-24, PFam score of 95.0
MKLMETLNQCINAGHEMTKAIAIAQFNDDSPEARKITRRWRIGEAADLVGVSSQAIRDAEKAGRLPHPDMEIRGRVEQRVGYTIEQINHMRDVFGTRLRRAEDVFPPVIGVAAHKAKGLTALSPQTDWNRKRNSSKPLAQVQEEDSAWHPECLQKTRQAWCDNLKTCHTSHGSVMAETAVINHKKRKNSPRIVQSNDLTEAAYSLSRDQKRMLYLFVDQIRKSDGTLQEHDGICEIHVAKYAEIFGLTSAEASKDIRQALKSFAGKEVVFYRPEEDAGDEKGYESFPWFIKRAHSPSRGLYSVHINPYLIPFFIGLQNPLTQFRLSETKEITNPYAMRLYESLCQYRKPDGSGIVSLKIDWIIERYQLPQSYQRMPDFRRRFLQCINAGHEMTKAIAIAQFNDDSPEARKITRRWRIGEAADLVGVSSQAIRDAEKAGRLPHPDMEIRGRVEQRVGYTIEQINHMRDVFGTRLRRAEDVFPPVIGVAAHKGGVYKTLISVHLAQDLALKGLPGLLREGNDPQGTTSMYHGWVPDLHIHAEDTLLPFYLGEKDDVPYAIKPTCWAGAWHFFLPCRALHRIETELMGKFDEGKLPTDPHLMLRLAIETVAHDYDVIVIDSAPNLGIGTINVVCAADVLIVPTPAELFDYTSALQFFDMLRDLLKNVDLKGFEPDVFIRDKLMERRNRRTGRTEKARIWEVTDRTVRTWIGEAVAAAAADGVTFSVPVTPHTFRHSYAMHMLYAGIPLKVLQSLMGHKSISSTEVYTKVFALDVAARHRVQFAMPESDAVAMLKQLS

SEQ ID NO: 37531 - protein, 358 aa, Homo sapiens
  DOMAIN (157)..(184): Mrp family proteins domain identified by eMATRIX, accession number BL01215A, p-value=4.964e-11, raw score of 9.75
MCEVNLNHPPQKAGKKNPATQGITKPIHKQRVDAMGLTSCRPEKIRNTRMFRMKLMETLNQCINAGHEMTKAIAIAQFNDDSPEARKITRRWRIGEAADLVGVSSQAIRDAEKAGRLPHPDMEIRGRVEQRVGYTIEQINHMRDVFGTRLRRAEDVFPPVIGVAAHKGGVYKTSVSVHLAQDLALKGLRVLLVEEGKQQPLTGLSTEAKVDGINQINPYLPSKPEPRSLRLPSLPRKREDASDFADFGTTIKQDFRLVGQNQRGPLCCNSFRGQPVKGNQAVAGFIGEKKNHPGAQYANRLSPRVGRFINAAGRTGFPTVQPAGQCLPYAAPPATCTLSFSSAGQGVQLGLNFHEQNT

SEQ ID NO: 37532 - protein, 621 aa, Homo sapiens
  DOMAIN (105)..(132): Mrp family proteins domain identified by eMATRIX, accession number BL01215A, p-value=4.000e-11, raw score of 9.75
  DOMAIN (421)..(508): ParB-like nuclease domain identified by PFam, accession name ParBc, E-value=1.7e-10, PFam score of 48.3
  misc_feature (1)...(621): Xaa = X or * as defined in Table 2
MKLMETLNHCINAGHEMTKAVAIAQFNDDSPEARKITRRWRIGEAADLVGVSSQAIRDAEKAGRLPHPDMEIRGRVEQRVGYTIEQINHMRDVFGTRLRRAEDVFPPVIGVAAHKGGVYKTSVSVHLAYDLALKGLRVLLVEGNDPQGTASMYHGWVPDLHIHAEDTLLPFYLGEKDDVTYAIKPTCWPGLDIIPSCLALHRIETELWGKFDEGRSFMPGPPHHHPLGRSSQXQVSNSLDRAAKGNXKPLCHCPCSGTTHATLRLIKEQRPYVPYAHLQQAVVDPRRGGHMVLINVVRVTGDVGKGQIRMRTVVEQAIDQRSSTGAWRNALSIWEPVCNEIFYRLIKPRWEIRWGKRAPVIPKHTLNTQPVEDTSLSTPAAPMVDSLIARVGVMARGNAITLPVCGRDVKFTLEVLRGDSVEKTSRVWSGNERDQELLTEDALDDLIPSFLLTGQQTPAFGRRVSGVIEIADGSRRRKAAALTESDYRVLVGELDDEQMAALSRLGNDYRPTSAYERGQRYASRLQNEFAGNISALADAENISRKIITRCINTAKLPKSVVALFSHPGEAICPVRMFRMKLMETLNQCINAGHEMTKAIAIAQFNDDSPGSEENNPALENR

SEQ ID NO: 37533 - protein, 908 aa, Homo sapiens
  DOMAIN (267)..(296): kw REPLICATION REPB REPA INITIATION domain identified by eMATRIX, accession number DM00653A, p-value=7.207e-27, raw score of 20.40
  DOMAIN (678)..(908): Reverse transcriptase domain identified by PFam, accession name rvt, E-value=1.6e-52, PFam score of 187.9
MKLMETLNQCINAGHEMTKAIAIAQFNDDSPEARKITRRWRIGEAADLVGVSSQAIRDAEKAGRLPHPDMEIRGRVEQRVGYTIEQINHMRDVFGTRLRRAEDVFPPVIGVAAHKGGVYKTSVSVHLAQDLALKGLRVLLVEAVINHKKRKNSPRIVQSNDLTEAAYSLSRDQKRMLYLFVDQIRKSDGTLQEHDGICEIHVAKYAEIFGLTSAEASKDIRQALKSKEGKEVVFYRPEEDAGDEKGYESFPWFIKRAHSPSRGLYSNRFTQFRLSETKEITNPYAMRLYESLCQYRKPDGSGIVSLKIDWIIERYQLPQSYQRMPDFRRRFLQCINAGHEMTKAIAIAQFNDDSPEARKITRRWRIGEAADLVGVSSQAIRDAEKAGRLPHPDMEIRGRVEQRVGYTIEQINHMRDVFGTRLRRAEDVFPPVIGVAAHKGGVYKTSVSVHLAQDLALKGLRVLLVEGNDPQGTASMYHGWVPDLHIHAEDTLLPFYLGEKDDVTYAIKPTCWPGLDIIPSCLALHRIETELMGKFDEGKLPTDPHLMLRLAIETVAHDYDVIVIDSAPNLGIGTINVVCAADVLIVPTPAELFDYTSALQFFDMLRDLLKNVDLKGFEPDWDVKFSYYYCVGVSEIEAIINSLPTKKSPETDGFTSKFYQRYKEELVPFLLKLFQSTEKEGILPNSFYEASIILIPKPGRDTINKENFRPISLMNINAKILNKILANRIQQHIKKLIHHDQVGFIRGMQGWFNIHKSINVIQHINRTKDKNHTIISIDAEKAFDKIRQRFMLKTLSKLGIDGTYLKIIRATYDKPTANIILNGQKLDAFPLKTGTRQGCPLSPLLFNTVLEVLARAIRQEKEIKGIQLGKEEVKLSLFADDMTVYLENPIVSAQNLLKLISNFSKVSG

SEQ ID NO: 37534 - protein, 1079 aa, Homo sapiens
  DOMAIN (557)..(600): 1 kw MIND INHIBITOR DIVISION CONTROL domain identified by eMATRIX, accession number DM01756B, p-value=4.822e-15, raw score of 22.91
  DOMAIN (533)..(652): ParA family ATPase domain identified by PFam, accession name ParA, E-value=1.1e-19, PFam score of 78.9
  misc_feature (1)...(1079): Xaa = X or * as defined in Table 2
FNDDSPEARKITRRWRIGEAADLVGVSSQAIRDAEKAGRLPHPDMEIRGRVEQRVGYTIEQINHMRDVFGTRLRRAEDVFPPFNDDSPEARKITRRWRIGEAADLVGVSSQAIRDAEKAGRSTATRILEIRGRVEQRVGYTIEQINHMRDVFGTRLRRAEDVFPPVIGVAAHKGGVYKTSVSVHLAQDLALKGLRVLLVEGRSFPQTEACLLQYSSWDVSSEKPAALNKNKSEMRGDFADFGTTIKQDFRLLGQTSVDRLLQLSQGQAVKGNQLLPVSLVKRKTTLAPNTQTASPRALADSLMQLARQVSRLESGQAPQAQPTGTPADREWERSKWNGSPSCHSGFSFNTSLKVRERAPALASQERGSHSAAAIRDAEKAGRLPEPGYGKFEGRVEQRVWLYNXTHINHMRDVFGTRIATVPEDVFPPVIGVAAHKGGVYKTLISVHLAQDLALKGLPVLLVEGNDPQGTASMYHGWVPDLHIHAEDTLLPFYLAMKSDVSYTIKPTCWPGLDIIPSCLALHRIETELMGKFDEGKLPTDPHLMLRQTIETVAHAHDYDVIVIDSAPNLGIGTINVVCAADVLIVPTPAELFDYTSALQFFDMLRDLLKNVDLKGFEPDVRILLTKYSNSNGSQSPWMEEQIRDAWGSMVLKNVVRETDEVGKGQIRMRTVFEQAIDQRSSTDTSLSTPAAPMVDSLIARVGVMARGNAITLPVCGRDVKFTLEVLRGDSVEKTSRVWSGNERDQELLTEDALDDLIPSFLLTGQQTPAFGRRVSGVIEIADGSRRRKAAALTESDYRVLVGELDDEQMAALSRLGNDYRPTSAYERGQRYASRLQNEFAGNISALADAENISRKIITRCINTAKLPKSVVALFSHPGELSARSGDALQKAFTDKEELLKQQASNLHEQKKAGVIFEAEEVITLLTSVLKTSSASRTSLSSRHQFAPGATVLYKGDKMFITVKIAKRSQAPCMKSNNALIVILGTVTLDAVGIGLVMPVLPGLLRDIVHSDSIASHYGVLLALYALMQFLCAPVLGALSDRFGRRPVLLASLLGATIDYAIMATTPVLWIYPLVNSPSC

SEQ ID NO: 37535 - protein, 155 aa, Homo sapiens
  DOMAIN (4)..(154): Mur ligase family domain identified by PFam, accession name Mur_ligase, E-value=0.0041, PFam score of -47.7
MYRGALKSILSELVRQDRLIVVEKFSVEAPKTKLLAQKLKDMANRVDTSCIAYVNLVHASFLHLQPMVAIVTNIEADHMDTYQGDFENLKQTFINFLHNLPFYGRAVMCVDDPVIRELLPRVGRQTTTYGFSEDIKFLFSEEYSLKFLWFSTDDS

SEQ ID NO: 37536 - protein, 97 aa, Homo sapiens
MYGFYDWENFYNGRHNKPCSEQRYTFKNTKPYLSWVDTGFSLYLHAYGTYGSANRVNFLDDMFLYGIGYNFTGSGCNFMLGSENFTLTNWNEYEFDL

SEQ ID NO: 37537 - protein, 569 aa, Homo sapiens
  DOMAIN (496)..(512): 10 KD CHAPERONIN SIGNATURE domain identified by eMATRIX, accession number PR00297A, p-value=3.368e-16, raw score of 13.91
  DOMAIN (499)..(566): Chaperonins 10 Kd subunit domain identified by PFam, accession name cpn10, E-value=5.6e-36, PFam score of 132.9
  misc_feature (1)...(569): Xaa = X or * as defined in Table 2
MLCTKWDKLGLEKNAGKNKNAYKWYGWPANAPDEPHIEQLVGECRVMRQLKRLISRIAPSPSSVMVVGESGTAIPVVSHAEFKGGFADIGVHYLDWTSRTTEKSSTKSHKDDFGYLEFEGGANFSWGEMYGFFDWENFYNGRHNKPGSEQRYTFKNTNRIYLGDTGFNLYLHAYGTYGSANRVNFHDDMFLAGFGFQFXPAGGWWGSNPFFAKRYTRSKPYYTGDNGYVAGWVAGYNFMLGSEKFTLTNWNEYEFDRDATYAADFLPLYDVDCQDNGNLEYDTYSQPEWKHNLFDHYLAVLYRFKDESGKEQFSGAVVKTREATPGKEIEAITRRMLDFSPRLKKLADCPSPRPVFEALCICSMLDALLLLCPLDYHASCDNYSYALLDPQGFPLPHRRLWGPYIDVDVPMLHLIQHAWAQDALLSCLYSDLLYMSSFPYPAGTLTRLMGVTSYNHKNTLLTYCITLMSTIRFAYDGDEEIAMKYTDFLKGELSMNIRPLHDRVIVKRKEVETKSAGGIVLTGSASAKSTRGEVLAVGNGRILENGEVKPLDVKIGDIVFFNDGYRGEI

SEQ ID NO: 37538 - protein, 304 aa, Homo sapiens
  misc_feature (1)...(304): Xaa = X or * as defined in Table 2
RTQHKASLHGRASAFCPPRLFAPQAPRLFDHRGFLTFASANFAAVAFCPPRLFPPTGAAAVCPLPLFAPRRFLPPPPPRLFRCHGFFPPCLGFLTSAAFFLPPPRLFALRRRGFLPFAAAAAFFPTRLFAPPPTQLFAPSPPWLFAAAAFCPPWLSAPTPPRLFVPAAAAFCCRDFLPPSPPLFRHRDFLPPPPRIFVPAAAALRAGAADSAAGSTGVLGQDLWSRCVVGTGMEAPGSRGGGGGLREDIPLPPEFPSGPALSSCRXGNRRPEGEMTCQEPLLSCSWIPXVKEFETNPDNIVRPH

SEQ ID NO: 37539 - protein, 541 aa, Homo sapiens
  DOMAIN (206)..(233): Mandelate racemase / muconate lactonizing enzyme family signa domain identified by eMATRIX, accession number BL00908A, p-value= 7.845e-10, raw score of 15.14
  DOMAIN (147)..(488): Mandelate racemase / muconate lactonizing en domain identified by PFam, accession name MR_MLE, E-value=0.018, PFam score of -103.8
MTKQLELPQSPGEVPGSDYPLLIACAYIGFLTWGGGFSGSMPLLAATPGNPVEHIAGLIPVGDTLFSGFNIFITVALIVVMPFITRMMMPKPSDVVSIDPKLLMEEADFQKQLPKDAPPSERLEESRILTLIIGALGIAYLAMYFSEHGFNITINTVNLMFMIAGLLLHKTPMAYMRAISAAARSTAGILVQFPFYAGIQLMMEHSVTGIEAAMLDLLGQHLGVNVASLLGDGQQRSEVEMLGYLFFVGNRKATPLPYQSQPDDSCDWYRLRHEEAMTPDAVVRLAEAAYEKYGFNDFKLKGGVLAGEEEAESIVALAQRFPQARITLDPNGAWSLNEAIKIGKYLKGSLAYAEDPCGAEQGFSGREVMAEFRRATGLPTATNMIATNWREMGHAVIAQSVDIPLADPHFWTMQGSVRVAQMCHEFGLTWGSHSNNHFDISLAMFTHVGAAAPGNPTAIDTHWIWQEGDCRLTQNPLEIKKGKIAVPDAPGLGVELDWEQVQKAHEAYKRLPGGARNDAGPMQYLIPGWTFDRKRPVFGRH

SEQ ID NO: 37540 - protein, 217 aa, Homo sapiens
SSQKPPALKAAVSKKRHRERKDSHDDQRDHTANTGVDWQEQHARADCRAVKASIHMVSVLRQALRESFDAIVLARITLDPNGAWSLNEAIKIGKYLKGSLAYAEDPCGLPTATNMIATDWRQMGHTLSLQSVDIPLADPHFWTMQGVPGKSVLPQAFGFLTYKMRGLDQMEIRGGGEILPKVRAGPGSSGCRISECRREKPPTGRLELKDATPPEVN

SEQ ID NO: 37541 - protein, 211 aa, Homo sapiens
  DOMAIN (80)..(135): Sigma-54 interaction domain proteins ATP-binding region A proteins domain identified by eMATRIX, accession number BL00675B, p -value=1.000e-40, raw score of 24.07
  DOMAIN (1)..(209): Sigma-54 transcription factors domain identified by PFam, accession name sigma54, E-value=1.6e-118, PFam score of 407.2
MQHLFSEIALVAPSKATVLIPADPATGKEMVARAIHASSARSENPLVTLNCAALNESLLEFELFGHEKGAFTGADKRREGRFVKADGGTLFLDEIGDISPMMQVRLLRAIQEREVQRVGSNQIISVDVRLIAATHRDLAAEVNAGRFRQDLYYRLNVVAIEVPSMRQRREDIPLLAGHFMQRFAERNRKAVKGFTPQAMDLLLEYRRPGIL

SEQ ID NO: 37542 - protein, 210 aa, Homo sapiens
  DOMAIN (18)..(34): RHO PROTEIN GDP DISSOCIATION INHIBITOR SIGNATURE domain identified by eMATRIX, accession number PR00492D, p-value=8.535e- 09, raw score of 14.82
MRARSPECLLGGVAQGVVGKAILMAGAYGPRSGWRRDYHDCLYGVRSLDINPFSPIGVDEQQVRFLDLFMVWCALADAPEMSSSELACTPLTQTAKDGSNCKEVDAPRPYVTGSCVGLIARHLIIVSVADTDLRGRVYNVHYAPVTIASYAHALNVCVCFNSYALNACGLAALYLNIASPIARATSSRASPATAIEDPECISLFCYFLVQ

SEQ ID NO: 37543 - protein, 377 aa, Homo sapiens
  DOMAIN (181)..(233): Phosphorylase pyridoxal-phosphate attachment site proteins domain identified by eMATRIX, accession number BL00102E, p-value= 1.000e-40, raw score of 18.33
  DOMAIN (62)..(258): Carbohydrate phosphorylases domain identified by PFam, accession name phosphorylase, E-value=2.3e-145, PFam score of 471.7
PTLSVIHESMRFFIRHQPENLTLVVLSRNLPQLALPICVFVINCWKLAVSNWHLPISTGCAVTKDGRWSPEFTITGQAWDLPVVGYRNGVAQPLRLWQATHAHPFDLTKFNDGDFLRAEQQGINAEKLTKVLYPNDNHTAGKKLRLMQQYFQCACSVADILRRHHLAGRKLHELADYEVIQLNDTHPTIAIPELLRVLIDEHQMSWDDAWAITSKTFAYTNHTLMPEALERWDVKLVKGPLPRHMQIINEINTRFKTLDLQDAEHRPLKMRGCLLCQCHTLFQGKHRFFTGAGGNRQNNVIEHLVAASRYRFTTASRRPLFTAGFTLLTAFLFHSNFAEGVNSLMFMKNLTISGGFLLLAITGPGAYSIDRLLNKKW

SEQ ID NO: 37544 - protein, 220 aa, Homo sapiens
  DOMAIN (51)..(103): Phosphorylase pyridoxal-phosphate attachment site proteins domain identified by eMATRIX, accession number BL00102E, p-value= 1.000e-40, raw score of 18.33
  DOMAIN (37)..(106): Carbohydrate phosphorylases domain identified by PFam, accession name phosphorylase, E-value=1.9e-53, PFam score of 174.2
MTAGSEVRIPANRTRIPAGHTEASLRENQLSLYTLFQGRKLHELADYEVIQLNDTHPTIAIPELLRVLIDEHQMSWDDAWAITSKTFAYTNHTLMPEALERWDVKLQLFLTADIAAITFSHSLIRESPLVDVDRTVFLCVSLPLLHRVLGSVSLDAETDFVRPGVVVRLAGPYIPADPDSAKLRALSAFITIAVVLNVSRTSRKPSNICAPLFVCSMPWA

SEQ ID NO: 37545 - protein, 257 aa, Homo sapiens
  DOMAIN (92)..(144): Phosphorylase pyridoxal-phosphate attachment site proteins domain identified by eMATRIX, accession number BL00102E, p-value= 1.000e-40, raw score of 18.33
  DOMAIN (51)..(257): Carbohydrate phosphorylases domain identified by PFam, accession name phosphorylase, E-value=3.1e-165, PFam score of 536.1
KHAEHLGQATHAHPFILTKFNPGYFLRRQTTRGINAEKLAKIFFPKANHFAGKKLRLMQQYFQCACSVADILRRHHLAGRKLHELADYEVIQLNDTHPTIAIPELLRVLIDEHQMSWDDAWAITSKTFAYTNHTLMPEALERWDVKLVKGLLPRHMQIINEINTRFKTLVEKTWPGDEKVWAKLAVVHDKQVHMANLCVVGGFAVNGVAALHSDLVVKDLFPEYHQLWPNKFHNVTNGITPRRWIKQCNPALAALLD

SEQ ID NO: 37546 - protein, 77 aa, Homo sapiens
  misc_feature (1)...(77): Xaa = X or * as defined in Table 2
KYPTPGRDLRMFITGLSERLXEITSLLKRSITGDKYSLRPLTANSVTSVTHFSFGRVALKSLSSVRAVSLDLNRCFK

SEQ ID NO: 37547 - protein, 231 aa, Homo sapiens
  DOMAIN (194)..(223): Homoserine dehydrogenase proteins domain identified by eMATRIX, accession number BL01042D, p-value=7.873e-18, raw score of 14.86
  DOMAIN (17)..(231): Homoserine dehydrogenase domain identified by PFam, accession name Homoserine_dh, E-value=3.7e-21, PFam score of 83.7
MRRSFDSSNADAAFYGSTDIAMFLLVPILSARYFGFDILGAIPFHRPTKWVQYTVSVILAQAKEPFNLGRLIALVKESHMLSPSLVDCTSSQAVADQYADIVREGIHVVTPNKEANASSMDYYPQLRYAAEKSRRKFLYDTNVGAGLPVIENLQNLLNAGDELMQFSGILYGSLSSIFGTLAAGMSFSEATPLAREMGYTEPDPRDDLSGMDVARKRRGAQANRYAYRVPQ

SEQ ID NO: 37548 - protein, 109 aa, Homo sapiens
  DOMAIN (21)..(73): ELEMENT TRANSPOSABLE INSERTION PROTEIN TRANSPOSITION DNA domain identified by eMATRIX, accession number PD02455C, p-value= 1.000e-40, raw score of 29.23
  DOMAIN (18)..(106): Integrase core domain identified by PFam, accession name rve, E-value=2.6e-23, PFam score of 84.6
TWLRICSIRHSKSLILTSIHVLHSDQGWQYRMRRYQNILKEHGIKQSMSRKGNCLDNAVVECFFGTLKSECFYLDEFSNISELKDAVTEYIEYYNSRRISLKLKGSDSN

SEQ ID NO: 37549 - protein, 1073 aa, Homo sapiens
  DOMAIN (776)..(791): P-TYPE CATION-TRANSPORTING ATPASE SUPERFAMILY SIGNATURE domain identified by eMATRIX, accession number PR00119B, p-value= 8.615e-14, raw score of 13.94
  DOMAIN (547)..(768): E1-E2 ATPase domain identified by PFam, accession name E1- E2_ATPase, E-value=1.5e-93, PFam score of 312.0
MFISGLDDFFIDVVYWVRRIKRKLSVYRRYPRMSYRELYKPDEKPLAIMVPAWNETGVIGNMAELAATTLDYENYHIFVGTYPNDPDTQRDVDEVCARFPNVHKVVCARPGPTSKADCLNNVLDAITQFERSANFAFAGFILHDAEDVISPMELRLFNYLVERKDLIQIPVYPFEREWTHFTSMTYIDEFSELHGKDVPVREALAGQVPSARVGPVSAARREPAVAEDILISSHTILPSLVRVQNRMLVRIKLFECLIEHILNHVHHWSFRKAVRNNFVVEEIYYWRQIQLAPIDCKFSNIGNPLLVWPRSLEISLENIRGGLPYLSSVRAVSLDLNRCFKIISARFGVPRTQVRTWVALYEKHGEKGLIPKPKGVSADPELRIKVVKAVIEQHMSLNQAAAHFMLAGSGSVARWLKVYEERGEAGLRALKIGTKRNIAISVDPEKAASALELSKDRRIEDLERQVRFLETRLMYLKKLKALAHPTKNSIIRSGNWRLSRPRWLGCTRLLDQALRLIKSGSYFAIETLMSVAAIGALFIGATAEAAMVLLLFLIGERLEGWAASRARQGVSALMALKPETATRLRKGEREEVAINSLRPGDVIEVAAGGRLPADGKLLSPFASFDESALTGESIPVERATGDKVPAGATSVDRLVTLEVLSEPGASAIDRILKLIEEAEERRAPIERFIDRFSRIYTPAIMAVALLVTLVPPLLFAASWQEWIYKGLTLLLIGCPCALVISTPAAITSGLAAAARRGALIKGGAALEQLGRVTQVAFDKTGTLTVGKPRVTAIHPATGISESELLTLAAAVEQGATHPLAQAIVREAQVAELAIPTAESQRALVGSGIEAQVNGERVVICAARNIPLMALWIQTGHKGNGFRIVRVNVENRGLNHLTDISTVRRRTGIQRIRGGETNLVVDNDTYRTANFITTRFRHVQGFLNHALPGHCGVTVDGDWQHFVAARLIKSVQTGTNRTDNYRAYNLKVRRVKRQRQVHQAAIGLEVRREAHVVFHVTRAEVFFMFTGELVEQVLRFFTQHVHQHVQTTTVRHPENHFAGAAVASVADHLFKHRD

SEQ ID NO: 37550 - protein, 2506 aa, Homo sapiens
  DOMAIN (143)..(192): Thiamine pyrophosphate enzymes proteins domain identified by eMATRIX, accession number BL00187E, p-value=7.577e-33, raw score of 31.32
  DOMAIN (66)..(200): Thiamine pyrophosphate enzymes domain identified by PFam, accession name TPP_enzymes, E-value=2.6e-68, PFam score of 221.7
MGLNALDIETLNNDEHAWDVVVEEFDGYRQIWRKRGVMPLPASLAKGLCASASERCFACLHVVVLWQQHCAQLRDEHSWRYDHPGDAIYAPLLLKQLSDRKPADCVVTTDVGQHQMWAAQHIAHTRPENFITSSGLGTMGFGLPAAVGAQVARPNDTVVCISGDGSFMMNVQELGTVKRKQLPLKIVLLDNQRLVIGEQMIDVLGPEKRRRRTTQEKIAIVQQSFEPGMTVSLVARQQWCSSQPVISLAIISARFGVPRTQVRTWVALYEKHGEKGLIPKPKGVSADPELRIKVVKAVIEQHMSLNQAAAHFMLAGSGSVARWLKVYEERGEAGLRALKIGTKRNIAISVDPEKAASALELSKDRRIEDLERQVRFLETRLMYLKKLKALAHPTKKAAEIPRSTFYYHLKALSKPDKYADVKKRISEIYHENRGRYGYRRVTLSLHREGKQINHKAVSRTDPIVFSKRDFKATRPNEKWVTDVTEFAVNGRKLYMSPVIDLLSSASLWNLAGKLIDITHGEVDFRFLRRRQQVKYGVSRSTHRDIQRHGVFKRRLTGDITRQCTFVVLLVITFGQFNNAFTSIKEQLLTVGVGPKGPTGLPRRIRQECCAAAACACLCPNGERVSFTYNDHVMHELDPALDLRNVGVAAPFGPVNVQKQHPREYSGSHWCVLVSKTTPTPQPGSDEINRAYEEGWVGNHALAFIGDTLSPKGEKVPELFIVELPQDEAGWKAAGDAPLSGTETTLPAPPRGVVQRRLTFTHHRAYPGLVNVPRHWVRCNPQGTQIAFLMRDDNGIVQLWLISPQGGEPRQLTHNKTDIQSAFNWHPSGEWLGFVLDNRIACAHAQSGEVEYLTEHHANSPSADAVGPSRRMPLVRKDVLHQTASLTGLVEVLKRQGKTVTSQVLIFEIIGPCASGHCQPVTDSNQRADLLLPSRSFCGRETADAGRQLYAGKTVPLLARQMKVAEHTPLLRITSLSYSESGEFLNYSVMFRNASEYQEHYQRIDSGVRERRRTAGWMKIISKRQRRRIGHGTCQHPAHGQHYRALWTSRYGQYAAVDFAVDIAVAIPVVQAFFNGQPELISQAMKFTVVHCCILFLSDGGSIAAWGQVFKVCTSAAAFRHDSSVTGIMMSLCSERFVSSLGRSYTTSFPVSGKHYDQVITKVRVVPRDGVICVSKWCLDDFGLRDKICIDGVVDRPGSIKRSLRCLIGNHARQIVRDRARKQHVDAGQNAESGAHQAKAKSKFPPDAHGTITRDTLFYHPRQEHTAQHNCEGINRLEHRGRNGITKHIAVNEAVDIKANRATALLCEGPEQHTEEGLAVGLALQGSLSNLAAGVLLVMFRPFRAGEYVDLGGVAGTVLSVQIFSTTMRTADGKIIVIPNGKIIAGNIINFSREPVRRNEFIIGVAYDSDIDQVKQILTNIIQSEDRILKDREMTVRLNELGASSINFVVRVWSNSGDLQNVYWDVLERIKREFDAAGISFPYPQMDVNFKRVKEDKAASCTWGGYDPTARSTKCFCDESGHTSSVPHYDCLTLCYQRFGPDLRRDFWWQRVIDAVAVVAGAGHLGRRKLLAVTNRLPGEEETEEGGGEAEHDTTRTREHRRSRQETEDGAAEDDRKRTKDDEGRSDGEARDRQRSRERENNKAGKDRQARSTAATEQRKAEEPTHRTVLDVPSVSYGVYASNTLINQHGDINHTHEVLQDDSKCEMIVGIDHFMTASAKYCDILLPDLMPTEQEDLISHESAGNMGYVILAQPATSAKFERKPIYWMLSEVAKRLGPDVYQTFTEGRSQHEWIKYLHAKTKERNPEMPDYEEMKTTGIFKKKCPEEHYVAFRAFREDPQANPLKTPSGKIEIYSERLAKIADTWELKKDEIIHPLPAYTPGFDGWDDPLRKTYPLQLTGFHYKARTHSSYGNIDVLQQACPQEVWINPIDAQARGIRHGDTVRVFNNNGEMLIAAKVTPRILPGVTAIGQGAWLKADMFGDRVDHGGSINILTSHRPSPLAKGNPSHSNLVQIEKPVPRNRYDIDEVDNISAELLRHYCKEVEKYQNPRGGYFTPGSYTVSAHVPLGSVVGATPDGRFAGEQLADGGLSPMLGQDAQGPTAVLKSVSKLDNTLLSNGTLLNVKFTPATLEAPSLSNCRRRSRMTSSAGQRISCNVVETRRDDVARIFNIQRYSLNDGEGIRTVVFFKGCPHLCPWCANPESISGKIQTVRREAKCLHCAKCLRDADECPSGAFERIGRDISLDALEREVMKDDIFFRTSGGGVTLSGGEVLMQAEFATRFLQRLRLWGVSCAIETAGDAPASKLLPLAKLCDEVLFDLKIMDATQARDVVKMNLPRVLENLRLLVNVTGFGFFVRLDDLFIDGLVHVSSLDNDYYRFDQVGQRLMGESSGQTYRLGDRVEVRVEAVNMDERKIDFSLISSERAPRNVGKTAREKAKKGDAGKKGGKRRQVGKKVNFEPDSAFRGEKKTKPKAAKKDARKAKKPSAKTQKIAAATKAKRAAKKKVAE

SEQ ID NO: 37551 - protein, 256 aa, Homo sapiens
  misc_feature (1)...(256): Xaa = X or * as defined in Table 2
CDRILCSACCAEPQPVSHLHRLRRSFSERQPDGNGSQNPASRDRDVVDVTVIAWIEHRGGHEAPSGPGEDGMDAPAIAAGTFSPREASTLPVQVSXVCRLNCCSRDVPKATRVPLEKLAGPLRHPLFMLFQTCLHLSLFTHHFADDSRRLQIFSVGFVAGLKQQYRRDLLQGDVNPRMATAVGNDQVWFQSGNGFQARLRARSDGLPRFQVRTHFGQDAFCIVIVGNTDRDDVHGGQRIGEREFQHHNPLWRFFEC

SEQ ID NO: 37552 - protein, 59 aa, Homo sapiens
RSMKSAEKLVYARSRLAPKETLQYQLIQKKRHQHWSCQKTDALRILKGKFDFLKRGLCI

SEQ ID NO: 37553 - protein, 362 aa, Homo sapiens
  DOMAIN (269)..(323): Sulfate transporters proteins domain identified by eMATRIX, accession number BL01130A, p-value=9.077e-39, raw score of 21.63
  DOMAIN (18)..(113): Integrase core domain identified by PFam, accession name rve, E-value=9.2e-29, PFam score of 103.5
TWLRICSIRHSKSLILTSIHVLHSDQGWQYRMRRYQNILKEHGIKQSMSRKGNCLDNAVVECFFGTLKSECFYLDEFSNISELKDAVTEYIEYYNSRRISLKLKGLTPIEYRNQTYMPRVNCPLFDTLRIPDIGGVVRARAIAKLLNDTDMAIIDKRRPRANVSQVMHIIGDVAGRDCVLVDDMIDTGGTLCKAAEALKERGAKRVFAYATHPIFSGNAANNLRNSVIDEVVVCDTIPLSDEIKSLPNVRTLTLSEKYTAARFTRDLIAGITVGIIAIPLAMALAIGSGVAPQYGLYTAAVAGIVIALTGGSRFSVSGPTAAFVVILYPVSQQFGLAGLLVATLLLGDLFDSDGSGTLWSPD

SEQ ID NO: 37554 - protein, 23 aa, Homo sapiens
  misc_feature (1)...(23): Xaa = X or * as defined in Table 2
NVLRGISAAFFVGXAKAPRNGTQ

SEQ ID NO: 37555 - protein, 63 aa, Homo sapiens
  misc_feature (1)...(63): Xaa = X or * as defined in Table 2
RVDDFVGGAGAPASPGLXQCGQLQKLIGISIGSLRGLGTKCAVSNDLTEQEIRTLEHCPNSFF

SEQ ID NO: 37556 - protein, 53 aa, Homo sapiens
  misc_feature (1)...(53): Xaa = X or * as defined in Table 2
XAAASRALGQCGQLQKLIVIFIGSLCGLCTKCAVSNDLTQQEIQTPEIQQRNA

SEQ ID NO: 37557 - protein, 103 aa, Homo sapiens
LGPCGLHRAALPAEAMGEKKDGGGGGDAAATEGGTGAAASRALQQCGQLQKLIVIFIGSLCGLCTKCAVSSDLTQQEIQTPLNFHLVQPSHLVGEETEGLREK

SEQ ID NO: 37558 - protein, 61 aa, Homo sapiens
SCPGLQQCGQLQKLIGISIGSLRGLGTKCAVSNDLTEQEIRTLEACKLLSDDYEQVCSAAV

SEQ ID NO: 37559 - protein, 465 aa, Homo sapiens
RVGLQKPVGTPRGAAEKSSKHGAEDRTQNIIMVLKDRMKIRERNKPEIFELIQEIFAVTKTAHTQQMKAVKQSVLDGTSKWSAKISITPHVGFPINRPEMRISGYVGYPGSDPRTSWGVKKAKFDGAQGGEWPEIPEGITADGLELGKGIGESLSPSADPYSHCHEKFNTYVTLKVQNVKSRPSRLETQKYQHLQVSLQLSQGTQSTLIILHTRFISNKASTSSSPPPRCSYALPDPFPLPPLQQLFPLPGSPSPCAPTCSYWPGGPSPSAPWVLRLTVLSVPCSLLILRHHVKQGPISTKELADFIRGGEVPKPHPPEATPTILSHAHLMATPCMYHGHMWILGGRRSREAKCRLRFLPVVAIVRASSDIYVKGQLFLPLSMEIGTLCRMKGVGKNEATLYLNAGQILSPGKGIMLNTTKLSIKNGIMPGGVAHTVSRTWEPRRRYCSGVRQLPLVTRPLSKIP

SEQ ID NO: 37560 - protein, 149 aa, Homo sapiens
  misc_feature (1)...(149): Xaa = X or * as defined in Table 2
IREKLIRLQHENKMLKLNQEGSDNEKIALLQSLLDDANLRKNELETEQXVLVPINFPLTTAFAVSHRFRLVNQRLLEVQSQVEELQKSLQDQGSKAEDSVLLKKKLEEHLEKLHEANNELQKKRAIIEDLEPRFNNSSLKIEELQEALR

SEQ ID NO: 37561 - protein, 320 aa, Homo sapiens
  DOMAIN (161)..(201): HSF-type DNA-binding domain proteins domain identified by eMATRIX, accession number BL00434C, p-value=8.222e-09, raw score of 23.85
LMSKESPVSAGNDAYVDLDRQLKKTTEELNEALSAKEEIAQRCHELDMQVAALQEEKSSLLAENQVLMERLNQSDSIEDPNSPAGRRHLQLQTQLEQLQEETFRFLLSAVDTSWYPEHLHELLILVLISEDFPYFLVVELQNRLSEESKKADKLDFEYKRLKEKVDSLQKEKDRLRTERDSLKETIEELRCVQAQEGQLTTQGCTGVVRFGLAGFSLLQVVEILFCHPPGEKLIRLQHENKMLKLNQEGSDNEKIALLQSLLDDANLRKNELETENREKLHEANNELQKKRAIIEDLEPRFNNSCFIYQETHGRAPPYCF

SEQ ID NO: 37562 - protein, 64 aa, Homo sapiens
NRPRCVMFPFLCPCALIVQFPPMSENMRCLVFCPCNSLLRMMVSSFIHVPVHSDGSFFCCAEAL

SEQ ID NO: 37563 - protein, 19 aa, Homo sapiens
APGPRGRACPAGAHLHLRT

SEQ ID NO: 37564 - protein, 186 aa, Homo sapiens
  DOMAIN (6)..(36): kw TRANSCRIPTASE REVERSE II ORF2 domain identified by eMATRIX, accession number DM01354R, p-value=2.735e-15, raw score of 8.50
MIISIDAEKAFNKTEHRFMLKTLNKLEINSRWIKDLNVKPKTIKTLEENLGNTIQDIVMDKDFMTKTPKAMATKAKIDKWDLIKLKSFCTAKETIIRVYRQPTERESIFVIYPSDKGLISRIYKELKQIYKKKTNNPIKKWAKHMNRHFSKEDIYAANKCMEKLLIITGHQRNANQNHNEIPSHTS

SEQ ID NO: 37565 - protein, 115 aa, Homo sapiens
WGRHKSVSGSTHTSPAGTASATLMTALRRCPNGFFGQRCLEKLPLRLYMPDPKQSVLWDTPGTGVSSSQWSTSPGGQLGPMRSVDQVSTWHWILGGSLLLHSMQFPSNLVKSQLC

SEQ ID NO: 37566 - protein, 105 aa, Homo sapiens
MVEGKEEQVTSYMDGSSPTKLPFPINKLKNLTAYCSTCKRWLHELGKRLESPYYGNNTLGGPSIRSAYIAALYFTLSSLTSVGFGNVSANTDAEKIFSICTMLIG

SEQ ID NO: 37567 - protein, 353 aa, Homo sapiens
MDTEATLSRVCACSLGVDHERPYSSHYRSHSQISKLGTGILQLQKRIILERGRTEVKRVGAEENEVIWCEMTYPKSRSQSATGLGLMSLTLLTMQIAEEHLKDKLEEYMARFSKVRIVRTKKREGLIRTRLLGASMARGEVLTFLDSHCEVNVNWLPPLLTLPSERRGGDPHQLQLEKREGKTYLVQAYVTATSTPMALARTVPERTACQGKKRMGCPSSMGVEGGGTKRSAGQEDINHVRVAPDKCTLGEGQYLGTCHDRGNPTAKRDLERAPANQMAIGRFPPLSPSLTLEEPEAKQGEMKGEDVKAREYTRAMLPQAKECMQLGEAKRGLEQILPQCFRGSMHSSADTLT

SEQ ID NO: 37568 - protein, 172 aa, Homo sapiens
  misc_feature (1)...(172): Xaa = X or * as defined in Table 2
EDALEQEKKELQIQVEHYEFQTRQLELKAKNYADQISRLEERESEMKKEYNALHQRHTEMIQTYVEHIERSKMQQVGGNSQTESSLPGRSRKERPTSLNVFPLADGTCTCTDRGQARACGGPLAPEXPRPAAVQLQLPGFVAVPWSERLLPVAGVPRSLGREPRLQAALHGS

SEQ ID NO: 37569 - protein, 392 aa, Homo sapiens
KFIEFEDALEQEKKELQIQVEHYEFQTRQLELKAKNYADQISRLEERESEMKKEYNALHQRHTEMIQTYVEHIERSKMQQVGGNSQTESSLPGRRYAGRGGVEPGLRWQKPPSHPIKAWPAAKAASCLPVLGVTPANEKGQNVQLWASWVTFWMIQKKLSDSASESLDVRANARPTDNTREVLRAPGPCELSQEQRLPQLQSRLMLPSSWARPGLPGRGAWLRGKEYFVLHVSLMVWGRREPDGALWKKPLDHFVRDGSGVLSCQRCHNQVLLPDLAPAIHFFWAHRTFGTGRGSNASSSGCVVGAFPSHGPQEASICETGPLHLCGRGRGLIQVYTKALVAMTGSSQKAPCSGVCAATLLWPLGLLARSPQHVRRRWPCGKKALGLAALSP

SEQ ID NO: 37570 - protein, 249 aa, Homo sapiens
  DOMAIN (138)..(163): RHODOPSIN-LIKE GPCR SUPERFAMILY SIGNATURE domain identified by eMATRIX, accession number PR00237F, p-value=8.333e-12, raw score of 13.57
  DOMAIN (18)..(194): 7 transmembrane receptor (rhodopsin family) domain identified by PFam, accession name 7tm_1, E-value=6.6e-29, PFam score of 94.0
LTFPRIHHYYCWLPSPTRYLAIVHPLKPRMNYQTASFLIALVWMVSILIAIPSAYFATETVLFIVKSQEKIFCGQIWPVDQQLYYKSYFLFIFGVEFVGPVVTMTLCYARISRELWFKAVPGFQTEQIRKRLRCRRKTVLVLMCILTAYVLCWAPFYGFTIVRDFFPTVFVKEKHYLTAFYVVECIAMSNSMINTVCFVTVKNNTMKYFKKMMLLHWRPSQRGSKSSADLDLRTNGVPTTEEVDCIRLK

SEQ ID NO: 37571 - protein, 230 aa, Homo sapiens
MNEKILQKNCTRDAEWEEDSLGGRTFTEACVRLQTPTQSAPKESRLFLVGSSLNGFGTRSSDGDLCLVVKEEPVTGYIERPQLIRAKVPIVKFRDKVSCVEFDLNVNNIVGIRNTFLLRTYAYLENRVRPLVLVIKKWASHHQINDASRGTLSSYSLVLMVLHYLQTLLVASIRLGFQPLLQNRSSYLEIAQLITSAAASVVLWGLSTPARLAALHGWCCHGPTPGWHAL

SEQ ID NO: 37572 - protein, 269 aa, Homo sapiens
  DOMAIN (26)..(121): PDZ domain (Also known as DHR or GLGF) domain identified by PFam, accession name PDZ, E-value=4.9e-05, PFam score of 30.2
VMMTGYNNGRCPRNSLYSDCIIEEKTVVLQKKDNEGFGFVLRGAKADTPIEEFTPTPAFPALQYLESVDEGGVAWQAGLRTGDFLIEVNNENVVKVGHRQVVNMIRQGGNHLFLKVVTVTRNLDPDDTARKKAPPPPKRAPTTALTLRSKSMTSELEELVDKASVRKKKDKPEEIVPASKPSRAAENMAVEPRVATIKQRPSSRCFPAGSDMNSVYERQGIAVMTPTVPGSPKAPFLGIPRGTMRRQKSIGKKCGTPPQKLPLGFQTQP

SEQ ID NO: 37573 - protein, 472 aa, Homo sapiens
MMNVPGGGAAAVMMTGYNNGRCPRNSLYSDCIIEEKTVVLQKKDNEGFGFVLRGAKADTPIEEFTPTPAFPALQYLESVDEGGDWAGRTVFCFGERLRCTSSLEDSSSIPMKMIDADALWPSLCANRTGSHSSTCPGVSPGKRGPDALQADSNGGCFLSMQQLCCCFLSRPPGSRSPPVLSCSCLIPALWAVSVSFWSPPAQTVGILEDTAVRGPPPTAPPGPTVSSCPGPAVLPACSLLPALAARPTSSSGMSLPRVTSSLRARTANSIWAPPPLLSIQNICLEASIWNALHDEIGPPMSGVGLQPGLLGTRPCLGSLGLLGVARRNCGHLVAPTGAQDEGGGSAPKCSSLRGLLRSHQGGGMPDLGARGTWTKNRLRFRALPSPEITMRISIRDDGKRASPSQCPWTFLESVYHCSVAVWVHTCLLMRLDKFLSITIHPHLDVSQTCSMEALRLDSHFHHLWALLELVLP

SEQ ID NO: 37574 - protein, 380 aa, Homo sapiens
  DOMAIN (339)..(368): RECA PROTEIN SIGNATURE domain identified by eMATRIX, accession number PR00142F, p-value=3.329e-09, raw score of 12.14
  DOMAIN (249)..(346): Gag P30 core shell protein domain identified by PFam, accession name Gag_p30, E-value=6.1e-10, PFam score of 38.3
ESIDQGAVRRHDACRRMGAYRARRYGARSSSGGGVPGEQVEAESSLNLSKPHLQSRDDDAYLMVRLWALSEVMYAGSFIQEVHATNGSSRSIWQALLLAASLSLTRMENWIGAGFFILFRPAFGEPMFTGMKGSSYIFQNHDDKYTTEIQDRVSKVKVHQWIIPAPIAGELLCLVAFYGPAWAFPGGSPISPCPPEKLNNLVLTGTHSEPTEGGSRARMLSCMQATFYVVSDIVGEKKRNLNPKDKDLREMIIKGIRESVPHTQNLSRAFDVQQEKDEGPMKFLKRPREQTKKYADLDPEDSLGQEMLKLHVVTNSWSDITKQLQKLENWKNLSIEKLLGEAQKFYASIRKPIDLIAAINPGTKPIGWTAERQYGKDLGP

SEQ ID NO: 37575 - protein, 192 aa, Homo sapiens
MVETVRELELEVEPEDVTELFQSYNKTLMDVKLRLIEKIKGKKSREKKTINYSSVEAGTRQMHNEVTSSVQGHMPPLMIPIFPHDQRTLAAAAAAQQGFLFPPGITYKPGTPESLAEKERQLSTMITQLISLREQLLAAHDEQKKLAASQIEKQRQQMDLARQQQEQVGSECVLTKDHLSGLRAVAAQLLSQ

SEQ ID NO: 37576 - protein, 89 aa, Homo sapiens
  DOMAIN (9)..(36): C1q domain proteins domain identified by eMATRIX, accession number BL01113A, p-value=4.255e-10, raw score of 17.99
  DOMAIN (4)..(62): Collagen triple helix repeat (20 copies) domain identified by PFam, accession name Collagen, E-value=0.00016, PFam score of 24.7
RPQGERGEAGPPGRGERGEPGAPGPKGKQGESGTRGPKGSKGDRGEKGDSGAQGPRGPPGQKGDQGATEIIDYNGNLHEALQASDWSLP

SEQ ID NO: 37577 - protein, 123 aa, Homo sapiens
LLITFILMLNLLPCHKFLFLQFLLGYLFLLGNLLFWFRNNLFLFRKDHLNVAGRAHVWVNPTMSSVGPAAHLRCFVHLDMLNDQRIQHSFWATDLVSSPIAWPAHTCQLHHCNVGMVHTVSVK

SEQ ID NO: 37578 - protein, 183 aa, Homo sapiens
  misc_feature (1)...(183): Xaa = X or * as defined in Table 2
VRRRILGALFTWICSVTRESTSKPLSSALLSAKLLHRARSRTGLSGRNPKTISQDLQFAAIGSPLTESLNLHSRQALRDCCWTHTIPPNPXICTHARRWRDCCWTHTIPPNPDTVWRFPLSSPVSAAPKQERASSEPCSWSHWCRCSLSWLSSIPTEGCTPVCSSICLLMATFPMFSLIKIVR

SEQ ID NO: 37579 - protein, 575 aa, Homo sapiens
  DOMAIN (497)..(542): Ribosomal protein L22 proteins domain identified by eMATRIX, accession number BL00464B, p-value=5.345e-31, raw score of 28.48
  DOMAIN (422)..(543): Ribosomal protein L22p/L17e domain identified by PFam, accession name Ribosomal_L22, E-value=1.4e-51, PFam score of 184.8
MAHKEGDMPAEQGFGAGYGFKRFYVPMKEGLKGSWSFLKYQRRRKYSLSAVFHSATMLQDVGEAIQFEVSIGNYGNKFDTTCKPLASTTQYSRAVFDGNYYYYLPWAHTKPVVTLTSYWEDISHRLDAVNTLLAMAERLYPQEKNNGPKVPVELRVNIWLGLSAVEKKFNSFAEGTFTVFAEMYENQALMFGKWGTSGLVGRHKFSDVTGKIKLKREFFLPPKGWEWEGEWIVDPERSLLTEADAGHTEFTDEVYQNESRYPGGDWKPAEDTYTDANGDKAASPSELTCPPGWEWEDDAWSYDINRAVDEKGWEYGITIPPDHKPKSWVAAEKMYHTHRRRRLVRKRKKDLTQTASSTARAMEELQDQEGWEYASLIGWKFHWKQRSSDTFRRRRWRRKMAPSETHGAAAIFKLEGALNTCETAQAIKGMHIRKATKYLKDVTLQKQCVPFRRYNAGVGRCAQAKQRGWTQGRWPRKSTEFLLHMLKNAESNAELKGLDVDSLVIEHIQVNKAPKMRRWTYRAHGRINPYMSSPCRIEMILTEKEQIVPKPEEEVAQKKKISQKKLQKQKLMAWE

SEQ ID NO: 37580 - protein, 126 aa, Homo sapiens
  DOMAIN (108)..(126): Ribosomal protein L22p/L17e domain identified by PFam, accession name Ribosomal_L22, E-value=0.004, PFam score of 15.6
  misc_feature (1)...(126): Xaa = X or * as defined in Table 2
PRRTPMKSCKIKEVPIFVFPLRTTRENCLRPIKGYAIYEKAPRSILKDVHLTRNQCVPIPDRYKWWSWQVCRRPKQWGWTQGPVAPKRSAEFFAAHAXKRRRVMLNLRGLDVDSLVIEHIQVNKAP

SEQ ID NO: 37581 - protein, 92 aa, Homo sapiens
  DOMAIN (2)..(84): PDZ domain (Also known as DHR or GLGF) domain identified by PFam, accession name PDZ, E-value=3.3e-13, PFam score of 57.3
MELLKESDGLGIQVSGGRGSKRSPHAIVVTQVKEGGAAHRDGRLSLGDELLVINGHLLVGLSHEEAVAILRSATGMVQLVVASKISGGTGLS

SEQ ID NO: 37582 - protein, 242 aa, Homo sapiens
MTSYELWKGMGEVKGTNRSTGGRRWALRKQQARASWKPAAARRKEALIFSVMDHYCAVRENPERPPFIREEQKQKEETERRENERRQDAKRKREEKTKEKSRTKREREEARKRREDKKKYEGGPARKKREKRSKKTQEHDFSLAMGRKKDYVYEVIFTRCLKVFKICLITSMVTLSKRTFGNYGNVISNRERIELIGYEKEESDFHLDILITIEITKMIMMTNVIEHLLFAKHNSRHFVHLI

SEQ ID NO: 37583 - protein, 75 aa, Homo sapiens
DAWGKLEEENRSLKADLQKLKDELASTKQKLEKAENQVLAMRKQSEGLTKEYDRLLEEHAKLQAAVDGPMDKKEE

SEQ ID NO: 37584 - protein, 72 aa, Homo sapiens
  DOMAIN (37)..(68): HMG14 and HMG17 proteins domain identified by eMATRIX, accession number BL00355, p-value=5.390e-30, raw score of 5.97
  DOMAIN (21)..(72): HMG14 and HMG17 domain identified by PFam, accession name HMG14_17, E-value=6.1e-05, PFam score of 29.9
RAAASRVQHLRPAAVAAATMPKRKAEGDAKGDKAKVKDEPQRRSARLSAKPAPPKPEPKPKKAPAEGAGDAK

SEQ ID NO: 37585 - protein, 93 aa, Homo sapiens
  DOMAIN (16)..(47): HMG14 and HMG17 proteins domain identified by eMATRIX, accession number BL00355, p-value=8.412e-32, raw score of 5.97
  DOMAIN (1)..(77): HMG14 and HMG17 domain identified by PFam, accession name HMG14_17, E-value=3.2e-15, PFam score of 64.0
  misc_feature (1)...(93): Xaa = X or * as defined in Table 2
KRKTEGDAKGDKAKVKDESQRRSARLSAKPAPPKPEPKPKKAPAKKGEKVPKGKKRKADAGKEREGYWRSQVKCIHFLXLYFWXLYSLKYYFI

SEQ ID NO: 37586 - protein, 396 aa, Homo sapiens
  DOMAIN (57)..(68): RNase H domain identified by eMATRIX, accession number PF00075F, p-value=6.029e-10, raw score of 12.87
  DOMAIN (1)..(141): RNase H domain identified by PFam, accession name rnaseH, E- value=4.8e-33, PFam score of 123.2
MFTDGSSFLEQGVQKTGAAITMETDILWAQALPVVTSAQRAELVAFTQALRWGKDKHINIYTDSRYAFATVHVHRAIYQEHGLLTLAGKTIKNKEEILALLEATGIPQQVAVIHCKGHQREDMAIARGNQRADSAAQEAARLPVAPLILLPAVSFPQSNLQDHPIYSAEEVKLVSDPQASKNQESWWILPDSRIFIPQTLGEILIGRLHSTTHLGGVKLTQLLRSCFKIPHLQNLANQASLQCKACAQVNAKQGPKPSSSNRLWGDLPGERGLSRLGLSGFGGGGLADNLADLLCGSSFTLALSPLASPSAFLLGMVAVATVAGGCKAGIRAMTATPDRPVAEHICTLQSKRPDAENKKGEMWWFSQAGWKKKLVIIATNPLGRHEILHNFGNKSG

SEQ ID NO: 37587 - protein, 120 aa, Homo sapiens
  DOMAIN (71)..(102): HMG14 and HMG17 proteins domain identified by eMATRIX, accession number BL00355, p-value=1.692e-37, raw score of 5.97
  DOMAIN (55)..(120): HMG14 and HMG17 domain identified by PFam, accession name HMG14_17, E-value=3.8e-14, PFam score of 60.4
PVRGSQRYKNFINPPEPEHCYRRGENDPRTDQSPRAAASRVQHLRPAAVAAATMPKRKAEGDAKGDKAKVKDEPQRRSARLSAKPAPPKPEPKPKKAPAKKGEKVPKGKKGKADSWQGGE

SEQ ID NO: 37588 - protein, 151 aa, Homo sapiens
MLMDRKSQYCENGHTAQAREARKAQARAKQAELQQTNDAATVADPPRKLEQQQANACPEQQVDPRRAAVEAAIARAKARKLEQQQANAEPEEQVDPRKAAVEAAIAQFFELYRKMLSRSMMSILDDHISHDPQLEDPMGFLNAYLGFIKSF

SEQ ID NO: 37589 - protein, 170 aa, Homo sapiens
  misc_feature (1)...(170): Xaa = X or * as defined in Table 2
RQPAHPGTSSAAAAPRKRSAAAHAGVAVAASARLPPCAGCGLRAAPPLLASSARLRALRRPGGLWAAGCAPAAGQLCTAAGSAAPGALQRCGGRHGITRPWCAEIASAGXGSGGSRWGCWPCPCLLRTCTSHPLSSPLPFTHGSLQASFSLTRDCVSSTKTLWVWLEVQR

SEQ ID NO: 37590 - protein, 652 aa, Homo sapiens
HVQLPIVSTSASDPGGTSTQLMTSPVFDTMSAPLMGVPNSGALSPPLMPASDSGALSPLLMPASDSGALSPLLMPALDSGTLSPLLSTSEYGVMSPGMMTIPDFGTMSATLMVAPDSAEISPLAMPAPSSGVVCTPIMSTSSSEAMSTPLMLAPDSGELSPILMQDMNPGVMSTQPVPAPSSEAMSPLQITDEDTEAMSKVLMTALASGEISSLLMSGTDSEAISSLIMSAVASGGTSPQPTSTQNSGGIPTPLMSDLDSGIMSSLLMSSPGSEVMSTPLLSVPDAGEMSTLPKPAPDAEAMSPALMTALPSGVMPTQTMPAPGSGAMSPWSTQNVDSEMMSNPPVRATASGVMSAPPVRALDSGAMSTPLMGAPASGNMSTLQKTVPASGAMTTSLMTVPSSGVMSTEQMSATASRVMSAQLTMAKTSGAMPTGSMKAVAKQYKRATASGKMSTPLRRAPTSGAMSTQPVTATASETMSMPQLTVPASGSMSMLQMRAPVSEAMSMPQMRTMASGLTSAAQMKAMTSGAMSTPLMTAQTSGSTSTLLMRDTASGVMSCPQMRSLASGALSKPLMTPKASGTMFTEKMTTTASEAMPTLLMRDTVSGALSMPQMTDTAFWKVVCIANERHSFWSNVHITNDSHSLWRDVHAT

SEQ ID NO: 37591 - protein, 226 aa, Homo sapiens
MEQGAHLATGSTFCPQCLQPPVDQLTHKALLPPGMVLVRSENGQLLMIPQQALAQMQAQAHAQPQTTMAPRPATPTSAPPVQISTVQRIPGINICAQRFRVDINFQPLWVNTKEHDCWTVCVLDVLSAPDPRGFSLLGLLCLVVAAQSFLVFDGLDVLESSGPCLVDVSLVCVCLVSPRDDVQAVESQLECRGPAGVSSEHWIGRQAFGPCVGIRKDAASGGCCGV

SEQ ID NO: 37592 - protein, 240 aa, Homo sapiens
MILSKFLKVPEKSSESFFAYLNQNPGYGNIAPSTEGGKIFCILYAIFGIPLFGFLLAGIGDQLGTIFGKSIARVEKVFRLLAAPSKIKILLGRRDSCILLNWQCTMNAFAEYWRVLLERVTEFQGEFMTAKMSPDITKCVLRGKIALVNLTIAILGYKGTIAPKTTRCMPWSPVQIFHTSSGASTNDPNQFFSASAIPTQNSPPSDGSLKRALQILYSGNEIISHQESKNAWRLDSDEYT

SEQ ID NO: 37593 - protein, 919 aa, Homo sapiens
  misc_feature (1)...(919): Xaa = X or * as defined in Table 2
QALQRGLLSRDRAPCSSKLSWRSSPRRRAGTGPVQEEVALKPVLLRHPVQPVIRVKLPRICLLEEAGQLRGVHRLESVEEYYEADGAEWGPPDTAMLESLPEMAGKHSLPQLLDSSSASQPGAIQIIYSILYQIHYLKHLLSSYWGASQWKHTRHTHYFESLWXEHLPSXKYQKREKWADLTRSLENPGQQPRDSWEPSGFWALPQAGDSCQTSQSPRKPTGPPKPSPPPEEGRLLRCPTMPVMRKSLTEKGTAFHSPGALPGPIRPLSEDDPRAFSISSSKGMDVHNQEGTTPENTAQWTXRRVCPEGMVDAASYAANLTDSAEAPKGSPGSWWKKELSGSSSRTLIGIHSPYRHPESERTRGRPQFPPAEKXRPGLQAQTSGHETHQRPVARALIRNXRNHLVLWEFPPQRXPWLLLLRGTSPRYATAALARVPLQAPGAESLEHAXPXQALQRGLLSRAERRALQNXAGDHPQEKGGNRACPGGSGPKTSAAETPSSASDTGEAAQDLPVXKKLVSXRGIWQGHRTIVEGQTSHKTLSKAVSQRLHVADHEDPDRNTTAAPRSPQCVLESKPPLATSGPLKPSVSDTSIRTFVSPLTSPKPVPEQGMWSRFHMAVLSEPDRGCPTTPKSPKCRAEGRAPRADSGPVSPAASRNGMSVAGNRQSEPRLASHVAADTAQPRPTGEKGGNIMASDRLERTNQLKIVEISAEAVSETVCGNKPAESDRRGGCLAQGNCQEKSEIRLYRQVAESSTSHPSSLPSHASQAEQEMSRSFSMAKLASSSSSLQTAIRKAEYSQGKSSLMSDSRGVPRNSIPGGPSGEDHLYFTPRPATRTYSMPAQFSSHFGREGHPPHSLGRSRDSQVPVTSSVVPEAKASRGGLPSLANGQGIYSVKPLLDTSRNLPATDEGDIISVQETSC

SEQ ID NO: 37594 - protein, 145 aa, Homo sapiens
  DOMAIN (13)..(42): Respiratory-chain NADH dehydrogenase subunit 1 proteins domain identified by eMATRIX, accession number BL00667D, p-value= 8.875e-09, raw score of 15.38
GVHRLESVEEYNELMVRNGDPRIRMLEVSRDGRKHSLPQLLDSSSASQEYHIVKKSTRSLSTTQVESPWRLIRPSVISIIGLYKEKGKGLGFSIAGGRDCIRGQMGIFVKTIFPNGSAAEDGRLKEDADPGSLHEVSAEPLTEEA

SEQ ID NO: 37595 - protein, 91 aa, Homo sapiens
MKTLVVHSIENEEMRSEMEYLSLIEPTGLSDVIQGHREGYWRSGPVVLSTPAQLIAPVVVAKGTLSITTTEIYFEVDEDDSAFKKIDTKVS

SEQ ID NO: 37596 - protein, 554 aa, Homo sapiens
SGWALQRSYSPFPAPRLNADTTTSTDANTTAVALNAAAHPTRLLPPCPRGHPPTTPVELQSPSLPPISKSSHCRPPFDRSIPTTNRRQPVPWLQLAADGELLRAQLRGPGMGNHRPYAGGWSRGRTARLAAVCGDGNGESSVVQEPGQEQLYWDTLKQLSKHIKPLHRVVNKIDKSEGPLKTLPKCEITLEKLKNDMAVPAAPGAADQTAVPMPAAPGCCPSQYLLTLFSHSLYRTFAPAMTAIHGPLITYIQLGWALQRADGQPWTMCAHCVVCTRKHRLEDDERQSIPSMLQGEVARLDPKCMINLDSSRCSNNGTVHLSLIFKEKVTSLKFKEKPTGLETRSSQTSLEVALYMFLRNPDTEAVLVAMSCFRHLCEEADTRCGVDEVSTWEDTHAKWEQATKLILSYPKAQMEDGQVLLTDTNTQFVEETLAILKNLLDNHTEGSSEHLEQASIETMMLNLVRYVCVLGNMVHAIQIKTKLCQLVEVTMARRDDLSFCREMKFRNKMVEYLTDWVMGTSNQAADDDVKCLTRLSGKINVRERYVWEVIVVSL

SEQ ID NO: 37597 - protein, 2503 aa, Homo sapiens
  DOMAIN (1086)..(1097): Ras GTPase-activating proteins domain identified by eMATRIX, accession number BL00509B, p-value=2.080e-11, raw score of 10.28
  DOMAIN (922)..(1097): GTPase-activator protein for Ras-like GTPase domain identified by PFam, accession name RasGAP, E-value=2.9e-102, PFam score of 353.1
NWEDNSVIFLLVQSMVVDLKNLLFNPSKPFSRGSQPADVDLMIDCLVSCFRISPHNNQHFKICLAQNSPSTFHYVLVNSLHRIITNSALDWWPKIDAVYCHSVELRNMFGETLHKAVQGCGAHPAIRMAPSLTFKEKVTSLKFKEKPTDLETRSYKYLLLSIVKLIHADPKLLLCNPRKQGPETQGSTAELITGLVQLVPQSHMPEIAQEAMEALLVLHQLDSIDLWNPDAPVETFWEISSQMLFYICKKLTSHQMLSSTEILKWLREILICRNKFLLKNKQADRSSCHFLLFYGVGCDIPSSGNTSQMSMDHEELLRTPGASLRKGKGNSSMDSAAGCSGTPPICRQAQTKLEVALYMFLWNPDTEAVLVAMSCFRHLCEEADIRCGVDEVSVHNLLPNYNTFMEFASVSNMMSTGRAALQKRVMALLRRIEHPTAGNTEAWEDTHAKWEQATKLILNYPKAKMEDGQAAESLHKTIVKRRMSHVSGGGSIDLSDTDSLQEWINMTGFLCALGGVCLQQRSNSGLATYSPPMGPVSERKGSMISVMSSEGNADTPVSKFMDRLLSLMVCNHEKVGLQIRTNVKDLVGLELSPALYPMLFNKLKNTISKFFDSQGQVLLTDTNTQFVEQTIAIMKNLLDNHTEGSSEHLGQASIETMMLNLVRYVRVLGNMVHAIQIKTKLCQLVEVMMARRDDLSFCQEMKFRNKMVEYLTDWVMGTSNQAADDDVKCLTRDLDQASMEAVVSLLAGLPLQPEEGDGVELMEAKSQLFLKYFTLFMNLLNDCSEVEDESAQTGGRKRGMSRRLASLRHCTVLAMSNLLNANVDSGLMHSIGLGYHKDLQTRATFMEVLTKILQQGTEFDTLAETVLADRFERLVELVTMMGDQGELPIAMALANVVPCSQWDELARVLVTLFDSRHLLYQLLWNMFSKEVELADSMQTLFRGNSLASKIMTFCFKVYGATYLQKLLDPLLRIVITSSDWQHVSFEVDPTRLEPSESLEENQRNLLQMTEKFFHAIISSSSEFPPQLRSVCHCLYQVVSQRFPQNSIGAVGSAMFLRFINPAIVSPYEAGILDKKPPPRIERGLKLMSKILQSIANHVLFTKEEHMRPFNDFVKSNFDAARRFFLDIASDCPTSDAVNHSLSFISDGNVLALHRLLWNNQEKIGQYLSSNRDHKAVGRRPFDKMATLLAYLGPPEHKPVADTHWSSLNLTSSKFEEFMTRHHQVHEKEEFKALKTLSIFYQAGTSKAGNPIFYYVARRFKTGQINGDLLIYHVLLTLKPYYAKPYEIVVDLTHTGPSNRFKTDFLSKWFVVFPGFAYDNVSAVYIYNCNSWVREYTKYHERLLTGLKGSKRLVFIDCPGKLAEHIEHEQQKLPAATLALEEDLKVFHNALKLAHKDTKVSIKVGSTAVQVTSAERTKVLGQSVFLNDIYYASEIEEICLVDENQFTLTIANQGTPLTFMHQECEAIVQSIIHIRTRWELSQPDSIPQHTKIRPKDVPGTLLNIALLNLGSSDPSLRSAAYNLLCALTCTFNLKIEGQLLETSGLCIPANNTLFIVSISKTLAANEPHLTLEFLEECISGFSKSSIELKHLCLEYMTPWLSNLVRFCKHNDDAKRQRVTAILDKLITMTINEKQMYPSIQAKIWGSLGQITDLLDVVLDSFIKTSATGGLGSIKAEVMADTAVALASGNVKLVSSKVIGRMCKIIDKTCLSPTPTLEQHLMWDDIAILARYMLMLSFNNSLDVAAHLPYLFHVVTFLVATGPLSLRASTHGLVINIIHSLCTCSQLHFSEETKQVLRLSLTEFSLPKFYLLFGISKVKSAAVIAFRSSYRDRSFSPGSYERETFALTSLETVTEALLEIMEACMRDIPTCKWLDQWTELAQRFAFQYNPSLQPRALVVFGCISKRVSHGQIKQIIRILSKALESCLKGPDTYNSQVLIEATVIALTKLQPLLNKDSPLHKALFWVAVAVLQLDEVNLYSAGTALLEQNLHTLDSLRIFNDKSPEEVFMAIRNPLEWHCKQMDHFVGLNFNSNFNFALVGHLLKGYRHPSPAIVARTVRILHTLLTLVNKHRNCDKFEVNTQSVAYLAALLTVSEEVRSRCSLKHRKSLLLTDISMENVPMDTYPIHHGDPSYRTLKETQPWSSPKGSEGYLAATYPTVGQTSPRARKSMSLDMGQPSQANTKKLLGTRKSFDHLISDTKAPKRQEMESGITTPPKMRRVAETDYEMETQRISSSQQHPHLRKVSVSESNVLLDEEVLTDPKIQALLLTVLATLVKYTTDEFDQRILYEYLAEASVVFPKVFPVVHNLLDSKINTLLSLCQDPNLLNPIHGIVQSVVYHEESPPQYQTSYLQSFGFNGLWRFAGPFSKQTQIPDYAELIVKFLDALIDTYLPGIDEETSEESLLTPTSPYPPALQSQLSITANLNLSNSMTSLATSQHSPASLPCSNSAVFMQLFPHQGIDKENVELSPTTGHCNSGRTRHGSASQVQKQRSAGSFKRNSIKKIV

SEQ ID NO: 37598 - protein, 1682 aa, Homo sapiens
  DOMAIN (57)..(100): kw TRANSCRIPTASE REVERSE II ORF2 domain identified by eMATRIX, accession number DM01354T, p-value=8.531e-40, raw score of 9.48
  DOMAIN (1276)..(1490): GTPase-activator protein for Ras-like GTPase domain identified by PFam, accession name RasGAP, E-value=5.7e-96, PFam score of 332.2
MIISIDTEKAFDEIQQPFMPKTLNKLGIDQTYLKIIRAIYDKPTANIILNGQKLEGFPLKTGTRQGCPLSPLLFKLILEVLARAIRQEKEIKAIRLGKEKVKLPLFADDMVAFWNWVENYPDEFTKLYQIPQTDMAECAEKLFDLVDGFAESTKRKAAVWPLQIILLILCPEIIQDISKDVVDENNMNKKQILSLKSAKIDLSETLISCRKRAEIVKKQTQTLIMQVADLQQKVHVQPNQVSTVKVWALIGKEWDPATWKGHTYNQTKVLAGVLLWPIYPVTQRTASFEWGPEQEKALQQVQAAVQAALPLGPYDPTDPMVLEVRKVGRAQQHSIIKWKWYIHDRAQAGPEGTTSVFKFFSFGTWTGSPCSSPCRQPIVGPRDRKLFLDSLRKALAGHGGSRQLTESAAIACVKLCKASTYINWEDNSVIFLLVQSMVVDLKNLLFNPSKPFSRGSQPADVDLMIDCLVSCFRISPHNNQHFKICLAQNSPSTFHYVLVNSLHRIITNSALDWWPKIDAVYCHSVELRNMFGETLHKAVQGCGAHPAIRMAPSLTFKEKVTSLKFKEKPTDLETRSYKYLLLSMVKLIHADPKLLLCNPRKQGPETQGSTAELITGLVQLVPQSHMPEIAQEAMEQADRSSCHFLLFYGVGCDIPSSGNTSQMSMDHEELLRTPGASLRKGKGNSSMDSAAGCSGTPPICRQAQTKLEVALYMFLWNPDTEAVLVAMSCFRHLCEEADIRCGVDEVSVHNLLPNYNTFMEFASVSNMMSTGRAALQKRVMALLRRIEHPTAGNTEAWEDTHAKWEQATKLILNYPKAKMEDGQAAESLHKTIVKRRMSHVSGGGSIDLSDTDSLQEWINMTGFLCALGGVCLQQRSNSGLATYSPPMGPVSERKGSMISVMSSEGNADTPVSKFMDRLLSLMVCNHEKVGLQIRTNVKDLVGLELSPALYPMLFNKLKNTISKFFDSQGQVLLTDTNTQFVEQTIAIMKNLLDNHTEGSSEHLGQASIETMMLNLVRYVRVLGNMVHAIQIKTKLCQLVEVMMARRDDLSFCQEMKFRNKMVEYLTDWVMGTSNQAADDDVKCLTRDLDQASMEAVVSLLAGLPLQPEEGDGVELMEAKSQLFLKYFTLFMNLLNDCSEVEDESAQTGGRKRGMSRRLASLRHCTVLAMSNLLNANVDSGLMHSIGLGYHKDLQTRATFMEVLTKILQQGTEFDTLAETVLADRFERLVELVTMMGDQGELPIAMALANVVPCSQWDELARVLVTLFDSRHLLYQLLWNMFSKEVELADSMQTLFRGNSLASKIMTFCFKVYGATYLQKLLDPLLRIVITSSDWQHVSFEVDPTRAAFSPNAKSHNHCAVRPPNADFLCTPRGHCQEVKEGWYRLEPSESLEENQRNLLQMTEKFFHAIISSSSEFPPQLRSVCHCLYQVVSQRFPQNSIGAVGSAMFLRFINPAIVSPYEAGILDKKPPPRIERGLKLMSKILQSIANHVLFTKEEHMRPFNDFVKSNFDAARRFFLDIASDCPTSDAVNHSLSFISDGNVLALHRLLWNNQEKIGQYLSSNRDHKAVGRRPFDKMATLLAYLGPPEHKPVADTHWSSLNLTSSKFEEFMTRHQVHEKEEFKALKTLSIFYQAGTSKAGNPIFYYVARRLDAGLDTAIEFEVVDVEVCPRNVNKHEEQANR

SEQ ID NO: 37599 - protein, 2891 aa, Homo sapiens
  DOMAIN (897)..(918): COAGULIN SIGNATURE domain identified by eMATRIX, accession number PR00763G, p-value=5.688e-09, raw score of 3.24
  DOMAIN (1308)..(1504): GTPase-activator protein for Ras-like GTPase domain identified by PFam, accession name RasGAP, E-value=6.4e-123, PFam score of 421.8
PPIPTPVGTLGACTPQTLSLPLPSPQPPLPALFPAQGAGPPFPPPPPGRGEDMAAHRPVEWVQAVVSRFDEQLPIKTGQQNTHTKVSTEHNKECLINISKYKFSLVISGLTTILKNVNNMRIFGEAAEKNLYLSQLIILDTLEKCLAGQPKDTMRLDETMLVKQLLPEICHFLHTCREGNQHAAELRNSASGVLFSLSCNNFNAVFSRISTRLQELTVCSEDNVDVHDIELLQYINVDCAKLKRLLKETAFKFKALKKVAQLAVINSLEKAFWNWVENYPDEFTKLYQIPQTDMAECAEKLFDLVDGFAESTKRKAAVWPLQIILLILCPEIIQDISKDVVDENNMNKKLFLDSLRKALAGHGGSRQLTESAAIACVKLCKASTYINWEDNSVIFLLVQSMVVDLKNLLFNPSKPFSRGSQPADVDLMIDCLVSCFRISPHNNQHFKICLAQNSPSTFHYVLVNSLHRIITNSALDWWPKIDAVYCHSVELRNMFGETLHKAVQGCGAHPAIRMAPSLTFKEKVTSLKFKEKPTDLETRSYKYLLLSMVKLIHADPKLLLCNPRKQGPETQGSTAELITGLVQLVPQSHMPEIAQEAMEALLVLHQLDSIDLWNPDAPVETFWEISSQMLFYICKKLTSHQMLSSTEILKWLREILICRNKFLLKNKQADRSSCHFLLFYGVGCDIPSSGNTSQMSMDHEELLRTPGASLRKGKGNSSMDSAAGCSGTPPICRQAQTKLEVALYMFLWNPDTEAVLVAMSCFRHLCEEADIRCGVDEVSVHNLLPNYNTFMEFASVSNMMSTGRAALQKRVMALLRRIEHPTAGNTEAWEDTHAKWEQATKLILNYPKAKMEDGQAAESLHKTIVKRRMSHVSGGGSIDLSDTDSLQEWINMTGFLCALGGVCLQQRSNSGLATYSPPMGPVSERKGSMISVMSSEGNADTPVSKFMDRLLSLMVCNHEKVGLQIRTNVKDLVGLELSPALYPMLFNKLKNTISKFFDSQGQVLLTDTNTQFVEQTIAIMKNLLDNHTEGSSEHLGQASIETMMLNLVRYVRVLGNMVHAIQIKTKLCQLVEVMMARRDDLSFCQEMKFRNKMVEYLTDWVMGTSNQAADDDVKCLTRDLDQASMEAVVSLLAGLPLQPEEGDGVELMEAKSQLFLKYFTLFMNLLNDCSEVEDESAQTGGRKRGMSRRLASLRHCTVLAMSNLLNANVDSGLMHSIGLGYHKDLQTRATFMEVLTKILQQGTEFDTLAETVLADRFERLVELVTMMGDQGELPIAMALANVVPCSQWDELARVLVTLFDSRHLLYQLLWNMFSKEVELADSMQTLFRGNSLASKIMTFCFKVYGATYLQKLLDPLLRIVITSSDWQHVSFEVDPTRLEPSESLEENQRNLLQMTEKFFHAIISSSSEFPPQLRSVCHCLYQATCHSLLNKATVKEKKENKKSVVSQRFPQNSIGAVGSAMFLRFINPAIVSPYEAGILDKKPPPRIERGLKLMSKILQSIANHVLFTKEEHMRPFNDFVKSNFDAARRFFLDIASDCPTSDAVNHSLSFISDGNVLALHRLLWNNQEKIGQYLSSNRDHKAVGRRPFDKMATLLAYLGPPEHKPVADTHWSSLNLTSSKFEEFMTRHQVHEKEEFKALKTLSIFYQAGTSKAGNPIFYYVARRFKTGQINGDLLIYHVLLTLKPYYAKPYEIVVDLTHTGPSNRFKTDFLSKWFVVFPGFAYDNVSAVYIYNCNSWVREYTKYHERLLTGLKGSKRLVFIDCPGKLAEHIEHEQQKLPAATLALEEDLKVFHNALKLAHKDTKVSIKVGSTAVQVTSAERTKVLGQSVFLNDIYYASEIEEICLVDENQFTLTIANQGTPLTFMHQECEAIVQSIIHIRTRWELSQPDSIPQHTKIRPKDVPGTLLNIALLNLGSSDPSLRSAAYNLLCALTCTFNLKIEGQLLETSGLCIPANNTLFIVSISKTLAANEPHLTLEFLEECISGFSKSSIELKHLCLEYMTPWLSNLVRFCKHNDDAKRQRVTAILDKLITMTINEKQMYPSIQAKIWGSLGQITDLLDVVLDSFIKTSATGGLGSIKAEVMADTAVALASGNVKLVSSKVIGRMCKIIDKTCLSPTPTLEQHLMWDDIAILARYMLMLSFNNSLDVAAHLPYLFHVVTFLVATGPLSLRASTHGLVINIIHSLCTCSQLHFSEETKQVLRLSLTEFSLPKFYLLFGISKVKSAAVIAFRSSYRDRSFSPGSYERETFALTSLETVTEALLEIMEACMRDIPTCKWLDQWTELAQRFAFQYNPSLQPRALVVFGCISKRVSHGQIKQIIRILSKALESCLKGPDTYNSQVLIEATVIALTKLQPLLNKDSPLHKALFWVAVAVLQLDEVNLYSAGTALLEQNLHTLDSLRIFNDKSPEEVFMAIRNPLEWHCKQMDHFVGLNFNSNFNFALVGHLLKGYRHPSPAIVARTVRILHTLLTLVNKHRNCDKFEVNTQSVAYLAALLTVSEEVRSRCSLKHRKSLLLTDISMENVPMDTYPIHHGDPSYRTLKETQPWSSPKGSEGYLAATYPTVGQTSPRARKSMSLDMGQPSQANTKKLLGTRKSFDHLISDTKAPKRQEMESGITTPPKMRRVAETDYEMETQRISSSQQHPHLRKVSVSESNVLLDEEVLTDPKIQALLLTVLATLVKYTTDEFDQRILYEYLAEASVVFPKVFPVVHNLLDSKINTLLSLCQDPNLLNPIHGIVQSVVYHEESPPQYQTSYLQSFGFNGLWRFAGPFSKQTQIPDYAELIVKFLDALIDTYLPGIDEETSEESLLTPTSPYPPALQSQLSITANLNLSNSMTSLATSQHSPGIDKENVELSPTTGHCNSGRTRHGSASQVQKQRSAGSFKRNSIKKIV

SEQ ID NO: 37600 - protein, 66 aa, Homo sapiens
IPAVLARRLRGRAWWTLWAQLLSKPVTECLSGSCSSLEVMQRCTDWRKGLASYCHCRSIHSGLWAG

SEQ ID NO: 37601 - protein, 265 aa, Homo sapiens
  misc_feature (1)...(265): Xaa = X or * as defined in Table 2
CSGSPPTCRQAQTSLEVALYMFLQNPDTEAVLVAMSCFCHLCEEADTQCGVDEVSVHNLLPNSNTFMEFACQQCDVNSPPVGPVSEHKGSMISVMSSEGNADTPVSKYMDQLLSLMVCNLEKVGLQIPTNDKDLVLLTDTNTQFVEQTLDIMKNLLDNHTEGSPEHLEQASIETMMLNLVRNKMVEYLTDWVMGTSNQAADDDVKCLTSRIDHPGGTLLXGQPRPELPAGLPRQPASPGPRHPGASCGWPRAPPDSAPGGPGRER

SEQ ID NO: 37602 - protein, 2871 aa, Homo sapiens
  DOMAIN (897)..(918): COAGULIN SIGNATURE domain identified by eMATRIX, accession number PR00763G, p-value=5.688e-09, raw score of 3.24
  DOMAIN (1308)..(1483): GTPase-activator protein for Ras-like GTPase domain identified by PFam, accession name RasGAP, E-value=2.9e-102, PFam score of 353.1
PPIPTPVGTLGACTPQTLSLPLPSPQPPLPALFPAQGAGPPFPPPPPGRGEDMAAHRPVEWVQAVVSRFDEQLPIKTGQQNTHTKVSTEHNKECLINISKYKFSLVISGLTTILKNVNNMRIFGEAAEKNLYLSQLIILDTLEKCLAGQPKDTMRLDETMLVKQLLPEICHFLHTCREGNQHAAELRNSASGVLFSLSCNNFNAVFSRISTRLQELTVCSEDNVDVHDIELLQYINVDCAKLKRLLKETAFKFKALKKVAQLAVINSLEKAFWNWVENYPDEFTKLYQIPQTDMAECAEKLFDLVDGFAESTKRKAAVWPLQIILLILCPEIIQDISKDVVDENNMNKKLFLDSLRKALAGHGGSRQLTESAAIACVKLCKASTYINWEDNSVIFLLVQSMVVDLKNLLFNPSKPFSRGSQPADVDLMIDCLVSCFRISPHNNQHFKICLAQNSPSTFHYVLVNSLHRIITNSALDWWPKIDAVYCHSVELRNMFGETLHKAVQGCGAHPAIRMAPSLTFKEKVTSLKFKEKPTDLETRSYKYLLLSMVKLIHADPKLLLCNPRKQGPETQGSTAELITGLVQLVPQSHMPEIAQEAMEALLVLHQLDSIDLWNPDAPVETFWEISSQMLFYICKKLTSHQMLSSTEILKWLREILICRNKFLLKNKQADRSSCHFLLFYGVGCDIPSSGNTSQMSMDHEELLRTPGASLRKGKGNSSMDSAAGCSGTPPICRQAQTKLEVALYMFLWNPDTEAVLVAMSCFRHLCEEADIRCGVDEVSVHNLLPNYNTFMEFASVSNMMSTGRAALQKRVMALLRRIEHPTAGNTEAWEDTHAKWEQATKLILNYPKAKMEDGQAAESLHKTIVKRRMSHVSGGGSIDLSDTDSLQEWINMTGFLCALGGVCLQQRSNSGLATYSPPMGPVSERKGSMISVMSSEGNADTPVSKFMDRLLSLMVCNHEKVGLQIRTNVKDLVGLELSPALYPMLFNKLKNTISKFFDSQGQVLLTDTNTQFVEQTIAIMKNLLDNHTEGSSEHLGQASIETMMLNLVRYVRVLGNMVHAIQIKTKLCQLVEVMMARRDDLSFCQEMKFRNKMVEYLTDWVMGTSNQAADDDVKCLTRDLDQASMEAVVSLLAGLPLQPEEGDGVELMEAKSQLFLKYFTLFMNLLNDCSEVEDESAQTGGRKRGMSRRLASLRHCTVLAMSNLLNANVDSGLMHSIGLGYHKDLQTRATFMEVLTKILQQGTEFDTLAETVLADRFERLVELVTMMGDQGELPIAMALANVVPCSQWDELARVLVTLFDSRHLLYQLLWNMFSKEVELADSMQTLFRGNSLASKIMTFCFKVYGATYLQKLLDPLLRIVITSSDWQHVSFEVDPTRLEPSESLEENQRNLLQMTEKFFHAIISSSSEFPPQLRSVCHCLYQVVSQRFPQNSIGAVGSAMFLRFINPAIVSPYEAGILDKKPPPRIERGLKLMSKILQSIANHVLFTKEEHMRPFNDFVKSNFDAARRFFLDIASDCPTSDAVNHSLSFISDGNVLALHRLLWNNQEKIGQYLSSNRDHKAVGRRPFDKMATLLAYLGPPEHKPVADTHWSSLNLTSSKFEEFMTRHHQVHEKEEFKALKTLSIFYQAGTSKAGNPIFYYVARRFKTGQINGDLLIYHVLLTLKPYYAKPYEIVVDLTHTGPSNRFKTDFLSKWFVVFPGFAYDNVSAVYIYNCNSWVREYTKYHERLLTGLKGSKRLVFIDCPGKLAEHIEHEQQKLPAATLALEEDLKVFHNALKLAHKDTKVSIKVGSTAVQVTSAERTKVLGQSVFLNDIYYASEIEEICLVDENQFTLTIANQGTPLTFMHQECEAIVQSIIHIRTRWELSQPDSIPQHTKIRPKDVPGTLLNIALLNLGSSDPSLRSAAYNLLCALTCTFNLKIEGQLLETSGLCIPANNTLFIVSISKTLAANEPHLTLEFLEECISGFSKSSIELKHLCLEYMTPWLSNLVRFCKHNDDAKRQRVTAILDKLITMTINEKQMYPSIQAKIWGSLGQITDLLDVVLDSFIKTSATGGLGSIKAEVMADTAVALASGNVKLVSSKVIGRMCKIIDKTCLSPTPTLEQHLMWDDIAILARYMLMLSFNNSLDVAAHLPYLFHVVTFLVATGPLSLRASTHGLVINIIHSLCTCSQLHFSEETKQVLRLSLTEFSLPKFYLLFGISKVKSAAVIAFRSSYRDRSFSPGSYERETFALTSLETVTEALLEIMEACMRDIPTCKWLDQWTELAQRFAFQYNPSLQPRALVVFGCISKRVSHGQIKQIIRILSKALESCLKGPDTYNSQVLIEATVIALTKLQPLLNKDSPLHKALFWVAVAVLQLDEVNLYSAGTALLEQNLHTLDSLRIFNDKSPEEVFMAIRNPLEWHCKQMDHFVGLNFNSNFNFALVGHLLKGYRHPSPAIVARTVRILHTLLTLVNKHRNCDKFEVNTQSVAYLAALLTVSEEVRSRCSLKHRKSLLLTDISMENVPMDTYPIHHGDPSYRTLKETQPWSSPKGSEGYLAATYPTVGQTSPRARKSMSLDMGQPSQANTKKLLGTRKSFDHLISDTKAPKRQEMESGITTPPKMRRVAETDYEMETQRISSSQQHPHLRKVSVSESNVLLDEEVLTDPKIQALLLTVLATLVKYTTDEFDQRILYEYLAEASVVFPKVFPVVHNLLDSKINTLLSLCQDPNLLNPIHGIVQSVVYHEESPPQYQTSYLQSFGFNGLWRFAGPFSKQTQIPDYAELIVKFLDALIDTYLPGIDEETSEESLLTPTSPYPPALQSQLSITANLNLSNSMTSLATSQHSPGIDKENVELSPTTGHCNSGRTRHGSASQVQKQRSAGSFKRNSIKKIV

SEQ ID NO: 37603 - protein, 686 aa, Homo sapiens
  misc_feature (1)...(686): Xaa = X or * as defined in Table 2
XSVASDSQPTPPQPPAIPQRVPRTSCLPQGVQPWAVSPKRTPNPCPQRKSSHCRPPFDRSIPTTNRRQPVPWLQLAADGELLRAQLRGPGMGNHRPYAGGWSRGRTARLAAVCGDGNGESSVVQEPGQEQLYWDTLKQLSKHIKPLHRVVNKIDKSEGPLKTLPKCEITLEKLKNDMAVVSGMLGTPGGSGLPQELLGAPLEGPSWSGWPAAPGAADQTAVPMPAAPGCCPSQYLLTLFSHSLYRTFAPAMTAIHGPLITYIQLGWALQRADGQPWTMCAHCVVCTRKHRLEDDERQSIPSMLQGEVARLDPKCMINLDSSRCSNNGTVHLSLIFKEKVTSLKFKEKPTGLETRSCKYLLLSMVKLIHADPELLLCTSLEVALYMFLRNPDTEAVLVAMSCFRHLCEEADTRCGVDEVSTWEDTHAKWEQATKLILSYPKAQMEDGQLHKTIVKRRMSHVSGGGPIDLSDTDSLQAWINMTSFLCALGGVCLQQRRNSGLATYSPPMGPVSEHKGSMISVMSSEGNADTPVSKYMDQLLSLMVCKLEKVGLQIRTNGKDLVLLTDTNTQFVEETLAILKNLLDNHTEGSSEHLEQASIETMMLNLVRYVCVLGNMVHAIQIKTKLCQLVEVTMARRDDLSFCREMKFRNKMVEYLTDWVMGTSNQAADDDVKCLTRLSGKINVRER

SEQ ID NO: 37604 - protein, 141 aa, Homo sapiens
  DOMAIN (4)..(19): CAP protein domain identified by eMATRIX, accession number BL01088A, p-value=7.097e-15, raw score of 7.26
MQGLVERLERAVSRLESLSAESHRPPGNCGEVNGVIAGFFGLRKAVGKKGLQKKLSPGKTYIGASRISGEFGPVPVLHTMGQKLLCVAPSVEAFDKLMDSMVAEFLKNSRILAGDVETHISGGIRFSEEHKPYGELRIRGI

SEQ ID NO: 37605 - protein, 560 aa, Homo sapiens
  DOMAIN (226)..(268): CAP protein domain identified by eMATRIX, accession number BL01088B, p-value=1.000e-40, raw score of 15.91
  DOMAIN (85)..(560): CAP protein domain identified by PFam, accession name CAP, E- value=0, PFam score of 1045.1
PLYFHSPPAWLCSPSPPSARLYLELRKLPATLPWSSVTDTGSYSAGRRERGGEGEGRGRRVRVADHRSALPRTGPQGSEEELANMQGLVERLERAVSRLESLSAESHRPPGNCGEVNGVIAGVAPSRGKPLHKLMDSMVAEFLKNSRILSGDVETLAEIVHSAFQAQRAFLLMASQYQQPHENDVAALLKPISEKIKEIQTFQRERTRGSNMFNHLSAVSESIPALGWIAVSPKPGPYVKEMNDAATFYTNRVLKDYKHSDLRHVDWVKSYLNIWSELQAYIKEHHTTGLTWSKTGPVASTVSAFSVLSSGPGLPPPPPPLPPPGPPPLFENEGKKEESSPSRSALFAQLNQGEAITKGLRHVTDDQKTYKNPSLRAQGGQTQSPTKSHTPSPTSPKSYPSQKHAPVLELEGKKWRVEYQEDRNDLVISETELKQVAYIFKCEKSTIQIKGKVNSIIIDNCKKLGLVFDNVVGIVEVINSQDIQIQVMGRVPTISINKTEGCHIYLSEDALDCEIVSAKSSEMNILIPQDGDYREFPIPEQFKTAWDGSKLITEPAEIMA

SEQ ID NO: 37606 - protein, 104 aa, Homo sapiens
MKDIVTPVPQEEVKTVIRKCLEQAALVNYSRLSEYAKIEENVGRLITPAKKLEDTIRLAELVIEVLQQNEEHHAEAFAWWSDLMVEHAETFLSLFAVDMDAALE

SEQ ID NO: 37607 - protein, 1207 aa, Homo sapiens
  DOMAIN (5)..(35): H-NS histone family domain identified by eMATRIX, accession number PF00816B, p-value=9.284e-09, raw score of 13.84
  DOMAIN (425)..(527): PH domain identified by PFam, accession name PH, E-value=1e- 11, PFam score of 46.9
SEKEKEELERLQKEEEERKKRLQLYVFVMRCIAYPFNAKQPTDMARRQQKISKQQLQTVKDRFQAFLNGETQIMADEAFMNAVQSYYEVFLKSDRVARMVQSGGCSANDSREVFKKHIEKRVRSLPEIDGLSKETVLSSWMAKFDAIYRGEEDPRKQQARMTASAASELILSKEQLYEMFQNILGIKKFEHQLLYNACQLDNPDEQAAQIRRELDGRLQMADQIARERKFPKFVSKEMENMYIEELKSSVNLLMANLESMPVSKGGEFKLQKLKRSHNASIIDMGEESENQLSKSDVVLSFSLEVVIMEVQGLKSLAPNRIVYCTMEVEGGEKLQTDQAEASKPTWGTQGDFSTTHALPAVKVKLFTESTGVLALEDKELGRVILHPTPNSPKQSEWHKMTVSKNCPDQDLKIKLAVRMDKPQNMKHSGYLWAIGKNVWKRWKKRFFVLVQVSQYTFAMCSYREKKAEPQELLQLDGYTVDYTDPQPGLEGGRAFFNAVKEGDTVIFASDDEQDRILWVQAMYRATGQSHKPVPPTQVQKLKPREEMYLSMDAPISQFSGLKDADRAQKHGMDEFISSNPCNFDHASLFEMVQRLTLDHRLNDSYSCLGWFSPGQVFVLDEYCARNGVRGCHRHLCYLKDLLERAENGAMIDPTLLHYSFAFCASHVHGNRPDGIGTVTVEEKERFEEIKERLRVLLENQITHFRYCFPFGRPEGALKATLSLLERVLMKDIVTPVPQEEVKTVIRKCLEQAALVNYSRLSEYAKIEENQKDAENVGRLITPAKKLEDTIRLAELVIEVLQQNEEHHAEGKEAFAWWSDLMVEHAETFLSLFAVDMDAALEVQPPDTWDSFPLFQLLNDFLRTDYNLCNGKFHKHLQDLFAPLVVRYVDLMESSIAQSIHRGFERESWEPVNNGSGTSEDLFWKLDALQTFIRDLHWPEEEFGKHLEQRLKLMASDMIESCVKRTRIAFEVKLQKTSRSTDFRVPQSICTMFNVMVDAKAQSTKLCSMEMGQEHQYHSKIDELIEETVKEMITLLVAKFVTILEGVLAKLSRYDEGTLFSSFLSFTVKAASKYVDVPKPGMDVADAYVTFVRHSQDVLRDKVNEEMYIERLFDQWYNSSMNVICTWLTDRMDLQLHIYQLKTLIRMVKKTYRDFRLQGVLDSTLNSKTYETIRNRLTVEEATASVSEGGGLQGISMKDSDEEDEEDD

SEQ ID NO: 37608 - protein, 519 aa, Homo sapiens
  misc_feature (1)...(519): Xaa = X or * as defined in Table 2
MTLHPVLLNPFSHKDKGQKLCSGDSSVLLTSACSTLYSRQALMRYKKHLHILGLMLHTEHKDYCTCEHEHVAGWPSNSEQVILHPTPNSPKQSEWHKMTVSKNCPDQDLKIKLAVRMDKPQNMKHSGTIQNFPSSMLGDSSLERSYRLRVPCRRHPDHSNSAYDSLAPQSATHIFEVPDGIGTVTVEEKERFEEIKERLRVLLENQITHFRYCFPFGRPEGALKATLSLLERVLMKDIVTPVPQEEVKTVIRKCLEQAALVNYSRLSEYAKIEGLEGGRAFFNAVKEGDTVIFASDDEQDRILWVQAMYRATGQSHKPVPPTQVQKLNAKGGNVPQLDAPISQFLRKWFAENLKGEFRRCPPCQIRYSLLWLKRLISGSSDGPQWHLECGPRTSSTSSTSKLVRNASSQPLPPSSTESATLGDQPIQVVTSKYQVSPVLRVSVDMVPTFKGAHRLVEKPQNEQDMCDEIYEENINSKMVSSEGNETLHFKRDNDLQGSVSPRVAFGPPASVSPGVPFIX

SEQ ID NO: 37609 - protein, 352 aa, Homo sapiens
  DOMAIN (241)..(287): DEAD-box subfamily ATP-dependent helicases proteins domain identified by eMATRIX, accession number BL00039D, p-value=6.294e- 23, raw score of 21.67
  DOMAIN (202)..(283): Helicases conserved C-terminal domain identified by PFam, accession name helicase_C, E-value=1.2e-18, PFam score of 75.4
MDQGACNSVSSEDFRLCFMDDASCCVLSWLNVKLVKERVWSEHSRPNRRKELPFLFMASEPAEQCEGSWALLSSVSCVHKLCQSAPSSKCLHYPRTIAMDQLPSAASDSKEFFIVYKSVMFMSLHVYWFVSSLKTGPMSFAMLCIEPLYVGDDGKANATVDGLEQGYVVCPSEKRFLLPFAVLKKNRKRKIMVFFSSSMSVKYHYELLNYMDLPILAIHGKQKQNKGTTTFFQFCKADSGILLCMDVAARGLDIPEVDWIVQHDPLDDPKEYIHRVSRTARGLNGRGHVLLILCPEEMGFLHYLKQSKFPLSEFDFSWSKISDIQSQLEKLIEKNCFLHKAAQEAYKSYTRA

SEQ ID NO: 37610 - protein, 493 aa, Homo sapiens
  DOMAIN (406)..(452): DEAD-box subfamily ATP-dependent helicases proteins domain identified by eMATRIX, accession number BL00039D, p-value=7.750e- 31, raw score of 21.67
  DOMAIN (120)..(331): DEAD/DEAH box helicase domain identified by PFam, accession name DEAD, E-value=2.5e-68, PFam score of 219.0
MSQEAVGNIKVTKSPQKSTVLTNGEAAMQSSNSESKKKKKKKRKMVNDAEPDTKKAKTENKGKSEEESAETTKETENNVEKPDNDEDESEVPSLPLGLTGAFEDTSFASLCNLVNENTLKAIKEMGFTNMTEIQHKSIRPLLEGRDLLAAAKTGSGKTLAFLIPAVELIVKLRFMPRNGTGVLILSPTRELAMQTFGVLKELMTHHVHTYGLIMGGSNRSAEAQKLGNGINIIVATPGRLLDHMQNTPGFMYKNLQCLVIDEADRILDVGFEEELKQIIKLLPTRRQTMLFSATQTRKVEDLARISLKKEPLYVGVDDDKANATVDGLEQGYVVCPSEKRFLLLFTFLKKNRKKKLMVFFSSCMSVKYHYELLNYIDLPVLAIHGKQKQNKRTTTFFQFCNADSGTLLCTDVAARGLDIPEVDWIVQYDPPDDPKEYIHRVGRTARGLNGRGHALLILRPEELGFLRYLKQSKVPLSEFDFSWSKISDIQLSA

SEQ ID NO: 37611 - protein, 328 aa, Homo sapiens
  DOMAIN (217)..(263): DEAD-box subfamily ATP-dependent helicases proteins domain identified by eMATRIX, accession number BL00039D, p-value=6.294e- 23, raw score of 21.67
  DOMAIN (178)..(259): Helicases conserved C-terminal domain identified by PFam, accession name helicase_C, E-value=1.2e-18, PFam score of 75.4
MDQGACNSVSSEDFRLCFMDDASCCVLSWLNVKLVKERVWSEHSRPNRRKELPFLFMASEPAEQCEGSWALLSSVSCVHKLCQSAPSSKCLHYPRTIAMDQLPSAASGFRRGVVLAAPDFKEPLYVGDDGKANATVDGLEQGYVVCPSEKRFLLPFAVLKKNRKRKIMVFFSSSMSVKYHYELLNYMDLPILAIHGKQKQNKGTTTFFQFCKADSGILLCMDVAARGLDIPEVDWIVQHDPLDDPKEYIHRVSRTARGLNGRGHVLLILCPEEMGFLHYLKQSKFPLSEFDFSWSKISDIQSQLEKLIEKNCFLHKAAQEAYKSYTRA

SEQ ID NO: 37612 - protein, 205 aa, Homo sapiens
  DOMAIN (118)..(164): DEAD-box subfamily ATP-dependent helicases proteins domain identified by eMATRIX, accession number BL00039D, p-value=7.750e- 31, raw score of 21.67
  DOMAIN (79)..(160): Helicases conserved C-terminal domain identified by PFam, accession name helicase_C, E-value=2.8e-28, PFam score of 107.4
MLFSATQTRKVEDLARISLKKEPLYVGVDDDKANATVDGLEQGYVVCPSEKRFLLLFTFLKKNRKKKLMVFFSSCMSVKYHYELLNYIDLPVLAIHGKQKQNKRTTTFFQFCNADSGTLLCTDVAARGLDIPEVDWIVQYDPPDDPKEYIHRVGRTARGLNGRGHALLILRPEELGFLRYLKQSKVPLSEFDFSWSKISDIQLSA

SEQ ID NO: 37613 - protein, 856 aa, Homo sapiens
  DOMAIN (247)..(286): PROTEIN ZINC FINGER ZINC-FINGER METAL-BINDING NU domain identified by eMATRIX, accession number PD01066, p-value=3.512e-31, raw score of 19.43
  DOMAIN (385)..(827): Zinc finger, C2H2 type domain identified by PFam, accession name zf-C2H2, E-value=3.6e-92, PFam score of 319.6
  misc_feature (1)...(856): Xaa = X or * as defined in Table 2
MDGAKAFFSAVAAGFVIILTCQLQWQWQHGGVHAHQLWQLASGYRDACFCVSTYSSGPSEFPGPTLGTLNELAIDLEERKHRRKAKVWKGEGGGLRSPRQSLLAFRAVLASRGTRSCHVSPYLGVSGALSSPNPHPSTTGAGPIPPVQRWGLPQINQKNREIAIPLTLGMSTHLRRGCKNMSRFSPSLHCCTTPISTNFTDPGSHCKGAHGDICLLIQNLKGALPMSINRSYFNAHPLLQISEAVTFKDVAVVFTEEELGLLDPAQRKLYRDVMLENFRNLLSVGNQPFHQDTFHFLGKEKFWKMKTTSQREGNSGGKIQIEMETVPEAGPHEEWSCQQIWEQIASDLTRSQNSIRNSSQFFKEGDVPCQIEARLSISHVQQKPYRCNECKQSFSDVSVFDLHQQSHSGEKSHTCGECGKSFCYSPALHIHQRVHMGEKCYKCDVCGKEFNQSSHLQTHQRVHTGEKPFKCGQCGKGFHSRSALNVHCKLHTGEKPYNCEECGKAFIHDSQLQEHQRIHTGEKPFKCDICGKSFRVRSRLNRHSMVHTGEKAFRCDTCGKNFRQRSALNSHSMVHIEEKPYKCEQCGKGFICRRDFCKHQMVHTGEKPYNCKECGKTFRWSSCLLNHQQVHSGQKSFKCEECGKGFYTNSRRSSHQRSHNGEKPYNCEECGKDYKRRLDLEFHQRVHTGERPYNCKECGKSFGWASCLLKHQRLHSGEKPFKCEECGKRFTQSSQLHSHQTCHTGEKLYKCEQCEKGYNSKFNLDMHQRVHGGERPYNCKECGKSFGWASCLLKHQRLHSGEKPLKCXECGKRSTQNSQLHLHQSLQARNWSVSPWDRVSKRRRRLPSLLFCSFHW

SEQ ID NO: 37614 - protein, 108 aa, Homo sapiens
  DOMAIN (69)..(108): KRAB box domain identified by PFam, accession name KRAB, E- value=2.7e-14, PFam score of 60.9
GCKNMSRFSPSLHCCTTPISTNFTDPGSHCKGAHGDICLLIQNLKGALPMSINRSYFNAHPLLQISEAVTFKDVAVVFTEEELGLLDPAQRKLYRDVMLENFRNLLSV

SEQ ID NO: 37615 - protein, 92 aa, Homo sapiens
  DOMAIN (53)..(92): PROTEIN ZINC FINGER ZINC-FINGER METAL-BINDING NU domain identified by eMATRIX, accession number PD01066, p-value=3.600e-30, raw score of 19.43
  DOMAIN (51)..(92): KRAB box domain identified by PFam, accession name KRAB, E- value=2.6e-17, PFam score of 71.0
PETADYSFLQQGSPRTRGCLGTILLSQELHHSGLCKFPEVRGKMTTFKEAMTFKDVAVVFTEEELGLLDLAQRKLYRDVMLENFRNLLSVGH

SEQ ID NO: 37616 - protein, 896 aa, Homo sapiens
  DOMAIN (200)..(239): PROTEIN ZINC FINGER ZINC-FINGER METAL-BINDING NU domain identified by eMATRIX, accession number PD01066, p-value=3.512e-31, raw score of 19.43
  DOMAIN (368)..(838): Zinc finger, C2H2 type domain identified by PFam, accession name zf-C2H2, E-value=1.9e-119, PFam score of 410.2
MDPGTLQSASQGPTAINPCDYVLKRRNIQTSWQRLTPIIKWHVYILMIGPGEKEAGRNLGIFGKWTPFPKIPAKRLRESNCPVDAQEIWLPQAFREYLGRRGNFGPGRRTCEFWEVESICSVESWELWLRQADSGDSGKCSPDACGIIDTSGLRAGHCYLTRLWHVSGRIPPSFKLHHPGVCKFPKVGGKMTTFKEAVTFKDVAVVFTEEELGLLDPAQRKLYRDVMLENFRNLLSVGHQPFHQDTCHFLREEKFWMMGTATQREGNSGGKIQTEMETVPEAGTHEEFSCKQIWEQIASDLTRSQDTTISNSQLFEQDDNPSQIKARLSIIHVKTETSEGRTCKKSFSDVSVLDLHQQLQSREKSHTCDECGKSFCYSSALRIHQRVHMGEKLYNCDVCGKEFNQSSHQQIHQRIHTGEKPFKCEQCGKGFSRRSGLYVHRKLHTGVKPHICEKCGKAFIHDSQLQEHQRIHTGEKPFKCDICCKSFRSRANLNRHSMVHMREKPFRCDTCGKSFGLKSALNSHRMVHTGEKRYKCEECGKRFIYRQDLYKHQIDHTGEKPYNCKECGKSFRWASGLSRHVRVHSGETTFKCEECGKGFYTNSQRYSHQRAHSGEKPYRCEECGKGYKRRLDLDFHQRVHRGEKPYNCKECGKSFGWASCLLNHQRIHSGEKPFKCEECGKRFTQNSQLYTHRRVHSGEKPFKCEECGKRFTQNSQLYSHRRVHTGVKPYKCEECGKGFNSKFNLDMHQRVHTGERPYNCKECGKSFSRASSILNHKRLHGDEKPFKCEECGKRFTENSQLHSHQRVHTGEKPYKCEKCGKSFRWASTHLTHQRLHSREKLLQCEDCGKSIVHSSCLKDQQRDQSGEKTSKCEDCGKRYKRRLNLDTLLSLFLNDT

SEQ ID NO: 37617 - protein, 196 aa, Homo sapiens
  misc_feature (1)...(196): Xaa = X or * as defined in Table 2
KRTAISPKDAFETRQDLNEEEAAQVHGVKDPAPASTQSVLADGTDSAGNXARQEPHKAALXPIQNYQANLVNTFPYSNNSGGRGRLMKTVTQGSQQPSLADPASHLPVGDHLTYSNETEPVRALLPDEKKEVKPPALSMSNLHEATMPVLLDHLRETRADKKRLRKALREFEEQFFKQTGRSPQKEDRIPMADEYY

SEQ ID NO: 37618 - protein, 122 aa, Homo sapiens
MPREARDMGHITEPPNSYVEALISNVAVFSDEGCKEVIKPQALGSDSFVQNSLLKLQALESDLCSAFLTNQEEAAQVHGVKDPAPASTQSVLADGTDSAAEANISSMELVSTYSDVIERKME

SEQ ID NO: 37619 - protein, 420 aa, Homo sapiens
RYRPGIPGSTISSLVEEHAPPSWEPQHQNVEATVLVDSVLRPSMGNFKSRKPKSIFKAESGRSHGESQETEHVVSSQSECQVRAGTPAHESPQNNAFKCQETVRLQPRIDQRTATSPKDAFETRQDLNEEEAAQVHGVKDPAPASTQSVLADGTDSADPSPVHKDGQNEADSAPEDLHSVGTSRLLLYHITDGDNPLLSPRLFPLSGQSQRFNLDPESAPSPPSTQQFMMPRSSSRCSCGDGKEPQTITQLTKHIQSLKRKIRKFEEKFEQEKKYRPSHGDKTSNPEVLKWMNDLAKGRKQLKELKLKLSEEQGSAPKGPPRNLLCEQPTVPRENGKPEAAGPEPSSSGEETPDAALTCLKERREQLPPQEDSKVTKQDKNLIKPLYDRYRIIKQILSTPSLIPTIVSQDTCMLLLCTDV

SEQ ID NO: 37620 - protein, 197 aa, Homo sapiens
  misc_feature (1)...(197): Xaa = X or * as defined in Table 2
PRMGARPRAPAAQPPPAAAQRPPARPATPTACGSSAHRAPSPARSRRSPCTPRAAPAAPGPKAARQWAGTATRSSRPQRSARRSPRDSSRCWAISSRSKRAATACTPGAKRRVATKARGALWSKPKSKAMRLWPWCLSGRLGSXKAQEVAQDPGSDEGRGRLVESGLQDEGWVPQGGEGGVAGQDASHRGSFRGALK

SEQ ID NO: 37621 - protein, 30 aa, Homo sapiens
HLRSSPVCLHPWPFAILFLIPTAAKQRTAK

SEQ ID NO: 37622 - protein, 421 aa, Homo sapiens
MMEEIEIRMDQQLEDSEVDNVGITGIYFAPMADSLQEFKDYIENLPLIDDPEIFGMHENANLVFQYKETSTLINTILEVQPRSSTGGEGKSNDEIVQELVASVQTRVPEKLEMEGASESLFVKDLQGRLNSLTTVLGQEVDRFNNLLKLIHPGGKHRPVLHSSPVSPRTVACLHLLTSLETLNKAIAGFVVMSEEMEKVYNSFLNNQVPALWSNTAYPSLKPLGSWVKDLILRTSFVDLWLKRGQPKSYWISGFFFPQGFLTGTLQNHARKYNLPIDELSFKYSVIPTYRDQAAVIEAAKTVQFGQELPMDMELPSPEDGVLVHGMFMDASRWDDKEMVIEDALPGQMNPVLPVVHFEPQQNYKPSPTLYHCPLYKTGARAGTLSTTGHSTNFVVTVLLPSKRSKDYWIAKGSALLCQLSE

SEQ ID NO: 37623 - protein, 311 aa, Homo sapiens
RRPERDGKGRQGRKQEVTLVQRLLQSWHLDHSADSPVSSLPTAEDTYRIVQLSDSQNGQRLKAIKDHCDKCSCEHHSEVNGADVWTLKGGGKVRSGMEAPSPHNRQHKHRRKRRNQCDFRLNLGQRWNFTLPLLRSHEVTECVRGVTTVRALRVQPGALDVRINVLWVWRSQPLGVLCALQDCGSFLPHWPLVPSQLFRWADWPGVQRTVLRVLERALPGECLPSPEDGVLVHGMFMDASRWDDKEMVIEDALPGQMNPVLPVVHFEPQQNYKPSPTLYHCPLYKTGARAGTLSTTGNLKGENKEWRRENV

SEQ ID NO: 37624 - protein, 30 aa, Homo sapiens
FLLFLFLLLRISGFGKHLLLVLQSHVWLRF

SEQ ID NO: 37625 - protein, 218 aa, Homo sapiens
  DOMAIN (69)..(92): TRANSFORMING PROTEIN P21 RAS SIGNATURE domain identified by eMATRIX, accession number PR00449C, p-value=3.571e-21, raw score of 17.27
  DOMAIN (29)..(218): Ras family domain identified by PFam, accession name ras, E- value=1.9e-103, PFam score of 357.1
EGPIPWGRRRREPEPLLPMAKKTYDLLFKLLLIGDSGVGKTCVLFRFSDDAFNTTFISTIGIDFKIKTVELQGKKIKLQIWDTAGQERFHTITTSYYRGAMGIMLVYDITNGKSFENISKWLINIDEHANEDVERMLLGNKCDMDDKRVVPKGKGEQIAREHGIRFFETSAKANINIEKAFLTLAEDILRKTPVKEPNSENVDISSGGGVTGWKSKCC

SEQ ID NO: 37626 - protein, 94 aa, Homo sapiens
  misc_feature (1)...(94): Xaa = X or * as defined in Table 2
GLLPGWKIXCSRVFVTSAIHVEVAELEANLPCTCKVHFPDPNKLHCFQLTVTPDEGYYQGGKFQFETEVPDAYNMVPPKVKCLTKIWHPNITET

SEQ ID NO: 37627 - protein, 80 aa, Homo sapiens
MLLMAKCWRNQSSSGSLAESNFRELRFSPAGWLRALKSFCALECNLFCSTDNPSSWITFKEILELSCCLQREKTFLRPGL

SEQ ID NO: 37628 - protein, 60 aa, Homo sapiens
MVPPKVKCLTKIWHPNITETGEICLSLLREHSIDGTGWAPTRTLKDVVWGLNSLVTDLLK

SEQ ID NO: 37629 - protein, 867 aa, Homo sapiens
GHLVRSTGPGGSFAKHMVAQCVSPKGPLACSRTYLFGATHVPYLGGDSKLPKKTEQIRLLSQIYAAVIEAVLAGIACYAKTSSLTKAKEVAEQTLGSGLDSFELIPFKAALRSKMTFHIHAVNNQGRIVPLDSEDSLSFVKTACMAVYDIPDLLGGNGCLGSVVFSESFLTSQILVKEKDGTVTTETSSVVLTAAVPRFCSWLVEDNEVKLSEKTQQAVRGDESFLGTYLTGGEGAYLYSSNLQSWPEEGNVHFFSSGLLFSHCRHGSIIISKDHMNSISFYDGDSTSTVAALLIDFKSSLLPHLPVHFHGSSNFLMIALFPKSKIYQAFYSEVFSLWKQQDNSGISLKVIQEDGLSVEQKRLHSSAQKLFSALSQPAGEKRSSLKLLSAKLPELDWFLQHFAISSISQEPVMRTHLPVLLQQAEINTTHRIESDKVIISIVTGLPGCHASELCAFLVTLHKECGRWMVYRQIMDSSECFHAAHFQRYLSSALEAQQNRSARQSAYIRKKTRLLVVLQGYTDVIDVVQALQTHPDSNVKASFTIGAITACVEPMSCYMEHRFLFPKCLDQCSQGLVSNVVFTSHTTEQRHPLLVQLQSLIRAANPAAAFILAENGIVTRNEDIELILSENSFSSPEMLRSRYLMYPGWYEGKLNAGSVYPLMVQICVWFGRPLEKTRFVAKCKAIQSSIKPSPFSGNIYHILGKVKFSDSERTMEVCYNTLANSLSIMPVLEGPTPPPDSKSVSQDSSGQQECYLVFIGCSLKEDSIKDWLRQSAKQKPQRKALKTRGMLTQQEIRSIHVKRHLEPLPAGYFYNGTQFVNFFGDKTDFHPLMDQFMNDYVEEANREIEKYNQELEQQEYHDLFELKP

SEQ ID NO: 37630 - protein, 455 aa, Homo sapiens
  DOMAIN (378)..(426): Ubiquitin-conjugating enzymes proteins domain identified by eMATRIX, accession number BL00183, p-value=9.581e-23, raw score of 28.97
  DOMAIN (326)..(454): Ubiquitin-conjugating enzyme domain identified by PFam, accession name UQ_con, E-value=1e-05, PFam score of -7.0
MDVYPPRRQGLPRARSPGGSSRGSPSVRETLLGTRVVRNMDIEVRAGIETQFECSHLFALLSGKCKREARDHCLTVKSPEQIPEGLLLQADEDLRPEHRHWATHKWNVPASPICAFFWKLQDFELCPGGLSSGTGLVSKKVHFKSTNVEGYPGQGRVQVLTTQQQEQFLPRDTYGALLSLETRASGKGSVHRKPGYLLEGRGFQSLNLDSRWLWLPQMDSTSTVAALLIDFKSSLLPHLPVHFHGSSNFLMIALFPKSKIYQAFYSEVFSLWKQQDNSGISLKVIQEDGLSVEQKRLLCGCALSAGCLALCNTGVLASERVNTDISMLPTCRLRLSSRLAGGTTEVAELEANLPCTCKVHFPDPNKLHCSQLTVTPDEGYYQGGKFQLETEVPDVYNMVPPKVKCLTKIWHPNITETGEICLSLLREHSIDGTGWAPMRTLKDVVWGLNSLFTDF

SEQ ID NO: 37631 - protein, 134 aa, Homo sapiens
  misc_feature (1)...(134): Xaa = X or * as defined in Table 2
SIPLLFRKSSLSRKXCSAASIFSGSSKFKRSVNKEFNPQTTSFNVLVGAQPVPSIECSLNKLRHISPVSVIVGVPDSLVQAFHFGRHHVVRIRELQFQTEIFHPGSNPHLGLLLAENNEACLDQENALYMYKVN

SEQ ID NO: 37632 - protein, 576 aa, Homo sapiens
  DOMAIN (386)..(506): SPRY domain identified by PFam, accession name SPRY, E-value= 0.0027, PFam score of 6.3
MAAAGAGPGQEAGAGPGPGAVANATGAEEGEMKPVAAGAAAPPGEGISAAPTVEPSSGEAEGGEANLVDVSGGLETESSNGKDTLEGAGDTSEVMDTQAGSVDEENGRQLGEVELQCGICTKWFTADTFGIDTSSCLPFMTNYSFHCNVCHHSGNTYFLRKQANLKEMCLSALANLTWQSRTQDEHPKTMFSKDKSKERDVFLVKEHPDPGSKDPEEDYPKFGLLDQDLSNIGPAYDNQKQSSAVSTSGNLNGGIAAGSSGKGRGAKRKQQDGGTTGTTKKARSDPLFSAQRLPPHGYPLEHPFNKDGYRYILAEPDPHAPDPEKLELDCWAGKPIPGDLYRACLYERVLLALHDRAPQLKISDDRLTVVGEKGYSMVRASHGVRKGAWYFEITVDEMPPDTAARLGWSQPLGNLQAPLGYDKFSYSWRSKKGTKFHQSIGKHYSSGYGQGDVLGFYINLPEDTETAKSLPDTYKDKALIKFKSYLYFEEKDFVDKAEKSLKQTPHSEIIFYKNGVNQGVAYKDIFEGVYFPAISLYKSCTMSDMGWGAVVEHTLADVLYHVETEVDGRRSPPWEP

SEQ ID NO: 37633 - protein, 186 aa, Homo sapiens
MAAARAGPGQEAGAGPGPGAVANATGAEEGEMKPVAAGAAAPPGEGISAAPTVEPSSGEAEGGEANLVDVSGGLETESSNGKDTLSSLASPHSHCDCGHDHLRNTLQIHERNRASKAGATSTASNLHETTDSEHKQRKIQSHQETEEHTQIQQYTHRRKQNRNKRNVNGRDTAPQPKETITSKQRT

SEQ ID NO: 37634 - protein, 626 aa, Homo sapiens
  DOMAIN (417)..(537): SPRY domain identified by PFam, accession name SPRY, E-value= 0.0027, PFam score of 6.3
PAGAGPGQEAGAGPGPGAVAYATGAEEGEMKPVAAGAAVPPGEGISAAPTVEPSSGEAEGGEANLVDVSGGLETESSNGKDTLEGAGDTSEVMDTQAGSVDEENGRQLGEVELQCGICTKWFTADTFGIDTSSCLPFMTNYSFHCNVCHHSGNTYFLRKQANLKEMCLSALANLTWQFRTQEEHPKTMFSKDKDIIPFIDKYWECMTTRHRPGKTTWPNNIVKTMSKERDVFLVKEHPDPGSKDPEEDYPKFGLLDQDLSNIGPAYDNQKQSSAVSTSGNLNGGIAAGSSGKGRGAKRKQQDGGTTGTTKKARSDPLFSAQRLPPHGYPLEHPFNKDGYRYILAEPDPQAPDPEKLEIDCWAGKPISGDLYRACLYERVLLALHDRAPQLKISDDRLTVVGEKGYSMVRASHGVRKGAWYFEITVDEMPPDTAARLGWSQPLGNLQAPLGYDKFSYSWRSKKGTKFHQSIGKHYSSGYGQGDVLGFYINLPEDTETAKSLPDTYKDKALIKFKSYLYFEEKDFVDKAEKSLKQTPHSEIIFYKNGVNQGVAYKDIFEGVYFPAISLYKSCTVSINFGPCFKYPPKDLTYRPMSDMGWGAVVEHTLADVLYHVETEVDGRRSPPWEP

SEQ ID NO: 37635 - protein, 89 aa, Homo sapiens
  DOMAIN (64)..(82): Cutinase serine proteins. domain identified by eMATRIX, accession number BL00155C, p-value=5.875e-10, raw score of 14.08
  DOMAIN (15)..(89): Phospholipase/Carboxylesterase domain identified by PFam, accession name abhydrolase_2, E-value=2.1e-05, PFam score of -7.5
MSAPLPAIVPATWKATAAVIFLHGLGDTGHRWIEAFADSQEDEPGIKQAAENIKALIDQEVKNGIPSNRIIVGGFSQGGALSLYTALTT

SEQ ID NO: 37636 - protein, 275 aa, Homo sapiens
  DOMAIN (152)..(170): Cutinase serine proteins. domain identified by eMATRIX, accession number BL00155C, p-value=3.500e-10, raw score of 14.08
  DOMAIN (65)..(249): Phospholipase/Carboxylesterase domain identified by PFam, accession name abhydrolase_2, E-value=4e-92, PFam score of 319.5
RGAALARTRLSVRPVGPAGTRRSHALGPRPGARSSFRLRCELRRCMCGNNMSTPLPAIVPAARKATAAVIFLHGLGDTGHGWAEAFAGIRSSHIKYICPHAPVRPVTLNMNVAMPSWFDIIGLSPDSQEDESGIKQAAENIKALIDQEVKNGIPSNRIILGGFSQGGALSLYTALTTQQKLAGVTALSCWLPLRASFPQGPIGGANRDISILQCHGDCDPLVPLMFGSLTVEKLKTLVNPANVTFKTYEGMMHSSCQQEMMDVKQFIDKLLPPID

SEQ ID NO: 37637 - protein, 394 aa, Homo sapiens
  DOMAIN (55)..(72): Zinc finger C2H2 type, domain proteins. domain identified by eMATRIX, accession number BL00028, p-value=8.412e-14, raw score of 16.07
  DOMAIN (25)..(103): Zinc finger, C2H2 type domain identified by PFam, accession name zf-C2H2, E-value=3.6e-17, PFam score of 70.5
MGEYLQARAQNLIVHQGIHTGEKSFECGKCGKAFSRSQGLTVPQRIHTGEKPFECNECGKAFSCSSYLIVHQRIHTGEKPYQCNECERAFGQSSHLILHQTTHAQKKPQLATWCDNLKTCHTSHGSVMAETAVINHKKRKNSPRIVQSNDLTEAAYSLSRDQKRMLYLFVDQIRKSDGTLQEHDGICEIHVAKYAEIFGLTSAEASKDIRQALKSFAGKEVVFYRPEEDAGDEKGYESFPWFIKPEVRRCRIYYLELAPDPPGPSESDQKSDESTHCRQSYTQGGTSLKDLHTRLNSDSDGKNSPPELRFVTGMKVLHYLINSVYTVSGQSEAADLRGVTAHKGSVDPKSEQWQDLLQRAKEQSFHTAEGDRSGLSLLLGQPAVILLSGPTTSC

SEQ ID NO: 37638 - protein, 792 aa, Homo sapiens
  DOMAIN (743)..(760): kw REPLICATION REPB REPA INITIATION domain identified by eMATRIX, accession number DM00653B, p-value=3.250e-15, raw score of 16.63
  DOMAIN (265)..(623): Zinc finger, C2H2 type domain identified by PFam, accession name zf-C2H2, E-value=2.5e-108, PFam score of 373.3
  misc_feature (1)...(792): Xaa = X or * as defined in Table 2
MVDRARPTVLVTEVPLKSKHTAQMGLVLTANESQPLVHETALKNKKPQSWFPNPCVSYNRKPGLQDXGRAERPELGEQATEAALLKAPAESVRQEHRSTNTPQTRSCCPQYFPRAGCLPSRGHDVEPQHEAGDGPCRGIRNGXKLLSSFFGQQVRTXXRCSELTPKQEFFKGSESSNRTSGGLFGVVPGAAETGDVCVYTFKELEGQTSDEEGSRLENDFLEITDEDKKKSTKDRYDKYKEVGEHPPLSSSPVEHEGVLKGQKSYRCDECGKAFNRSSHLIGHQRIHTGEKPYECNECGKTFRQTSQLIVHLRTHTGEKPYECSECGKAYRHSSHLIQHQRLHNGEKPYKCNECAKAFTQSSRLTDHQRTHTGEKPYECNECGEAFIRSKSLARHQVLHTGKKPYKCNECGRAFCSNRNLIDHQRIHTGEKPYECSECGKAFSRSSGLISHHRVHTGEKPYSCIECGKAFNQNSQLIEHQRMHRGKKVYKCKECGKAFGLSKCLIRHQRLHTGEKPYKCNECGKSFNQNSHLIIHQRIHTGEKPYECNECGKVFSYSSSLMVHQRTHTGEKPYKCNDCGKAFSDSSQLIVHQRVHTGEKPYECSECGKAFSQRSTFNHHQRTHTGEKSSGLACQEGNKEISKGPQKPPGYRLCPLQAVGGGEFGPTRVHISFSLSDLKQIKVFFPGGPLMLEKQKKKSPNPYAMRLSKSLCQYRKPDGSGIVSLKIDWIIERYQLPQSYQRMPDFRRRFLQVCVNEINSRTPMRLSYIEKKKGRQTTHIVFSFRDITSMTTG

SEQ ID NO: 37639 - protein, 532 aa, Homo sapiens
  DOMAIN (109)..(126): Zinc finger C2H2 type, domain proteins. domain identified by eMATRIX, accession number BL00028, p-value=8.412e-14, raw score of 16.07
  DOMAIN (51)..(506): Zinc finger, C2H2 type domain identified by PFam, accession name zf-C2H2, E-value=2e-125, PFam score of 430.1
MARRVRPGAGGPSPRGPLRNVGAADRSVEATGLAETKQGETERIHTGEKPYECQECGNTFSQSSNLIVHQGIHTGEKSFECGKCGKAFSRSSGLTVPQRIHTGEKPFECNECGKAFSCSSYLIVHQRIHTGEKPYQCNECERAFGQSSHLILHQTTHAQKKPQLATWRIHTGEKPYECNECGKTFRQTSQLIVHLRTHTGEKPYECSECGKAYRHSSHLIQHQRLHNGEKPYKCNECAKAFTQSSRLTDHQRTHTGEKPYECNECGEAFIRSKSKARHQVLHTGKKPYKCNECGRAFCSNRNLIDHQRIHTGEKPYECSECGKAFSRSKCLIRHQSLHTGEKPYKCSECGKAFNQNSQLIEHERIHTGEKPFECSECGKAFGLSKCLIRHQRLHTGEKPYKCNECGKSFNQNSHLIIHQRIHTGEKPYECNECGKVFSYSSSLMVHQRTHTGEKPYKCNDCGKAFSDSSQLIVHQRVHTGEKPYECSECGKAFSQRSTFNHHQRTHTGEKVLSAALVSFLRYGSLETESKDL

SEQ ID NO: 37640 - protein, 1131 aa, Homo sapiens
MAHAGGGSGGSGAGGPAGRGLSGARWGRSGSAGHEKLPVHVEDALTYLDQVKIRFGSDPATYNGFLEIMKEFKSQSIDTPGVIRRVSQLFHEHPDLIVGFNAFLPLGYRIDIPKNGKLNIQSPLTSQENSHNHGDGAEDFKQQVPYKEDKPQVPLESDSVEFNNAISYVNKIKTRFLDHPEIYRSFLEILHTYQKEQLNTRGRPFRGMSEEEVFTEVANLFRGQEDLLSEFGQFLPEAKRSLFTGNGPCEMHSVQKNEHDKTPEHSRKRSRPSLLRPVSAPAKKKMKLRGTKDLSIAAVGKYGTLQEFSFFDKVRRVLKSQEVYENFLRCIALFNQELVSGSELLQLVSPFLGKFPELFAQFKSFLGVKELSFAPPMSDRSGDGISREIDYASCKRIGSSYRALPKTYQQPKCSGRTAICKEVLNDTWVSFPSWSEDSTFVSSKKTPYEEQLHRCEDERFELDVVLETNLATIRVLESVQKKLSRMAPEDQEKFRLDDSLGGTSEVIQRRAIYRIYGDKAPEIIESLKKNPVTAVPVVLKRLKAKEEEWREAQQGFNKIWREQYEKAYLKSLDHQAVNFKQNDTKALRSKSLLNEIESVYDEHQEQHSEGRGSAPPSEAHLIFVYEDRQILEDAAALISYYVKRQPAIQKEDQGTIHQLLHQFVPSLFFSQQLDLGASEESADEDRDSPQGQTTDPSERKKPAPGPHSSPPEEKGAFGDAPATEQPPLPPPAPHKPLDDVYSLFFANNNWYFFLRLHQTLCSRLLKIYRQAQKQLLEYRTEKEREKLLCEGRREKGSDPAMELRLKQPSEVELEEYYPAFLDMVRSLLEGSIDPTQYEDTLREMFTIHAYVGFTMDKLVQNIARQLHHLVSDDVCLKVVELYLNEKKRGAAGGNLSSRCVRAARETSYQWKAERCMADENCFKVMFLQRKGQVIMTIELLDTEEAQTEDPVEVQHLARYVEQYVGTEGASSSPTEGFLLKPVFLQRNLKKFRRRWQSEQARALRGEARSSWKRLVGVESACDVDCRFKLSTHKMVFIVNSEDYMYRRGTLCRAKQVQPLVLLRHHQHFEEWHSRWLEDNVTVEAASLVQDWLMGEEDEDMVPCKTLCETVHVHGLPVTRYRVQYSRRPASP

SEQ ID NO: 37641 - protein, 246 aa, Homo sapiens
  DOMAIN (13)..(37): Alpha-2-macroglobulin family thiolester region proteins domain identified by eMATRIX, accession number BL00477K, p-value= 2.161e-11, raw score of 17.42
MATIGGWLHAGSSNMAVLEVPLLSGFRADIESLEQVRQRRHGLSEAELKDVLSLDDEVLQDVYRDWTPPSKELLRFPPLLWVRLRRDLGYYLARRPVDGFTLLAIAHSRKFYTKLPPLQNLKAIAVRVLRISIVEFAEYRFPVIRLLDVVLETNLATIRVLESVQKKLSRMAPEDQEKFRLDDSLGGTSEVIQRRAIYRIYGDKAPEIIESLKKNPVTAVPVVLKREPLESSLVLFVNRCRLQGGR

SEQ ID NO: 37642 - protein, 133 aa, Homo sapiens
MEHSGVTKANCSPDGLNQASHLSLLCSWDYRCFCGRLVKQHACFTASLAMKYSDVKLGDHFNQAIEEWSVEKHTEQSPTDAYGVINFQGGSHSYRAKVRKQKEALKLAQGCTHSKQQSWDPNSDQSDSRICTI

SEQ ID NO: 37643 - protein, 73 aa, Homo sapiens
FTIMFRPKVMAPNRLSAASDCCQRGGNQWNTRALPPPQTAHRNYTDFVHEHNVKNAGIRHDVHFPGHTAMTEI

SEQ ID NO: 37644 - protein, 346 aa, Homo sapiens
  DOMAIN (9)..(49): Band 41 family domain proteins. domain identified by eMATRIX, accession number BL00660B, p-value=4.800e-27, raw score of 17.33
  DOMAIN (1)..(108): FERM domain (Band 4.1 family) domain identified by PFam, accession name Band_41, E-value=1.9e-46, PFam score of 146.8
NNLREELTRYLFVLQLKQDILSGKLDCPFDTAVQLAAYNLQAELGDYDLAEHSPELVSEFRFVPIQTEEMELAIFEKWKEYRGQTPAQAETNYLNKAKWLEMYGVDMHVVKARDGNDYSLGLTPTGVLVFEGDTKIGLFFWPKITRLDFKKNELTLVVVEDDDQGKEQEHTFVFRLDHPKACKHLWKCAVEHHAFFRLRGPVQKSSHRSGFIRLGSRFRYSGKTEYQPTKTNKARRSTSFERRPSKRYSRRTLQMKACATKPEELSVHNNVSTQSNGSQQAWGMRSALPVSPSISSAPVPVEIENLPQSPGTDQHDRKWLSAASDCCQRGGKPEEHKGLAPTPDRT

SEQ ID NO: 37645 - protein, 155 aa, Homo sapiens
MRRCVSAGGVELEEYYPAFLDMVRSMLEGSIDPTQYEDTLREMFTIHAYVGFTMDKLVQNIARQINAWNLETAEPVFHILGDASDPWMCMAVLASQATLLTVSRDGVVSLWSSATGKLQGKQHMSSIKEETPTCAVSVQKQGKLVTGFSNGSISL

SEQ ID NO: 37646 - protein, 96 aa, Homo sapiens
RECYEAFLDIVRSLLKGSIDPTQYKDTIREMFTIHAYVGFTMDKLVQSIARQVSRAGVGPALRTAEMALPSFHSPLGRGPVVSTANLSCFFLIETK

SEQ ID NO: 37647 - protein, 1554 aa, Homo sapiens
  DOMAIN (1484)..(1498): PROTEIN SH3 DOMAIN REPEAT PRESYNA domain identified by eMATRIX, accession number PD00289, p-value=1.000e-14, raw score of 9.97
  DOMAIN (136)..(1521): PDZ domain (Also known as DHR or GLGF) domain identified by PFam, accession name PDZ, E-value=5.4e-129, PFam score of 441.9
FKMPENPATDKLQVLQVLDRLKMKLQEKGDTSQNEKLSMFYETLKSPLFNQILTLQQSIKQLKGQLNHIPSDCSANFDFSRKGLLVFTDGSITNGNVHRPSNNSTVSGLFPWTPKLGNEDFNSVIQQMAQGRQIEYIDIERPSTGGLGFSVVALRSQNLGKVDIFVKDVQPGSVADRDQRLKENDQILAINHTPLDQNISHQQAIALLQQTTGSLRLIVAREPVHTKSSTSSSLNDTTLPETVCWGHVEEVELINDGSGLGFGIVGGKTSGVVVRTIVPGGLADRDGRLQTGDHILKIGGTNVQGMTSEQVAQVLRNCGNSVRMLVARDPAGDISVTPPAPAALPVALPTVASKGPGSDSSLFETYNVELVRKDGQSLGIRIVGYVGTSHTGEASGIYVKSIIPGSAAYHNGHIQVNDKIVAVDGVNIQGFANHDVVEVLRNAGQVVHLTLVRRKTSSSTSPLEPPSDRGTVVEPLKPPALFLTGAVETETNVDGEDEEIKERIDTLKNDNIQALEKLEKVPDSPENELKSRWENLLGPDYEVMVATLDTQIADDAELQKYSKLLPIHTLRLGVEVDSFDGHHYISSIVSGGPVDTLGLLQPEDELLEVNGMQLYGKSRREAVSFLKEVPPPFTLVCCRRLFDDEASVDEPRRTETSLPETEVDHNMDVNTEEDDDGELALWSPEVKIVELVKDCKGLGFSILDYQDPLDPTRSVIVIRSLVADGVAERSGGLLPGDRLVSVNEYRLDNTSLAEAVEILKAVPPGLVHLGICKPLVEDNEEESCYILHSSSNEDKTEFSGTIHDINSSLILEAPKGFRDEPYFKEELVDEPFLDLGKSFHSQQKEIEQSKEAWEMHEFLTPRLQEMDEEREMLVDEEYELYQDPSPSMELYPLSHIQEATPVPSVNELHFGTQWLHDNEPSESQEARTGRTVYSQEAQPYGYCPENVMKENFVMESLPSVPSTEGNSQQGRFDDLENLNSLAKTSLDLGMIPNDVQGPSLLIDLPVVAQRREQEDLPLYQHQATRVISKASAYTGMLSSRYATDTCELPEREEGEGEETPNFSHWGPPRIVEIFREPNVSLGISIVGGQTVIKRLKNGEELKGIFIKQVLEDSPAGKTNALKTGDKILEVSGVDLQNASHSEAVEAIKNAGNPVVFIVQSLSSTPRVIPNVHNKANKITGNQNQDTQEKKEKRQGTAPPPMKLPPPYKALTDDSDENEEEDAFTDQKIRQRYADLPGELHIIELEKDKNGLGLSLAGNKDRSRMSIFVVGINPEGPAAADGRMRIGDELLEINNQILYGRSHQNASAIIKTAPSKVKLVFIRNEDAVNQMAVTPFPVPSSSPSSIEDQSGTEPISSEEDGSLEVGIKQLPESESFKLAVSQMKQQKYPTKVSFSSQEIPLAPASSYHSTDADFTGYGGFQAPLSVDPATCPIVPGQEMIIEISKGRSGLGLSIVGGKDTPLNAIVIHEVYEEGAAARDGRLWAGDQILEVNGVDLRNSSHEEAITALRQTPQKVRLVVYRDEAHYRDEENLEIFPVDLQKKAGRGLGLSIVGKR

SEQ ID NO: 37648 - protein, 1526 aa, Homo sapiens; identical to SEQ ID NO: 36475
  DOMAIN (1124)..(1138): PROTEIN SH3 DOMAIN REPEAT PRESYNA domain identified by eMATRIX, accession number PD00289, p-value=8.650e-11, raw score of 9.97
  DOMAIN (136)..(1493): PDZ domain (Also known as DHR or GLGF) domain identified by PFam, accession name PDZ, E-value=1.2e-105, PFam score of 364.4

SEQ ID NO: 37649 - protein, 1584 aa, Homo sapiens
  DOMAIN (1514)..(1528): PROTEIN SH3 DOMAIN REPEAT PRESYNA domain identified by eMATRIX, accession number PD00289, p-value=1.000e-14, raw score of 9.97
  DOMAIN (136)..(1551): PDZ domain (Also known as DHR or GLGF) domain identified by PFam, accession name PDZ, E-value=1.1e-127, PFam score of 437.6
FKMPENPATDKLQVLQVLDRLKMKLQEKGDTSQNEKLSMFYETLKSPLFNQILTLQQSIKQLKGQLNHIPSDCSANFDFSRKGLLVFTDGSITNGNVHRPSNNSTVSGLFPWTPKLGNEDFNSVIQQMAQGRQIEYIDIERPSTGGLGFSVVALRSQNLGKVDIFVKDVQPGSVADRDQRLKENDQILAINHTPLDQNISHQQAIALLQQTTGSLRLIVAREPVHTKSSTSSSLNDTTLPETVCWGHVEEVELINDGSGLGFGIVGGKTSGVVVRTIVPGGLADRDGRLQTGDHILKIGGTNVQGMTSEQVAQVLRNCGNSVRMLVARDPAGDISVTPPAPAALPVALPTVASKGPGSDSSLFETYNVELVRKDGQSLGIRIVGYVGTSHTGEASGIYVKSIIPGSAAYHNGHIQVNDKIVAVDGVNIQGFANHDVVEVLRNAGQVVHLTLVRRKTSSSTSPLEPPSDRGTVVEPLKPPALFLTGAVETETNVDGEDEEIKERIDTLKNDNIQALEKLEKVPDSPENELKSRWENLLGPDYEVMVATLDTQIADDAELQKYSKLLPIHTLRLGVEVDSFDGHHYISSIVSGGPVDTLGLLQPEDELLEVNGMQLYGKSRREAVSFLKEVPPPFTLVCCRRLFDDEASVDEPRRTETSLPETEVDHNMDVNTEEDDDGELALWSPEVKIVELVKDCKGLGFSILDYQDPLDPTRSVIVIRSLVADGVAERSGGLLPGDRLVSVNEYRLDNTSLAEAVEILKAVPPGLVHLGICKPLVEDNEEESCYILHSSSNEDKTEFSGTIHDINSSLILEAPKGFRDEPYFKEELVDEPFLDLGKSFHSQQKEIEQSKEAWEMHEFLTPRLQEMDEEREMLVDEEYELYQDPSPSMELYPLSHIQEATPVPSVNELHFGTQWLHDNEPSESQEARTGRTVYSQEAQPYGYCPENVMKENFVMESLPSVPSTEGNSQQGRFDDLENLNSLAKTSLDLGMIPNDVQGPSLLIDLPVVAQRREQEDLPLYQHQATRVISKASAYTGMLSSRYATDTCELPEREEGEGEETPNFSHWGPPRIVEIFREPNVSLGISIVGGQTVIKRLKNGEELKGIFIKQVLEDSPAGKTNALKTGDKILEVSGVDLQNASHSEAVEAIKNAGNPVVFIVQSLSSTPRVIPNVHNKANKITGNQNQDTQEKKEKRQGTAPPPMKLPPPYKALTDDSDENEEEDAFTDQKIRQRYADLPGELHIIELEKDKNGLGLSLAGNKDRSRMSIFVVGINPEGPAAADGRMRIGDELLEINNQILYGRSHQNASAIIKTAPSKVKLVFIRNEDAVNQMAVTPFPVPSSSPSSIEDQSGTEPISSEEDGSLEVGIKQLPESESFKLAVSQMKQQKYPTKVSFSSQEIPLAPASSYHSTDADFTGYGGFQAPLSVDPATCPIVPGQEMIIEISKGRSGLGLSIVGGKDTPLFWRLGSPRAWSQHLVRAFMLHHPVTEVEGQNAIVIHEVYEEGAAARDGRLWAGDQILEVNGVDLRNSSHEEAITALRQTPQKVRLVVYRDEAHYRDEENLEIFPVDLQKKAGRGLGLSIVGKR

SEQ ID NO: 37650 - protein, 112 aa, Homo sapiens
MPIEAFWISDFSFWFWDAQLDQSGTEPISSEEDGSVEVGIKQLPESESFKLVLENISCDCHRLHILESELILAEGKECFSKSGNCNGPLMNKPYMGPETPGMKSTSSLFTRD

SEQ ID NO: 37651 - protein, 147 aa, Homo sapiens
MCREEPADRSGWSISYEGSVMGKEAKEEVGARSFITQGLEGKGRIKPKDNRGRFVVVEKLLFTFALPPCDPSEYFRLALSKLQSCDLFDEFDKRGEQSPSLSKYECGHKAVEGDKAKHLALALHCHLESKRSIETSCHMKRFSAFWF

SEQ ID NO: 37652 - protein, 47 aa, Homo sapiens
LPHTHLPLPISRRGEQSPSLSKYECGHKAVEGDQGLTTFALGSCIVT

SEQ ID NO: 37653 - protein, 153 aa, Homo sapiens; identical to SEQ ID NO: 35668
  DOMAIN (69)..(80): RNase H domain identified by eMATRIX, accession number PF00075F, p-value=8.159e-09, raw score of 12.87
  DOMAIN (19)..(144): RNase H domain identified by PFam, accession name rnaseH, E- value=9.8e-08, PFam score of 33.0

SEQ ID NO: 37654 - protein, 187 aa, Homo sapiens
  DOMAIN (9)..(20): RNase H domain identified by eMATRIX, accession number PF00075B, p-value=7.923e-09, raw score of 12.56
  DOMAIN (42)..(148): RNase H domain identified by PFam, accession name rnaseH, E- value=2.2e-12, PFam score of 54.6
  misc_feature (1)...(187): Xaa = X or * as defined in Table 2
FQKIGLXXFIDLKDGLFTIPLAEQDCEWFAFTIPVVNNLQPAKRFHCFTDGSNNGKASYSGSKNKVFQMSYTSAQKAELVAVIELIENAQLRFHTDEQLMTLFTQLQTAVRSRMHPFYITHIRAHTPLPGPLTEGNQMADRLVANAISSARHFQQHLLTHSHPPGDRSRSCHRWRKKLEESGTSSHE

SEQ ID NO: 37655 - protein, 470 aa, Homo sapiens
  DOMAIN (244)..(255): PROTEASE POLYPROTEIN HYDROLASE ASP domain identified by eMATRIX, accession number PD00302A, p-value=3.571e-10, raw score of 6.33
  DOMAIN (93)..(213): dUTPase domain identified by PFam, accession name dUTPase, E- value=3e-32, PFam score of 120.6
MQDDAIEQLRGVCIRAWEKITSGGEQYLSFSAIKQGPREPYINFIARFQESLRKMIADLAAQDIVLQLLAFDNANPNCQAALRPIRGKAHLVDYIKACDGIRASSATVDLCCTKAVSLLPGEPLQKVPTGVCGPLPAGTIGLLLGRSSLGLKGIQIHTGVIDSNYNGEIQIVISTSVSWKAEPGERIAQLLIVPYVGMGKSEIKRTGGFGSTNKQGKAAYWVNQITDKHPTCETTIQGKKFKGLVDTGVDISIISLQHWLSTWRIQPTQFNIGPLTEGNQMADHLVANAISNARHFHNLTHVNASGLKHRYSITWKEAKNIIQRCPTCQMVHSSSFRGGVNPRGLEPNSLWQMDVTHIPLFGRLAYVHKRRRIRGGGGGEGEGEGEGEGEEEEEEEEEEEEEEEEEEEEEEEQEQEQEEQEQEEQEQEEQEQEERRRKDTEELSYSLPLNRTQPCWHPDFGLPATRTVRR

SEQ ID NO: 37656 - protein, 580 aa, Homo sapiens
  DOMAIN (93)..(104): dUTPase domain identified by eMATRIX, accession number PF00692B, p-value=5.891e-09, raw score of 8.14
  DOMAIN (27)..(154): dUTPase domain identified by PFam, accession name dUTPase, E- value=4.2e-26, PFam score of 100.1
MGQVWALVHSTLETFHTDEEEGEYNEVTEQVCLPAKAGSAAVDLCCTKAVSLLPGESPQKVPTGAGGPLPAGMTGLLLGRSSLNIKAVQVQTGVTDSDYNGEIQIVTSTSVPWKAKPGDHIAQLLIVPKKFEGLKEPLQVERQSSCQGLGYPFLMAAIVKPPEPIPLKWLTDKPIWTEQWPLSKEKLEALEDLITQQLKKGHIAPTFSPWNSPVFIIKKKSAEQDCEWFVFTILAVNNLQLKPAKRFHWKVLPQGPNQQPIWIPSRYLKPYHKPDAKEEIPEGSQGFPVAAMSRLTLRRTPTVTSNTHRTQPPTWGQIEKLPQMAEENLRKAGQPVTISNWILPRITKFKPIEGAENVFTDGSSNGKASYSGSKGPLTEGNQMADRLVAKVISNARHFHNLTHVNASGLKRRYSITWKEAKAIIQRCPTCQVMLSAAEQHLQKSAAKTEAEKLVWWRDPITKSREIGKIITWGRGYACVSPGPNQQPIWIPSKHLKPYHKPDAGEKIPGESRGPPVAAMSRLTLRRMPTVMSNTHRTQPPTWGQIKKLSQMAEENLRKAGQPVTMNNLMIAVITTAFNKG

SEQ ID NO: 37657 - protein, 413 aa, Homo sapiens
  DOMAIN (284)..(323): Integrase Zinc binding domain identified by PFam, accession name Integrase_Zn, E-value=4.5e-14, PFam score of 50.8
MGQVWVLVHSTLEPFHTNNEEEAKYNEVTEEVTEQVCLPAKANAAKEKEVHPYPSAPLNYFEEKEWPDPPDLSFLEDTGGDPSLTSHWQLTKEAEAELQLIEKQVHKAQINRIDPEKIPDLLIFSTQHSTGVIVQEQGLVEWLFLPHTNSRTLTPYVDQIATMIGNGRTQIVKLHGYYPGKIIVPLMKAQIQQAFINSLTWQTHLADFVVILDNHFPKMKLFQFLKLTNWILPKITKFKPIKGAENVFTDGSSNGKASYSELKGLLTEGNQVAEHLVATAISNARHFHNLTHVNAAGLKRRYSITWKEAKAIIQQCPTCQMLYSSSFTGPNQQPIWVPSRHLKPYHEPDAKEETLGGTREPPSCSHVKTDAEEDPNCHKQHLLNTANYLRTDQEAVTDSRRKPEESRTTSHHE

SEQ ID NO: 37658 - protein, 259 aa, Homo sapiens
  DOMAIN (183)..(201): RNase H domain identified by eMATRIX, accession number PF00075J, p-value=4.892e-17, raw score of 15.78
  DOMAIN (123)..(246): Integrase core domain identified by PFam, accession name rve, E-value=4.1e-16, PFam score of 59.8
MPQNSLEECALELGKKSLQENVNNFPKTKLFQFLKLTNWILPKITKFKPIEGAENVFTDGSSNGKASYFGLKGKVFQTPYTAAQKVELVAVIEVLTAFDMPVSMISDSTYVVHSTQLTENAQLRLHTDEQLMTLFSQLQTAVRCFAVMGIPASTTTDNAPGYTSQALATFFSMWNIKRITGIPYNSQGQAIVERMNLSLKQQLQKQTEGDREYGTPQMQLNLALLTLNFLSLPKGQMLSAAEQHLQKPAVKTEAEQLIW

SEQ ID NO: 37659 - protein, 435 aa, Homo sapiens
  DOMAIN (275)..(286): RNase H domain identified by eMATRIX, accession number PF00075F, p-value=8.159e-09, raw score of 12.87
  DOMAIN (121)..(232): gag gene protein p24 domain identified by PFam, accession name gag_p24, E-value=4.7e-34, PFam score of 126.5
MGISCPGSSKMLNSRALPVLKLTQGALRDCKERANYTNFNIYKAVESQGKFVCVLYNGQQSPEYVMIPCTSVSPTGQEVPEDRGMRMVMKNKPNKPSKMQSLKSSKHLTNSVIVIAVGIFFSVTLQARDPQLDDAIEQLRGVCIRAWEKITSGGEQYPSFSAIKQGPKEPYIDFIARLQESLKKMIADSAAQDIVLQLLAFDNANPDCQAALRPIRGKAHLVDCIKACDDIGDGSSNGKASYFGSKSKVFQTSYTSAQKAELVAVIEVLTAFDMPINVISDSSYMVYSTQLIENAQLRFHTDEQLMTLFTQLQTAFRSTMHPFYITHIRAHTPLPGPLTEGNQMADRLVANAISNARHFHNLTHVNASGLKRRYNITWKEAKAIIQRCPTCQMVHSSSFTGGVNPRGLEPNSQALAKFFSIRNIKHITDIPYNSE

SEQ ID NO: 37660 - protein, 680 aa, Homo sapiens
  DOMAIN (474)..(490): PROTEASE POLYPROTEIN HYDROLASE ASP domain identified by eMATRIX, accession number PD00302B, p-value=8.286e-15, raw score of 9.52
  DOMAIN (44)..(629): RNase H domain identified by PFam, accession name rnaseH, E- value=5e-10, PFam score of 46.8
MEEQQVIGEGNPLRRGCAIEAGGEIGVTKVQVTGEERIFLRKEKGGKDRSSNGKASYSGWKSKVFQMPYTSAQKAELVAVIEVLTAFNMPINVISDSSYVVHFTQLIENAQLRFHTDEQLMTLFTQLQTAVRKLEKQEQTHSKASRRQEITKIRAELKEIETQKTLQKINESRSWFFERINKIDRLLARLIKKKREKNLIDAIKNDKGDITTDPTEIQTTIREYYKHLYTNKLENLEEMDKFLDTYTLPRLNQEEVEFLNKPITGSEIVAIINSLPTKKSPGPDGFTAKFYQRKGRRAIPKRYLWDSGERPEAKRWYYSFQFKELVQEDVKRFTLQDCLVATKGYNDKQRKKAQLSTAIKFNSLQLVLFEKNFHAKRIVLEKSWSRQVASILGAQIQVEGSPEQRLENVELAGGHLNTLKAIPMHWPSMWPIQPTQFNIVEVGKAPEVYQSSYILHCKGPDGQPATIQPIITSVPINLWGRDLLQQWGAQVLIAEQLYSPQSRHMMHEMGHVPDRSSNGKASYSGWKSKVFQMPYTSAQKAELVAVIEVLTAFNMPINVISDSSYVVHFTQLIENAQLRFHTDEQLMTLFTQLQTAVRSQNQESIWIPSRLLKPYHKPDAKEEALGVSQGSPSCSHVEIDNPNCHEQHPSNTATHLGTDQEAVTDGGRKPEESRTTTHYE

SEQ ID NO: 37661 - protein, 632 aa, Homo sapiens
  DOMAIN (177)..(188): PROTEASE POLYPROTEIN HYDROLASE ASP domain identified by eMATRIX, accession number PD00302A, p-value=4.484e-11, raw score of 6.33
  DOMAIN (26)..(146): dUTPase domain identified by PFam, accession name dUTPase, E- value=2.2e-30, PFam score of 114.4
MAGAPPPAWLPHCSSISDCCARNERGSVGVAPSKPARSAAVDLCCTKAVSLLPGEPPQKVPARVCGPLPAGTVGLLLGRSSLSLKEVQIHTGVIDSDYKVEIQIVVSTSVPWKAEPGERIAQLLVVPYVGTGKSEIKQTEGFGSTNKQGKAAYWVNQITDKHLTCEITIQGKKFKGLVDTGADVSIISLQHWPSMWPIQSTQFNIVGVDGSSNGKASYFGSKCKVFQMPYTSAQKVELVAIIEVLTTFDMPINVISDSSYVVHSTQLIENAQLQFHTDEQLMTLFTQLQTAVRSRMHPFYITHIRARHTPLPGPLTEGNQMADCLVATAVSNARHFHNLTHVNASGLKCRYSNTWKAAKAIIQRRPTCQMVHSSSFTGGVNPQGLEPNSLWQMDVTHVPSFGRLAYVHVCVDTFSHFVWATCQSGESSACVKHHLLQGFVVMGIPASIKTDNVPGYTSQALATFFSMLNIKRITDIPYNSQDVEADANADVGVDVDADADVDAEEEVFTDADADAEVDVDEDADAERLRCNADEDSDLDLDVDAEMDADVDTNLDVDAAVDVDVDADADVDADTDVDVDTGLNLEADLDLDVDADVDTDADVDRDADVEVAVDADATVNADVDYVDVDTDSD

SEQ ID NO: 37662 - protein, 188 aa, Homo sapiens
SRAEEFARAHSPASLSFASYRQVASFGSAAPPRQFDASQFSQGPVPGTCADWIPQSASCPTGPPQNPPSAPYCGIVFSGSSLSSAQSAPLQHPGGFTTRPSAGTFPELDSPQLHFSLPTDPDPIRGFGSYHPSAYSPFHFQPSAASLTANLRLPMASALPEALCSQSRTTPVDLCLLEESVGSLEGSR

SEQ ID NO: 37663 - protein, 332 aa, Homo sapiens
MKCYTRIEKYRYEIIRRDLLLNQCIERRIKIKMMISIKQNCRKRRRNIRQTQTTANSIPSELHQLICSRSRNIKALSLPPCAPEMWPKHIFGHELGQPKAELDFWEFLPGFFFDSDLGQSGAELLSIDVYQKSVKCRTKLRTLKILGCLCGHQHPDPMAPIASSTDTISGPPQNPSSAPYCGIALSGSSLSSTQSAPLQPVGGRTTRPSTGTYPELDSPQLHFSLPTDPDPIRVGMRGKHTSGTLNKAETSEDFQQSTPTQDNLRTLTRSSHPEARIDNNMGQAFQHERVQRAMTMGWASVRIQSLAAARGVECYADTQDTKREMSHLERRN

SEQ ID NO: 37664 - protein, 80 aa, Homo sapiens
KLPTFLSVVTVRRPLVVTIMSILLGIVRFLSVLRVVVTPGSSMPLIGSIVTWPPPSVVPASELSVVLQPQRFEAAVLLNV

SEQ ID NO: 37665 - protein, 198 aa, Homo sapiens
MGFYHVGQVGLERLTSEGSVGSDRGSIVDTEEEKEEESSSPRGEVRTRYFTRGEDFDVGAVGKEKAWPAASSLAAKSAAVKELLPQIFGNFRMTDTAKAVPNFEEMFASRFTEDDEEYQEYLKRPPESSPIVEEWNSRAGGNQRNRDNRLQDSRQFRGRDGRWGWPSDNRSNQWRGQSCGNNYPQHRQEPYYPDQYGH

SEQ ID NO: 37666 - protein, 123 aa, Homo sapiens
MTQQKTPQTFPHGNRVNAFTKSCPTFLSVVTVRRPLVVTHKCPKLLGIVRFLSVLRGSCYPRDRPCHWIGIDCQLGHPHPVVPASELSVVLQPIASVSLVPTQLCYSIPQQLEETQEGRFRYS

SEQ ID NO: 37667 - protein, 412 aa, Homo sapiens
  DOMAIN (62)..(97): Matrix protein (MA) p15. domain identified by eMATRIX, accession number PF01140D, p-value=9.100e-10, raw score of 15.54
MNQCVTAMSHLISSNGRYLYCYQAIAFAKIRMALPGPRVCPDIVQKKKKKEEEEEEGEGEGEGEEEEEEEEEEEEEEEEEEEEEEEKKKRNGPAKLFFMVLVCLRDQNADSVYLPGNCKTNQSEDQVIEKKKLAQPKISFNPGVPNPQARDCYRDLWPARNQAAQQEVSGGQMRLSSCKKTSSWLPLILHYAALLFRARCLPACAGTRGAERLKPPVRDALSRSPALRCALQEAGRDFGAASSACANSDISDLISFFTSQNIMVTMINDSDYVSVAPHSAALNVMHSEKIKAYTQLKLSGLLPSAYWIGQAVVDIPLFFIILILMLGSLLAFHYGLYFYTVKFLAVLLNILLVLWENELQIDFQATIHLPAVDSARLCREMNCAKHLWLPCEKGDAVLHQGAVYPLCVSGTE

SEQ ID NO: 37668 - protein, 267 aa, Homo sapiens
  DOMAIN (102)..(133): Protein kinases ATP-binding region proteins domain identified by eMATRIX, accession number BL00107A, p-value=1.947e-18, raw score of 18.39
  DOMAIN (4)..(247): Eukaryotic protein kinase domain identified by PFam, accession name pkinase, E-value=7.2e-54, PFam score of 192.4
EKMRHVPSGQIMAVKRIRATVNSQEQKRLLMDLDISMRTVDCPFTVTFYGALFREGDVWICMELMDTSLDKFYKQVIDKGQTIPEDILGKIAVSIVKALEHLHSKLSVIHRDVKPSNVLINALGQVKMCDFGISGYLVDSVAKTIDAGCKPYMAPERINPELNQKGYSVKSDIWSLGITMIELAILRFPYDSWGTPFQQLKQVVEEPSPQLPADKFSAEFVDFTSQCLKKNSKERPTYPELMQHPFFTLHESKGTDVASFVKLILGD

SEQ ID NO: 37669 - protein, 600 aa, Homo sapiens
MINDSDYVSVAPHSAALNVVHSEKEITDIVFKIELYFQAALLGIIVTAMPPYFAMENAENHKIKAYTQLKLSGLLPSAYWIGQAVVDIPLFFIILILMLGSLLAFHYGLYFYTVKFLAVETSRKDKCRDRMPTGDCQRPGRVKNEEKLLTSLLIRPHTPTWEVLPLRVLVVRGVSSSKTGNAADAEFSKRPETHDILKKMDFTLVKMVLVCLRDQNADSVYLPGNCKTNQSEDQVIEKKKLAQPKMSAGAAVSNTSPITVKESANPDQLAAEIGRNKSPLKEKRMKTGPVTALILSIASGPRAAGYVHRAGCWSASPGTILGVASPQGRTDFNKKRIPYENSNLSSYVHSDIHTNTNCGPNTEDFQLSGNELWIQYSDIQGRNREVIKYEVVADEVRSVFQGGRPSGLRIQGEARSREQDLEVAIMRGKIQRSGNSEVLLEQQHTSREKPLWEASTFGRCQQRPRGESRCLHPPGSKEAAPPFSHQLVLQQRCKLQACNLHASGVSLDRCSRWTFRESRWKCTPCKTDWKVIFPPVATLGKAVLQLHDGPGLAAKSSKLGTEYLSAQTSFLRRARRPLGNVVLRRSPRGSDLRKRGRPGR

SEQ ID NO: 37670 - protein, 166 aa, Homo sapiens
MTTSDPRPTPDNSLETQRGGSHKEATRFYGIKVLQNQGSRQNRQRLNCDMGGYTALGTVASGILDDTWCQSGLGKFLKFSEPVTPGPWASVFLSEKKGEELCPRTTPVGDGAKTEGKQVWFLPSKGLFILKSTVIHGFVPFANPGTLLDTNGLYDEDVCTPDNLQK

SEQ ID NO: 37671 - protein, 1132 aa, Homo sapiens
  DOMAIN (683)..(719): Synapsins proteins domain identified by eMATRIX, accession number BL00415P, p-value=9.814e-09, raw score of 2.37
MDCSEKWRDPLDAVCVLPATEEPVVQGSALYLVAHHDDYCVWYSLQRTSPEKNERVRQMRPVCDCQAHLLWNRPRFGEINDQDRTDRYVQALRTEIPLTLKGAKLQREEKEGDMPCRANILVTELFDTELIGEGALPSYEHAHRHLVETSLGEQVIVPPVDVESCPGAPSVCDIQLNQVSPADFTVLSDVLPMFSIDFSKQVSSSAACHSRRFEPLTSGRAQVVLSWWDIEMDPEGKIKCTMAPFWAHSDPEEMQGFVKRRIEDVEETEDTYPSHLDPPRRAVTADLKGDEQFTGVPGTISRAHLTATEQPRTGFMSYLILNITNFFVVFVSVNANYYFQHVHSPLCFVYECQPLVPQALDVKRTTLLSPRPQYICWLGMEGSSPSRLPAQMTNSDPRPTPDNSLKTHRGAPMTNSDPRPTPDNSLETQRGGSHKEATRFYGIKVLQNQGSSCLSALHCVSWALIFPCYWLVDRLAASFIPTTYEKRQRADNPCCLQLLCTALFTPIYLALLVASLPFAFLGFLFWSPLQSARRPYIYSRLEDKGLAGGAALLSEWKGTGPGKSFCFATANVCLLPDSLARVNNLFNTQARAKEIGQRIRNGAARPQIKIYIDSPTNTSISAASFSSLVSPQGGDGVARAVPGSIKRTASVEYKGDGGRHPGDEAANGPASGDPVDSSSPEDACIVRIGGEEGGRPPEADDPVPGGQARNGAGGGPRGQTPNHNQQDGDSGSLGSPSASRESLVKGRAGPDTSASGEPGANSKLLYKASVVKKAAARRRRHPDEAFDHEVSAFFPANLDFLCLQEVFDKRAATKLKEQLHGYFEYILYDVGVYGCQGCCSFKCLNSGLLFASRYPIMDVAYHCYPNKCNDDALASKGALFLKSLILDTSSVDSLCPPGLKGTAFRVIACFCKRNTRLCGSQGHEPGINEAQQIIKWILVQVGSTPQDQRIVGYIACTHLHAPQEDSAIRCGQLDLLQDWLADFRKSTSSSSAANPEELVAFDVVCGDFNFDNCSSDDKLEQQHSLFTHYRDPCRLGPGEEKPWAIGTLLDTNGLYDEDVCTPDNLQKVLESEEGRREYLAFPTSKSSGQKGRKELLKGNGRRIDYMLHAEEGCAQTGRPRWKNSVLSPSCPA

SEQ ID NO: 37672 - protein, 229 aa, Homo sapiens
  DOMAIN (89)..(131): Chloramphenicol acetyltransferase proteins domain identified by eMATRIX, accession number BL00100C, p-value=1.000e-39, raw score of 23.60
  DOMAIN (45)..(219): Chloramphenicol acetyltransferase domain identified by PFam, accession name CAT, E-value=1e-132, PFam score of 454.3
ALQNYQRYTGIQHVHRIGMAERMWCDRNRERHTVSSSGATASPIQTVQLDITAFLKTVKKNKHKFYPAFIHILARLMNAHPEFRMAMKDGELVIWDSVHPCYTVFHEQTETFSSLWSEYHDDFRQFLHIYSQDVACYGENLAYFPKGFIENMFFVSANPWVSFTSFDLNVANMDNFFAPVFTMGKYYTQGDKVLMPLAIQVHHAVCDGFHVGRMLNELQQYCDEWQGGA

SEQ ID NO: 37673 - protein, 220 aa, Homo sapiens
  DOMAIN (85)..(127): Chloramphenicol acetyltransferase proteins domain identified by eMATRIX, accession number BL00100C, p-value=8.548e-36, raw score of 23.60
  DOMAIN (81)..(215): Chloramphenicol acetyltransferase domain identified by PFam, accession name CAT, E-value=6.7e-98, PFam score of 338.7
GFADSEPTIKQDFRLLGQTSVARLLQLSQGQAVKGNQLLPVSLVKRKTTLAPNTQTASPRALADSLMQLARQVSRLESGHMAMKDGELVIWDSVHPCYAVFHEQTETFSSLWSEYHDDFRQFLHIYSQDVACYGENLAYFHKGFIENMFFVSANPWVSFTSFDLNVANMDNLFAPVFTMGKYYTQGDKVLMPLAIQVHHAVCDGFHVGRMLNELQQYCDE

SEQ ID NO: 37674 - protein, 121 aa, Homo sapiens
  DOMAIN (87)..(121): Chloramphenicol acetyltransferase domain identified by PFam, accession name CAT, E-value=1.4e-22, PFam score of 88.5
TDGLMSHQALQNFQRYTGIQHVHRIGMAERMWCDRNRERHTVSSSGGNRLPNPGPDRSVRHFPDPRFLCPSCATVTPLHELIANKYVFTMGKYYTQGDKVLMPLAIQVHHAVCDGFHVGRM

SEQ ID NO: 37675 - protein, 30 aa, Homo sapiens
  DOMAIN (3)..(30): Chloramphenicol acetyltransferase domain identified by PFam, accession name CAT, E-value=8.3e-17, PFam score of 68.3
GSMGKYYTQGDKVLMPLAIQVHHAVCDGFH

SEQ ID NO: 37676 - protein, 276 aa, Homo sapiens
  DOMAIN (15)..(27): Phage integrase family domain identified by eMATRIX, accession number PF00589C, p-value=9.609e-10, raw score of 14.62
MLYAGIPLKVLQSLMGHKSISSTEVYTKVFALDVAARHRELRMQKTYKAKATAYDMARSQNNNSEKLLVYRKLLQVLTGLYKRSNLGVRLYACCGLLLCPAYPQHFAHGYVDKIPGYPGRAGTLTGLHPMQCDNLKTCHTSHGSVMAETAVINHKKRKNSPRIVQSNDLTEAAYSLSRDQKRMLYLFVDQIRKSDGTLQEHDGICEIHVAKYAEIFGLTSAEAILRYFIKHSADMEAITNGMMNLNRQRHQHLVALRIIFAHGENGGEEVVHIGHV

SEQ ID NO: 37677 - protein, 51 aa, Homo sapiens
  DOMAIN (11)..(51): Chloramphenicol acetyltransferase domain identified by PFam, accession name CAT, E-value=8.9e-27, PFam score of 102.4
AGTPLKVLQSVANMDNFFAPVFTMGKYYTQGDKVLMPLAIQVHHAVCDGFH

SEQ ID NO: 37678 - protein, 82 aa, Homo sapiens
  misc_feature (1)...(82): Xaa = X or * as defined in Table 2
LFVSIWQVFHXGRRGFLLVRNDCVQIWCEMISHSGFDLHFSDGQXWMSISSCDFLAAXMSSFEKCLFMSFAHFLMGLFVFFL

SEQ ID NO: 37679 - protein, 243 aa, Homo sapiens
  DOMAIN (147)..(190): 1 kw MIND INHIBITOR DIVISION CONTROL domain identified by eMATRIX, accession number DM01756B, p-value=4.822e-15, raw score of 22.91
  DOMAIN (112)..(226): ParA family ATPase domain identified by PFam, accession name ParA, E-value=2.7e-28, PFam score of 107.5
MEAITNGMMNLNRQRHQHLVALRIIFAHGENGGEEVVHIGHDLALKGLRVLLVEGNDPQGTASMYHGWVPDLHIHAEDTLLPFYLGEKDDVTYAIKPTCWPGLDIIPSCLALHRIETELMGKFDEGKLPTDPHLMLRLAIETVAHDYDVIVIDSAPNLGIGTINVVCAADVLIVPTPAELFDYTSALQFFDMLRDLLKNVDLKGFEPDVRILLTKYSNSNGSQSPWMEEQIRDAWGSMVLKNV

SEQ ID NO: 37680 - protein, 258 aa, Homo sapiens
  DOMAIN (3)..(29): G-protein coupled receptors family 2 proteins domain identified by eMATRIX, accession number BL00649C, p-value=3.571e- 28, raw score of 17.82
  DOMAIN (53)..(227): Chloramphenicol acetyltransferase domain identified by PFam, accession name CAT, E-value=2.3e-127, PFam score of 436.5
VGCKAAMVFFQYCVMANFFWLLVEGLYLYTLLAVSFFSERKYFWGYILIGWGMTVQLDITAFLKTVKKNKHKFYPAFIHILARLMNAHPEFRMAMKDGELVIWDSVHPCYTVFHEQTETFSSLWSEYHDDFRQFLHIYSQDVACYGENLAYFPKGFIENMFFVSANPWVSFTSFDLNVANMDNFFAPVFTMGKYYTQGDKVLMPLAIQVHHAVCDGFHVGRMLQSVTDNPQIIRRHGSDIAEGKYDMSRLAAFLFLNV

SEQ ID NO: 37681 - protein, 172 aa, Homo sapiens
MEAITNGMMNLNRQRHQHLVALRIIFAHGSFQEDIRDTSHCLPWAAPGKSPRDQDQLTGVIVVQLLLACSWHQASPPCDLVCELCDRLPGGKYGMDPGLFKKDLLQNSPNSMFGVSNNPHGIVVPASALQQGNIAMTTVNSQVVSDNYIPSLSEDCREPNIEALNGNCCDTE

SEQ ID NO: 37682 - protein, 165 aa, Homo sapiens
  DOMAIN (121)..(165): Chloramphenicol acetyltransferase domain identified by PFam, accession name CAT, E-value=8.1e-30, PFam score of 112.5
LFQHRNRIRLRHRKLHPVPGSHIQRKNLRVDYKRTDGRMSHQPPQNQQRYTGIQHVHRIGMAERMWCDRNRERHTVSSSGGNRLPNPGPDRLVRHFPDPSFLCPSCATVTPLHELIANKYVANMDNFFAPVFTMGKYYTQGDKVLMPLAIQVHHAVCDGFHVGRM

SEQ ID NO: 37683 - protein, 378 aa, Homo sapiens
  DOMAIN (351)..(365): Phage integrase family domain identified by eMATRIX, accession number PF00589B, p-value=1.621e-11, raw score of 16.17
MEAITNGMMNLNRQRHQHLVALRIIFAHGGATQAFAKENNQKAYKETYGVSHITRHDMLQIPKQQQNEKYQVPQFDQSTIKNIESAKGLDVWDSWPLQNADGTVAEYNGYHVVFALAGSPKDADDTSIYMFYQKVGDNSIDSWKNAGRVFKDSDKFDANDPILKDQTQEWSGSATFTSDGKIRLFYTDYSGKHYGKKSLTTAQHSADMEAITNGMMNLNRQRHQHLVALRIIFAHAPENLDNSKIRPVVILFHYGESWNLLRADQRLIFAKSWPRASRYQQGHQDLFILRSDLPSQVFIRDKLMERRNRRTGRTEKARIWEVTDRTVRTWIGEAVAAAAADGVTFSVPVTPHTFRHSYAMHMLYAGIPVKGSAKPDGT

SEQ ID NO: 37684 - protein, 473 aa, Homo sapiens
  DOMAIN (105)..(143): Chloramphenicol acetyltransferase proteins domain identified by eMATRIX, accession number BL00100D, p-value=7.677e-36, raw score of 17.22
  DOMAIN (100)..(175): Chloramphenicol acetyltransferase domain identified by PFam, accession name CAT, E-value=2.3e-57, PFam score of 204.0
MPKEKNPQYKFPDIAETVEDPATPRETTSSAQKQPTITGLAARDGPQQRNPTEPPHNKTGKEGHHTPAREQAGTEAATRRKDKGAQKDTERKNKTGDGPAQQGFIENMFFVSANPWVSFTSFDLNVANMDNFFAPVFTMGKYYTQGDKVLMPLAIQVHHAVCDGFHVGRMLNELQQYCDEWQARGGFCRFRNHHQTGFSPAGANQRGPLAATLSGPGGEGQSAVARLTGEKKNHPGAQYANRLSPRVGRFINAAGTTGFPTGKRAPVQLDITAFLKDRKEKISTSFIRAFIHILAPPDECSSGVPMEAITNGMMNLNRQRHQHLVALRIIFAHGREDVRGRCVEAMGLLASAGLLLLLVIGHPQKPRSHMSPPRTGLSAAGLLELARGPLQTLFAWVSAAVFAEQRFFVNRKFCCLIVPLEVLSQRSTRPCEVSVCPYWGHSADMEAITNGMMNLNRQRHQHLVALRIIFCPW

SEQ ID NO: 37685 - protein, 149 aa, Homo sapiens
  misc_feature (1)...(149): Xaa = X or * as defined in Table 2
AVTLTTKVCSFTPEASETTNPPGGTNNSRRTALRAVALTAKVRSFTPRGSAASFLKSVRPRTHQFRTQXHVHQIEFSPGGLWESCPRASSSTGDPGRPPERRGAAARKTVGVQGVGYSLPRKLCPLFSRTTYPHTSLRKDCLESDTTAE

SEQ ID NO: 37686 - protein, 130 aa, Homo sapiens
  misc_feature (1)...(130): Xaa = X or * as defined in Table 2
HLFIYLLVVLLWCPGWPQTAGLKGSSCLSLLSNWNYRPPLXALLLGTQKLPRVWNFIMVRRIQDGVKPSVSIAEREMKSRKSAASLLSQRDHEPTRRKKLRTHPNIRRNKLQTRHLKSCNTHCEGPWRHS

SEQ ID NO: 37687 - protein, 68 aa, Homo sapiens
LTFPRFNTFLDQGSITGFFYISMVSKGLLYFSSVVERLIMRGDSVLAVLAALARSQRLLCLGSHFGGT

SEQ ID NO: 37688 - protein, 293 aa, Homo sapiens
  DOMAIN (107)..(136): kw REPLICATION REPB REPA INITIATION domain identified by eMATRIX, accession number DM00653A, p-value=7.207e-27, raw score of 20.40
  DOMAIN (91)..(133): Initiator RepB protein domain identified by PFam, accession name RepB_protein, E-value=0.0091, PFam score of 12.3
MLYLFVDQIRKSDGTLQEHDGICEIHVAKYAEIFGLTSAEASKDIRQALKSFAGKEVVFYRPEEDAGDEKGYESFPWFIKRAHSPSRGLYSVHINPYLIPFFIGLQNRFTQFRLSETKEITNPYAMRLYESLCQYRKPDGSGIVSLKIDWIIERYQLPQSYQRMPDFRRRFLQDPRQSSQPSLALGASSAWTPILAALEKPFSPPLHCGSPFLGWPRPELAPSACREVRRERRQREPGLHLALACQLEFRAEECGRTVWDWQAAPPTAQVWDSLGEASWAPESGGDLENFMSS

SEQ ID NO: 37689 - protein, 1450 aa, Homo sapiens; identical to SEQ ID NO: 34532
  DOMAIN (1016)..(1055): Phosphatidylinositol 3- and 4-kinases proteins domain identified by eMATRIX, accession number BL00915C, p-value=8.147e- 32, raw score of 22.43
  DOMAIN (916)..(1131): Phosphatidylinositol 3- and 4-kinases domain identified by PFam, accession name PI3_PI4_kinase, E-value=1.1e-93, PFam score of 324.6

SEQ ID NO: 37690 - protein, 311 aa, Homo sapiens
MKPRTFAVSVTALKVARLEFVLSDVRMCSEFLPSGVKLRTYAVSVTALKAVCLELFVPPGGFVVPLVSGVKLQTFAVVDGTGRRGAGGRARRGGSAAQEHMEAWGGSGMAGCRSRALPRGKAAKARREIQRSAAEGASSGLGQPRKGLPHSSGRLKGSSSAAKVGAQAEEAPRASEGCEDCQHAVTSHRYFEKSLHFSLLVLVVVKMLYAGLPELSGIQDLKYVYNNLRPQDTDLEATSHFTKPQSSQGFSEPALAEVEQRYILQPFSGTHPFIRNTSSISREQKFLSGTAISMLPPGVPWIFGSRSALLP

SEQ ID NO: 37691 - protein, 82 aa, Homo sapiens
  misc_feature (1)...(82): Xaa = X or * as defined in Table 2
VLQLLRQHVWSCSFLLVGSWSHWLQERSCRSSQXVLQLIKAVWTQRTQEPSWLHLVDPAPGLQVELPASPTRYAHTPQPLGG

SEQ ID NO: 37692 - protein, 931 aa, Homo sapiens
  DOMAIN (738)..(865): Transient receptor domain identified by PFam, accession name Trans_recep, E-value=8.9e-07, PFam score of 24.0
MVGGCRWTEDVEPAEVKEKMSFRAARLSMRNRRNDTLDSTRTLYSSASRSTDLSYSESASFYAAFRTQTCPIMASWDLVNFIQANFKKRECVFFTKDSKATENVCKCGYAQSQHMEGTQINQSEKWNYKKHTKEFPTDAFGDIQFETLGKKGKYIRLSCDTDAEILYELLTQHWHLKTPNLVISVTGGAKNFALKPRMRKIFSRLIYIAQSKGAWILTGGTHYGLMKYIGEVVRDNTISRSSEENIVAIGIAAWGMVSNRDTLIRNCDAEGYFLAQYLMDDFTRDPLYILDNNHTHLLLVDNGCHGHPTVEAKLRNQLEKYISERTIQDSNYGGKIPIVCFAQGGGKETLKAINTSIKNKIPCVVVEGSGQIADVIASLVEVEDALTSSAVKEKLVRFLPRTVSRLPEEETESWIKWLKEILECSHLLTVIKMEEAGDEIVSNAISYALYKAFSTSEQDKDNWNGQLKLLLEWNQLDLANDEIFTNDRRWEKSKPRLRDTIIQVTWLENGRIKVESKDVTDGKASSHMLVVLKSADLQEVMFTALIKDRPKFVRLFLENGLNLRKFLTHDVLTELFSNHFSTLVYRNLQIAKNSYNDALLTFVWKLVANFRRGFRKEDRNGRDEMDIELHDVSPITRHPLQALFIWAILQNKKELSKVIWEQTRGCTLAALGASKLLKTLAKVKNDINAAGESEELANEYETRAVGESTVWNAVVGADLPCGTDIASGTHRPDGGELFTECYSSDEDLAEQLLVYSCEAWGGSNCLELAVEATDQHFIAQPGVQNFLSKQWYGEISRDTKNWKIILCLFIIPLVGCGFVSFRKKPVDKHKKLLWYYVAFFTSPFVVFSWNVVFYIAFLLLFAYVLLMDFHSVPHPPELVLYSLVFVLFCDEKRKTAMDQTDEDLFPYGAFYQFLMISRSFRGEEMSIGKQH

SEQ ID NO: 37693 - protein, 86 aa, Homo sapiens
  misc_feature (1)...(86): Xaa = X or * as defined in Table 2
VAKIFSHVVGCLFTLMVVSFAVQKLFSLIRSHLSILAFVAIAFGVLDMKSLPTPMSXMVMPRFSSRVFMVLGLKFKSLIHLELIFV

SEQ ID NO: 37694 - protein, 58 aa, Homo sapiens
  misc_feature (1)...(58): Xaa = X or * as defined in Table 2
NKGGHKQMEEHSMLMDRKNQYRENGHTAQGNLXIQCHPHQATNDFLHRIGKNKLASNM

SEQ ID NO: 37695 - protein, 1128 aa, Homo sapiens
  DOMAIN (158)..(203): kw TRANSCRIPTASE REVERSE II ORF2 domain identified by eMATRIX, accession number DM01354N, p-value=1.000e-40, raw score of 13.17
  DOMAIN (242)..(520): Reverse transcriptase domain identified by PFam, accession name rvt, E-value=1.5e-78, PFam score of 274.3
MRMQSSAKLLCSAWTLAYSIAVRTLSSDSEGQPPLVIHRQTGSGEDLQQTPTDLQLRVLTIRRKTNKQKGHPHQNPISSRRQEITKIRAELKKIETQKPFKKINESRSWFFEKINKIDRLLARLIKKKIEKNQIDAIKNDKGNITTNPTEIQTTIREYYKHLYANKLEHLEEMDKFLDIYTLPRLNQEEVESVNRPITGSEIEAIINSLPTKKSPGPDRFTAELYQRYKEELVPFLLKLFQSIEKEGILPNSFYEASIILISKPGRDTTKKENFRPISLMNIDAKILNKILANQIQQHIKKLIHHHQVGFIPGMQGWFNILKSINVIHHINRTKDKNHMIISIEAEKAFDKIQQPFMLKTLNKLGIDGTYLTYLKIIRAIYDKPTANIILNGQKLEAFPFKTGTRQGCPLSPLLFNIVLEALARAIRQEKEIKGIQLGKEDVKLSLFADDMIVYLENPIVSAQNLLKLISNFSEVSGYKINVQKSQAFLYTNNRQTESQIMSELPFTIASKRIKYLGIQLTRDVKDLFKENYKPLLNEIKEDTNKWKNIPCSWIGRINIVKMAILPKTLNQKFSYWFRVNKHYIHQRTFPLKETEFNTIATLYNGASPAQHQKALEPMAIKHQDCHGSEELPFAVLLSSLNENSIRVICLVRQIGGKREFLGVQVVLKTKPELAFPVEGGLQGQRWISNYLYEGNGQGDEKEKSNTEDRKSLSMEMMFQPRQEGVERASEAKGRMGVGKDTEKQLLEEESARAQAWRRKCAGCMVTESRMLFWLSGDKGPQFVTMGPAEGPARSKNQHKKIESFKHLSLDNSSQEETPGPGQCHYHLQQLPSAPHKEAKATQHKRVCPSISSQSLTPSSLLSKDITTAPCKLNLTKDLCLMNEQPYRNVIGHKGSGLTVKDGVGKPSKTTEFFTEYFSYKKSYPKKPYKCIQRQLLLIQSQEELAGNHVQRPLALEFGALFSPGGASWGFGDLKSYLGLQNTVSTHLDKLPLLGERHMSHQTPMSHPWPLSGTLPLTSHKSPRTVHPPAEHHQSPLPIPLPVTAKGAFASVPPLLFPAPQGLSNEGRRCHGYILINISGITNNTEIYASLVTITLQHFLLPSEDCGKAPLQGRVEGREGVSQKEKRKT

SEQ ID NO: 37696 - protein, 369 aa, Homo sapiens
  DOMAIN (80)..(125): kw TRANSCRIPTASE REVERSE II ORF2 domain identified by eMATRIX, accession number DM01354N, p-value=1.000e-40, raw score of 13.17
  DOMAIN (95)..(322): Reverse transcriptase domain identified by PFam, accession name rvt, E-value=4.7e-30, PFam score of 113.3
  misc_feature (1)...(369): Xaa = X or * as defined in Table 2
XSPKSSTNRESHEALASSSNSSSDHSGSTTPSSGQETLSLAVGSSSEGLRQRTLPQAQTDQAQSHQFPYVMQGNMAIREYYKHLYANKLENLEEMDKFLDTYTLPRLNQEEVESLNRPITGSEIEAIINSLPTKKSPRPDGFTAEFYQRCRKGLYKIQQLFMLKTLNKLGIDGTYLKIVKAVYDTPTANIILNGQKLEAFPLKTGTRQGCRLSPLLFNVVLEVLARAIRQEKAIKGIQLGNEEVKLSLFADDMIVYLENPIISAQNLLKLISNFSKVSGYKINVQNSQAFLYTNNRQTESQIMSELPFTIASKRIKYLGIQITRDVNDLFKENYKPLLSEIKEDTNKWKNIPCSWIGRINIVKMAILPK

SEQ ID NO: 37697 - protein, 85 aa, Homo sapiens
  misc_feature (1)...(85): Xaa = X or * as defined in Table 2
LLNVFALAFLVLLIEMLGCQFWIFPAFSCRHLVLXISLYTLLXMRPRDSGMWCLCSRWFQRTSLFLASFRYVPSSHSGAGCSVSM

SEQ ID NO: 37698 - protein, 530 aa, Homo sapiens
  DOMAIN (249)..(292): kw TRANSCRIPTASE REVERSE II ORF2 domain identified by eMATRIX, accession number DM01354T, p-value=1.000e-40, raw score of 9.48
  DOMAIN (136)..(383): Reverse transcriptase domain identified by PFam, accession name rvt, E-value=6e-37, PFam score of 136.2
  misc_feature (1)...(530): Xaa = X or * as defined in Table 2
SPGHIXSSVXREIYSTKCPQEKAGKIXNSHPNITIKRTGEARANTFKSXQKARNNXDQSRTEGDRDTKNPSKNQCNPGAGFLKRSTKLIDRXQDXXRRKXRRIKXTXXKMIKGIVTTDPTEIQTTIREFYKHFYANRLKNLEEMDEFLETYTLPRLNQEEVESLNRPITGSEIEAIINSLPTKKSPGPDGFTAEIYQRTNDKNHMIISIDEEKAFDKIQQPFMLEMLNKLGIYGMYIKIIRTIYDKSTANIILNVQKLEAFPLKTGTRQGCPLSPLLFNIVLEVLARAIRQEKEIKGIRLRKEVFKMFLFADDMIVYLENPIISAPNLLKLISNFSKVSGYKINVQKSQAFLYTNNRQTESQIMSELPFTIATKRIKYLGIQLTRDVKDLFKENYKPLLNEIKEDTNKWKNIPCSWIGRINIVKMAILPKVIYRFNAIPIKLPMTFFTELEKTTLKFIWNQKRALNAKTILSQKNKAGGIMLPDFKLPYKATWYWNQNTEIDQWNKTEASEITPHIYNHLVFDNPDKNKK

SEQ ID NO: 37699 - protein, 33 aa, Homo sapiens
IKPQRWGETRAEKLKILKTRVPFLLQRITAPHQ

SEQ ID NO: 37700 - protein, 407 aa, Homo sapiens; identical to SEQ ID NO: 37414
  DOMAIN (171)..(214): kw TRANSCRIPTASE REVERSE II ORF2 domain identified by eMATRIX, accession number DM01354T, p-value=1.000e-40, raw score of 9.48
  DOMAIN (46)..(293): Reverse transcriptase domain identified by PFam, accession name rvt, E-value=1.7e-52, PFam score of 187.8

SEQ ID NO: 37701 - protein, 55 aa, Homo sapiens
  misc_feature (1)...(55): Xaa = X or * as defined in Table 2
KMIKGISPLIPQRYKLPSENTINTSTQINXKIXKKWIHSSTHTPSQDXTRKKLNL

SEQ ID NO: 37702 - protein, 433 aa, Homo sapiens
  DOMAIN (37)..(83): kw TRANSCRIPTASE REVERSE II ORF2 domain identified by eMATRIX, accession number DM01354O, p-value=1.000e-40, raw score of 8.73
  DOMAIN (70)..(348): Reverse transcriptase domain identified by PFam, accession name rvt, E-value=1.5e-78, PFam score of 274.3
  misc_feature (1)...(433): Xaa = X or * as defined in Table 2
MDKFLDIYTLPRLNQEEVESVNRPITGSEIEAIINSLPTKKSPGPDRFTAELYQRYKEELVPFLLKLFQSIEKEGILPNSFYEASIILISKPGRDTTKKENFRPISLMNIDAKILNKILANQIQQHIKKLIHHHQVGFIPGMQGWFNILKSINVIHHINRTKDKNHMIISIEAEKAFDKIQQPFMLKTLNKLGIDGTYLTYLKIIRAIYDKPTANIILNGQKLEAFPFKTGTRQGCPLSPLLFNIVLEALARAIRQEKEIKGIQLGKEDVKLSLFADDMIVYLENPIVSAQNLLKLISNFSEVSGYKINVQKSQAFLYTNNRQTESQIMSELPFTIASKRIKYLGIQLTRDVKDLFKENYKPLLNEIKEDTNKWKNIPCSWIGRINIVKMAILPKTLNQKFSYWFRVNKHYIHQRTFPLKETEFNTIATLYNX

SEQ ID NO: 37703 - protein, 491 aa, Homo sapiens
  DOMAIN (7)..(54): kw TRANSCRIPTASE REVERSE II ORF2 domain identified by eMATRIX, accession number DM01354V, p-value=1.000e-40, raw score of 12.97
MGELPFTIASKRIKYLGIQLTRDVKDLFKENYKPLLKEIKEDTNKWKNIPCSWVGRINIVKMAILPKVIYRFNAIPIKLPMTFFTELEKTTLKFIWNQKRACIAKSILSQKNKAGGITLPDFKLYYKATVTKTAWYWYQNRDIDQWNRTEASKIMPHIYNYLIFDKPEKNKQWGKDSLFNKWCWENWLAICRKLKLDPFLTPYTKINSRWIKDLNVRPKTIKTLEENLGITIQDIGVGKDFMSKTPKAMATKDKIDKWDLIKLKSFCTAKETTIRVNRQPTTWEKIFATYSSDKGLISRIYNELKQIYKKKTNNPIKKWAKDMNRHFSKEDIYAAKKHMKKCSSSLAIREMQIKTAMRYHLTPVRMAIIKKSGNNRIFDHLLSFLLLLSFSAVIPYDVFVFDSYKPLIPPTPPFELSTSVFQHIMVVKKTKLPVKQTQAGPSKGIPEDAIVIIGNDSFMHVTVPEDLSVGQDVEVEDNDTANPDPCRPSLI

SEQ ID NO: 37704 - protein, 95 aa, Homo sapiens
  misc_feature (1)...(95): Xaa = X or * as defined in Table 2
SSYATKKEPALPSQSEAKKTKLETSCYLTSNYTTRLQXPKQHGTGTKTEIXANGTEQSPQKXYHTATTIWSLTNLTKTRNGERIPYLINGVGKTG

SEQ ID NO: 37705 - protein, 777 aa, Homo sapiens
  DOMAIN (35)..(80): kw TRANSCRIPTASE REVERSE II ORF2 domain identified by eMATRIX, accession number DM01354N, p-value=1.000e-40, raw score of 13.17
  DOMAIN (42)..(298): Reverse transcriptase domain identified by PFam, accession name rvt, E-value=1.3e-43, PFam score of 158.3
MSQGYSIHLAPAAGSGDESASLEGLHEIQTAIREYYKHLYANKLENLEEMDTFLDTYTLPRLNQEEVESLNRPITGSEIVAIINSLPTKKSPGPDGFTAEFYQRYKEELHINRAKDKNHMIISIDAEKAFDKIQQPFMLKTLNKLGIDGTYFKIIRAIYDKPTANIILNGQKLEAFPLKTGTRQGCPLSPLLFNIGLEVLARAIRQEKEIKGIQLGKEKVKLSLFADDMIVYLENPIVSAQNLLKLISNFSKVSGYKINVQKSQAFLYTNNRQTESQIMSELPFTIASKRIKYLGIQLTRDVKDLFKENYKPLLKEIKEDTNKWKNIPCSWVGRISIVKMAILPKVIYRFNAIPIKLPMTFFTELEKTTLKFIWNQKRARIAKSILSQKNKAGGITLPDFKLYYKATVTKTAWCWYQNRDIDQWNGTEPSEIMPHIYNYLIFDKPEKNKQWGKDSLFNKWCWENWLAICRKLKLDPFLTPYTKINSRWIKDLNVRPKTIKTLEENLGITIQDIGVGKDFMSKTPKAMATKAKIDKWDLIKLKSFCTAKETTVRVNRQPTTWEKIFTTYSSDKGLISRIYNELKQIYKKKTNNPIKKWAKDMNRHFSKEDIYAAKKHMKKCSSSLAIREMQIKTTMRYHLTPVRMAIIKKSGNNSNSWVSKKILLKIKKHKKLRCICQEWLTSFSIVLIENELAKSLHFDDLINKVAESVKKHPEVIHSDFNEQHISILFTQGTEVKAGLIIYKAFTMPLRCQGLQVDLQPLKIWPRSLSCLQTTPAF

SEQ ID NO: 37706 - protein, 513 aa, Homo sapiens
  DOMAIN (147)..(194): kw TRANSCRIPTASE REVERSE II ORF2 domain identified by eMATRIX, accession number DM01354V, p-value=1.000e-40, raw score of 12.97
  DOMAIN (1)..(160): Reverse transcriptase domain identified by PFam, accession name rvt, E-value=0.0017, PFam score of -20.0
MDKFLDTYTLPRLNQEEVESLNRPITGSEIEAIINSLLTKKTPGPDGFTAEFYQSVGSSGQGNRAIRQEKEIKGIQLGKEEVKLSLFADDMIVYLENPIISAQNLLKLISKFSKVSGYKINVQKSQAFLYTYNRQTESQIMGELPFTIASKRIKYLGIQLTRDVKDLFKENYKPLLKEIKEDTNKWKNIPCSWVGRINIVKMAILPKVIYRFNAIPIKLPMTFFTELEKTTLKFIWNQKRARIAKSILSQKNKAGGITLPDFKLYYKATVTKTAWYWYQNRDIDQWNRTEPSEIMLHIYNYLIFDKPEKNKQWGKDSLFNKWCWENWLAICRKLKLDPFLTPYTKINSRWIKDLNVKPKTIKTLEENLGITIQDIGVGKDFMSKTPKAMATKDKIDKWDLIKLKSFCTAKETTIRVNRQPVGRKFRQPEWEKIFATYSSDKGLICRIYNKLKQIYKKKTNNPIKKCRNPVESSEALKDSGPTRWKDHRSLNEYRYHLLSHPPPSCIALGMSKK

SEQ ID NO: 37707 - protein, 786 aa, Homo sapiens
  DOMAIN (324)..(370): kw TRANSCRIPTASE REVERSE II ORF2 domain identified by eMATRIX, accession number DM01354O, p-value=1.000e-40, raw score of 8.73
  DOMAIN (357)..(627): Reverse transcriptase domain identified by PFam, accession name rvt, E-value=1.8e-69, PFam score of 244.2
MWESLELHGDLLNDFDQNANSDMGSEVQAELSSDRNEKVIGNYSKGHSCYSLAKRLIALCPCCRDLWNFELERDDLRYLAEEISKQQSTQDVVWLLLTAYSRMCSQRDGLKLELMFKRETEHKSLENLQPDHVVEKKKEPFSGDKFKLAAEICISKDKPNVNSQDNGENVSRACLEAYEGKKVLWAMPRALLLCATLGHDALQPSPSSSSHGKKEPRYSLGCCFGGCKAQALAASTSFNPITNRHLRLFELAKDYMNGTGRYRVVKHMIFPVGDAYKKKGLIPAHHQVIIAELATKNSKLNQEDIESLNRPITGSEIEAIINSLPTKKSPGPDGFTADFYQRYKQELVPFLLKLFQSIEKEGILPNSFDEASIILIPKPGRDTTKKENFRPISLMNIDAKILANQIQQQIKKFIHHDQVGFIPGMQGWFNIHKSINVIQHINRTKDKNHTIISTDAEKAFDKIQQPFMLKTLNKLGIDGTYLKIIRAIYDEPTANIILNGQKLEAFPLKTGTRQGCPLSPLLFNIVLEVLARAIKQDKEIQDIQLGKEVKLSLFADVMIVYLENSIVSVQNLLKLISNFSEVSGYKINVQKSQAFLYTNKRQRESQIMSELPFTIASKRIKYLGIQLTRDVKDLFKENYKPLLNEIKEDTNKWKNIPCSWIGRINIVKMAILPKIIYAAKKHMKKCSSSLAIREMQIKTTMRYHLTPVRMAIIKKSGNNRSTRGLLSCDSADLRTSLVKVCRDPCRRLGNGEMILSLHYLWSNNFVQRTSCLAFSPSAQDAADAAV

SEQ ID NO: 37708 - protein, 155 aa, Homo sapiens
  misc_feature (1)...(155): Xaa = X or * as defined in Table 2
GTAFLWRRRGALRFRVSSFSVLFFPHLCGFIYFWSLMMVMYRCVFGVDVLSVCXFSFXQTGPSAAGLLEYPAVXGVSVPLLGGASQLGCSGVRGQGPTXGGSLPVLRSPAACWENHCSLQSCQTGTFKSAEVTAVFLFVCALPPEVEPTEAGRPP

SEQ ID NO: 37709 - protein, 153 aa, Homo sapiens
PKKQEEEEGTTDTATSSSNNHEKDSGVGRTDESLRNDESSEQENAAEDPNSTSLKSKRDLGQSIDTLGSVELQYNESLVSGEYIDSDCIGNPDEDCERFRQLLELKCKIRNHGDDITCVDSSTADYRSCSLIGSTMCNGSQWKQQLRIMEELP

SEQ ID NO: 37710 - protein, 353 aa, Homo sapiens
RGVCGRLLSRQLHCALRLMSKVLTVWVCVFPAGVSSVTSLMSLAWVLASYHKLLRDSRDDKKSMSYRGAIIQVFWRLFTISSRVISFALFASIFQLYFGIFVVVHWCAMAFWIIHGGTDFCMSKWEEILFNMVVGIVYIFCWFNVKEGRTRYRMFAYYTIVLTENAALTFLWYFYRDPETTDSYAVPALCCVFISFVAGIAMMLLYYGVLHPTGPRAKILASSCCAELLWGIPLPPDVEPMAPEIPGYRGTQVTPTRAVTEQQEDLTADTCLPVFQVRPMGPPTPLGRPYLPEGPLIKIDMPRKRYPAWDAHFVDRRLRRTINILQYVTPTAVGIRYRDGPLLYELLQYESSL

SEQ ID NO: 37711 - protein, 285 aa, Homo sapiens
  DOMAIN (122)..(136): LEUCINE-RICH REPEAT SIGNATURE domain identified by eMATRIX, accession number PR00019A, p-value=2.000e-09, raw score of 11.19
  DOMAIN (97)..(183): Leucine Rich Repeat domain identified by PFam, accession name LRR, E-value=4.1e-06, PFam score of 33.7
ISQFIFLFPGIMKNLYFRVITIVIWLYFTGIMTNASRKSNILFNSECQWNEYILTNCSFTGKCDIPVDISQTAATVDVSFNFFRVLLQSHTKKEEWKIKHLDLSNNLISKITLSPFAYLHALEVLNLSNNAIHSLSLDLLSPKSSWVKRHRSSFRNRFPLLKVLILQRNKLSDTPKECLKAQSKDDACSQLRLTGYVTDLWFRCSTFYLVKVKMSRSRSPSPIRCGLPSLDQQTFQDWLKECGIESILHEHTDVSTHTHTHTHYHRYCQTEKAQDVAVGSFTLNM

SEQ ID NO: 37712 - protein, 92 aa, Homo sapiens
QPLRKQSCMRLEMAQPRTTACFITLIGQLFQTSISLMNLTSTPLCNLSDIPPVGIKSKAVVVPWGSCHFLEKARIAQKGGAEAMLVVNNSVL

SEQ ID NO: 37713 - protein, 270 aa, Homo sapiens
  DOMAIN (103)..(187): PA domain identified by PFam, accession name PA, E-value= 0.00067, PFam score of 26.4
PGRPRLSGPVRPRRQRSGGTPSLPRRVSCAAPCRPTRHPPVRWGRSGGCPLPGTALLWGFLLQLTAAQEAILHASGNGTTKDYCMLYNPYWTALPSTLENATSISLMNLTSTPLCNLSDIPPVGIKSKAVVVPWGSCHFLEKARIAQKGGAEAMLVVNNSVLFPPSGNRSEFPDVKILIAFISYKDFRDMNQTLGDNITVKMYSPSWPNFDYTMVVIFVIAVFTVALGGYWSGLVELIACRGKNMEVRLIFLSGLCIAVAVVWAVFRNED

SEQ ID NO: 37714 - protein, 1133 aa, Homo sapiens
MLVGQGAGPLGPAVVTAAVVLLLSGVGPAHGSEDIVVGCGGFVKSDVEINYSLIEIKLYTKHGTLKYQTDCAPNNGYFMIPLYDKDHLAMSRDVFVVTSVAVRYSHPGDFILKIEPPLGWSFEPTTVELHVDGVSDICTKGGDINFVFTGFSVNGKVLSKGQPLGPAGVQVSLRNTGTEAKIQSTVTQPGGNSCLSPLSNPVECSVTGPCCATRIGFMPEILEIKGDVSTPLSDQHMEHPSWHTASTTVRVTNSNANAASPLIVAGYNVSGSVRSDGEPMKGVKFLLFSSLVTKEPQDESLVYLCYTVSREDGSFSFYSLPSGGYTVIPFYRGERITFDVAPSRLDFTVEHDSLKIEPVFHVMGFSVTGRVLNGPEGDGVPEAVVTLNNQIKVKTKADGSFRLENITTGTYTIHAQKEHLYFETVTIKIAPNTPQLADIVATGFSVCGQISIIRFPDTVKQMNKYKVVLSSQDKDKSLVTVETDAHGSFCFKANPGTYKVQVMVPEAETRAGLTLKPQTFPLTVTDRPVMDVAFVQFLASVSGKVSCLDTCGDLLVTLQSLSRQGEKRSLQLSGKVNAMTFTFDNVLPGKYKISIMHEDWCWKNKSLEVEVLEDDVSAVEFRQTGYMLRCSLSHAITLEFYQDGNGRENVGIYNLSKGVNRFCLSKPGVYKVTPRSCHRFEQAFYTYDTSSPSILTLTAIRHHVLGTITTDKMMDVTVTIKSSIDSEPALVLGPLKSVQELRREQQLAEIEARRQEREKNGKEEGEERMTKPPVQEMVDELQGPFSYDFSYWARVLCFVGTGPAKLKYINYFRSGEKITVTPSSKELLFYPPSMEAVVSGESCPGKLIEIHGKAGLFLEGQIHPELEGVEIVISEKGASSPLITVFTDDKGAYSVGPLHSDLEYTVTSQKEGYVLTAVEGTIGDFKAYALAGSPGQYYFKPMMKEFRFEPSSQMIEVQEGQNLKITITGYRTAYSCYGTVSSLNGEPEQGVAMEAVGQNDCSIYGEDTVTDEEGKFRLRGLLVGNNDIDDVNIIVFRQINQFDLSGNVITSSEYLPTLWVKLYKSENLDNPIQTVSLGQSLFFHFPPLLRDGENYVVLLDSTLPRSQYDYILPQVSFTAVGYHKHFTLIFNPT

SEQ ID NO: 37715 - protein, 1042 aa, Homo sapiens
  DOMAIN (512)..(533): POLYCYSTIC KIDNEY DISEASE PROTEIN SIGNATURE domain identified by eMATRIX, accession number PR00500B, p-value=1.153e-29, raw score of 7.74
  DOMAIN (566)..(647): WSC domain identified by PFam, accession name WSC, E-value= 1.2e-33, PFam score of 125.2
MASTTVRVTNSNANAASPLIVAGYNVSGSVRSDGEPMKGVKFLLFSSLVTKEPQDESLVYLCYTVSREDGSFSFYSLPSGGYTVPVFHVMGFSVTGRVLNGPEGDGVPEAVVTLNNQIKVKTKADGSFRLENITTGTYTIHAQKEHLYFETVTIKIAPNTPQLADIVATGFSVCGRISIIRFPDTVKQMNKYKVVLSSQDKDKSLVTVETDAHGSFCFKAKPGTYKVQVMVPEAETRAGLTLKPQTFPLTVTDRPVMDVAFVQFLASVSGKVSCLDTCGDLLVTLQSLSRQGEKRSLQLSGKVNAMTFTFDNVLPGKYKISIMHEDWCWKNKSLEVEVLEDDVSAVEFRQTGYMLRCSLSHAITLLLRCLCSPYLLSLSSSLTYSGLILIVSLIRGYCLLVLIYRCFDDSFNADRALVLGFGGGGPWGLVACPSLSWQDSECQAPQVCNRAQGDLVGRDVSHNLLRALDVGLLANLSALAELDISNNKISTLEEGIFANLFNLSEINLSGNPFECDCGLAWLPRWAEEQQVRVVQPEAATCAGPGSLAGQPLLGIPLLDSGCGEEYVACLPDNSSGTVAAVSFSAAHEGLLQPEACSAFCFSTGQGLAALSEQGWCLCGSAQPSSASFACLSLCSGPPPPPAPTCRGPTLLQHVFPASPGATLVGPHGPLASGQLAAFHIAAPLPVTATRWDFGDGSPEVDAAGPAASHRYVLPGRYHVTAVLALGTGSALLGTDVQVEAAPAALELVCPSSVQSDESLDLSIQNRGGSGLEAAYSIVALGEEPARAVHPLCPSDTEIFSGNGHCYRLVVEKAAWLQAQEQCRAWAGATLAMVDSPAVQRFLVSRVTRSLDMWIGFSTVQGVEVGPAPQGEAFSLESCQNWLPGEPHPATAEHCVRLGPTGWCNTDLCSAPHSYVCELRPGGPVQDAENLLVMVFPGLRLSREAFLTTAEFGTQELRRPAQLRLQVYRLLSTAGTPENGSEPESRSPDNRTQLAPACMPGGRWCAGANICLPLTPPATPGLRQCCTEVTISTPLEKEEEKIP

SEQ ID NO: 37716 - protein, 129 aa, Homo sapiens
MVNIECQLDWIEGGKVLILALITSSSNSTDENTEAWGDIKCLIQIACIEEKLPEVSPEADAGIMLLVQSAELKTKADGSFRLENITTGTYTIHAQKEHLYFETVTIKIAPNTPQLADIIATGEEGQLLI

SEQ ID NO: 37717 - protein, 1191 aa, Homo sapiens
  misc_feature (1)...(1191): Xaa = X or * as defined in Table 2
RDLVVGCGGFVKSDVEINYSLIEIKLYTKHGTLKYQTDCAPNNGYFMIPLYDKGDFILKIEPPLGWSFEPTTVELHVDGVSDICTKGGDINFVFTGFSVNGKVLSKGQPLGPAGVQVSLRNTGTEAKIQSTVTQPGGKFAFFKVLPGDYEILATHPTWALKEASTTVSVTNSNANAASPLIVAGYNVSGSVRSDGEPMKGVKFLLFSSLVTKEDVLGCNVSPVPGFQPQDESLVYLCYTVSREDGSFSFYSLPSGGYTVIPFYRGERITFDVAPSRLDFTVEHDSLKIEPVFHVMGFSVTGRVLNGPEGDGVPEAVVTLNNQIKVKTKAXWAHSRLENITTGTYTIHAQKEHLYFETVTIKIAPNTPQLADIVATGFSVCGQISIIRFPDTVKQMNKYKVVLSSQDKDKSLVTVETDAHGSFCFKANPGTYKVQVMVPEAETRAGLTLKPQTFPLTVTNRPMMDVAFVQFLASVSGKVSCLNTCGDLLVTLQSLSRQGEKRSLQLSGKVNAMTFTFDNVLPGKYKISIMHEDWCWKNKSLEVEVLEDDMSAVEFRQTGYMLRCSLSHAITLEFYQDGNGRENVGIYSLFKGVNRFCLSKPGVYKVTPRSCHRFEQAFYIYDTSSPSIFTLTAIRHHVLGTITTDKMMDVTVTIKSSIDSEPALVLGPLKSVQELRREQQLAEIEARRQEREKNGNEEGEERMTKPPVQEMVDELQGPFSYDFSYWARSGEKITVTPSSKELLFYPPSMEAVVSGESCPGKLIEIHGKAGLFLEGQIHPELEGVEIVISEKGASSPLITVFTDDKGAYSVGPLHSDLEYTVTSQKEGYVLTAVEGTIGDFKAYALAGVSFEIKAEDDQPLPGVLLSLSGGLFRSNLLTQDNGILTFSNLSPGQYYFKPMMKEFRFEPSSQMIEVQEGQNLKITITGYRTAYSCYGTVSSLNGEPEQGVAMEAVGQNDCSIYGEDTVTDEEGKFRLRGLLPGCVYHVQLKAEGNDHIERALPHHRVIEVGNNDIDDVNIIVFRQINQFDLSGNVITSSEYLPTLWVKLYKSENLDNPIQTVSLGQSLFFHFPPLLRDGENYVVLLDSTLPRSQYDYILPQVSFTAVGYHKHTTLIFNPTRKLPEQDIAQGSYIALPLTLLVLLAGYNHDKLIPLLLQLTSRLQGVRALGQAASDNSGPEDAKRQAKKQKTRRT

SEQ ID NO: 37718 - protein, 142 aa, Homo sapiens
PGRPRLSGPVRPRRQRSGGTPSLPRRVSCAAPCRPTRHPPVRWGRSGGCPLPGTALLWGFLLQLTAAQEAILHASGNGTTKDYCMLYNPYWTALPSTLENATSISLMNLTSTPLCNLSDIPPVGIKSKAVVVPWGSCHFLEK

SEQ ID NO: 37719 - protein, 46 aa, Homo sapiens
  misc_feature (1)...(46): Xaa = X or * as defined in Table 2
VSSEKVSLGVPCPAASAAASGDASRXMATGRGGGGGGVAALPESAP

SEQ ID NO: 37720 - protein, 429 aa, Homo sapiens
  DOMAIN (237)..(321): PA domain identified by PFam, accession name PA, E-value= 0.00067, PFam score of 26.4
KQGPTNPMLFHLVRDVKQGNLPPGYKITLIDIGLVIEYLMGGTYRCTYTRKRFRLIYNSLGGNNRRSGRNTSSSTPQLRKSHESFGNRADKKEKMRHNHFIKTAQPYRPKIDTVMEEGKKKRTKDEIVDIDDPETKRFPYPLNELLIWACLMKRQVMARFLWQHGEESMAKALVACKIYRSMAYEAKQSDLVDDTSEELKQYSKQPLRKQSCMRLEMAQPRTTACFITLIGQLFQTSISLMNLTSTPLCNLSDIPPVGIKSKAVVVPWGSCHFLEKARIAQKGGAEAMLVVNNSVLFPPSGNRSEFPDVKILIAFISYKDFRDMNQYVRLSYDTKPEVILQLLLKEWQMELPKLVISVHGGMQKFELHPRIKQLLGKGLIKAAVTTGAWILTGGVNTGVAKHVGDAPQRTCFQIISKDLHYRNSSMGSD

SEQ ID NO: 37721 - protein, 1595 aa, Homo sapiens
  DOMAIN (1186)..(1209): Guanine-nucleotide dissociation stimulators CDC24 family sign domain identified by eMATRIX, accession number BL00741B, p-value= 7.000e-21, raw score of 14.27
  DOMAIN (1048)..(1237): RhoGEF domain identified by PFam, accession name RhoGEF, E- value=3.8e-37, PFam score of 136.8
DHKTMGNAESQHVEHEFYGEKHASLGRNDTSRSLRLSHKTRRTRHASSGKVIHRNSEVSTRSSSTPSIPQSLAENGLEPFSQDGTLEDFGSPIWVDRVDMGLRPVSYTDSSVTPSVDSSIVLTAASVQSMPDTEESRLYGDDATYLAEGGRRQHSYTSNGPTFMETASFKKKRSKSADIWREDSLEFSLSDLSQEHLTSNEEILGSAEEKDCEEARGMETRASPRQLSTCQRANSLGDLYAQKNSGVTANMGPGSKFAGYCRNLVSDIPNLANHKMPPAAAEETPPYSNYNTLPCRKSHCLSEGATNPQISHSNSMQGRRAKTTQDVNAGEGSEFADSGIEGATTDTDLLSRRSNATNSSYSPTTGRAFVGSDSGSSSTGDAARQGVYENFRRELEMSTTNSESLEEAGSAHSDEQSSGTLSSPGQSDILLTAAQGTVRKAGALAVKNFLVHKKNKKVESATRRKWKHYWVSLKGCTLFFYESDGRSGIDHNSIPKHAVWVENSIVQAVPEHPKKDFVFCLSNSLGDAFLFQTTSQTELENWITAIHSACATAVARHHHKEDTLRLLKSEIKKLEQKIDMDEKMKKMGEMQLSSVTDSKKKKTILDQIFVWEQNLEQFQMDLFRFRCYLASLQGGELPNPKRLLAFASRPTKVAMGRLGIFSVSSFHALVAARTGETGVRRRTQAMSRSASKRRSRFSSLWGLDTTSKKKQGRPSINQVFGEGTEAVKKSLEGIFDDIVPDGKREKEVVLPNVHQHNPDCDIWVHEYFTPSWFCLPNNQPALTVVRPGDTARDTLELICKTHQLDHSAHYLRLKFLIENKMQLYVPQPEEDIYELLYKEIEICPKVTHSIHIEKSDTAADTYGFSLSSVEEDGIRRLYVNSVKETGLASKKGLKAGDEILEINNRAADALNSSMLKDFLSQPSLGLLVRTYPELEEGVELLESPPHRVDGPADLDESPLAFLTSNPGHSLCSEQGSSAETAPEETEGPDLESSDETDHSSKSTEQVAAFCRSLHEMNPSDQNPSPQDSTGPQLATMRQLSDADNVRKVICELLETERTYVKDLNCLMERYLKPLQKETFLTQDELDVLFGNLTEMVEFQVEFLKTLEDGVRLVPDLEKLEKVDQFKKVLFSLGGSFLYYADRFKLYSAFCAIHTKVPKVLVKAKTDTAFKAFLDAQNPKQQHSSTLESYLIKPIQRILKYPLLLRELFALTDAESEEHYHLDVAIKTMNKVASHINEMQKIHEEFGAVFDQLIAEQTGEKKEVADLSMGDLLLHTTVIWLNPPASLGKWKKEPELAAFVFKTAVVLVYKDGSKQKKKLVGSHRLSIYEDWDPFRFRHMIPTEALQVRALASADAEANAVCEIVHVKSESEGRPERVFHLCCSSPESRKDFLKAVHSILRDKHRRQLLKTESLPSSQQYVPFGGKRLCALKGARPAMSRAVSAPSKSLGRRRRRLARNRFTIDSDAVSASSPEKESQQPPGGGDTDRWVEEQFDLAQYEEQDDIKETDILSDDDEFCESVKGASVDRDLQERLQATSISQRERGRKTLDSHASRMAQLKKQAALSGINGGLESASEEVIWVRREDFAPSRKLNTEI

SEQ ID NO: 37722 - protein, 57 aa, Homo sapiens
FHLTGHSLCSEQGSSAETAPEETEGPDLESSDETDHSSKVRDFHFHIPCFEPLKNHS

SEQ ID NO: 37723 - protein, 36 aa, Homo sapiens
  misc_feature (1)...(36): Xaa = X or * as defined in Table 2
PLRQLLCVKRGFCXHHXHEGCQSRLLLRCLLCSTAI

SEQ ID NO: 37724 - protein, 615 aa, Homo sapiens
  DOMAIN (7)..(46): PROTEIN ZINC FINGER ZINC-FINGER METAL-BINDING NU domain identified by eMATRIX, accession number PD01066, p-value=9.143e-32, raw score of 19.43
  DOMAIN (207)..(605): Zinc finger, C2H2 type domain identified by PFam, accession name zf-C2H2, E-value=4.6e-76, PFam score of 266.1
MAGSLSFEDVTVGFTQEEWQHLDPAQMTLYRDVMLENYSHLVSVEVCKVDDQLEHCQEIQDRHIWQAPYINNRTLTIERGNIVGKVFDFSIHPLPSIKIPCKCDLCGMSLQYISDLFNSKKNYLRKMPHDLSAYGKLFLNSNHEKTHMEEKPYEFIQNGKCLSHKEDFISYLRIQNLEQSFEYKECEKDFYGKAVFITYKQAYTGASPCVHNECNKVFCNNSTLMVHKMSEKRENFYEFNEYEKTFEKSPFLKHKVHLEEISPHSTSESPHRRETLCKECGKCFSRNSHLIIHQRTHTGEQPCECKECRKSFYHKSYLTVHQRIHTGEKPYECNQCGKTFISNSVLTIHRKTYTGEKPYECNECGKSFSRSSYLTIHQRTHPGEKPYECKVCRKTFCHKSDATKHQKTHLGGKPYECTQCGKTFSRNSGLKVHQRTHAKEKPYEYTECGKSFSEKSVLTVHQRIHTGEKPYKCNARGKTFYNKSDLTKHQRTHTGEKPCECKECGKFFSRNSYLTIHQRMHTGDKPYVCKKCGKTFYHKADYTVHKRTHRGEKSYYCNKCGKTFICNSVLKSHQRTHTGEKPYGCNECGKSFSEKSVLTVHQRIHTGEKPYKCNE

SEQ ID NO: 37725 - protein, 438 aa, Homo sapiens
  DOMAIN (396)..(409): PROTEIN ZINC-FINGER METAL-BINDI domain identified by eMATRIX, accession number PD00066, p-value=5.500e-16, raw score of 13.92
  DOMAIN (154)..(428): Zinc finger, C2H2 type domain identified by PFam, accession name zf-C2H2, E-value=9.4e-64, PFam score of 225.2
QSGKPPAMGQAPPATNEQKQRKSKTNGAENETLTLAEYHEQEEIFKLRLGHLKKEEAEIQAELERLERVRNLHIRELKRIHNEDNSQFKDHPTLNDRYLLLHLLDRGEVCKVDDQLEHCQEIQDRHIWQAPYINNRTLTIERVHQRIHTGEKPYECNQCGKTFISNSVLTIHRKTYTGEKPYECNECGKSFSRSSYLTIHQRTHPGEKPYECKVCSKTFCHKSDATKHQKTHLGGKPYECTQCGKTFSRNSGLKVHQRTHAKEKPYEYTECGKSFSEKSVLTVHQRIHTGEKPYKCNARGKTFYNKSDLTKHQRTHTGEKPCECKECGKFFSRNSYLTIHQRMHTGDKPYVCKKCGKTFYHKADYTVHKRTHRGEKSYYCNKCGKTFICNSVLKSHQRTHTGEKPYGCNECGKSFSEKSVLTVHQRIHTGEKPYKCNE

SEQ ID NO: 37726 - protein, 229 aa, Homo sapiens
SPVGDVPFIRSGLLGFVGPGSLVFVVGKMDGLLMVSGRRHNADDIVATGLAVESIKTVYRGRIAVFSVSVFYDERIVVVAEQRPDASEEDSFQRMIRVLQAIDSIHQVGVYCLALVPANTLPKTPLGGIHISQTKQLFLEGSLHPCNILMCPHTCVTNLPKPRQKQPGVGPASVMVGNLVAGKRIAQAAGRDLGQIEENDLVRKHQFLAEILQWRAQATPDHVLFMLLK

SEQ ID NO: 37727 - protein, 172 aa, Homo sapiens
MLLAWSKWEEKEPYVVTFWKDIMDDCKRCSDDVQSVREIKRIEMLEHKYGGHLVSRRAACTIQTAFRQYQLSKNFEKIRNSLLESRLPRRISLRKPGGRESAHGGLRLVGLPLVRSPSLPPTFAGTLTELEDSFTEQVQSLAKSIDDALSTWSLKTMCSLRDSGAYQLHQAL

SEQ ID NO: 37728 - protein, 92 aa, Homo sapiens
MTTQKGPENLHYDQGCQTSRTKMTPLRQGILKAFTVYHMRELCNKACEALNADKETTMDRLLEAVTICIFLIMATQPGGSIKQSIDNCWEDV

SEQ ID NO: 37729 - protein, 709 aa, Homo sapiens
MWQETFFRMENLQLIIILILGSPSQLHFPVIRNNQGWTLYHQWPHFLNRFSSRLSNSSLLNQLKFTCANCKKPLQKGQTAYQRKGSAHLFCSTTCLSSFSHKPAPKKLCVMCKKDITTMKGTIVLAQVDSSESFQEFCSTSCLISLYEEQQNPTKGALNKSRCTICGKLTEIRHEVSFKNMTHKLCSDHCFNRYRMANGLIMNCCEQCGEYLPSKGAGNNVLVIDGQQKRFCCQSCVSEYKQVGSHPSFLKEVRDHMQDSFLMQPEKYGKLTTCTGCRTQCRFFDMTQCIGPNGYMEPYCSTACMNSHKTKYAKSQSLGIICHFCKRNSLPQYQATMPDGKLYNFCNSSCVAKFQALSMQSSPNGQFVAPSDIQLKCNYCKNSFCSKPEILEWENKVHQFCSKTCSDDYKKLHCIVTYCEYCQEEKTLHETVNFSGVKRPFCSEGCKLLYKQDFARRLGLRCVTCNYCSQLCKGGATKELDGVVRDFCSEDCCKKFQDWYYKAARCDCCKSQGTLKERVQWRGEMKHFCDQHCLLRFYCQQNEPNMTTQKGPENLHYDQGCQTSRTKMTGSAPPPSPTPNKEMKNKAVLCKPLTMTKATYCKPHMQTKSCQTDDTWRTEYVPVPIPVPVYIPVPMHMYSQNIPVPTTVPVPVPVPVFLPAPLDSSEKIPAAIEELKSKVSSDALDTELLTMTDMMSEDEGKTEQPTSTV

SEQ ID NO: 37730 - protein, 357 aa, Homo sapiens
  DOMAIN (248)..(267): TYPE III EGF-LIKE SIGNATURE domain identified by eMATRIX, accession number PR00011B, p-value=3.423e-15, raw score of 13.08
  DOMAIN (173)..(281): Laminin EGF-like (Domains III and V) domain identified by PFam, accession name laminin_EGF, E-value=8.5e-28, PFam score of 105.8
MKAASSSGLPVKDVLLLSPIYGGGNWGTKRLGHLPKVSQQVTDKYVFNDRILSPCGWFEESVPASSQALGWVLGNCYYIIITTTIIITTITTIITTITITIITTITTIMYRDHARTLFVFLSSLCRRRCVLVLRSAVVVSSSCSLVLRFLFPERFAGWCYARVFGSPFGCLACSCNQHARRCRFNSELFRLSGGRSGGVCERCRHHTAGRHCHYCQPGFWRDPSQPIFSRRACRACQCHPIGATGGTCNQTSGQCTCKLGVTGLTCNRCGPGYQQSRSPRCLPAHIGPAPDPEDWWSYKDNLQGNFVPGAAKAGTQESGPPGASFFRLRNLGSQLPPPPQDQESQPPPLSLRSRASF

SEQ ID NO: 37731 - protein, 677 aa, Homo sapiens
  DOMAIN (231)..(639): Zinc finger, C2H2 type domain identified by PFam, accession name zf-C2H2, E-value=1.8e-19, PFam score of 78.1
KGSASTSSSAEQPLGITQNPKAEVNLGGLSSLVVNTPITSVSLSHSSSESSKMSESKDQENNCERPKESNVLHPNGECPVKSEPTEPGDEDEEDAYSNELDDEEVLGELTDSIGNKDFPLLNQSISPLSSSVLKFIEKGTSSSSATVSDDTEKKKQTAAVRASGSVASNYGISGKDFADASASKDSATAAHPSEIARGDEDSSATPHQHGFTPSTPGTPGPGGDGSPGSGIECPKCDTVLGSSRSLGGHMTMMHSRNSCKTLKCPKCNWHYKYQQTLEAHMKEKHPEPGGSCVYCKTGQPHPRLARGESYTCGYKPFRCEVCNYSTTTKGNLSIHMQSDKHLNNVQNLQNGNGEQVFGHSAPAPNTSLSGCGTPSPSKPKQKPTWRCEVCDYETNVARNLRIHMTSEKHMHNMMLLQQNMKQIQHNLHLGLAPAEAELYQYYLAQNIGLTGMKLENPADPQLMINPFQLDPATAAALAPGLVNNELPPEIRLASGQLMGDDLSLLTAGELSPYISDPALKLFQCAVCNKFTSDSLEALSVHVSSERSLPEEEWRAVIGDIYQCKLCNYNTQLKANFQLHCKTDKHMQKYQLVAHIKEGGKSNEWRLKCIAIGNPVHLKCNACDYYTNSVDKLRLHTTNHRHEAALKLYKGNLLGATVTLEVPFHGELDVVFEFITTN

SEQ ID NO: 37732 - protein, 976 aa, Homo sapiens
  DOMAIN (272)..(323): Neuromodulin (GAP-43) proteins domain identified by eMATRIX, accession number BL00412D, p-value=6.327e-09, raw score of 16.54
APPPPVTLAFCQPLSLSLSPLLPLASSLAPERTHLPGPGSLLLSPPSFPARPREPRGCVTAAPPDKMDTAEEDICRVCRSEGTPEKPLYHPCVCTGSIKFIHQECLVQWLKHSRKEYCELCKHRFAFTPIYSPDMPSRLPIQDIFAGLVTSIGTAIRYWFHYTLVAFAWLGVVPLTACRIYKCLFTGSVSSLLTLPLDMLSTENLLADCLQGCFVVTCTLCAFISLVWLREQIVHGGAPIWLEHAAPPFNAAGHHQNEAPAGGNGAENVAADQPANPPAENAVVGENPDAQDDQAEEEEEDNEEEDDAGVEDAADANNGAQDDMNWNALEWDRAAEELTWERMLGLDGSLVFLEHVFWVVSLNTLFILVFAFCPYHIGHFSLVGLGFEEHVQASHFEGLITTIVGYILLAITLIICHGLATLVKFHRSRRLLGVCYIVVKVSLLVVVEIGVFPLICGWWLDICSLEMFDATLKDRELSFQSAPGTTMFLHWLVGMVYVFYFASFILLLREVLRPGVLWFLRNLNDPDFNPVQEMIHLPIYRHLRRFILSVIVFGSIVLLMLWLPIRIIKSVLPNFLPYNVMLYSDAPVSELSLELLLLQVVLPALLEQGHTRQWLKGLVRAWTVTAGYLLDLHSYLLGDQEENENSANQQVNNNQHARNNNAIPVVGEGLHAAHQAILQQGGPVGFQPYRRPLNFPLRIFLLIVFMCITLLIASLICLTLPVFAGRWLMSFWTGTAKIHELYTAACGLYVCWLTIRAVTVMVAWMPQGRRVIFQKVKEWSLMIMKTLIVAVLLAGVVPLLLGLLFELVIVAPLRVPLDQTPLFYPWQDWALGVLHAKIIAAITLMGPQWWLKTVIEQVYANGIRNIDLHYIVRKLAAPVISVLLLSLCVPYVIASGVVPLLGVTAEMQNLVHRRIYPFLLMVVVLMAILSFQVRQFKRLYEHIKNDKYLVGQRLVNYERKSGKQGSSPPPPQSSQE

SEQ ID NO: 37733 - protein, 559 aa, Homo sapiens
  DOMAIN (365)..(377): ALCOHOL DEHYDROGENASE SUPERFAMILY SIGNATURE domain identified by eMATRIX, accession number PR00080A, p-value=3.143e-12, raw score of 9.32
  DOMAIN (289)..(442): short chain dehydrogenase domain identified by PFam, accession name adh_short, E-value=1.2e-12, PFam score of 55.4
MELDYTDPALIGQSFYGKLQTQAPNVCPHSLLIELLTYLCLSFLRSYYPCYLKVCHRDILGNRDVQVKSVEVLIRITAQLVSMAKSAEGKNTEFIHSLLQRCKVQEFVLLSLSASMYTSQKRYGLATADRGGRLLAEDSLFEESLINLGQDQIWSEHPLQIELLKLLQALIVLEHHLGQGQEEAETQPALSREWQRALNFQQAIGAMQYVQPHPLTSQGLLVSAVVRGLQPAYGYGMHPAWVSLVTHSLPYFGKSLGWTVTPFVIQICKNLDDLVKQYESESVKFTISRVALVTGANKGIGFAITRDLCRKFSGDVVLTARDEARGRAAVQQLQAEGLSPRFHQLDIDDPQSIRALRDFLRKEYGGLNVLVNNAGIAFRMDDPTPFDIQAEVTLKTNFFATRNVCTELLPIMKPHGCKMDPEEQELLNDYRYRSYSSVIEKALRNFESSSEWADLISSLGKLNKVLGHFLWEARPREPRGCVTAAPPRQDGHRVRKCPTPSRQNFFVDFETSRKIPRQMTAEWMPFLCTGFSAFPAGSLQLHQGVLEAESAARPGNGNR

SEQ ID NO: 37734 - protein, 4386 aa, Homo sapiens
  DOMAIN (4114)..(4130): Death domain proteins profile domain identified by eMATRIX, accession number BL50017B, p-value=5.263e-11, raw score of 17.60
  DOMAIN (80)..(801): Ank repeat domain identified by PFam, accession name ank, E- value=4.3e-259, PFam score of 874.1
EDLFKCIMAHAASQLKKNRDLEINAEEEPEKKRKHRKRSRDRKKKSDANASYLRAARAGHLEKALDYIKNGVDINICNQNGLNALHLASKEGHVEVVSELLQREANVDAATKKGNTALHIASLAGQAEVVKVLVTNGANVNAQSQNGFTPLYMAAQENHLEVVKFLLDNGASQSLATEDGFTPLAVALQQGHDQVVSLLLENDTKGKVRLPALHIAARKDDTKAAALLLQNDNNADVESKSGFTPLHIAAHYGNINVATLLLNRAAAVDFTARNDITPLHVASKRGNANMVKLLLDRGAKIDAKTRDGLTPLHCGARSGHEQVVEMLLDRAAPILSKTKNGLSPLHMATQGDHLNCVQLLLQHNVPVDDVTNDYLTALHVAAHCGHYKVAKVLLDKKANPNAKALNGFTPLHIACKKNRIKVMELLLKHGASIQAVTESGLTPIHVAAFMGHVNIVSQLMHHGASPNTTNVRGETALHMAARSGQAEVVRYLVQDGAQVEAKAKDDQTPLHISARLGKADIVQQLLQQGASPNAATTSGYTPLHLSAREGHEDVAAFLLDHGASLSITTKKGFTPLHVAAKYGKLEVANLLLQKSASPDAAGKSGLTPLHVAAHYDNQKVALLLLDQGASPHAAAKNGYTPLHIAAKKNQMDIATTLLEYGADANAVTRQGIASVHLAAQEGHVDMVSLLLGRNANVNLSNKSGLTPLHLAAQEDRVNVAEVLVNQGAHVDAQTKMGYTPLHVGCHYGNIKIVNFLLQHSAKVNAKTKNGYTPLHQAAQQGHTHIINVLLQNNASPNELTVNGNTALGIARRLGYISVVDTLKIVTEETMTTTTVTEKHKMNVPETMNEVLDMSDDEVRKANAPEMLSDGEYISDVEEGEDAMTGDTDKYLGPQDLKELGDDSLPAEGYMGFSLGARSASLRSFSSDRSYTLNRSSYARDSMMIEELLVPSKEQHLTFTREFDSDSLRHYSWAADTLDNVNLVSSPIHSGFLVSFMVDARGGSMRGSRHHGMRIIIPPRKCTAPTRITCRLVKRHKLANPPPHGERRGISSRLVEMGPAGAQFLGPVIVEIPHFGSMRGKERELIVLRSENGETWKEHQFDSKNEDLTELLNGMDEELDSPEELGKKRICRIITKDFPQYFAVVSRIKQESNQIGPEGGILSSTTVPLVQASFPEGALTKRIRVGLQAQPVPDEIVKKILGNKATFSPIVTVEPRRRKFHKPITMTIPVPPPSGEGVSNGYKGDTTPNLRLLCSITGGTSPAQWEDITGTTPLTFIKDCVSFTTNVSARFWLADCHQVLETVGLATQLYRELICVPYMAKFVVFAKMNDPVESSLRCFCMTDDKVDKTLEQQENFEEVARSKDIEVLEGKPIYVDCYGNLAPLTKGGQQLVFNFYSFKENRLPFSIKIRDTSQEPCGRLSFLKERKTTKGLPQTAVCNLNITLPAHKKETESDQDDEIEKTDRRQSFASLALRKRYSYLTEPGMKTVERSTGATRSLPTTYSYKPFFSTRPYQSWTTAPITVPGPAKSGFTSLSSSSSNTPSASPLKSIWSVSTPSPIKSTLGASTTSSVKSISDVASPIRSLRTMSSPIKTVVSQSPYNIQVSSGTLARAPAVTEATPLKGLASNSTFSSRTSPVTTAGSLLERSSITMTPPASPKSNINMYSSSLPFKSIITSAAPLISSPLKSVVSPVKSRVDVISSAKITMASSLSSPVKQMPGHAEVALVNGSISPLKYASSSTLINGCKATATLQEKISSATNSVSSVVSAATDTVEKVFSTTTAMPFSPLRSYVSAAPSAFQSLRTPSASALYTSLGSSISATTSSVTSSIITVPVYSVVNVLPEPALKKLPDSNSFTKSAAALLSPIKTLTTETHPQPHFSRTSSPVKSSLFLAPSALKLSTPSSLSSSQEILKDVAEMKEDLMRMTAILQTDVPEEKPFQPELPKEGRIDDEEPFKIVEKVKEDLVKVSEILKKDVCVDNKGSPKSPKSDKGHSPEDDWIEFSSEEIREARQQAAASQSPSLPERVQVKAKAASEKDYNLTKVIDYLTNDIGSSSLTNLKYKFEDAKKDGEGGQKRVLKPAIALQEHKLKMPPASMRTSTSEKELCKMADSFFGTDTILESPDDFSQHDQDKSPLSDSGFETRSEKTPSAPQSAETTGPKPLFHEVPIPPVITETRTEVVHVIRSYDPSAGDVPQTQPEEPVSPKPSPTFMELEPKPTTSSIKEKVKAFQMKASSEEDDHNRVLSKGMRVKEETHITTTTRMVYHSPPGGEGASERIEETMSVHDIMKAFQSGRDPSKELAGLFEHKSAVSPDVHKSAAETSAQHAEKDNQMKPKLERIIEVHIEKGNQAEPTEVIIRETKKHPEKEMYVYQKDLSRGDINLKDFLPEKHDAFPCSEEQGQQEEEELTAEESLPSYLESSRVNTPVSQEEDSRPSSAQLISDDSYKTLKLLSQHSIEYHDDELSELRGESYRFAEKMLLSEKLDVSHSDTEESVTDHAGPPSSELQGSDKRSREKIATAPKKEILSKIYKDVSENGVGKVSKDEHFDKVTVLHYSGNVSSPKHAMWMRFTEDRLDRGREKLIYEDRVDRTVKEAEEKLTEVSQFFRDKTEKLNDELQSPEKKARPKNGKEYSSQSPTSSSPEKVLLTELLASNDEWVKARQHGPDGQGFPKAEEKAPSLPSSPEKMVLSQQTEDSKSTVEAKGSISQSKAPDGPQSGFQLKQSKLSSIRLKFEQGTHAKSKDMSQEDRKSDGQSRIPVKKIQESKLPVYQVFAREKQQKAIDLPDESVSVQKDFMVLKTKDEHAQSNEIVVNDSGSDNVKKQRTEMSSKAMPDSFSEQQAKDLACHITSDLATRGPWDKKVFRTWESSGATNNKSQKEKLSHVLVHDVRENHIGHPESKSVDQKNEFMSVTERERKLLTNGSLSEIKEMTVKSPSKKVLYREYVVKEGDHPGGLLDQPSRRSESSAVSHIPVRVADERRMLSSNIPDGFCEQSAFPKHELSQKLSQSSMSKETVETQHFNSIEDEKVTYSEISKVSKHQSYVGLCPPLEETETSPTKSPDSLEFSPGKESPSSDVFDHSPIDGLEKLAPLAQTEGGKEIKTLPVYVSFVQVGKQYEKEIQQGGVKKIISQECKTVQETRGTFYTTRQQKQPPSPQGSPEDDTLEQVSFLDSSGKSPLTPETPSSEEVSYEFTSKTPDSLIAYIPGKPSPIPEVSEESEEEEQAKSTSLKQTTVEETAVEREMPNDVSKDSNQRPKNNRVAYIEFPPPPPLDADQIESDKKHHYLPEKEVDMIEVNLQDEHDKYQLAEPVIRVQPPSPVPPGADVSDSSDDESIYQPVPVKKYTFKLKEVDDEQKEKPKASAEKASNQKELESNGSGKDNEFGLGLDSPQNEIAQNGNNDQSITECSIATTAEFSHDTDATEIDSLDGYDLQDEDDGLTESDSKLPIQAMEIKKDIWNTEGILKPADRSFSQSKLEVIEEEGKVGPDEDKPPSKSSSSEKTPDKTDQKSGAQFFTLEGRHPDRSVFPDTYFSYKVDEEFATPFKTVATKGLDFDPWSNNRGDDEVFDSKSREDETKPFGLAVEDRSPATTPDTTPARTPTDESTPTSEPNPFPFHEGKMFEMTRSGAIDMSKRDFVEERLQFFQIGEHTSEGKSGDQGEGDKSMVTATPQPQSGDTTVETNLERNVETPTVEPNPSIPTSGECQEGTSSSGSLEKSAAATNTSKVDPKLRTPIKMGISASTMTMKKEGPGEITDKIEAVMTSCQGLENETITMISNTANSQMGVRPHEKHDFQKDNFNNNNNLDSSTIQTDNIMSNIVLTEHSAPTCTTEKDNPVKVSSGKKTGVLQGHCVRDKQKVLGEQQKTKELIGIRQKSKLPIKATSPKDTFPPNHMSNTKASKMKQVSQSEKTKALTTSSCVDVKSRIPVKNTPRDNIIAVRKACATQKQGQPEKGKAKQLPSKLPVKVRSTCVTTTTTTATTTTTTTTTTTTSCTVKVRKSQLKEVCKHSIEYFKGISGETLKLVDRLSEEEKKMQSELSDEEESTSRNTSLSETSRGGQPSVTTKSARDKKTEAAPLKSKSEKAGSEKRSSRRTGPQSPCERTDIRMAIVADHLGLSWTELARELNFSVDEINQIRVENPNSLISQSFMLLKKWVTRDGKNATTDALTSVLTKINRIDIVTLLEGPIFDYGNISGTRSFADENNVFHDPVDGWQNETSSGNLESCAQARRVTGGLLDRLDDSPDQCRDSITSYLKGEAGKFEANGSHTEITPEAKTKSYFPESQNDVGKQSTKETLKPKIHGSGHVEEPASPLAAYQKSLEETSKLIIEETKPCVPVSMKKMSRTSPADGKPRLSLHEEEGSSGSEQKQGEGFKVKTKKEIRHVEKKSHS

SEQ ID NO: 37735 - protein, 314 aa, Homo sapiens
QMMSLEPSHFLSSPPLPSFPSLSSTFLCAGLIPRQAFCIWWFPAPPGLCPAISIISYKPFFSTRPYQSWTTAPITVPGPAKSGFTSLSSSSSNTPSASPLKSIWSVSTPSPIKSTLGASTTSGLRPKSPTRQVLRDFPMCSAAATTAFMFSSRTSPVTTAGSLLERSSITMTPPASPKSNINMYSSSLPFKSIITSAAPLISSPLKSVVSPVKSAVDVISSAKITMASSLSSPVKQMPGHAEVALVNGSISPLKYPSSSTLINGCKATATLQEKISSATNSVSSVVSAATDTVEKVFSTTTAMPFSPLRSYVSG

SEQ ID NO: 37736 - protein, 227 aa, Homo sapiens
  DOMAIN (132)..(142): dUTPase domain identified by eMATRIX, accession number PF00692C, p-value=3.189e-09, raw score of 11.65
  DOMAIN (174)..(225): Retroviral aspartyl protease domain identified by PFam, accession name rvp, E-value=2.6e-14, PFam score of 55.9
WIEAAPQAQEVQGDGLWLPCGAAGAGGLQSARSYGTVGEASVAEHPWCAPGGCMAGCGSLAAAASPGLVPGHLPQPTAAPSHPHRASLRVALLSGQWGLTCGQLLASAPLLQSWAWDTRLLMCRRLSCSSEEGERIAQLLLLPYLKLGSSTVKRTGGFGNTNPAGKAVYWVNQVSDKRPICTVAIQGKDFEGLVDTEADVSIIAINQWPQHWPKQKASIGIVGVGAA

SEQ ID NO: 37737 - protein, 556 aa, Homo sapiens
  DOMAIN (243)..(254): PROTEASE POLYPROTEIN HYDROLASE ASP domain identified by eMATRIX, accession number PD00302A, p-value=7.457e-09, raw score of 6.33
  DOMAIN (116)..(190): gag gene protein p24 domain identified by PFam, accession name gag_p24, E-value=5.2e-22, PFam score of 86.5
RWRVKVSPQNLLSLTLQCSKAVLPMVPRTRDYRVGGMGENCPRFFKKHIKMEQKFQSQFWSMWVLIKAALEPFQTDDEADSDAEEEDGCKELNSDSECEEQEMEEIKEKKGKLNKGPKESYIDFIAWLQEVVYKAITDKTAQDVVIQLLTYDNANAECQTAIRPLRGKSHLAEYIKACNGTGGERIAQLLLLPYIKLGSSTVKRAGGFGSTNPARKAVYWVNQVSDKRPICTVTIQGKDFEGRVDTGADVSIIAINQWPQHWPKQKAPIGIAGVGAASEIFHSSLILPCQGLDGQEETIQPIIIPIPVNLWAESWGDRGSFVAIIIITLMGHTCGQHSTSAKACCNHYCTRMPKDYYPWFLKGTYNQQPQDLVLCVSATPAMAKGGHGTAQAIASEGESPKLWQFPSNVGPTGVQKTKTEICEDSTCVFEEPCNCSSLYVRSNGGSHSQSITKFNYNGIIGSRGGEGQVVALSHQRQGDPKCHCGPPLKVGAYGGQVTVATIKYRQSGNFGPDERTVVPMVQCTNWLRDDNVWMEQKLALMTEQLNEQHGASLLHG

SEQ ID NO: 37738 - protein, 60 aa, Homo sapiens
LRVVTLAVAAFIFNTTEFVPVGLLSDIAQSFHMQTAQVGIMLTIYAWVVAQPPLTRGGKA

SEQ ID NO: 37739 - protein, 571 aa, Homo sapiens
  DOMAIN (21)..(76): Aspartate/ornithine carbamoyltransferase domain identified by PFam, accession name OTCace, E-value=1.2e-08, PFam score of 34.4
MTWAYSPSYGKPLSVPQGIIGLMTRFGMDVTLAHPEGYDLIPDVVEVAKNNAKASGGSFRQVTSMEEAFKDADIVYPKSWAPYKVMEERTELLRANDHEGVKRTGKTLSRHRTRNTNDWHQHRRDDGTDPVRAKPRTSTADQTEINGASCKEGRSDQKAYDEKSRPDEMPIDDNVVLNKGDVLQVSGDARRVKTIADRIGFISIHSQVTDLLAFCAFFVIGLMIGMITFQFSTFSFGMGNAAGLLFAGIMLGFMRANHPTFGYIPQGALSMVKEFGLMVFMAGEIQVDGNTIYPHIWKSCDGGVLFAKQYLLRLGIILYGFRLTFSQIADVGISGIIIDVLTLSSTFLLACFLGQKVFGLDKHTSWLIGAGSSICGAAAVLATEPVVKAEASKVTVAVATVVIFGTVAIFLYPAIYPLMSQWFSPETFGIYIGSVIEVGVDVPNASLMIIENPERLGLAQLHQLRGRVGRGAGLLTACCSTKRRFLKAAPEVTRTGLADDRSSGLPLQTGYELASMQGLVDVVRLSPQGTDTFAMLDAFRANENGAAPLPLTANSDCNGYWRRLAGLELQA

SEQ ID NO: 37740 - protein, 258 aa, Homo sapiens
  DOMAIN (138)..(217): Potassium channel domain identified by PFam, accession name TrkA, E-value=5.4e-10, PFam score of 46.6
MHLNENLDDNGEMHDINVTPFIDVMLVLLIISMVAAPLATVDVKVNLPASTSTPQPRPEKPVYLSVKADNSDTSRPQPDHLMLLDDGKNLRVLGIYRQTGCYIERIRRNGILANPDGDAVLQMGDEIAFRNGKEVFDRDLLDMRIVTEEVVVKNHNAVGKRLAQLKLTDHGCFLNRVIRSQIEMPIDDNVVLNKGDVLQVSGDARRVKTIADRIGFISIHRQVTDLLAFCAFLVIGLMIGMITFQFSTFSFGMGNAAG

SEQ ID NO: 37741 - protein, 52 aa, Homo sapiens
  DOMAIN (22)..(36): MAJOR SIGMA-70 FACTOR SIGNATURE domain identified by eMATRIX, accession number PR00046A, p-value=3.000e-17, raw score of 13.26
SHLRFVVHIARNYAGYGLPQADLIQEGNIGLMKAVRRFNPEVGVRLVSFAVH

SEQ ID NO: 37742 - protein, 58 aa, Homo sapiens
  DOMAIN (18)..(33): Flagella basal body rod proteins domain identified by eMATRIX, accession number BL00588A, p-value=7.750e-13, raw score of 11.03
  DOMAIN (3)..(33): Flagella basal body rod proteins domain identified by PFam, accession name flg_bb_rod, E-value=1.1e-11, PFam score of 51.1
MAFSQAVSGLNAAATNLDVIGNNIANSATYGFKSGTASFADMFAGSKVGGCWKFVEKF

SEQ ID NO: 37743 - protein, 331 aa, Homo sapiens
  DOMAIN (178)..(221): 1 kw MIND INHIBITOR DIVISION CONTROL domain identified by eMATRIX, accession number DM01756B, p-value=4.822e-15, raw score of 22.91
  DOMAIN (144)..(258): ParA family ATPase domain identified by PFam, accession name ParA, E-value=1.9e-26, PFam score of 101.3
ELGECGCRQGSVSHCGRGSRPLLPRVRGKRHLPRARLARCQEALSPWGFCRFRNHHQTGFSLAGANQRGPLAATLSGPGGEGQSAVARLMGEKKNHPGAQYATRLSPRVGRFINAAGTTGFPTGKRAPTCWPGADIIPSCLALPRIETELMGKFDEGKLPTDPHLMLGLAIETVAHDYDVIVIDSAPNLGIGTINVVCAADVLIVPTPAELFDYTSALQFFDMLRDLLKNVDLKGFEPDVRILLTKYSNSNGSQSPWMEEQIRDAWGSMVLKNVVRETDEVGKGQIRMRTVFEQAIDQRSSTGAWRNALSIWEPVCNEIFDRLIKPRWEIR

SEQ ID NO: 37744 - protein, 371 aa, Homo sapiens
  DOMAIN (326)..(343): kw REPLICATION REPB REPA INITIATION domain identified by eMATRIX, accession number DM00653B, p-value=3.250e-15, raw score of 16.63
  DOMAIN (144)..(258): ParA family ATPase domain identified by PFam, accession name ParA, E-value=3.6e-26, PFam score of 100.4
MEIRGRVEQRVGYTIEQINHMRDVFGTRLRRAEDVFPPVIGVAAHKGGVYKTSVSVHLAQDLALKGLRVLLVEGNDPQGTASMYHGWVPDLHIHAEDTLLPFYLGEKDDVTYAIKPTCWPGLDIIPSCLALHRIETELMGKFDEAESPTELMGKFDEGKLPTDPHLMLRLAIETVAHDYDVIVIDSAPNLGIGTINVVCAADVLIVPTPAELFDYTSALQFFDMLRDLLKNVDLKGFEPDVRILLTKYSNSNGSQSPWMEEQIRDAWGSMVLKNVVRETDEVGKEETALCQYRKPDGSGIVSLNIDWIIERYQLPQSYQTRPDFRRRFLQVCVNEINSRTPMRLSYIEKKKGRQTTHIVFSFRDITSMTTG

SEQ ID NO: 37745 - protein, 392 aa, Homo sapiens
  DOMAIN (248)..(291): 1 kw MIND INHIBITOR DIVISION CONTROL domain identified by eMATRIX, accession number DM01756B, p-value=4.822e-15, raw score of 22.91
  DOMAIN (213)..(327): ParA family ATPase domain identified by PFam, accession name ParA, E-value=1e-28, PFam score of 108.8
TDDTSGTVVRSDYQTDDTSGTVVSTNNQTDDTSGTVVRSNNQTDDTSGTVCDNLKTCHTSHGSVMAETAVINHKKRKNSPRIVQSNDLTEAAYSLSRDQKRMLYLFVDQIRKSDGTLQEHDGICEIHVAKYAEIFGLTSAEADLALKGLRVLLVEGNDPQGTASMHHGWVSDLHIHAEDTLLPFYLGEKDDVTYAIKPTCWPGLDIIPSCLALHRIETELMGKFDEGRLPTDPHLMLRLAIETVAHDYDVIVIDSAPNLGIGTINVVCAADVLIVPTPAELFDYTSALQFLDMLRDLLKNVDLKGFEPDVRILLTKYSNSNGSQSPWMEEQIRDALGSMVLQNVVRETDEVGKGHIRMRTVFEQAIDQRSSTGDWRNALSIWELSAMTFSIV

SEQ ID NO: 37746 - protein, 126 aa, Homo sapiens
  DOMAIN (1)..(75): ParA family ATPase domain identified by PFam, accession name ParA, E-value=0.032, PFam score of -6.4
LLLFRDLGIGTINVVCAADVLIVPTPAELFDYTSALQFFDMLRDLLKNVDLKGFEPDVRILLTKYSNSNGSQSPWMEEQIRDAARFPVGKPVVPAALMNRPTRRGEAVCVLGARVVFLFTSETGNS

SEQ ID NO: 37747 - protein, 476 aa, Homo sapiens
  DOMAIN (28)..(71): 1 kw MIND INHIBITOR DIVISION CONTROL domain identified by eMATRIX, accession number DM01756B, p-value=4.822e-15, raw score of 22.91
  DOMAIN (2)..(402): ParA family ATPase domain identified by PFam, accession name ParA, E-value=5.7e-54, PFam score of 192.7
MGKFDEGKLPTDPHLMLRLAIETVAHDYDVIVIDSAPNLGIGTINVVCAADVLIVPTPAELFDYTSALQFFDMLRDLLKNVDLKGFEPDVRILLTKYSNSNGSQSPWMEEQIRDAWGSMVLKNVVRETDEVGKVSVHLAQDLALKGLRVLLVEGNDPQGTASMYHGWVPDLHIHAEDTLLPFYLGEKDDVTYAIKPTCWPGLDIIPSCLALHRIETELMGKFDEGKLPTDPHLMLRLAIETVAHDYDVIVIDSAPNLGIGTINVDDVTYAIKPTCWPGLDIIPSCLALHRIETELMGKFDEGKLPTDPHLMLRLAIETVAHDYDVIVIDSAPNLGIGTINVVCAADVLIVPTPAELFDYTSALQFFDMLRDLLKNVDLKGFEPDVRILLTKYSNSNGSQSPWMEEQIRDAWGSMVLKNVVRETDEVGKGQIRMRTVFEQAIDQRSSTGAWRNALSIWEPVCNEIFDRLIKPRWEIR

SEQ ID NO: 37748 - protein, 375 aa, Homo sapiens
  DOMAIN (185)..(228): 1 kw MIND INHIBITOR DIVISION CONTROL domain identified by eMATRIX, accession number DM01756B, p-value=4.822e-15, raw score of 22.91
  DOMAIN (150)..(265): ParA family ATPase domain identified by PFam, accession name ParA, E-value=9.9e-28, PFam score of 105.6
MAVCRSRALPRGKAAKAPREIEHSAATQLWPLCYRLKPVGADTENQSPQQSVIPRHRFECGSRPGSRSPTQPRLLLKPKDLALKGLRVLLVEGNDPQGTASMYHGWVPDLHIHAEDTLLPFYLGEKDDVTYAIKPTCWPGLDIIPSCLALHRIETELMGKFDEGKLPTDPHLMLRLAIETVAHDYDVIVIDSAPNLGIGTINVVCAADVLIVPTPAELFDYTSALQFFDMLRDLLKNVDLKGFEPDVRILLTKYSNSNGSQSPPMEEQIRDAWGSMVLKNVKCRWSRRVKCALRKYYRVLVASAHHRWCIIQIGTIIAHKAYERGPGVKGQSLVVRFTGERKPALALNTQTASPRVWADSLMQLARQVSRLESGQ

SEQ ID NO: 37749 - protein, 252 aa, Homo sapiens
  DOMAIN (127)..(170): 1 kw MIND INHIBITOR DIVISION CONTROL domain identified by eMATRIX, accession number DM01756B, p-value=4.822e-15, raw score of 22.91
  DOMAIN (95)..(207): ParA family ATPase domain identified by PFam, accession name ParA, E-value=9.3e-25, PFam score of 95.7
SDRRYEWDRGPSLIIRPTIRVGPWSQTNNQTDDTSGTVVRRPFPPVIGVVFHKGGVYKTSVSVHLAQDLALKGLRVLLVEGNDPQGTASMYHGWVPDLHIHAEDTLLPFYDPHLMLRLAIETVAHDYDVIVIDSAPNLGIGTINVVCAADVLIVPTPAELFDYTSALQFFDMLRDLLKNVDLKGFEPDVRILLTKYSNSNGSQSPWMEEQISDALRISQRRNISSKFILQSACITLTTFISTCWAIIVTQSG

SEQ ID NO: 37750 - protein, 443 aa, Homo sapiens
  DOMAIN (207)..(250): 1 kw MIND INHIBITOR DIVISION CONTROL domain identified by eMATRIX, accession number DM01756B, p-value=4.822e-15, raw score of 22.91
  DOMAIN (172)..(437): ParA family ATPase domain identified by PFam, accession name ParA, E-value=1.3e-52, PFam score of 188.2
MKLMETLNQCINAGHEMTKAIAIAQFNDDSPEARKITRRWRIGEAADLVGVSSQAIRDAEKAGRLPHPDMEIRGRVEQRVGYTIEQINHMRDVFVSVHLAQDLALKGLRVLLVEGNDPQGTASMYHGWVPDLHIHAEDTLLPFYLGEKDDVTYAIKPTCWPGLDIIPSCLALHRIETELMGKFDEGKLPTDPHLMLRLAIETVAHDYDVIVIDSAPNLGIGTINVVCAADVLIVPTPAELFDYTSALQFFDMLRDLLKNVDLKGFEPDDLALKGLRVLLVEDLHIHAEDTLLPFYLGEKDDVTYAIKPTCWPGLDIIPSCLALHRIETELMGKFDEGKLPTDPHLMLRLAIETVAHDYDVIVIDSAPNLGIGTINVVCAADVLIVPTPAELFDYTSALQFFDMLRDLLKNVDLKGFEPDVRILLTKYSNSKGGSLESHSRLQA

SEQ ID NO: 37751 - protein, 395 aa, Homo sapiens
  DOMAIN (222)..(265): 1 kw MIND INHIBITOR DIVISION CONTROL domain identified by eMATRIX, accession number DM01756B, p-value=4.822e-15, raw score of 22.91
  DOMAIN (187)..(301): ParA family ATPase domain identified by PFam, accession name ParA, E-value=2.7e-28, PFam score of 107.5
MGKDFISKTPKAMATKAKIDKRDLIKLKSFCTAKETTIRERSSSPATEQSWTENDFDELREEGFRRSNYSELQEEILTKGKEAENFEKNLDERITRITNTEKCLKELMELKAKAREDLALKGLRVLLVEGNDPQGTASMYHGWVPDLHIHAEDTLLPFYLGEKDDVTYAIKPTCWPGLDIIPSCLALHRIETELMGKFDEGKLPTDPHLMLRLAIETVAHDYDVIVIDSAPNLGIGTINVVCAADVLIVPTPAELFDYTSALQFFDMLRDLLKNVDLKGFEPDVRILLTKYSNSNGSQSPWMEEQIRDAWGSMVLKNVVRETDEVGKAELVLKLQSKVPFTLRSTFLKQEESLPIATIAGMCGVTPEASIILILTPCCGKYYLATTADYSGPRAL

SEQ ID NO: 37752 - protein, 355 aa, Homo sapiens
  DOMAIN (210)..(253): 1 kw MIND INHIBITOR DIVISION CONTROL domain identified by eMATRIX, accession number DM01756B, p-value=4.822e-15, raw score of 22.91
  DOMAIN (175)..(289): ParA family ATPase domain identified by PFam, accession name ParA, E-value=2.7e-28, PFam score of 107.5
MAETAVINHKKRKNSPRIVQSNDLTEAAYSLSRDQKRMLYLFVDQIRKSDGTLQEHDGICEIHVAKYAEIFGLTSAEASKDIRQALKSFAGKEVVFYRPEEDAGDEKGYESFPWFIKRNDPQGTASMYHGWVPDLHIHAEDTLLPFYLGEKDDVTYAIKPTCWPGLDIIPSCLALHRIETELMGKFDEGKLPTDPHLMLRLAIETVAHDYDVIVIDSAPNLGIGTINVVCAADVLIVPTPAELFDYTSALQFFDMLRDLLKNVDLKGFEPDVRILLTKYSNSNGSQSPWMEEQIRDAWGSMVLKNVVRETDEVGKGQIRMRTVFEQAIDQRSSTGAWRNALSIWEPVCNEISGGL

SEQ ID NO: 37753 - protein, 323 aa, Homo sapiens
  DOMAIN (84)..(127): 1 kw MIND INHIBITOR DIVISION CONTROL domain identified by eMATRIX, accession number DM01756B, p-value=4.822e-15, raw score of 22.91
  DOMAIN (49)..(296): ParA family ATPase domain identified by PFam, accession name ParA, E-value=1.8e-53, PFam score of 191.1
  misc_feature (1)...(323): Xaa = X or * as defined in Table 2
MYHGWVPDLHIHAEDTLLPFYLGEKDDVTYAIKPTCWPGLDIIPSCLALHRIETELMGKFDEGKLPTDPHLMLRLAIETVAHDYDVIVIDSAPNLGIGTINVVCAADVLIVPTPAELFDYTSALQFFDMLRDLLKNVDLKGFEPDRPFSCSSFWGKRRMFTYAIKPPWLAGGLTLFPSGRVWPGIETELMGKFDEGNCPTDPHLMLRLAIETVAHDYDVIVIDSAPNLGIGTINVVCAADVLIVPTPAELFDYTSALQFFDMLRDLLKNVDLKGFEPDVRILLTKYSNSNGSQSPWMEEQIRDAWGSMVLKNVVRETDEVGKX

SEQ ID NO: 37754 - protein, 397 aa, Homo sapiens
  DOMAIN (106)..(149): 1 kw MIND INHIBITOR DIVISION CONTROL domain identified by eMATRIX, accession number DM01756B, p-value=4.822e-15, raw score of 22.91
  DOMAIN (71)..(185): ParA family ATPase domain identified by PFam, accession name ParA, E-value=2.7e-28, PFam score of 107.5
DLALKGLRVLLVEGNDPQGTASMYHGWVPDLHIHAEDTLLPFYLGEKDDVTYAIKPTCWPGLDIIPSCLALHRIETELMGKFDEGKLPTDPHLMLRLAIETVAHDYDVIVIDSAPNLGIGTINVVCAADVLIVPTPAELFDYTSALQFFDMLRDLLKNVDLKGFEPDVRILLTKYSNSNGSQSPWMEEQIRDAWGSMVLKNVVRETDEVGKGQIRMRTVFEQAIDQGGEDPRNYTSGDNHTLRDPHYVEDKGHKYLVFEANTGTENGYQGEESLFNKAYYGGGTNFFRKESQKLQQSAKKRDAELANGALGIIELNNDYTLKKVMKPLITSNTVTDEIERANVFKMNGKWYLFTDSRGSKMTIDGINSNDIYMLGYVSNSLTGPYKPLNKTGLVLQM

SEQ ID NO: 37755 - protein, 471 aa, Homo sapiens
  DOMAIN (274)..(317): 1 kw MIND INHIBITOR DIVISION CONTROL domain identified by eMATRIX, accession number DM01756B, p-value=4.822e-15, raw score of 22.91
  DOMAIN (239)..(353): ParA family ATPase domain identified by PFam, accession name ParA, E-value=2.7e-28, PFam score of 107.5
VLRGDSVEKTSRVRSGNERDQELLLEDALDDFIPSFLLTGQQTPAFGRRVSGVIEIADGSRRRKAAALTESDYRVLVGELDDEQMAALSRLGNDYRPTSAYERGQRYASRLQNEFAGNISALADAENISRKIITRCINPAKLPKSVVALFSHPGELSARSGDALQKAFTDKEELLKQQASNLHEQKKAGVIFEAEEVITLLTSVLKTSTHQELVKDDVTYAIKPTCWPGLDIIPSCLALHRIETELMGKFDEGKLPTDPHLMLRLAIETVAHDYDVIVIDSAPNLGIGTINVVCAADVLIVPTPAELFDYTSALQFFDMLRDLLKNVDLKGFEPDVRILLTKYSNSNGSQSPWMEEQIRDAWGSMVLKNVVRETDEVGKGQIRMRTVFEQAIDQRSSTGAWRNALSIWEPVCNEIFDRLIKPRWRLDECILYSKAWLSCTLFRLSYIEKKKGRQTTHIVFSFRDITSMTTG

SEQ ID NO: 37756 - protein, 392 aa, Homo sapiens
  DOMAIN (235)..(278): 1 kw MIND INHIBITOR DIVISION CONTROL domain identified by eMATRIX, accession number DM01756B, p-value=4.822e-15, raw score of 22.91
  DOMAIN (200)..(307): ParA family ATPase domain identified by PFam, accession name ParA, E-value=6.3e-24, PFam score of 92.9
MKLMETLNQCINAGHEMTKAIAIAQFNDDSPEARKITRRWRIGEAADLVGVSSQAIRDAEKAGRLPHPDMEIRGRVEQRVGYTIEQINHMRDVFGTRLRRAEDVFPPVIGVAAHKGGVYKTSVSVHLAQDLALKGLRVLLVEGNDPQGTASMYHGWVPDLHIHAEDTLLPFYLGEKDDVTYAIKPTCWPGLDIIPSCLALHRIETELMGKFDEGKLPTDPHLMLRLAIETVAHDYDVIVIDSAPNLGIGTINVVCAADVLIVPTPAELFDYTSALQFFDMLRDLLKNVDLKGFEPDVNVSKSDDTLKINGVEDHKTIFDGDGKTYQNVQQFIDEGNYTSGDNHTLRDPHYVEDKGHKYFVFEANTGTENGYQGEESLFGLLGEGINTCERVR

SEQ ID NO: 37757 - protein, 536 aa, Homo sapiens
  DOMAIN (281)..(324): 1 kw MIND INHIBITOR DIVISION CONTROL domain identified by eMATRIX, accession number DM01756B, p-value=1.098e-10, raw score of 22.91
  DOMAIN (244)..(462): ParA family ATPase domain identified by PFam, accession name ParA, E-value=8.9e-27, PFam score of 102.4
MKRAPVIPNIRSILNRYEDTSLSTPAAPMVDSLIARVGVMARGNAITLPVCGRDVKFTLEVLRGDSVEKTSRVWSGNERDQELLTEDALDDLIPSFLLTGQQTPAFGRRVSGVIEIADGSRRRKAAALTESDYRVLVGELDDEQMAALSRLGNDYRPTSAYERGQRYASRLQNEFAGNISALADAENISRKIITRCINTAKLPKSVVALFSTPVNYLSGQFFDMLRDLLKNVDLKGFEPDVRILLTKYSNSNGSQSPWMEEQIRDAWGSMVLKNVVRETDEVGKVIDSAPNLGIGTINVVCAADVLIVPTPAELFDYTSALQFFDMLRDLLKNVDLKGFEPDVRILLTKYSNSNGSQSPWMEEQIRDAWGSMVLKNVVRETDEVGKVIDSAPNLGIGTINVVCAADVLIVPTPAELFDYTSALQFFDMLRDLLKNVDLKGFEPDVRILLTKYSNSNGSQSPWMEEQIRDAWGSMVLKNVVRETDEVGKGQIRMRTVFEQAIDQRSSTGAWRNALSIWEPVCNEIFDRLIKPRWEIR

SEQ ID NO: 37758 - protein, 1023 aa, Homo sapiens
  DOMAIN (13)..(56): 1 kw MIND INHIBITOR DIVISION CONTROL domain identified by eMATRIX, accession number DM01756B, p-value=4.822e-15, raw score of 22.91
  DOMAIN (1)..(688): ParA family ATPase domain identified by PFam, accession name ParA, E-value=1.6e-22, PFam score of 88.3
MLRLAIETVAHDYDVIVIDSAPNLGIGTINVVCAADVLIVPTPAELFDYTSALQFFDMLRDLLKNVDLKGFEPDVRILLTKYSNSNGSQSPWMEEQIRDAWGSMVLKNVVRETDEVGKGQIRMRTVFEQAIDQRSSTDTSLSTPAAPMVDSLIARVGVMARGNAITLPVCGRDVKFTLEVLRGDSVEKTSRVWSVDSCSKLEQHSTLSRAILLIYKGFCRFRNHHQTGFSPAGANQRGPLAATLSGPGGEGQSAVARLTGEKKNHPGAQYANRLSPRVGRFINAAGTTGFPTGKRAVSATQLMDFADSGTTIKQDFRLLGQTQRGPLAATLSGPGGEGQSAVARLTGEKKNHPGAQYANRLSPRVGRFINAAGTTGFPTGKRAMLQIPKQQQNEKYQVPQFDQSTIKNIESAKGLDVWDSWPLQNADGTVAEYNGYHVVFALAGSPKDADDTSIYMFYQKVGDNSIDSWKNAGRVFKDSDKFDANDPILKDQTQEWSGSATFTSDGKIRLFYTDYSGKHYGKQSLTTAQVNVSKSDDTLKINGVEDHKTIFDGDGKTYQNVQQFIDEGNYTSGDNHTLRDPHYVEDKGHKYLGEDYILWGEWRHQASSRITAHVFSAPNLGIGTINVVCAADVLIVPTPAELFDYTSALQFFDMLRDLLKNVDLKGFEPDVRILLTKYSNSNGSQSPWMEEQIRDAWGSMVLKNVVRETDEVGKGQIRMRTVFEQAIDQRSSTESIIPNDGKKLSFSVSGKMRKGHYFSSEESHVRTDILADTKMQSANGLDVWDSWPLQNADGTVAEYNGYHVVFALAGSPKDADDTSIYMFYQMVGDNSIDSWKNAGRVFKDSDKFDAHDPILKDQTQEWSGSATFTSDGKIRLFYTDYSGKHYGKQSLTTAQVNVSKSDDTLKINGVEDHKTIFDGDGKTYQNVQQFIDEGNYTSGDNHTLRDPHYVEDKGHKYLVFEANTGTENGYQSEESLFNKAYYGGGTNFFRKESQKLQQSAKKRDAELTNGAPSYHRVKLLITH

SEQ ID NO: 37759 - protein, 1707 aa, Homo sapiens
  DOMAIN (154)..(183): kw REPLICATION REPB REPA INITIATION domain identified by eMATRIX, accession number DM00653A, p-value=7.207e-27, raw score of 20.40
  DOMAIN (319)..(1633): ParA family ATPase domain identified by PFam, accession name ParA, E-value=1.6e-117, PFam score of 403.8
KLVTLHMDLSWRKQRLSMHKKRKNSPRIVQSNDLTEAAYSLSRDQKRMLYLFVDQIRKSDGTLQEHDGICEIHVAKYAEIFGLTSAEASKDIRQALKSFAGKEVVFYRPEEDAGDEKGYESFPWFIKRAHSPSRGLYSVHINPYLIPFFIGLQNRFTQFRLSETKEITNPYAMRLYESLCQYRKPDGSCIVSLKIDWIIEAYQLPQSYQRMPDFRRRFLQVCVNEINSRTPMRLSYIEKKKGRQTTHIDLALKGLRVLLVEGNDPQGTASMYHGWVPDLHIHAEDTLLPFYLGEKDDVTYAIKPTCWPGLDIIPSCLALHRIETELMGKFDEGKLPTDPHLMLRLAIETVAHDYDVIVIDSAPNLGIGTINVVCAADVLIVPTPAELFDYTSALQFFDMLRDLLKNVDLKGFEPDVRILLTKYSNSNGSQSPWMEEQIRDAWGSMVLKNVVRETDEVGKGIPNLLLHPRGLRAITIAVFGKQNTYIRLEPFKINVLEQITKHIEKLQCGGVVKQLSRRGNNQHISSTYDINRADTQVRRAVNNYDIIVMSNSFNGQSEHQAIRDAEKAGRLPHPDMEIRGRVEQRVGYTIEQINHMRDVFGTRLRRAEDVFPPVIGVAAHKGGVYKTSVSVHLAQDLALKGLRVLLVEGNDPQGTASMYHGWVPDLHIHAEDTLLPFYLGEKDDVTYAIKPTCWPGLDIIPSCLALHRIETELMGKFDEGKLPTDPHLMLRLAIETVAHDYDVIVIDSAPNLGIGTINVVCAADVLIVPTPAELFDYTSALQFFDMLRDLLKNVDLKGFEPDVRILLTKYSNSNGSQSPWMEEQIRDAWGSMVLKNVVRETDEVGKGIPNLLLHPRGLRAITIAVFGKQNTYIRLEPFKINVLEQITKHIEKLQCGGVVKQLSRRGNNQHISSTYDINRADTQVRRAVNNYDIIVMSNSFNGQSEHQAIRDAEKAGRLPHPDMEIRGRVEQRVGYTIEQINHMRDVFGTRLRRAEDVFPPVIGVAAHKGGVYKTSVSVHLAQDLALKGLRVLLVEGNDPQGTASMYHGWVPDLHIHAEDTLLPFYLGEKDDVTYAIKPTCWPGLDIIPSCLALHRIETELMGKFDEGKLPTDPHLMLRLAIETVAHDYDVIVIDSAPNLGIGTINVVCAADVLIVPTPAELFDYTSALQFFDMLRDLLKNVDLKGFEPDVRSRGKCIDAGRVGQDELAPRPPDDVWEHWQIGWAPLQTSWKCAQSPVMWTEQGDPQAPIGTWALAGAAPGNERDQELLTEDALDDLIPSFLLTGQQTPAFGRRVSGVIEIADGSRRRKAAALTESDYRVLVGELDDEQMAALSRLGNDYRPTSAYERGQRYASRLQNEFAGNISALADAENISRKIITRCINTAKLPKSVVALFSHPGELSARSGDALQKAFTDKEELLKQQASNLHEQKKAGVIFEAEEVITLLTSVLKTSSASRTSLSSRHQFAPGATVLYKGDKMVLNLDRRHSPAFYLGEKDDVTYAIKPTCWRGLDITPSCLAVHRIETELMGKFDEGKVPTDPHLMLRLAIETVAHDYDVIVIDSAPNLGIGTINVVCAADVLIVPTPAELFDYTSALQFFDMLRDLLKNVDLKGFEPDVRILLTKYSNSNGSQSPWMEEQIRDAWGSMVLKNVVRETDEVGKGQIRMRTVFEQAIDQRSSTGAWRNALSIWEPVCNEIFDRLIKPRWEIR

SEQ ID NO: 37760 - protein, 118 aa, Homo sapiens
  misc_feature (1)...(118): Xaa = X or * as defined in Table 2
RATASSISTTRPCESTSNAPSCNSPIRSRSPLPIIRPRASITLILVSMMRMVRATISCAILVSRCQPAISPPLCTAFFRPICAAGVPVFTLFTTTPXSLPLLLISAPSMPLKMELEST

SEQ ID NO: 37761 - protein, 63 aa, Homo sapiens
  misc_feature (1)...(63): Xaa = X or * as defined in Table 2
CSNASARFFAAVNPSGLGMILMXSRFIVFTKLSAIPLLSGLRTAVFFGSSPNIRANWRVSLAR

SEQ ID NO: 37762 - protein, 198 aa, Homo sapiens
  misc_feature (1)...(198): Xaa = X or * as defined in Table 2
LKNSKPQVVMAAAGIFLIMCGVWLGFGGVLDPTKSSGYLIVDIYNEIICMLSNRIAGLGLSIMAVGGYARYMEGTPASRAMVSLLSRPLKLIRSPYIILSATXVIGQIMPQFITSASGLGMLLMVPLFPTLVSLGVSRLSAVAVIATTMSIEWGILETNSIFAAQVAGMKIATFFCHAHNPVASRVILSVAISGTRAR

SEQ ID NO: 37763 - protein, 326 aa, Homo sapiens
  DOMAIN (275)..(318): Alkaline phosphatase proteins domain identified by eMATRIX, accession number BL00123B, p-value=2.000e-36, raw score of 19.31
  DOMAIN (140)..(228): PDZ domain (Also known as DHR or GLGF) domain identified by PFam, accession name PDZ, E-value=3.1e-08, PFam score of 40.8
MGYVILKNYKPQVVLAAAGIFLMMCGVWLGFGGVLDPTKSSGYLIVDIYNEILRMLSNRIAGLGLSIMALGVYARYMERIGASRAMVSLLSRPLKLIRSPYIILSATYVIGQIMAQFITSASGLGMLLMVTLFPTLQSSQNQVDSSSIFNGIEGAEMSNKGKDQGVVVNNVKTGTPAAQIGLKKGDVIIGANQQAVKNIAELRKQTVNAVGPMGGITSASMPMLVVENVTDGNRNASAVRHRLIRGATLLAAATPPYSCFYSLSYKSQFQNLPLTGQYTHYALNKKTGKPDYVTDSAASATAWSTGVKTYNGALGVDIRTVGIRRG

SEQ ID NO: 37764 - protein, 94 aa, Homo sapiens
  misc_feature (1)...(94): Xaa = X or * as defined in Table 2
MNRHFSKEDIYAAKKHMKKCSPSLAIREMQIKTTMRYHLTPVRMAIIKKSGNNRYWRGCGEIGMLLHCWWEGKLVQPLWKTVVCTQRIXKSFYF

SEQ ID NO: 37765 - protein, 821 aa, Homo sapiens
  DOMAIN (272)..(317): kw TRANSCRIPTASE REVERSE II ORF2 domain identified by eMATRIX, accession number DM01354N, p-value=1.000e-40, raw score of 13.17
  DOMAIN (212)..(466): Reverse transcriptase domain identified by PFam, accession name rvt, E-value=8.3e-07, PFam score of 27.0
MGDFNTPLSTLDRSMRQKVKKDTQELNSALHQADLIDIYRTLHPKSTEYTFFSAPHHTYSKIDHILGSKALLSKCKRTEIITNYLSDGSAIKLELRIKNLTQNRSTTWKLNNLLLNDYWVPNEMKAEIKMFFETNENKDTTYQNLWDAFKAVCRGKFIALNAHKRKQERSKIDTLTSQLKELEKQEQTHSKASRRQEITKIRAELKEIETQKTLQKINESRSWFFERINKIDRPLARLIKKKREKNQIDTIKNDKGDITTNPTEIQTTIREYYKHLYANKLENLEEMDKFLDTYTLPRLNQEEVESLNRPITGSEIVAIINSLPTKKSPGPDGFTAEFYQRYKEELVPFLLKLFQSIEKEGILLLEVLARAIRQEKEIKGIQLGKEEVKFSLFADDMIVYLENPIVSAQNLLKLISNFSKVSGYKINVQKSQAFLYTNNRQTESQIMSELPFTIASKRIKYLGIQLTRDVKDLFKENYKPLLKEIKEDTNKCKNIPCSWVGRINIVKMAILPKVIYRFNAIPIKLPMPFFTELEKTTLKFIWNQKRARIAKSILSQKNKAGGITLPDFKPYYKATVTKTAWYWYQKRDIDQWNRTEPSEITPHIYNYLIFDKPEKNKQWGKDSLFNKWCWENWLAICRKLKLDPFLTPYTKINSRWIKDLNVRPKTIKTLEENLGNTIQDIGMGKDFMSKTPKAMATKDKIDKWDLIKLKSFCTAKETTIRVNRQPTKWEKIFTTYSSDKGLISRIYNELKQIYKKKTNNPIKKWAKDMNRHFSKEDIYAAKKHMKKCSSSLAIREMQIKTTMRYHLTPVRMAIIKKSGNN

SEQ ID NO: 37766 - protein, 472 aa, Homo sapiens; identical to SEQ ID NO: 35776
  DOMAIN (57)..(100): kw TRANSCRIPTASE REVERSE II ORF2 domain identified by eMATRIX, accession number DM01354T, p-value=1.000e-40, raw score of 9.48
  DOMAIN (1)..(179): Reverse transcriptase domain identified by PFam, accession name rvt, E-value=1.3e-14, PFam score of 62.0

SEQ ID NO: 37767 - protein, 757 aa, Homo sapiens
  DOMAIN (98)..(139): kw TRANSCRIPTASE REVERSE II ORF2 domain identified by eMATRIX, accession number DM01354I, p-value=1.000e-40, raw score of 15.55
  DOMAIN (344)..(529): Reverse transcriptase domain identified by PFam, accession name rvt, E-value=1.6e-12, PFam score of 55.0
  misc_feature (1)...(757): Xaa = X or * as defined in Table 2
RSTRQKVNKDTQELNSALHQADLIDIYRTLHLKSTEYTFFSAPHHTYSKIDHILGSKALLSKCKRTEIITNYLSDHSAIKLELRIKNLTQNRSTTWKLNNLLLNDYWVHNKMKAEIKMFFETNENKDTTYQNLWDTFKAVCRGKFIALNAHKRKQERSKIDTLTSQLKELEKQEQTHSKASRRQEITKIRAELKEIETQKTLQKINESRSWFFERINKIDRPLARLIKKKREKNLIDAIKNDKGDITTDPTEIQTTIREYYKHLYTNKLENLEEMDKFLDTYTLPRLNEEEVESLNRPITGAEIVAIINSLPTKKSPGPDGFTAEFYQRYKEELVPFLLKLFQSIEKEGILPNSCYEASIILIPKPGRDTTKKENFRPISLMNIDAKILNKILAKRIQQHIKKLIHHDQVGFIPGMQGWFNIRKSINVIQHINRAKDKNHMIISIDAEKAFDKIQQPFMLKTLNKLDIGRNYCKVHMEPKKSPHRQVNPKPKEQSWRHHTTXLQTILQGYSNQNSMVLVPKQRYRSMEQNRALRNNAAYLQLSDLXQTXEKQAMGNGFPIXXMVLGKLASHMXKAETGSLPYTLYKNQFKMDXRLKRXTXNHKNPRRKPRHYHSGHRHGQGLHVXNTKSNGNKSQNXQMGSNXTKELLHSKRNYHQSEQATYKMGENFHNLLIXQRANIQNLQXTQTNLQEKNKQPHQKVGKGHEQTLLRRRHLCSQKTHEKMLIITGHQRNANQNHNEIPSHTSXNGNHXKVRKQQ

SEQ ID NO: 37768 - protein, 1006 aa, Homo sapiens
  DOMAIN (344)..(390): kw TRANSCRIPTASE REVERSE II ORF2 domain identified by eMATRIX, accession number DM01354O, p-value=1.000e-40, raw score of 8.73
  DOMAIN (379)..(651): Reverse transcriptase domain identified by PFam, accession name rvt, E-value=4.2e-80, PFam score of 279.6
MELKTKAQELREECRSLRSQCDQLEERVSAMEDEMNEMKREGKFREKRIKRNEQSLQEIRDYVKRPNLRLIGVPESDRENGTKLENTLQNIIQENFPNLARQANVQIQEIQRTPQRYSLRRATPRHTIVRFTKVEMKEKMLRAAREKGRVTLKGKPIRLKRISRQKLYKPEEMCRGKFTALNAHERKQERSKIDTLTSQLKELEKQEQTHSKASRRQEITKIRAELKEIETQKTLQKINESGSWFFERINKIDRPLARLIKKKREKNKIDAIKNDKGDITTDPTEIQTTIREYYKHLYANKLENREEMDKFLNTYTLPRLNQEKVESLNRPITGAEIVAIINSLPTKKSPGPDGFTAEFYQRYKEELVPFLLKLFQSTEKEGILPNSFDEASIILIPKPSRDTTKKENFRPVSLMNIDAKSLNKTLANRIQQHIKKLIHHDQVGFIPGMQGWFNIHKSINVIQHINRTKDKNHIIISIDAEKAFDKIQQHFMLKTLNKLGIDGTYLKIIRAIYDKPTANIILNGQKLEAFPLKTGTRQGCPVSPLLFNIVLELLATAIRQKEIKRIQLGKEEVKLSLFADDMTVYLENPTVSAQNLLNLISNFSKVSGYKINVQKSQAFLYTNNRQTESQIMSELPFTIASKRIKYLGIHLTRDVKDLFKENYKPLLNEIKEDTKKWKNIPCSWVGRINIVKMAILPKVIYRFNAIPIKLPMTFFTELEKTTLKFIWNQKRARIAKSILSQKNKAGGIMLPDFKLYYKATVTKTAWYWYQNRDIDQWNRTEPSETTPYIYNYLIFDKPEKNKQWGKDSLFNKWCWENWLAICRKLKLDPFLTPYTKINSRWIKDLNVRPKTIKTLEENLGFTIQDIGMGKDFMCKTPKAMATKAKIDKWDLMKLKSFCTAKETTIRVNRQPTKWEKIFTTYSSDKGLISRIYNELKQIYKKKTNNPIKKWAKDMNRHFSKEDIYAAKKHMKKCSSSLAIREMQIKTTMRYHLTPVRMAIMKKSGNN

SEQ ID NO: 37769 - protein, 1015 aa, Homo sapiens
  DOMAIN (154)..(195): kw TRANSCRIPTASE REVERSE II ORF2 domain identified by eMATRIX, accession number DM01354I, p-value=1.000e-40, raw score of 15.55
  DOMAIN (400)..(594): Reverse transcriptase domain identified by PFam, accession name rvt, E-value=8.6e-35, PFam score of 129.0
MVKGSIQQEELTILNIYAPNTGALRFIKQVLRDLQRDLDSHTIIMGDFHTPLSTLDRSTRQKVNKDIQELNSALHQEDLIDIYRTLHPKSTEYTFFSAPHHTYSKIDHIVGSKALLSKCKRTEIITNCLSDHSAIKLELRIKNLTQNRSTTWKLNNLLLNDYWVHNEMKAEIKMFFETNENKDTTYQNLWDTFKAVCRGKFIALNAHKRKQERSKIDTLTSQLKELEKQEQTHSKASRRQEITKIRAELKEIETQKTLQNINESRSWFFERINKIDRPLARLIKKKREKNQIDAIKNDKGDITTDPTEIQTTIREYYKHLYANKLENLEEMDKFLNTYTLPTLNQEEVESLNRPITGAEIVAIINSLPTKKSPGPDGFTAEFYQRYKEELVPFLLKPFQSIEKEGILPNSFYEASIILIPKPGRDTTKKENFRPISLMNIDAKILNKILAKRIQQHIKNLIHHDQVGFIPGMQGWFNIRKSINVIQHINRAKDKNHMIISIDAEKAFDKIQQPFMLKTLNKLDDMIVYLENPIVSAQNLLKLISNFSKVSGYKINIQKSQAFLYTNNRQTESQIMSELPFTIASKRIKYLGIQLTRDVKDLFKENHKPLLNEIKEDTNKWKNIPCSWVGRINIVKMAILPKVIYRFNAIPIKLPMTFFTELEKTTLKFIWNQKRARIAKSILSQKNKAGGITLPDFKLYYKATVTKTAWYWYQNRDIDQWNRTEPSERTPHIYNYLIFDKREKNKQWGKDSLFNKWCWENWLAICRKLKLDPFLTPYTKINSRWIKDLNVRPKTIKTLEENLGFTIQDIGMGKDFISKTPKAMATKAKIDKWDLIKLKSFCTAKETTIRVNRQPTKWEKIFATYSSDKGLISRIYNELKQIYKKKTNNPIKKWAKDMNRHFSKEDIYAAKKHMKKCSPSLAIREMQIKTTMRYHLTPVRMAIIKKSGNNRCWRGCGEIGTLLHCWWDCKLVQPLWKAVWRFLRDLELEIPFDPAIPLLGIYPKDYKSCCYKDTCT

SEQ ID NO: 37770 - protein, 574 aa, Homo sapiens
  DOMAIN (37)..(83): kw TRANSCRIPTASE REVERSE II ORF2 domain identified by eMATRIX, accession number DM01354O, p-value=1.000e-40, raw score of 8.73
  DOMAIN (72)..(262): Reverse transcriptase domain identified by PFam, accession name rvt, E-value=9.5e-10, PFam score of 45.8
MDKFLDTYTLPRLNQEEAESLNRPITGSEIEAIINSLSTKKSPGPDGFTAEFYQRYKEELVPFLLKLFQSTEKEGILPNSFYEASIILIPKPGRDTTKKENFRPISLMNIDAKILNKILANRIQQHIKKLIHHDQVGFIPGMQGWFNIRKSINVIQHINRTKHKNHMIISIDAEKASDKIQQPFMLKTLRKLGIDETQTESQIMSELPFTIASKRIKYLGIQLTRDVKDLFKENYKPLLNEIKEDTNKWKNFPCSWVGRINIVKMAIVPKVIYRFNASPIKLPMTFFTELEKTTLKFIWNQKRACIAKSILSQKNKAGGIMLPDFKLYYKATVTKTAWYWYQNRDIDQWNRTEPSEITPHIYNYLFFDKPDKNKQWGKDSLFNKWCWENWLAICRKLKLDPVLTPYTKINSRWIKDLHVRPKTIKTLEENLGITIQDIGMGKDFMSKTPKAMATKAKIDKWDLIKLKSFCTAKETTIRVNRQPTEWEKIFATYSSDKGLISRIYNELKQIYKKKTNNPIKKWAKDMNRHFSKEDIYADKKHMKKCSSSLIIREMQVKTTMRYHLTPVRMAIIKN

SEQ ID NO: 37771 - protein, 536 aa, Homo sapiens
  DOMAIN (57)..(100): kw TRANSCRIPTASE REVERSE II ORF2 domain identified by eMATRIX, accession number DM01354T, p-value=1.000e-40, raw score of 9.48
  DOMAIN (1)..(179): Reverse transcriptase domain identified by PFam, accession name rvt, E-value=1.2e-10, PFam score of 48.8
MIISTDAEKAVNKIQQPFMLKTLNKFGIDGTYLKRIRAIYDKPTANIILNGQKLEAFPLKTGTTQGCPLSPLLFNIVLEVLARAIRQEKERKGIQLGKEEVKLSLFADDMIVYLENPIVSAQNLLKLISNFSKLSGYKINVQKSQAFFYTNNRQTESQIMSELPFTIASKRIKYLGIQLTRDVKDLFKENYKPLLNEIKKDTNKWKNIPCSLIGRINIVKMAIMPKFIWNQKRACIAKTILSQKNKAGGIMLPDFKLYYKATVTKTAWYWYQNRDIDQWNRIEPSEIIPHIYNSLIFDKPDKNKQWVNDSLFNKWCWENWLAICRQLKLDPFLTPYTKINSRWIKDLNVRLKTIKTLEENLGNTIQDIGMGKDFMSKTTKAMATKAKIDKWDLIKLKSFCTVKETTIRVNRQPTEWENIFAIYSSDKGLISRVYKELKQIYKKKNNPIKKWAKHMNRHFSKEDIYAAKRHMKKCSSSQAIREMQIKTTMRYHLKPVRMAIIKKSGNNRDMDEAGNHHSQQTVTRTEIQTPHVLTHS

SEQ ID NO: 37772 - protein, 648 aa, Homo sapiens; identical to SEQ ID NO: 35991
  DOMAIN (10)..(65): kw TRANSCRIPTASE REVERSE II ORF2 domain identified by eMATRIX, accession number DM01354Q, p-value=1.000e-40, raw score of 9.23
  DOMAIN (1)..(238): Reverse transcriptase domain identified by PFam, accession name rvt, E-value=2.7e-52, PFam score of 187.1
  misc_feature (1)...(648): Xaa = X or * as defined in Table 2

SEQ ID NO: 37773 - protein, 571 aa, Homo sapiens
  DOMAIN (485)..(534): kw TRANSCRIPTASE REVERSE II ORF2 domain identified by eMATRIX, accession number DM01354Z, p-value=1.000e-40, raw score of 9.06
MDKFFDTYTLPRLNQEEVASLNRPITGAEIVAIINSLPTKKSPGPDGFTAEFYQRYKEELNKILGIQLTRDVKDLFKENYKLLLNEIKEDTNKWKNIPCSWVGRINIVKMAILPKVIYRFNAIPIKLPMPFFTELEKTTLKFIWNQKRACITKSILSQKNKAGGITLPDFTLYYKATVTKRAWYWYQNRDIDQWNRTEPSEITPHIYNYLIFDEPEKNKPWGKDSLFNKWFWENWLAICRKLKLDPFLTPYTKINSRWIKDLNIRPKTIKTIEENLGITIQDIGMGKDFMFKTPKAMATKNKIDKWDLIKLKSFCTAKETTIRVNRQPTKWEKIFATYSSDKGLISRIYNELKQIYKKKTNNPIKKWAKDMNRHFSKEDIYAAKKHMKKCSSSLAIREMQIKTTMRYHLTPVRMAIIKKSGNNRCWRGCGEIGTLLHCWWDCKLVQPLWKTVWRFLRDLELEIPFDPAIQLLGIYPKDYKSCCYKETCTRMFIVTLFTIAKTWNQPKCPTMIDWIKKMWHIYTMEYYAAIKKDEFMSFVGTWMKLEIIILNKLSQEQKTKHKKPNTAYSHP

SEQ ID NO: 37774 - protein, 867 aa, Homo sapiens
  DOMAIN (204)..(250): kw TRANSCRIPTASE REVERSE II ORF2 domain identified by eMATRIX, accession number DM01354O, p-value=1.000e-40, raw score of 8.73
  DOMAIN (237)..(512): Reverse transcriptase domain identified by PFam, accession name rvt, E-value=5.3e-86, PFam score of 299.1
KPRLENYMKNAEASRADAINWKKGYLVMEDKMNEMKREGKFREKRIKRNKQSLQEIWDYVKRPNLRLISVPESDRENGTKLENTLQDIIQENFPNLARQANIQIQEIQRTPQRYSSRRATPRHIIVRFSKVEMKEKMLRAAREKEIQTNIREYYKHRYANKLENLEEMDKFLNIYTLRRLNQEEVESLNRPIRGSEIVAIINSLPTKKSPGPDGFTAEYYQRYKEELVPFLLKLFQSIEKEGILPNSFYEASIILIPKPGRDTTKKENFRTISLMNIDAKILNKILANRIQQHIKKLIHHDQVGFIPGMQGWFNIRKSINVIQHINRTKDKNHVIISIDAEKAFDKIQQLFLLKTLNKLGIDGTYLKIKRAIYDKPTANIILNGQKLEAFPLKTGTRQGCPLSPLLFNIVLEVLARAIRQEKEIKGIQLGKEEVKLSLFADDMIVYLENPIVSAQNLLKLISNFSKVSGYKINVQKSQAFLYTNNRQTETQIMSELPFTIASKRIKYLGIQLTRDVKDLFKENYKPLLNEIKEDTKKWKNIPCSWVGRINIMKMAILHKVIYRFNAIPIKLPMTFFTELEKTTLKFTWNQKRARIAKSILSQKNKAGGIMLPDFKLYYKATVTKTAWYWYQNRDIDQWNRTEPSEITPHIYNYLIFDKPEKNKQWGKDSLFNKWCWENWLAIWRKLKLDPFFTPYTKINSRWIKDLNVRPKTIKTLEENLGITIQDIGMGKDFMSKTPKAIATKAKIDKLDLIKLKSFCTAKETTIRVNRQPTEWEKIFATYSSDKGLISRIYNELKQIYKKKTNNPIKKWAKDMNRHFSKEDIYAAKKHMKKCSPSLAIREMQIKNTMRYHLTPLRMAIIKKSGNN

SEQ ID NO: 37775 - protein, 878 aa, Homo sapiens
  DOMAIN (316)..(361): kw TRANSCRIPTASE REVERSE II ORF2 domain identified by eMATRIX, accession number DM01354N, p-value=1.000e-40, raw score of 13.17
  DOMAIN (256)..(527): Reverse transcriptase domain identified by PFam, accession name rvt, E-value=3.5e-24, PFam score of 93.8
MVKGSIQQEELTILNIYAPNTGAPRFIKQVLSDLQRDLDSHTLIMGDFNTPLSTLDRSTRQKVNKDTQELNSALHQADLIDINRTLHPKSTEYTFFSAPHHTYSKIDHIVGSKALLSKCKRTEIITNYLSDHSAIKLELRIKNLTQSRSTPWKLNNLLLNDYWVHNEMKAEIKMFFETNKNKDTTYQNLWDAFKAVCRGKFIALNAYKRKQERSKIDTLTSQLKELEKQEQTHSKASRRQEITKIRAELKEIETQKTLQKINESRSWFFERINKIDRPLARLIKKKREKNQIDTIKNDKGDITTDPTEIQTTIREYYKHLYANKLENLEEMDTFLDTYTLPRLNQEEVESLNRPITGSEIVAIINSLPTKKSPGPDGFTAEFYQRAIYDKPTANIILNGQKLEAFPLKTGTRQGCPLSPLLFNIVLEVLARAIRQEKEIKGIQLGKEEVKLSLFADDMIVYLENPIVSAQNLLKLISNFSKVSGYKINVQKSQAFLYTKNRQTESQLMSELPFTIASKRIKYLGIQLTRDVKDLFKENYKPLLNEIKEDTNKWKNIPCSWVGRINIVKMAILPKVIYRFNAIPFKLPMTFFTELEKTTLKFIWNQKRARIAKSILSQKNKAGGITLPDFKLYYKATVTKTAWYWYQNRDIDQWNRTEPSEIMPHIYNYLIFDKPEKNKQWGKDSLFNKWCWENWLAICRRLKLDPFLTPYTKINSRWIKDLNVRPKTIKTLEENLGITIQDIGVGKDFMSKTPKAMATKAKIDKWDLIKLKSFCTAKETTIRVNRQPTTWEKIFATYSSDKGLISRIYNELKQIYKKKTNNPIKKWAKDMNRHFSKEDIYAAKKHMKKCSSSLAIREMQIKTTMRYHLTPVRMAIIKN

SEQ ID NO: 37776 - protein, 444 aa, Homo sapiens; identical to SEQ ID NO: 35469
  DOMAIN (76)..(123): kw TRANSCRIPTASE REVERSE II ORF2 domain identified by eMATRIX, accession number DM01354V, p-value=1.000e-40, raw score of 12.97

SEQ ID NO: 37777 - protein, 819 aa, Homo sapiens
  DOMAIN (51)..(96): kw TRANSCRIPTASE REVERSE II ORF2 domain identified by eMATRIX, accession number DM01354N, p-value=1.000e-40, raw score of 13.17
  DOMAIN (137)..(313): Reverse transcriptase domain identified by PFam, accession name rvt, E-value=3.5e-23, PFam score of 90.5
SWFFEKINKIDRPQARLIKKKREKNQIDTIKNDKGDITTDPTEIQITIREYYKHLYANKLENLEEMDKFLDTYTLPRLNQEEVESVNRPITGSEIEAITNSLPTKKSPGPDGFTAEFYQRYKEELVPFLLKLFQPIEKEGILPNSFYEASIILIPKPGRDTTKKGNFRPISLMNIDAKILNKILANQIQQHIKKLIHHDQVGFIPGMQGWLEVLARAIRQEKEIKGIQLGKEEVKLSLFADDMIVYLENPTVSAQNLLKLISNFSKVSGYKINVQKSQAFLYTNNRQTESQIMSELPFTIASKRIKYLGIQLTRDVKDLFKENYKPLLNEIKEDTNKWKNIPCSWIGRINIVKMAILPKVIYTFNAIPIKLPMTFFTELEKTTLKFIWKQKRSHIAKSILSQKNKAGDITLPDFKLHYKATVTKTAWYWYQNRDIDQWNTTEPSEIMLHIYNHLIFDKPDKNKQWGNDSLFNKWCWENWLAICRKLKLDPFLTSYTKINSRWIKDLNVRPKTIKTLEENLGNTIQDIGMGKDFMSKTPKAVATKAKIDKWDVIKLKSFCTAKETTIRVNRQPTEWEKIFATYSSDKGLISRIYNELKQIYKKKTNNPIKKWAKDMNRHFSKEDIYAAKRHMKKCSSSLAIREMQIKTTMRYHLTPIRMVIIKKSGNNRAPGGRGGCGCSFGRLKRSCVPALKRVADLPAQRSSSAKGETASSSGSLNPVPPDWEKPPSRGRQTPHTGELRLASDGCLSGMKLPEEGIGSSLCCSAASAGDTQANGVRSGLPANSSRPAAEGPVRRKTNRQKGIVSTSTKRTSTPKPHPK

SEQ ID NO: 37778 - protein, 700 aa, Homo sapiens
  DOMAIN (25)..(71): kw TRANSCRIPTASE REVERSE II ORF2 domain identified by eMATRIX, accession number DM01354O, p-value=1.000e-40, raw score of 8.73
  DOMAIN (58)..(239): Reverse transcriptase domain identified by PFam, accession name rvt, E-value=6.5e-26, PFam score of 99.5
LNQEEVESLNRPITGAEIVAIINSLPTKKSPGPDGFTAKFYWRYKEELVPFLLKLFQSIEKEGILPNSCYEASIILIPKPGRDTTKKENFRPISLMNIDAKILNKILANRIQQHIKKLIHHDQVGFIPGMQGWFNICKSINVIQHINRTKDKNHMIISIDAEKAFDKIQQPFMLKTLNKLAQNLLKLISNFSKVSGYKINVQKSQAFLYTNNRQTESQIMSELPFTTALKRIKYLGIQLTRDVKDLFKENYKPLLKEIKEDTNKWKNIPCSWVGRINILKMATLPKVIYRFNAIPIKLLMTFFTELEKTTLKFIWNQKRARIAKSILNQKNKAGGITLPDFKLYYKATVTKTAWYWHQNRDRDQWNRTEPSETMLHIYNYLIFDKPDKNKQWGTDSLFNKWCWENWLAIWRKLKLDPFLTPYTKINSRWIKDLHIRAKTIKTLEENLGNTIQYIGMGKDFMSETPKAMATKAKIDEWDLIKLKSFCTAKETTIRVNRQPTKWEKIFATYSSDKGLISRIYNELKQIYKKKTNNPIKKWAKDMNRHFSKEDIYAAKKHMKKCSSSLAIREMQIKTTMRYHLTPVRMAIIKKSGNNRCWRGCGEIGTLLHCWWDCKLVQPLWKSVWRFLRDLELEIPFDPAIPLLGIYPKDYKSCCYKDTCTRLKCGIRMVNMKSKEPAVGSRFFSRISSWRNSTVTGHPWQ

SEQ ID NO: 37779 - protein, 200 aa, Homo sapiens
  DOMAIN (123)..(172): kw TRANSCRIPTASE REVERSE II ORF2 domain identified by eMATRIX, accession number DM01354Z, p-value=4.600e-33, raw score of 9.06
GILSFAKDMNRHFSKEDIYAAKKHMKKCSSSLAIREMQIKTTMRYHLTPVRMAIIKKSGNNRCWRGCGEIGTLLHCWLDCKLVQPLWKSVWRFLRDLELEIPFDPAIPLLGIYPNEYKSCCYKDTCTRMFIAALFTIAKTWEPPKCSNMIDWIKKMWHIYTRDTMRPKNDEVQSLVGTWVNWETTFSVTIAVQKPTRLSH

SEQ ID NO: 37780 - protein, 202 aa, Homo sapiens
ISPNAIPSPPPTPQQARVCEVPFLCPGVLIGQFPPMSELQIRARSEPSRYRGSLESVDGQADIIHRMLTIVGFARSIFGSCTFRVNSFARTSAADKYLGSHGLPHSPAAWLLYWRWHRTHGRKYALLHPGAQHGEYIKERHRPFFWNRERDIHAIVVDGVKAYIRPQQFELTQVVITQRANVVLLYPAATCIFVPAGPPLSA

SEQ ID NO: 37781 - protein, 662 aa, Homo sapiens
  DOMAIN (37)..(83): kw TRANSCRIPTASE REVERSE II ORF2 domain identified by eMATRIX, accession number DM01354O, p-value=1.000e-40, raw score of 8.73
  DOMAIN (70)..(295): Reverse transcriptase domain identified by PFam, accession name rvt, E-value=4.6e-51, PFam score of 183.1
MDKFLNTYTLPRLNQEEVESLNRPITGSEIVAIINSLPTKKSPGPDGFTAEFYQRCKEELVPFLLKLFQSIEKEGILPNSFYEASIILIPKLGRDTTKKENFRPISLMNIDAKILNKILAKRIQQHIQKLIHHDQVGFIPGMQGWFNIRKSINVIQHINRAKDKNHMIISIDAEKAFDKIQQPFMLKTLNKLVLEVLARAIRQEKEIKGIQLGKEEVKLSLFADDMIVYLENPIVSAQNLLKLMSNFSKVSGYKINVQKSQAFLYTNNRQTESQIMSELPFTIASKRIKYLGIQLTRDMKDLFKENYKPLLKEIKEDTNKWKNIPCSWVGRINIVKMAILPMVIYRFNAIPIKLPMPFFTELEKTTLKFIWNQKRARIAKAILSQKNKAGGITLPDFKLYYKATVTKTAWYQYQNRDIDQWNRTEPSEIMPHIYNYLIFDKPEKNKQWGKDSLFNKWCWENWLAICRKLKLDPFLTPYTKINSRWIKDLNVRPETIKTLEENLGITIQDIGMGKDFMSKTPKAMATKAKIDKWDLIKLKSFCTAKETTIRVNRQPTKWEKIFSTYSSDKGLISRIYNELKQIYKKKTNNPMKKWAKDMNRHFSKEDIYAAKKHMKKCSSSLAITEMQIKTTMRYHLTPVRMAIIKKSGNNRDMDEIGNHHSQ

SEQ ID NO: 37782 - protein, 1146 aa, Homo sapiens
  DOMAIN (390)..(415): 7 kw REVERSE TRANSCRIPTASE RNA POLYMERASE domain identified by eMATRIX, accession number DM00895E, p-value=3.333e-11, raw score of 15.72
  DOMAIN (361)..(638): Reverse transcriptase domain identified by PFam, accession name rvt, E-value=9.8e-75, PFam score of 261.7
TWKGTTSTSRCKIMPKYRSTRQKVNKDTQELNSALHQADLIDIYRTLHTKSTEYTFFSAPHHTYSKIDHILGSKALLSKCKRIEIITNYLSDHSAIKLELRIKNLTQSRSTTWKLNNLLLNDYWVHNEMKTEIKMFFETNENKDTTYQNLWDAFKAVCRGKFIALNAYKRKEERSKIDTLTSQLKELEKQEQRHSKPSRRQEITKMRAELKEIETQKTLQKINESSSWFFERINKIDRPLARLIKKKREKNQIDTIKNDKGDITTDPTEIQTTIREYYKHLYTNKLENLEEMDTFLDTYTLPRLNQEEVESLNRPITGSEIVAITNSLPTKKSPGPEGFTAEFYQRYKEELVPFLLKLFQSIEKEGILPNSFYEASIILIPKPGRDTTKKENFRPISLMNIDAKILNKILANRIQQHIKKLIHHDQVGFIPGMQGWFNIRKSINVIQHINRAKDKNHMIISIDAEKAFDKIQQRFMLKTFNKFAIDGTYLKIIRAIYDKPTANIILNGQKLEAFPLKTGTRQGCPLSPLLLNIVLEVLAWAIRQDKEIKCIQLGKDEVKLSLFADDMIAYLENPIVSAQNLLKLISNFSKVSGYKINVQKSQAFLYTNNRQTESQIMSELPFTIASKRIKYLGIQLTRDVKDLFKENHKPLLNEIKEDTNKWKNIFIPCLWVGRISIMKMAILPKVIYRFNAIPIKLPMTFFTELEKTTLKFIWNQKRARITKAILSQKHKAGGITLPDCKLYYKATVTKTAWYWYQNRDIDQWNRTEPSEITPHIYNYLIFDKPWEKPSNGGKDSLFNKWCWENWLAICRKLKLDPFLTPYTKISNSRWIKKKDLNVRPKTIKTLEENLGNTIQDIGMGKDFMSNKTPKAMATKSKIDKWDLIKLKSFCTAKETTIRVNRQPTKWKKIFAIYSSDKGLISRIYNELKQIYKKKPNNPIKKWVEDMNRHFSKEDIYAAKKHMKKCSTSLAIRVMQIKTTMRYHLTPVRMVIIKKSGNNRCWRGCGEIGTLLHCWWDCKLVQPLWKSVWRCLRDLELEIPFDPAIPLLGIYPKDYKSCCYKDTCTRMFIAALFTTIAKTWSQPKCPTMIDWIKKMWHIYTMDYYAAIKNDEFMSFVGTWMKLETIILSKLSQEQKTKHRVFSLIGGN

SEQ ID NO: 37783 - protein, 557 aa, Homo sapiens
  DOMAIN (447)..(458): Sulfatases proteins domain identified by eMATRIX, accession number BL00523C, p-value=5.800e-12, raw score of 12.64
  DOMAIN (214)..(434): Phosphoglycerate kinases domain identified by PFam, accession name PGK, E-value=4.2e-113, PFam score of 389.2
MGQLQRNARDLQESVMSIRMMPMEYVFSRYPRLVRDLAGKLGKQVELTLVGSSTELDKSLIERIIDPLTHLVRNSLDHGIELPEKRLAAGKNSVGNLILSAEHQGGNICIEVTDDGAGLNRERILAKAASQGLTVSENMSDDEVAMLIFAPGFSTAEQVTDVSGRGVGMDVVKRNIQKMGGHVEIQSKQVTGTTIRILLPLTLAILDGMSSLLTHGIGQFADVACAGPLLAAELDALGKALKEPARPMVAIVGGSKVSTKLTVLDSLSKIADQLIVGGGIANTFIAAQGHDVGKSLYEADLVDEAKRLLTTCNIPVPSDVRVATEFSETAPATLKSVNDVKADEQILDIGDASAQELAEILKNAKTILWNGPVGVFEFPNFRKGTEIVANAIADSEAFSIAGGGDTLAAIDLFRIADKNSYISTGGGAFLEFVERLTTLTQLLHDQGYVTQAIGKWHMRETTEPQPQNVGFDDFRGFNSVSDMYTAWRDVHVNPEVALSPDRPAYINQSPLSKDDVHALRGGDQQAIADITPKYMADLDQRCTEYGAQLLDKMAKSA

SEQ ID NO: 37784 - protein, 1120 aa, Homo sapiens
  DOMAIN (223)..(249): Prokaryotic molybdopterin oxidoreductases proteins domain identified by eMATRIX, accession number BL00551B, p-value=7.618e- 19, raw score of 23.29
  DOMAIN (926)..(1120): Sulfatase domain identified by PFam, accession name Sulfatase, E-value=0.019, PFam score of -93.8
MAGTTAAALGFAPSVALAETRQYKLLRTRETRNTCTYCSVGCGLLMYSLGDGAKNAKASIFHIEGDPDHPVNRGALCPKGAGLVDFIHSESRLKFPEYRAPGSDKWQQISWEEAFDRIAKLMKEDRDANYIAQNAEGVTVNRWLSTGMLCASASSNETGYLTQKFSRALASLAPTFGRGAMTNHWVDIKNANLVVVMGGNAAEAHPVGFRWAMEAKIHNGAKLIVIDPRFTRTAAVADYYAPIRSGIELIHARARHTAVDICIAQYFARDNRSRKPPHRWSNLRAKHDVFQRCQMREEVKLLEHHTCFLANQALVNFRIVNLQAIDNQIAGGDFFQFVDAAQQGRFTGTGRPDNHHDFALGNVQIDIVQHLGWAKTTQNKAQHQGNNQIEHRHGAPDLKGAEVTGNNFLPLTGQFRHADHNKQRGVFNADDPLCEGRIACTVQSITEDYDIGFRLKEKGMTEIFVRFPVVDEAKEREQRKFLQHARTSNMICVREYFPDTFSTAVRQKSRWIIGIVFQGFKTHKWTSSLTLNYFLWRDRKGAISNFVSFLAMLVMIQLLLLLAYESLWPDAWHFLSIFSGSAWLMTLLWLNFGLMVNRIVQRVIFVTGYYGLTQGLLSVLRLFWGNLINFMANWRALKQVLQHGDPRRVAWDKTTHDFPSVTGDTRSLRPLGQILLENQVITEEQLDTALRNRVEGLRLGVREIVFKCFGLRLGKAARVALFYDMTIFHIHHSAGGFTRHFNFVGDDHLGNIRFCQLTNDADDLCRNFRGQCGGRFIEQQYLRVHHQRTGNSNTLLLDTRKMQRVVLLKHHANVTTQIANRFVRGCFGEIEMVACNVERTGARHLKQIEYTQQRAFTRAAGANAADTPSTATARKGFAGYDHPNQYLVKPATTIADNMMPVMQHPAQDKETQQKLAELEKKTGKKPNVVVFLLDDVGWMDVGFNGGGVAVGNPTPDIDAVASQGLILTSAYSQPSSSPTRATILTGQYSIHHGILMPPMYGQPGGLQGLTTLPQLLHDQGYVTQAIGKWHMGENKESQPQNVGFDDFRGFNSVSDMYTEWRDVHVNPEVALSPDRSEYIKQLPVSKDDVHAVRGGEQHAIADITPKYMGKLDQRLMDYGV

SEQ ID NO: 37785 - protein, 180 aa, Homo sapiens
NSLFAQIVHIIEEGGWTVFRNMPLIFAVGLPIGLDKQAQGRACLAVMVSFLTWNYFINAMGMTWGSYFGVDFTQDAVAGSGLTMMAGIKTLDTSIIGAIIISGIVTALHNRLFDKKLPVFLGIFQGTSYVVIIAFLVMIPCAWLTLLGWPKVQMGIESLQAFLRSAGALGVWNNTFLERI

SEQ ID NO: 37786 - protein, 139 aa, Homo sapiens
  misc_feature (1)...(139): Xaa = X or * as defined in Table 2
QAIAFDVQPGRGDYAGNQRHHNQYNQHQAHXSWQRCGIGDGLARFARHNATKPANKPGETGDRFNHQKNHGGQQDPVLHQLIEVMLVGRGGDQAVGQATLGIDTNVGLHAKVLTDCLSWSDASPDRVAALCSWSSWVPQ

SEQ ID NO: 37787 - protein, 46 aa, Homo sapiens
  misc_feature (1)...(46): Xaa = X or * as defined in Table 2
SPPSAXVKALPGPKHHGGLKPVHPIPGASLVLARRWSMFRRWGLIT

SEQ ID NO: 37788 - protein, 69 aa, Homo sapiens
  DOMAIN (12)..(23): Sulfatases proteins domain identified by eMATRIX, accession number BL00523C, p-value=5.800e-12, raw score of 12.64
FWQTPQLLHDQGYVTQAIGKWHMGENKESQPQNVGFDDFRRRPGSLQPGRGDYAGNQRHHNQYNQHQAH

SEQ ID NO: 37789 - protein, 661 aa, Homo sapiens
  DOMAIN (380)..(432): CBS domain identified by PFam, accession name CBS, E-value= 4.5e-08, PFam score of 40.3
MLFIVTSFNYGDRATLSIAGSEMAKDIGLDPVGMGYVFSASHGHQRIAWLGGQSSSLTRAERFIPFGRPTWCPFNLRPFGPGHQPAGLMFAGVADLGYFGLFGPALLFTAYAGSEAVFAHVFGDALGDAGLLMSLLSPFDVVIWMTDGWPLYESRLKGKLHVISKRYTQRIERHNLNLRQHLARLGRKSLSFSKSVEQHDKLESLPGQIDKSLDEASLSLRAGSLRTITHILLPLLRPAILSALIYSFVRAITTVSAIVFLVTPDTRVATAYILNRVEDGEYGVAIAYGSILIVVMLAIIFIFDWLIGESLLSRFEKTVDDHSQSRLPAEGSILSQDISGVKLFSLLTPARGYVPIRAPCPFLCASYRFFCVARQQGLDAALIDAPLAVDALTPLSELLSHVGQAPCSVPVVDEDQQYVGIISKGMLLRALDREGGVRVPVDYILNGFHPLLLGMPAPLAIIVFALIACRFPGSNGRIRRSRRIRHLHKMPDATLSASYQAYVRHQTNVTALVLRSSHRFRKDRHCWGFVFLQQPILRATGQFEIQTFRYLSVFSVQRHKTNGKTALMSGNVADKAVNRATGPTACVWLFSLRNSSMVTTRFCGLCEWADQQGARPARISENGKRGYSYLYDVHMGAQSGETRGRQGEYASKPPSREYAGD

SEQ ID NO: 37790 - protein, 36 aa, Homo sapiens
RLYSAAGRCGDAGRGVAFSECALLVFPRAGGLQSAR

SEQ ID NO: 37791 - protein, 521 aa, Homo sapiens
  DOMAIN (74)..(120): Protein secA proteins domain identified by eMATRIX, accession number BL01312B, p-value=1.000e-40, raw score of 14.77
  DOMAIN (76)..(289): SecA protein, amino terminal region domain identified by PFam, accession name SecA_protein, E-value=5.3e-149, PFam score of 453.3
MIQSYRLNEADYSCERFADLPCDPKSNNDLVVLNKTGVDRRYSQRLLFKRARISSEPTALTSRPCGCGLSTLEDPQRCIAEMRTGEGKTLTATLSVYLNALTGKGVHVVTVNDYLAQRDAENNRPLFEFLGLTVGINLPGMPAPAKREAYAADITYGTNNEYGFDYLRDNMEFSPEERVQRKLHYALVDEVDSILIDEARTPLIISGPAEDSLEMYKRVNKNIPHLIRQEKKDSETFQGESHFLGDEKSCQVKLTQLCLVLIEELLVKKGIMDEGESLVSSDNIMLMHHALTMVLDLIRQSDPFRKQTSLNGFYQDNGGDADLLRLNLSLDSQLYPQISGHKSRYAIRFMPLDTENGQHCVRMSDAAKTPYLTYRRFSFAITRSLGCGKSLAFKTDQRHSLNGVGFFYPRIPFPRSPQDQAKQPLALGLTLDTCSSFHNKQLGHKSHAVCQAWLQEGTGTRRTPVAADSHAAIPLVPCILDIYRSTRACLPSYPTWLSEDPVVSKLPSCEDGATILAFSEA

SEQ ID NO: 37792 - protein, 361 aa, Homo sapiens
MMGGVAAARAPAGPRGRLCAGGRARGLGALGLRARRRWRRRQDQRGAVIGKQRINSGTEQDFPGEQRSRLYWNWIRAHPPIRYPSGLRPAPPLSVRAALLLTDLQPSYSADFHAATPDASWHTPGSGTSRGQPPRIPPAPTTHKQYGPQPSNDKTRLHRGHAQHHPPPTAHQAPHAPQPAKHRTQATDAPGKTRTRGNATPGLNSKKHTQTHDDRFRSTTNHSTNQTHTHTSHRRTPTPNQKKKREANSAVLCGPSTKKPATARQQRAPPTTHTTPTTKHTPTQTTTSVKLRVAEPRQPTWPIGIRWSPPLPMGNRMRRVDALKLVLLGYCMPRIVLCYFTYICDVLFYMSDGPVHTTING

SEQ ID NO: 37793 - protein, 171 aa, Homo sapiens
  DOMAIN (106)..(158): Xanthine/uracil permeases family proteins domain identified by eMATRIX, accession number BL01116C, p-value=7.871e-09, raw score of 28.96
TQCDQYRNHNRRQDQRGAVIGKQRINSGTEQDFPGEQRSSGVYSIPPDISGVIGEVDLSGALTLELAGIIFSFMLINLFDSSGTLIGVTDKAGLIDGNGKFPNMNKALYVDSVSSVAGAFIGTSSVTAYIESTSGVAVGGRTGLTAVVVGVMFLLVMFFSPLVIILEPKEG

SEQ ID NO: 37794 - protein, 113 aa, Homo sapiens
  misc_feature (1)...(113): Xaa = X or * as defined in Table 2
RPPGNSLNVSRMGTRSSYSCRRHSPAFLSWGKGRCHLCNKAHLLAGAXHYSFLSGSAPYXNXVNGQIXXRXTAHRSTPDAPTGHXNCCSXLXCHSYXQRAXPGYRHDXCRMCC

SEQ ID NO: 37795 - protein, 86 aa, Homo sapiens
LGFLLRLSEMPRKQGDYRTRICEIRGRVEQRVGYTIEQINHMRDVFDRRYEWDHGPRLIIRPTIRVGPWSQSDYQTDDTSGTVVPD

SEQ ID NO: 37796 - protein, 48 aa, Homo sapiens
IVGLIISSDHGPTRIVGLIIRLDHGPTRIVGLIISLGPWSHSYRRSDY

SEQ ID NO: 37797 - protein, 250 aa, Homo sapiens
ARKVVAVAARHKCPACISFSASHRLYRYWEEEMNPAPVEAMRTFQQFIDEGNYTSGDTHTLRDPHYVEDKAHKYLVFEANTGTENGYQGEESLFNKAYYGGGTNFFRKESQKLQQSAKKRDAELANGALGIIELNNDYTLKKVMKPLITSNTVTDEIERANVFKMNGKWYLFTDSRGSKMTIDGINSNDIYMLGYVSNSLTGPYKPLNKTGLVLQMGLDPNTNIQTDDTSGTVVQTNNQTADTSGTMVPD

SEQ ID NO: 37798 - protein, 175 aa, Homo sapiens
MASSTTSKPSSSSSGPRTLPWPGQPIRGCRGPQAALPPVVILSKAAYSLLGSQKSGKLPSSSSLLPHADVAWVSSLRPLLNKDMSSEEQSLYYRQWTLARQHHADYSNQLDPASGTRNFHPRRLLLTGPPQTNNQTDDTEWDRGPRLIIRPTIRVGPWFQTNNQTDDTSGTVVPD

SEQ ID NO: 37799 - protein, 495 aa, Homo sapiens
  DOMAIN (221)..(257): PROTEIN-GLUTAMATE O-METHYLTRANSFERASE domain identified by eMATRIX, accession number DM01855B, p-value=6.667e-29, raw score of 22.71
  DOMAIN (117)..(355): CheR methyltransferase domain identified by PFam, accession name CheR, E-value=5.2e-91, PFam score of 315.8
MRIWMNPNELNKFQLTPVDVITAIKAQNAQVAAGQLGGTPPVKGQQLNASIIAQTRLTSTEEFGKILLKVSAVSERVHHVRRQSGRTVLRERVRIEIASTHIALQHAIVTGDAVGMDDIPQEARQYRHNQAYAYSIQGDGAEDDDERIHSGEWQAFINSLTTNLTAFFREAHHFPLLADHARRRSGEYRVWSAAASTGEEPYSIAMTLADTLGTAPGRWKVFASDIDTEVLEKARSGIYRHEELKNLTPQQLQRYFMRGTGPHEGLVRVRQELANYVDFAPLNLLAKQYTVPGPFDAIFCRNVMIYFDQTTQQEILRRFVPLLKPDGLLFAGHSENFSHLERRFTLRGQTVYALRKCCRKACKRCAMRKQWLGICIAAGMLAACTSDDGQQQTVSVPQPAVCNGPIVEISGADPRFEPLNATANQDYQRDGKSYKIVQDPSRFSQAGLAAIYDAEPGSNLTASGEACRSDTADGSPSNASDPPATPESLTWLTGE

SEQ ID NO: 37800 - protein, 344 aa, Homo sapiens
  misc_feature (1)...(344): Xaa = X or * as defined in Table 2
YLISQRGLIRRSKISLQTGSQIERAFLQAPVEERXSMACSKYSSHPDLTFTNFIRFTYNIFXNHASPGIPNLLLHPRGLRAITIAVFGKQNTYIRLEPFKINVLEQITKHIEKLQCGECSQTTQQAWEQSAHQQHIRHXSCRYPGXARCQXVHQARTLXDQRSXADHEAYRKTAVRRCSQTTQQAWEQSAHQQHIRHXSCRYPGXARCQXLXHHSHEQQFQWPVGCIRCGSVGSLPSSICPLTQFQYGAEPDRKEXCQAPASKWALLHKXHRPFPQDRKAGECLLHEYEDLVPIRDTLRLFPGGRYLPRAKHVAPSEPDPTIRVGPWSQSDYQTDDTSGTVVPD

SEQ ID NO: 37801 - protein, 141 aa, Homo sapiens
  DOMAIN (109)..(123): Type I fibronectin domain proteins domain identified by eMATRIX, accession number BL01253D, p-value=7.840e-09, raw score of 4.84
CTTIGIPTRPAPPSPQTPGSWSFLCFKWSTKESGPATLGTHWAPSTSLSASPCTVSGGKGTPGSQEGDPAESCPPSPQTPRSCWAPPAPGRLRVCIAVAPPRPARPPLCAGGLGRSCWRGTAARTPLRSPPAQPGPGPTAP

SEQ ID NO: 37802 - protein, 69 aa, Homo sapiens
  misc_feature (1)...(69): Xaa = X or * as defined in Table 2
RWRLQNLSFCSSCSRIWLXRGYVFCSWKPREQSSQSPLACSAACLTLRTQSCLGTAGQTDDTSGTMVQY

SEQ ID NO: 37803 - protein, 429 aa, Homo sapiens
  DOMAIN (1)..(187): Transposase domain identified by PFam, accession name Transposase_15, E-value=6e-100, PFam score of 345.5
MEDALYEIASMRLFARLSLDSALPDRTTIMNFRHLLEQHQLARQLFKTINRWLAEAGVMMTQGTLVDATIIEAPSSTKNKEQQRDPEMHQTKKGNQWHFGMKAHIGVDAKSGLTHSLVTTAANEHDLNQLGNLLHGEEQFVSADAGYQGAPQREELAEVDVDWLIAERPGKVRTLKQHPRKNKTAINIEYMKASIRARVEHPFRIIKRQFGFVKARYKGLLKNDNQLAMLFTLANLFRADQMILCPVFVHHIPRFFGTFFGATDTQTFTLTESVIHQPLVLTNFIAIDGNDFARLRREITAQELAEFTFANEANADQDLQQSYALRFFQFADREQALRNLLMAERIKEVALVFIAVQTTQQAALAIDIGPTYVMTGSDIIGTYKEGFYTDWVKMIPGHTFLSEGRIFQGDIPYKPLTRRNECDGSDVSE

SEQ ID NO: 37804 - protein, 130 aa, Homo sapiens
  misc_feature (1)...(130): Xaa = X or * as defined in Table 2
HHHSGLDDHRRKILNTAYRSRKLQASCXKSAERAWKTKASLTVNGWMKKIRCKTPMCRPTVRXSIRILIITTPLPRVPSRSXLKPPTSCTXCIFTQPTRCXKMTTCWRCSTSRKSSGHVCVSPGSVAVTI

SEQ ID NO: 37805 - protein, 71 aa, Homo sapiens
  misc_feature (1)...(71): Xaa = X or * as defined in Table 2
KARWMLQTRKRAVRRSNWRKRNIWCAPAAICKRSTTLITSFXKPVKMACPFICAMLRRSRLARRCAGALPN

SEQ ID NO: 37806 - protein, 316 aa, Homo sapiens
  DOMAIN (251)..(265): C2H2-TYPE ZINC FINGER SIGNATURE domain identified by eMATRIX, accession number PR00048A, p-value=6.824e-12, raw score of 10.52
  DOMAIN (252)..(274): Zinc finger, C2H2 type domain identified by PFam, accession name zf-C2H2, E-value=1.5e-05, PFam score of 31.9
ISRSLEAGVASVDAADYNPEPCQPGTRRGRRRSLKEATEPQLAMAEEFVTLKDVGMDFTLGDWEQLGLEQGDTFWDTALDNCQDLFLLDPPRPNLTSHPDGSEDLEPLAGGSPEATSPDVTETKNSPLMEDFFEEGFSQEIIEMLSKDGFWNSNFGEACIEDTWLDSLLGDPESLLRSDIATNGESPTECKSHELKRGLSPVSTVSTGEDSMVHNVSEKTLTPAKSKEYRGEFFSYSDHSQQDSVQEGEKPYQCSECGKSFSGSYRLTQHWITHTREKPTVHQECEQGFDRNASLSVYPKTHTGYKFYVCNEYGTT

SEQ ID NO: 37807 - protein, 602 aa, Homo sapiens
MLTSGSGSASRQECSRHVQAMMVSNRREQETFALALSDVTETKNSPLMEDFFEEGFSQEIIEMLSKDGFWNSNFGEACIEDTWLDSLLGDPESLLRSDIATNGESPTECKSHELKRGLSPVSTVSTGEDSMKSVMVLHGFVLNRISPDADCPPIKMPPGCSKCLTRFRCRLYRYRSLRTSGRCRWQEPPLLRGSGTAIKDKSYFLYTLSHEQIAQSLFPVGELEKPQCVRLLKILVWSPRRKKTLPAFASLANVNSASSWAVISRRNRAKSLPSMAMKLTNNQTDDTSGTVVMTNNQTDDTSGTMVTTNNQTDDTSGTVVMSDYHTDDTSGTVVRTNTQTDDTSGTVVSTNNQADDTSGTVVSHCKRHISLVFSEDMPLCGCLSNRATTPGDMHDTSQLKHDSSTDIIVTNPRYVAELIVAATSMTLVLVAMKTSTSLMHADGNGGNREKYQDHSTTGMMWASPAPSLRWWLGEELLEGNSSQGSFEVTPSSAGPWANSSLSLHGGLSSGLRLRCKAWNVHGAQSGSVFQLLPVDNNSSEKRGMNNTEPRHAPSDLEMVAEIMAKADSTELDVGETPDIEHGQCMPLQTVHRAQSWAYQARE

SEQ ID NO: 37808 - protein, 657 aa, Homo sapiens
  DOMAIN (380)..(418): Chloramphenicol acetyltransferase proteins domain identified by eMATRIX, accession number BL00100D, p-value=7.677e-36, raw score of 17.22
  DOMAIN (318)..(423): Chloramphenicol acetyltransferase domain identified by PFam, accession name CAT, E-value=4.7e-62, PFam score of 219.6
  misc_feature (1)...(657): Xaa = X or * as defined in Table 2
MDDIPQEARQYRHNQAYAYSIQGDGAEDDDERIVRFHTRVTVDSDTLASDAARLTCRHARSNQCGCSTPNIKANERFRLLLLDPKHPSKICRLNRFTQFRLSETKEITNPYAMRLYESLCQYRKPDGSGIVSLKIDWIIERYQLPQSYQRMPDFRRRFLQCDNLKTCHTSHGSVMAETAVINHKKRKNSPRIVQSNDLTEAAYSLSRDQKRMLYLFVDQIRKSDGTLQEHDGICEIHVAKYAEIFGLTSAEATAVLTESDYRVLVGELDDEQMAALSRLGNDYRPTSAYERGQRYASRLQNEFAGNISALADAENISQHFEAFQSVAQCTYNQTVQLDITAFLKTVKKNKHKFYPAFIHILARLMNAHPEFRMAMKDGFIENMFFVSANPWVSFTSFDLNVANMDNFFAPVFTMGKYYTQGDKXKNITNPYAMRLYESLCQYRKPDGSGIVSLKIDWIIERYQLPQSYQRMPDFRRRFLQTPAFGRRVSGVIEIADGSRRRKAAALTESDYRVLVGELDDEQMAALSRLGNDYRPTSAYERGQRYASRLQNEFAGNISALADAENISRKIITRCINTAKLPKSVVALFSHPGELSARSDRRYEWDRGPSLIIRPTIRVGPWSQTNNQTDDTSGTVVPDLLISHLSSITVLCCRHTMS

SEQ ID NO: 37809 - protein, 628 aa, Homo sapiens
  misc_feature (1)...(628): Xaa = X or * as defined in Table 2
MLQIPKQQQNEKYQVPQFDQSTIKNIESAKGLDVWDSWPLQNADGTVAEYNGYHVVFALAGSPKDADDTSIYMFYQKVGDNSIDSWKNAGRVFKDSDKFDANDPILKDQTQEWSGSATFTSDGKIRLFYTDYSGKHYGKQSLTTAQVNVSKSDDTLKINGVEDHKTIFDGERKTYQNVQQFIDEGNYTSGDNHTLRDPHYQNTYIRLEPFKINVLEQITKHIEKLQCGGVVKQLSRRGNNQHISSTYDINRADTQVRRAVNNYDIIVMSNSFNGQSEHQVWIDRKAGECLLHEYEDLVPIRDTLRLFPGGRYLPRAKHVAPSEPDPEQDEQKLSCCTYRKRYRVLVGELGDEQMAALSRLGNDYRPTSAYERGQRYASLLQNEFAGNISALADAENISRKIITRCINTAKLPKSVVALFSHPGELSARSGDALQKAFXSASPDRADSSPGXEKRATTDSRQFGGVDTAGNNLTXNIFRISQRRNISSKFILQXACITLTTFISTCWAIIVTQSGLMQPSAHHPARQPEHDIAFGKCSSSVSVHLALGSGSEGATCFARGRXRPPGNSLNVSRMGTRSSYSCRRHSPAFHRSTPDAPTGHXNCCSXLXCHSYXQRAXPGYRHDXCRMCC

SEQ ID NO: 37810 - protein, 1492 aa, Homo sapiens
  DOMAIN (899)..(916): kw REPLICATION REPB REPA INITIATION domain identified by eMATRIX, accession number DM00653B, p-value=3.250e-15, raw score of 16.63
  DOMAIN (1160)..(1247): ParB-like nuclease domain identified by PFam, accession name ParBc, E-value=1.7e-10, PFam score of 48.3
  misc_feature (1)...(1492): Xaa = X or * as defined in Table 2
MSSPKGLDVWNSWPLQNAAGPVAEYKGYHVVFALAESPKDADDTSSYMFYQKVGDNSIDSWKNAGRVFKDSDKFDANDPILKDQTQEWSGSATFTSDGKIRLFYTDYSGKHYGKQSLTTAQVNVSKSDDTLKINGVEDHKTIFDGDGKTYQNVQQFIDEGNYTSGDNHTLRDPHYVEDKGHKYLVFEANTGTENGYQGEESLFNKAYYGGGTNFFRKESQKLQQSAKKRDAELANGALGIIELNNDYTLKKVMKPLITSNTVTDEIERANVFKMNGKWYLFTDSRGSKMTIDDLWKFELENDDLEYLVEENSKQKTIQDVIWLFLTAYTHIRGATQAFAKENNQKAYKETYGVSHITRHDMLQIPKQQQNEKYQVPQFDQSTIKNIESAKGLDVWDSWPLQNADGTVAEYNGYHVVFALAGSPKDADDTSIYMFYQKVGDNSIDSWKNAGRVFKDSDKFDANDPILKDQTQEWSGSATFTSDGKIRLFYTDYSGKHYGKQSLTTAQVNVSKSDDTLKINGVEDHKTIFDGDGKTYQNVQQFIDEGNYTPGDNHTLRDPHYVKTKAMRGSXTVDLDACTKGVLTFTTALLAGGANQAFAKENTKKAYKETYGVSHITRHDMLQILKQQQNEKYQVPQFDQSTIKNIESAKGLDVWDSWPLQNADGTVAEYNGYHVVFALAGSPKDADDTSIYMFYQKVGDNSIDSWKNAGRVFKDSDKFDANDPILKDQTQEWSGSATFTSDGKIRLFYTDYSGKHYGKQSLTTAQVNVSKSDDTLKINGVEDHKTIFDGDGKTYQNVQQFIDEGNYTSGDNHTLRDPHYVKTKAMIWDHGPTRIVGLIISLGPRSHSYRRSDNQTGTTVPLVSSYRSRDGSGIVSLKIDWIIERYQLLQSYQRMPDSRRRFLQVCVNEINSRTPMRLSYIEKKKGRQTTHIVYSISDSTQFWLSAGVSKVTQDCSLKRATGVAIRKKAYRSQRMATDTARIQGNLDSDHLHPGPQTNQPKKHLTNFKSAMDDIPQEARQYRHNQAYAYSIQGDGAEDDDERIVRFHTRVTVDSDTLASDAARLTCRHGLGNQSGTHGPTRIDGMIISLGPRSHSYGRSDNQYWALGPTRIVDTSLSTPAAPMVDSLIARVGVMARGNAITLPVCGRDVKFTLEVLRGDSVEKTSRVWSGNERDQELLTEDALDDLIPSFLLTGQQTPAFGRRVSGVIEIADGSRRRKAAALTESDYRVLVGELDDEQMAALSRLGNDYRPTSAYERGQRYASGLQNEFAGNISALADAEGIRYLLFHPRGLRAITIAVFGKQNTYIRLEPFKINVLEQITKHIEKLQCGGVVKQLSRRGNNQHISSTYDINRADTQVRRAVNNYDIIVMSNSFNGQSEHQVWIDRKAGECLLHEYEDLVPIRDTLRLFPGGRYLPRAKHVAPSEPDPEQDEQKLRFCKRHLYGKQPRSPVERVWDHGPTRIVGLIISLGPRSHSYRRSDNQTGTTVPLVSSV

SEQ ID NO: 37811 - protein, 222 aa, Homo sapiens
  DOMAIN (145)..(164): Sigma-54 factors family proteins domain identified by eMATRIX, accession number BL00717E, p-value=8.971e-15, raw score of 15.06
  DOMAIN (40)..(218): Quinolinate phosphoribosyl transferas domain identified by PFam, accession name QRPTase, E-value=1.5e-09, PFam score of -8.1
MPPRRYNLDTRRDELLERINLDIPGPVAQALREDLGGTVDANNDITAKLLPENSRSHATVITRENGVFCGKRWVEEVFIQLAGDDVTIIWHVDDGDVINANQSLFELEGPSRVLLTGERTALNFVQTLSGVASKMCWCRKHNGHWTVELYSDSIPRLQINQHYASMCNNARNDGDSQFIRSNLQDAKWLIKSLESRNDTLLRVSRCIVEQQQAFFEQGCRNA

SEQ ID NO: 37812 - protein, 246 aa, Homo sapiens
  DOMAIN (115)..(153): Orn/Lys/Arg decarboxylases family 1 pyridoxal-P attachment si domain identified by eMATRIX, accession number BL00703B, p-value= 8.147e-33, raw score of 19.06
  DOMAIN (57)..(198): Orn/Lys/Arg decarboxylase domain identified by PFam, accession name OKR_DC_1, E-value=1.1e-82, PFam score of 288.2
MEPQTKKLPVLPVGRIQKKAFAAMDRDLLELVDEFAWILEDTADFIAGRAVPAMTPPGHQGGVGFTKTPAGRFYHDYYGENLFRTDMGIERTSLGSLLDHTGAFGESEKYAARVFGADRSWSVVVGTSGSNRTIMQACMTDNDVVVVDRNCHKSIEQGLMLTGAKPVYMVPSRNRYGIIGPIYPQEMQPETLQKKISERRLQTENRTEESRGERANQTGRHWPPKKAVWQGLGEGTPETVIPTSNP

SEQ ID NO: 37813 - protein, 242 aa, Homo sapiens
  DOMAIN (143)..(179): Orn/Lys/Arg decarboxylases family 1 pyridoxal-P attachment si domain identified by eMATRIX, accession number BL00703A, p-value= 4.563e-22, raw score of 21.99
  DOMAIN (141)..(242): Orn/Lys/Arg decarboxylase domain identified by PFam, accession name OKR_DC_1, E-value=5.3e-41, PFam score of 149.1
  misc_feature (1)...(242): Xaa = X or * as defined in Table 2
MKVLIVESEFLHQDTWVGNAVERLADALSQQNVTVIKSTSFDDGFAILSSNEAIDCLMFSYQMEHPDEHQNVRQLIGKLHERQLNVPVFLLGDREKALAAMDRDLLELVDEFAWILEDTADFYRRTAPVAREXTRYPPGSCWPPLFTAPLMKYSDIHEYSWAAPGHQGGVGFTKTPAGRFYHDYYGENLFRTDMGIERTSTAVSLLDHSGAFGQSEKYAARVFGADRSWSVVVGTSGSNRTI

SEQ ID NO: 37814 - protein, 248 aa, Homo sapiens
MQMQTHTPPSTISRFADSHRELQLSQSSIHITTEQSTIKRIHTHQAHSSGASPLARSNSNHCSSQHRTQPTPGHKDNPVPHTGPTITPRPDIQPNKGIQKPTHGTDSTIQRPHRQPSKYQKEGKTNNANLQKTRMNGSHTNTTKTTRTKTAQGPQTPKKRQNDKPKQTTHACQSSIGFLAIVLAQHVNIVLDVWLVMGLHMNVQGAALANEMQRQVAGSTERYGEPPYACQLLSQVDMDCRSTCDPSA

SEQ ID NO: 37815 - protein, 83 aa, Homo sapiens
MPDLYFYRDPEEIEKEEQAAAEKAVTKEEFQGEWTALAPEFTATQPEIADWFEGKTRVAGISAGRNKLIDLACHGEHPTLFEL

SEQ ID NO: 37816 - protein, 283 aa, Homo sapiens
  DOMAIN (85)..(103): RIBOSOMAL PROTEIN S2 SIGNATURE domain identified by eMATRIX, accession number PR00395C, p-value=1.000e-17, raw score of 16.17
  DOMAIN (9)..(173): Ribosomal protein S2 domain identified by PFam, accession name Ribosomal_S2, E-value=3.2e-71, PFam score of 250.0
MKEEDVLNFLAAGNQLGGTNLDLQMEQYMYKRKSDGIYIPNLKRTWEKLLLAARGIVAIENPADVSVIPSRNTGQRAVLKFAAATGATPIAGRFTPGTFTNQIQAAFREPRLLVFTDPRADQQPLTEASYVNLPTLLYSPLRHVDIAIPSNNKGAHSVGLMWWMLAREVLRMRGTISCEHPWEVMPDLYFYRDHEDIEKEEQAAAEKAVTRRNFRLVKTAKLGTSWNYLFDFHPHRVLVVGAFANFCTEPTGCSCLFPKLPPHLLMLPCWFHLLFFQDYIMSG

SEQ ID NO: 37817 - protein, 356 aa, Homo sapiens
  DOMAIN (76)..(130): Ribosomal protein S2 proteins domain identified by eMATRIX, accession number BL00962B, p-value=4.140e-26, raw score of 36.15
  DOMAIN (66)..(256): Ribosomal protein S2 domain identified by PFam, accession name Ribosomal_S2, E-value=9.3e-28, PFam score of 102.0
  misc_feature (1)...(356): Xaa = X or * as defined in Table 2
GNLAAGKTIQAQDRDAVGILSSRTGESMENLQKNLLPKQRRRTRETFTMSGALDVLQIKEEDVLKFLAAGTHLGGTNLDFQMEQYIYKRKSDGIYIINLKRTWEELLRQPRAMVPIENPADVSVISSRNTGQVCGTVRAVLRFLAATGATPIGGRFTPGTFTNQIQASLPGSPRAFLWVTXPPGAEPPALSRSASLCXPFLPLALVNPDSPLRRYVIIAIPCNNKGAHSVGLMWWMLAREVLRMRGTISREHPWEVMPDLYFYRDPEEIEKEEQAAAEKAVTKEEFQGEWTAPAPEFTLATQPEVADWSEGVQGAPLVPIQQFPTEDWSAQPATEDWSXAPLAQATEWVGATTDWS

SEQ ID NO: 37818 - protein, 351 aa, Homo sapiens
MENNYSNYITGRNAACYSHFGKQFDSSYEVKHTFTIPSTLFSIHPGERKTCPPKAYRQSHSTKTVMDFVNSSDNVIFVHNTIHLISQVMDNMVMACGGILPLLSAATSATHELENIEPTQGLSIEASVTFLQRLISLVDVLIFASSLGFTEIEAEKSMSSGGILRQCLRLEILKVIATLLRNSPQCPESMEVRRAFLSDMIKLFNNSRENRRSLLQCSVWQEWMLSLCYFNPKNSDEQKITEMVYAIFRILLYHAVKYEWGGWRVWVDTLSITHSKVFPEKQNQEDVQIERETEIDFKKFIHAIMEAWGCGYRECWVGPFGFASVALYTYVSRFYIGLCSSTYKPLDGSYE

SEQ ID NO: 37819 - protein, 217 aa, Homo sapiens
GRRFRATHELENIEPTQGLSIEASVTFLQRLISLVDVLIFASSLGFTEIEAEKSMSSGGILRQCLRLVCADAVRNCLECQQHSQLKTMGDKALKPMHSLIPLGKSAANSPVDIVTGGISPVRDLDRLLQDMDINRLRAAVFRDIEDSKQAQFLALAVVYFISVLMGSKYRDILEPQNERHSQSCTETGSENENVSLSGSTDALYLSVHGIHPYSQHI

SEQ ID NO: 37820 - protein, 286 aa, Homo sapiens
  DOMAIN (142)..(187): kw TRANSCRIPTASE REVERSE II ORF2 domain identified by eMATRIX, accession number DM01354N, p-value=1.000e-40, raw score of 13.17
  misc_feature (1)...(286): Xaa = X or * as defined in Table 2
TLMQKSSIKYWQTESSSTSKSLSTMIKWASSLXREIYSTKCPQEKAGKIQNXHPNITIKRTRKARANTFKSXQKARNNXNQSRTEGNRDTKNPSKNXXMPGAGFLKGSTKLIDRXQDXXRKKERRIKXIAIKNDKGDITTNPTEIQTTIREYYKHLYANKLENLEEMHKFLDTYTLPRLNQEEVESLNRPITGAEIVEXSIAYQPKKVQDQMDSQANSTRGTRRNWYHSFXTIPINRKRGNPXTLMQKSSIKYWQTESSSTSKSLSTMIKWASSLGGKAGSIYANQ

SEQ ID NO: 37821 - protein, 525 aa, Homo sapiens
  DOMAIN (110)..(151): kw TRANSCRIPTASE REVERSE II ORF2 domain identified by eMATRIX, accession number DM01354I, p-value=1.000e-40, raw score of 15.55
  DOMAIN (212)..(399): Reverse transcriptase domain identified by PFam, accession name rvt, E-value=0.032, PFam score of -38.1
  misc_feature (1)...(525): Xaa = X or * as defined in Table 2
MGDFNTPLSTLDRSMRQKVNKDIQELNSALHQADLIDIYRNLHPESTEYTFFSAPHHTYSKIDHILGSKAPLSKYRRSEIKINCLSDHSAIKLELRIKKLTQNRSTTWKLNNLLLNDYWVHNEMKAEIKMFFETNENKDTTYQNLWDTLKAVCRGKFIALNAHKRKQERSKIDTLTSQLKELEKQEQTHSKASRRQEISKIRGELKEIETQKTLQKINESRGWFFEKINKIDRLLARLIKKKREKNQIHAIKNDKGDMSTNHTEIQTTIREYYKHLYANKLENLKEIDKFLETYSLPRLNQEEVESLNRPITGSEIEAIINSLPNKRSPGPDGFTAKFYQRYKEELLISNFSKVSGYKINVQKSQAFLYTNNRQTESQIMSELPFTIASKRMKYLGIQPTRDMKDLFKENYKPLLNEIKEDTNKWKNIPCSWVGRINIVKMAILPKNWKKTTLKFIWNQKRARIAKSILSQIEQSWRHHATXLQTILQGYNNENSMVLVSKQRYRSMEQNRALRNNATYLQPSDL

SEQ ID NO: 37822 - protein, 91 aa, Homo sapiens
  misc_feature (1)...(91): Xaa = X or * as defined in Table 2
FTENDDFQFHPCPYKGHELIIFYGCIVFHGVYVPHFLNPVYHCWTFGLVPSLCYCEXCRNKHTCACVFIAAXFIVIWVYTQXWDGWVKWYF

SEQ ID NO: 37823 - protein, 91 aa, Homo sapiens
  misc_feature (1)...(91): Xaa = X or * as defined in Table 2
DCLGNAGSFLVPYELGHYGHFHNIDSSYQXAWMFFHLFVSFFISLSSGLXFSLKRSFTSLVSWIPRYFILFEAIVNGSSLMIWLSVCLLLV

SEQ ID NO: 37824 - protein, 145 aa, Homo sapiens
  misc_feature (1)...(145): Xaa = X or * as defined in Table 2
YSMVYMCHIFLIQSIIVGHLGWFQVFAIVNNVTINIRVHVSLXQHDLXSFGYIPSNWMAGSNGISSSRSLRNRHTVFHNGXTSLQSHQQCKSVPISPHPLQHLLFPDFLMIAILTGVRWYLIVVLICISLMASDDEHFFMCFLAA

SEQ ID NO: 37825 - protein, 92 aa, Homo sapiens
  misc_feature (1)...(92): Xaa = X or * as defined in Table 2
NQREQRHNIPESLGRIQSSVXREIYSTKCPQEKAGKIQNXHPNITIKRTRKARANTFKSXQKARNNXNQSRTEGNRDTKNPSKNQXIQELVF

SEQ ID NO: 37826 - protein, 136 aa, Homo sapiens
  misc_feature (1)...(136): Xaa = X or * as defined in Table 2
IYKLPWAVWPFSXYXFFLPMSGGVFFHLFVSSFMSLSSGLXFSLKRSFTSLVSCIPRYFILSEAIVNGSSLMIWLSVCLLLVYKNACDFCTLILYPETLLKLSISLRRFWAETMGFSRCTIMSSANRDNLISSFRN

SEQ ID NO: 37827 - protein, 994 aa, Homo sapiens
  DOMAIN (87)..(133): kw TRANSCRIPTASE REVERSE II ORF2 domain identified by eMATRIX, accession number DM01354O, p-value=1.000e-40, raw score of 8.73
  DOMAIN (120)..(395): Reverse transcriptase domain identified by PFam, accession name rvt, E-value=1.4e-88, PFam score of 307.7
MVDIHKPYHPFTWLGVSVSPCGPVLRYSNFFLASSTVQVELLVCGGSSSGSSEQGFVTMRTELNQEEVESLNRPITGSEIVAIINSLPTKKSPGPDGLTAEFYQRYKEELVPFLLKLFQSIEKEGILPNSFYEASIILIPKPGRDTTKKENFRPISLMNIDAKILNKILANRIQQHIKKLIHHDQVGFIPGMQGWFNIRKSINVIQHINRAKDKNHMIISIDAEKAFDKIQQPFMLKTLNKLGIDGTYFKIIRAIYDKPTANIILNGQKLEAFPLKTGTRQGCPLSPLLFNIVLEVLARAIRQEKEIKGIQLGKEEVKLSLFADDMIVYLENPIISAQNLLKLISNFSKVSGYKINVQKSQAFLYTNNRQTESQIMSELPFTIASKRIKYLGIQLTRDVKDLFKENYKPLLKEIKEDTNKWKNIPCSWVGRINIVKMAILPKVIYRFNAIPIKLPMTFFTELEKTTLKFIWNQKRARIAKSILSQKNKAGGITLPDFKLYYKATVTKTAWYWYQNRDIDQWNRTEPPEIMPHIYNYLIFDKLEKNKQWGKDSLFNKWCWESWLAICRKLKLDPFLTPYTKINSRWIKDLNVRPKTIKTLEENLGITIQDIGMGKDFMSKTPKAMATKAKIDKWDLIKLKSFCTAKETTIRVNRQPTTWEKIFATYSSDKGLISRIYNELKQIYKKKTNNPIKKWAKDMNRHFSKEDIYAAKKHMKKCSSSLAIREMQIKTTMRYHLTPVRMAIIKKSGNNRCWRGCGEIGTLLHCWWDCKLVQPLWKSVWRFLRDLELEIPFDPAIPLLGIYPNDYKSCCYKDTCTRMFIAALFTIAKTWNQPKCPTMIDWIKKMWHIYTMEYYAAIKNDEFMSFVGTWMKLETIILSKLSQEQKTKHRIFSLIDRLDQRNFLLGSSGAFPLSHDLAERDQASGTGKASPHRQLNPSHPAQPSVDSGPLTANHNTASATFSLPCLWAKAPPAGHLEHGTFRVKSFLGHSPAINQ

SEQ ID NO: 37828 - protein, 75 aa, Homo sapiens [sequence omitted]

SEQ ID NO: 37829 - protein, 151 aa, Homo sapiens
SGHGSSSGTKSSIKKNQNIGYKLGHRRALFEKRKRLSDYALIFGMFGIVVMVIETELSWGAYDKASLYSLALKCLISLSTIILLGLIIVYHAREIQLFMVDNGADDWRIAMTYERIFFICLEILVCAIHPIPGNYTFTWTARLAFSYAPST

SEQ ID NO: 37830 - protein, 247 aa, Homo sapiens
TLRWNSQDVTSNFLGAMWLISISFLSIGYGDMVPNTYCGKGVCLLTGIMGAGCTALVVAVVARKLELTKAEKHVHNFMMDTQLTKRVKNAAANVLRETWLIYKNTKLVKKIDHAKVRKHQRKFLQAIHQLRSVKMEQRKLNDQANTLVDLAKTQNIMYDMISDLNERSEDFEKRIVTLETKLETLIGSIHALPGLISQTIRQQQRDFIEAQMESYDKHVTYNAERSRSSARRRRSSFTAPPTSSESS

SEQ ID NO: 37831 - protein, 806 aa, Homo sapiens
MCPILREHRGSTEGKRRQKRLPLELTLKDEEVLAHRQEIEVAKASPSKGNIIIHFGYKGVEYHDQQDVTSNFLGAMWLISITFLSIGYGDMVPNTYCGKGVCLLTGIMGAGCTALVVAVVARKLELTKAEKHVHNFMMDTQLTKRHCPWAATIQPKLSFLISLPGCDYRGESARARPLSHPPLQLGLGKDARYLRICDRSLLCVCAAAGNAGLRPRDSPHTLLHWRSRSPYFFSPKPVPPQLLGGQPAAHSRRDDLGEAGVGRGGCCFAALRGVQSEKWSGFHTVPEPAPGQGDVMPIVLVRPTNRTRRLDSTGAGMGPSSHQQQESPLPTITHCAGCTTAWSPCSFNSPDMETPLQFQRGFFPEQPPPPPRSSHLHCQQQQQSQDKPCPPFAPLPHPHHHPHLAHQQPASGGSSPCLRCNSCASSGAPAAGAGDNLSLLLRTSSPGGAFRTRTSSPLSGSSCCCCCCSSRRGSQLNVSELTPSSHASALRQQYAQQSAQQSASASQYHQCHSLQPAASPTGSLGSLGSGPPLSHHHHHPHPAHHQHHQPQARRESNPFTEIAMSSCRYNGGVMRPLSNLSASRRNLHEMDSEAQPLQPPASVGGGGGASSPSAAAAAAAAVSSSAPEIVVSKPEHNNSNNLALYGTGGGGSTGGGGGGGGSGHGSSSGTKSSKKKNQNIGYKLGHRRALFEKRKRLSDYALIFGMFGIVVMVIETELSWGAYDKPGTAALASVLYGVDPAAQPRVFPVFPGLLSSLLVLRPSDLTDHRAKTASLYSLALKCLISLSTIILLGLIIVYHAREIQEK

SEQ ID NO: 37832 - protein, 193 aa, Homo sapiens
MEMTPGAGSLAAGGDLTMGTGMATGSQGGRQLQEKCLTIYFPLIMRMVVTWTTMAAEEVKNAAANVLRETWLIYKNTKLVKKIDHAKVRKHQRKFLQAIHQLALNSIWRRADMVTSVAQKSSFPYETYEGSNGKLFMVDNGADDWRIAMTYERIFFICLEILVCNAVLGGKLGMERKRESKGDLAGFYDRPQS

SEQ ID NO: 37833 - protein, 394 aa, Homo sapiens
  DOMAIN (194)..(209): FIBRONECTIN TYPE III REPEAT SIGNATURE domain identified by eMATRIX, accession number PR00014D, p-value=5.846e-12, raw score of 12.04
  DOMAIN (79)..(210): Fibronectin type III domain identified by PFam, accession name fn3, E-value=5.7e-09, PFam score of 43.2
MSSANRSILEVPHLDILLQELPGVSKVVTVEVRGNWQRWLKVRDLTKGVTYFFRVQARTITYGPELQANITAGPAEGSPGSPRDVLVTKSASELTLQWTEGHSGDTPTTGYVIEARPSVFGNGSFQVSKEENQYFSEGLTSIEVPSQQVQQEGAVAMALMVPDEGLWDMFVKDIPRSATSYTLSLDKLRQGVTYEFRVVAVNEAGYGEPSNPSTAVSAQVEAPFYEEWWFLLVMALSSLIVILLVVFALVLHGQNKKYKNCSTRQGISTMEESVTLDNGGFAALELSSRHLNVKSTFSKKNGTRSPPRPSPGGLHYSDEDICNKYNGAVLTESVSLKEKSADASESEVSVGAYFRAVTISPYFCKDAGFAVRTIALGLAETAGSKADARKGTFV

SEQ ID NO: 37834 - protein, 449 aa, Homo sapiens
  DOMAIN (194)..(209): FIBRONECTIN TYPE III REPEAT SIGNATURE domain identified by eMATRIX, accession number PR00014D, p-value=5.846e-12, raw score of 12.04
  DOMAIN (79)..(210): Fibronectin type III domain identified by PFam, accession name fn3, E-value=5.7e-09, PFam score of 43.2
MSSANRSILEVPHLDILLQELPGVSKVVTVEVRGNWQRWLKVRDLTKGVTYFFRVQARTITYGPELQANITAGPAEGSPGSPRDVLVTKSASELTLQWTEGHSGDTPTTGYVIEARPSVFGNGSFQVSKEENQYFSEGLTSIEVPSQQVQQEGAVAMALMVPDEGLWDMFVKDIPRSATSYTLSLDKLRQGVTYEFRVVAVNEAGYGEPSNPSTAVSDRLQARALGGSERDGLCLRRGDLSSMKGREASALGQQSLSQKPQEFGGTTLCSSVAQVEAPFYEEWWFLLVMALSSLIVILLVVFALVLHGQNKKYKNCSTGKGISTMEESVTLDNGGFAALELSSRHLNVKSTFSKKNGTRSPPRPSPGGLHYSDEDICNKYNGAVLTESVSLKEKSADASESEVSVGAYFRAVTISPYFCKDAGFAVRTIALGLAETAGSKADARKGTFV

SEQ ID NO: 37835 - protein, 179 aa, Homo sapiens
  misc_feature (1)...(179): Xaa = X or * as defined in Table 2
MAYCKSTPAVGLRVTVXSLSRLSLICYTFCIGAPSHLSVGSLIIATSFIVSNRPCRAPYVDTIYRLPSPLRLAGHRTLPLKPSFPRRSPPLLYYPSPRPPAHYPLSPSSEPNRRYTMALTAVPYPYTSPLQAFPFLHSRIPQLQLFLLTNSFTSRTPVEPVQVLEILSQWKATTKWHYG

SEQ ID NO: 37836 - protein, 65 aa, Homo sapiens
  DOMAIN (26)..(55): EPSP synthase domain identified by PFam, accession name EPSP_syntase, E-value=0.00015, PFam score of 20.1
FSDSHLYFCSMEGPIQGFLYTSGTRPAAREPEIVDTANFLITLGAKISGQGTDRIAWVHHRNIPA

SEQ ID NO: 37837 - protein, 120 aa, Homo sapiens
  DOMAIN (3)..(21): GLUCOSE/RIBITOL DEHYDROGENASE FAMILY SIGNATURE domain identified by eMATRIX, accession number PR00081A, p-value=1.000e- 14, raw score of 10.53
  DOMAIN (2)..(118): short chain dehydrogenase domain identified by PFam, accession name adh_short, E-value=1e-05, PFam score of 2.0
MAIALVTGGSRGIGRATALLLAQEGYTVAVNYQQNLHAAQEVMNLITQAGGKAFVLHADISDENQVVAMFTAIDQHDEPLATLVNNAGILFTQCTVENLTAERINRVLSTNVTGYFLCCG

SEQ ID NO: 37838 - protein, 115 aa, Homo sapiens
IHVIRIHYRMSYSILAFTLSADRSHRRSKWRKDVGIQQVVHSNKVALDYMQGDYDLNRNTLRTMITTAWYSALGIPIDSSGKLVNYPPNGKYLLNRKRDNLEHCKLAAGRHMWYP

SEQ ID NO: 37839 - protein, 356 aa, Homo sapiens
  DOMAIN (203)..(230): PROTEIN TRANSMEMBRANE TRANSPORT INNER MEMBRANE R domain identified by eMATRIX, accession number PD01612B, p-value=3.382e- 21, raw score of 11.68
  DOMAIN (190)..(264): AcrB/AcrD/AcrF family domain identified by PFam, accession name ACR_tran, E-value=2.4e-33, PFam score of 124.2
  misc_feature (1)...(356): Xaa = X or * as defined in Table 2
SAVRYSVAITTADRRTAAGAISYPTKXSXSEPIQEGQPEEQRANYPNGTYPTSLRHLERLWLRSALSVKARFYHQQYSLKKYRYKHIADNVCQWLDEVFLRPKEMSDIHKLTFIEKRERLKNSVFKSLHDVRTVEDPSGTQLEVVSNNPWDPKRQLLKWDGTKWTGWDIPDYSAAPPEAVPSLNNPQTFSEQKLDEALYHGAVLRVRPKAMTVAVIIAGLLPILWGTGAGSEVMSRIAAPMIGGMITAPLLSLFIIPAAYKLMWLHRHRWLKCKSARRPQYQSGYTDDRHSRSVKASPTAGLPSLTHEQQQKAVERIQELMAQGMSSGQAIALVAEELRANHSGERIVARFEDEDE

SEQ ID NO: 37840 - protein, 305 aa, Homo sapiens
  misc_feature (1)...(305): Xaa = X or * as defined in Table 2
RLKFTETNLYTNIYVGSIHIHLNLEIIHMSLHXXMDRTNINIRVQICFCEFKSLVLLDKPGRQELIDDLNKRTDNFLTDSGISVSDWIDAATWEVFSSLRELELLGIKNIRLASQDLHGVILSSETVAEDIWCRILDTVTRKGEHSRRIHSADDKSYLRPDLLEWFKQRVEDDQSRSGRKIYVKRDLPHILTPFRAPMASVCAKRKGQVLHQQYSLKKYRYKHIADNVCQWLDEVFLRPKEMSDIHKLTFIEKRERLKNSVFKSLHDVSEFLGRVLLHATDPAAPRKPAYSLHAIRGKSRGRKNS

SEQ ID NO: 37841 - protein, 59 aa, Homo sapiens
  DOMAIN (1)..(58): Uncharacterised protein family UPF0047 domain identified by PFam, accession name UPF0047, E-value=2.6e-05, PFam score of -6.3
MPRVNIGLLHLLLQHTSASLTLNENCDPTVRHDMERFFLRTVPDNGNYEDLQACKFRRN

SEQ ID NO: 37842 - protein, 133 aa, Homo sapiens
MFDVQIMAQTLVNGADSFSLLAIPFFVLAGEIMNAGGLSKRIVDQPMKLITLRLSCRHGSDIAEGKYDMSRLAAFLGPRCRFLIPKVLCQGFQTMTTGCGEPEPGNANGHRQKAPTGACPLVNKPRGQKSFRQ

SEQ ID NO: 37843 - protein, 68 aa, Homo sapiens
THLAQDLALKGLRVLLVGGNDPQGTASMYHGWVPDLHIHAEDTLLPFYRLSLPYGTPDEHSSGGQECE

SEQ ID NO: 37844 - protein, 96 aa, Homo sapiens
SVGVKAIDKVRENSQMIARSATILGITVIGGLIASYVHINVVTSFAIDNTHSVALQQDFFDKVFPNILCSFGLLSLLAPLVAEFFFPLETVLSVQV

SEQ ID NO: 37845 - protein, 84 aa, Homo sapiens
  DOMAIN (17)..(68): Ribosomal protein S3Ae proteins domain identified by eMATRIX, accession number BL01191B, p-value=1.000e-40, raw score of 13.33
  DOMAIN (1)..(84): Ribosomal S3Ae family domain identified by PFam, accession name Ribosomal_S3Ae, E-value=2.9e-05, PFam score of -13.2
DLQNDEVAFRKLKLIIEDVQGKSYLTNFHGMNLTHDKMCSMVKKWQTVIEAHVDVKTTNGYLLCLFCVGFTKKCNNQIWKKILF

SEQ ID NO: 37846 - protein, 254 aa, Homo sapiens
  DOMAIN (85)..(136): Ribosomal protein S3Ae proteins domain identified by eMATRIX, accession number BL01191B, p-value=1.000e-40, raw score of 13.33
  DOMAIN (7)..(233): Ribosomal S3Ae family domain identified by PFam, accession name Ribosomal_S3Ae, E-value=1.6e-94, PFam score of 327.4
  misc_feature (1)...(254): Xaa = X or * as defined in Table 2
TSFLTTGGKKGSKKKVVDPFSKKDWLXYVKHPAMFNIRNIGKDVGSPRTQGTKIASDGLKGRVFEVSLADLQHDEVAFRKFKLITEDVQGKNCLTNFHGMDLTRDKMCSMVKKWQTMIEAHVDVKTTDGYLLRLFCVGFTKKRNNQIGKPFXAQHHRVRQIGKKMMEIMTREVQTNDLKEVVNKLIPDSIGKDIEKACQSIYPLHDVFVRKVKMLKKPKFELGKLMELHGEGSSSGKATGDETGAKVERADGYE

SEQ ID NO: 37847 - protein, 380 aa, Homo sapiens
MEEGEGEADTSYTAGAGETERERGSDSRSRALSQRPGAPRTMLSSTQNAGGSYQRVRGALDTQEWKWGEVSPRTLNVDGRALVSVANTHGTDRPAYTLNPQSRDQRSGVITLGYKRPLEREDLFELKESDSFCTACPIFEKQWRKEVLRNQERQKVKALNKLDEALCPGIILTQSTDSNANLFQKQPHRHTQTSGRWQIIIFCEHSSNFGWNGYGYAVALLVVVFLQTLILQQYQRFNMLTSAKVKTAVNGLIYKKLGWSGKVSWLILHDVGHGIMEGYIAWGKGSDVRITWEKKSTEMRTRPAQKMALLLSNVSRQKFSTGEIINLMSATHGLDSKPQSPLRELQMEVIEFYHLLIHSTSIEQACILCQPVFQAQEVQQ

SEQ ID NO: 37848 - protein, 93 aa, Homo sapiens
LSAAKGSDSRSRALSQRPGAPRTMLSSTQNAGGSYQRVRGALDTQKCSPEKSASFFSKVTYSWVSRVITLGYKRPLEREDLFELKESDPSALR

SEQ ID NO: 37849 - protein, 287 aa, Homo sapiens
  DOMAIN (165)..(218): IMP dehydrogenase / GMP reductase proteins domain identified by eMATRIX, accession number BL00487D, p-value=6.700e-37, raw score of 26.53
  DOMAIN (21)..(107): IMP dehydrogenase / GMP reductase N terminus domain identified by PFam, accession name IMPDH_N, E-value=3.7e-45, PFam score of 163.4
MTDYLIRGGTDYVPDNWLPAQQLFASADCLTYDDFLILPGFTDFIADEADLTSALTRKITLKTPLISSPTDTADIAIAMALMGGIGFIHHNCTPEFQAKEVRKVKKFEQGFITDPVVLTPSHTVGDVLEAKMRHGFSGIPITETGTIGSKLKNRDYPLASKDSHKQLLRGAAVGTPEDDKYRLDLLTQAGVDVVVLDLSQGNSVYQIATVHYIKQKYPHLQVIGMTAAQAKNLIDAAVDGLRIGMGCGSICITQEVMACGGPQGTALYKVAEYALCFGVSIIADGGI

SEQ ID NO: 37850 - protein, 134 aa, Homo sapiens
MWEILELPRDLLNGFAQNADSNMDNKVQAEVALDGNGELVGYYSKASAGDTQANRVWSGPPANSNRPAAEGPERNTININKKDINTKTPSVGHRHQRPKVDKTTKTRKTRAEKLKILKTRVPLIFQRTAALRQR

SEQ ID NO: 37851 - protein, 88 aa, Homo sapiens
  misc_feature (1)...(88): Xaa = X or * as defined in Table 2
TQSPVQTKPTPITTRGGGFLPTQPFPVILQRQFCPEXLVAFMGSXEDVPXGSFRVSAESSILXRAPXGAQSTCKPVNRNEKISKRIVH

SEQ ID NO: 37852 - protein, 49 aa, Homo sapiens
RTDGVLLWMSFLFVSFPSNSQDPQLQVCWSLLEVHSRPCLPGYQQQRQF

SEQ ID NO: 37853 - protein, 389 aa, Homo sapiens
  DOMAIN (182)..(196): Glutamyl-tRNA reductase proteins domain identified by eMATRIX, accession number BL00747B, p-value=3.284e-09, raw score of 10.23
  DOMAIN (17)..(210): AP endonuclease family 1 domain identified by PFam, accession name AP_endonucleas1, E-value=5.7e-34, PFam score of 126.3
  misc_feature (1)...(389): Xaa = X or * as defined in Table 2
PPLLIPRQTGSGVDLQQTPTDLQLRVLTVRRKTNKQKGHPHQNSICTSPSSKTKDFKPTKIKRDKEGHYIMVKGSIQQEELTILNIYTPNTGAPRFIKQVLRDLQRDLDSHTIIVGDFNTPLSTLDSSKRQKVDKDIQELNSALYQADLTDIYRTLHPKSTEYTFFSAPHHTYSKIDHIVGSKALLSKCNRTEIITNCLSDHSAIRLELRIKKLTENRSTTWKLNNLLLKDYWVHNEMKAEIKMFFETNENKDTTYQNLWDTGKAACRGIFIAINAHKRNQKRSKMDTLTSQLKELEKQEQRHSKASRRLNQEEVESLNKPRTGSEIEAIINSLPTKKSPGADGFTAEFYQRYKEEPGTIPSETIPINRKRGNTPXLILXGQHHPDTKA

SEQ ID NO: 37854 - protein, 847 aa, Homo sapiens
  DOMAIN (700)..(745): kw TRANSCRIPTASE REVERSE II ORF2 domain identified by eMATRIX, accession number DM01354N, p-value=1.000e-40, raw score of 13.17
  DOMAIN (70)..(310): Reverse transcriptase domain identified by PFam, accession name rvt, E-value=1.4e-09, PFam score of 45.3
  misc_feature (1)...(847): Xaa = X or * as defined in Table 2
MDEFLNTYTLPRLNQEEVESLNRPITGSEIVAIINSLPRKKSPGPDGFTAEFYQRYKEELVPFLLKLFQSIEKEGILPNSFYEASIILIPKPGRDTTIKENFRPISLMNIDAKILNKIILANRIQQHIKKLIHHDQVGFIPGMQGWFNIRKSINVIQHINRTKDKNHMIISTDAEKAFDKIQQPFMLKTLKKFGIDGTYLKIRIKYLGIQLTRDVKDLFKENYKPLLNEIKEDTKKWKNIPCSWVGRINIMKMAILPKVIYRFNAIPIKLPMTFLTELEKTTLKFIWNQKRARIAKSILSQKNKAGGITLPDFKLYYKATVTKTAWYWYQKRDIHQWNTTEPSEITPHIYNHLIFDKPEKNKQWGKDSLFNKWCWENWLAIWRKLKLDPFLTPYTKINSRWIKDLNVRPKTIKTLEENLGITIQDIGMGKDFMSKTPKAMATKAKIDKWDLIKLKSFCTAKETTIRVNRQPTKWEKIFTTYSSDKGLISRIYNELKQIYKKKSDNPIKKWVKDMNRHFSKEDIYAAKKHMKKCSPSLAIREMQIKTTMRYHLTPPSLLIPRQTGSGVDLQQTPTDLQLKVLTVRRKTNKQKVHPHQNPICTSPSSKTKELEKQEQTHSKASRRQEITKIRAELKEIETQKNLQKINESRSWFLEKVNKIDRLLARLIKKKREKDQIDAIKNDKGDITTDPTEIQATIREHYKHLYANKLENLEEMDKFLDTYTLPRLNQEEVESLNRPITGSEIEAIINSLPTKKSPGPDGFTAKFYQRYKEEPGTIPSETIPINRKRGNPPXLILXVQHHPDTKAGKRHNQKREFXTNILDEHXCKNPQXNTGKPNPAAHQKAYPP

SEQ ID NO: 37855 - protein, 427 aa, Homo sapiens
  DOMAIN (379)..(424): kw TRANSCRIPTASE REVERSE II ORF2 domain identified by eMATRIX, accession number DM01354N, p-value=5.714e-33, raw score of 13.17
  misc_feature (1)...(427): Xaa = X or * as defined in Table 2
SAADTQANRVWSVPPTNSNRPAAEGPDCXKENXQKGHPHQNPICQSPSSKPKVDKTTKMGKKQNRKTGNSKNQSTSPPPQEHSSSPAMEQRITNAEKYLKDLMELKTTAQELHDECTSLSSPFDQLEERVSVMEDQMNEMKREEKFREKRIKRNEQSLKEIWDYVKRPNLPLIGVPESDRENGNKLENTLQDIIQENFPNLARHANIQIQEIQRMPQRYSSKRATPRYIIVRFTKVEMKEKMLRAARDKSLVTHKGKLIRLTAGKFIALIAHKGNQERSKIDTLTSQLKELEKQEQTHSKPSRRQEITKIRAELKEIETQTTLQKINESRSWFFEKINKIDRLLARLIKKKREKNQIDAIKNDKGDITTDPTEIQTTIREYYKHHYANKLENLKEMNKFLDTYTLPRLKQEEVESLNRPIKALKLRQ

SEQ ID NO: 37856 - protein, 360 aa, Homo sapiens
  DOMAIN (129)..(174): kw TRANSCRIPTASE REVERSE II ORF2 domain identified by eMATRIX, accession number DM01354N, p-value=9.143e-14, raw score of 13.17
  misc_feature (1)...(360): Xaa = X or * as defined in Table 2
MLSSVGLLLTHRRKKKSTDTINDESLNKERDMTGNPHIFPRYQEIWQVFVSSGNNYITTATGPTAVPPLLIPRQTGSGVDLQQTPTDLQLRLLTVGRKTNKQKGHPHQNPICTSPSSKTKEIRTTIREYYKHLYANKLENLEEMDKFHXHIHPPKTKPGRSXISAXTNNRLXNXGNNXXLTNQKKSRTRWIHSRILPEVQGGADKQRAKHEXTPIHNCFKENKIPRNPTYKEHEGPLQGELQTTSQGNKRGYKQMDRTFHAHGXEESISXKWPYCPRXFIDSPSPSSYQXLSSQNGKNYFKVHMEPKKSPYCQVNPKPKEQSWRHHATXLQTILQGYSNQNSMVLVPKQRYRPMEQSPQK

SEQ ID NO: 37857 - protein, 1293 aa, Homo sapiens
  DOMAIN (667)..(692): 7 kw REVERSE TRANSCRIPTASE RNA POLYMERASE domain identified by eMATRIX, accession number DM00895E, p-value=3.333e-11, raw score of 15.72
  DOMAIN (638)..(892): Reverse transcriptase domain identified by PFam, accession name rvt, E-value=1.2e-70, PFam score of 248.1
  misc_feature (1)...(1293): Xaa = X or * as defined in Table 2
MNLSRHLNEVKGELLWSLEWRDPDGGSIRMEVGLGGWTQRLEEEKKGNVCSHGNLEKDFPYIPHLFGLQQKKMDLKGVFKSCFKIYCSSKHLLKTGFISEAVLCYGEGGEGDTVLTMKERWPHECIVLIQCNKGRLTPHTARYSSETKLPEERSGSSICGSPISAVLQPPLLIPRQTGSGVDLQQTPTNLQLRVLTVRRKTNKQKGHPHQKPICMSPSSKTKDFKPTKIKRDKEGHYIMVKGSIQQEELTILNIYAPNTEAPRFIKQVLSDLQRDLDSHIIIMGDFNTPISTLDRSMRQKVNKDIQELKSALQQADLIDIYRTLHPKSTEYTFFSAPHHTYSKIDHIVGSKALLSKCKRMEIITNCLSDHSAIKLELRIKKLTQNRSTTWKLNNVLLNDYWVHNKMKAEIKMFFETNGNKDTTYQNLWDTFKGVCRGKFIALNAHKRKQEGSKIDTLTSQLKELEKQEQTHSKVSRRQEITKIRAELKEIETQKTLQKINESRSWFFEKFNKIDRRLARLIKKKREKNQIDAIKNDKRDITTDPTEIQTTIREHYKHLYANKLENLEEMDKFLDTYTLPRLNQEEVESLNRPITGSEIEAIINSLPTKKSPGPDGLTAKFYQRYKEELVPFLLKLFQSIEKEGILPNSFYEVCIILIPKPGRGTTKKENFRPISLMNIDAKILNKILANRIQQLIKKLIHHDQHINRTKYKNHMIISINAEKAFDKIQQRFMLKTLNKLGIDGTYLKIIRAIYDKPTANIILNGQKLEAFPLETGTRQGCPLSPPLFNIVLEVLARAIRQEKEIKGIQLGKEEVKLSLFADDMIVDLENPIVSAQNLLKLISNFSNVSGYKINVQKSQAFLYTNNRQTESQIMSELPFTIASKSIKYLGIQLTRDVKDLFKENYKPLLNEIKEDTNKWKNILCSWVGRINIVKMAILPKVIYRFNAIPIKLPMTFFTELEKTTFKYLEYIKWLSPKSGQLETVSRGCEWSNNKKKHSLSTCSGRDPCSHGAYILRSGGGDGSRTGKVSICKCQSEMQVSQQLQRLQGNDCSSEVTNGSFNHRLIADLGQDEGHCCNTRGSTRNXKNXRSKSKHIQKCSRRQEITKIRAELKEIETQKTLQKINESRSWFFEKFNKIDRRLARLIKKKREKNQIDAIKNDKRDITTDPTEIQTTIREHYKHLYANKLENLEEMDKFLDTYTLPRLNQEEVESLNRPITGSEIEAIINSLPTKKSPGPDGLTAKFYQRYKEEPGTIPSETIPINRKRGNPPXLILXGLHHPDTKAWQRHYKKREF

SEQ ID NO: 37858 - protein, 91 aa, Homo sapiens
  misc_feature (1)...(91): Xaa = X or * as defined in Table 2
QGYPGTELSSAPSGPNRHLQNFPPQINRIYILLSTTSHLFQNXPHSWKXSTPQQMXKRRNYNKNQLELRIKKQTQNRSTTWKLNNLLLNDY

SEQ ID NO: 37859 - protein, 135 aa, Homo sapiens
  misc_feature (1)...(135): Xaa = X or * as defined in Table 2
DKTSRGTIRQQHLLFTNIRCSAASAADTQANRVWSGPPANSDRPAAEGPDCXKENXQTERTSTPKSHLYVTIIKDQRNKIPKNPTYKGCEGPLQGELQTTAQQNKRRYKQMQEHSMLMGRKNQYHENGHTAQGNL

SEQ ID NO: 37860 - protein, 549 aa, Homo sapiens; identical to SEQ ID NO: 32849
  DOMAIN (253)..(294): kw TRANSCRIPTASE REVERSE II ORF2 domain identified by eMATRIX, accession number DM01354I, p-value=1.000e-40, raw score of 15.55
  DOMAIN (44)..(239): AP endonuclease family 1 domain identified by PFam, accession name AP_endonucleas1, E-value=1.4e-28, PFam score of 108.4

SEQ ID NO: 37861 - protein, 315 aa, Homo sapiens
  DOMAIN (142)..(182): kw TRANSCRIPTASE REVERSE II ORF2 domain identified by eMATRIX, accession number DM01354Y, p-value=1.000e-40, raw score of 10.69
  misc_feature (1)...(315): Xaa = X or * as defined in Table 2
MAMPPLLIPRQTGSGVDHQQTPTDPQLRILTVRRKTNTQKGHPHQNPNCTSPSSKTKELKEEVGTQRKEVKNLEKRLDEWLTRIANAEKSLKDLMQLKTMAQELQLDKTTLNFIWNQKRACIAKTILSKKNKAGGIRLPDFKLYYKATVTKTAWYWHQNRYIDQWNRTEASEIMPHIYNHLIFDKPDKKKQWGNDSLFKXMVLGKLASHMQKTEIGPLPYNFYKNXLKMDXRLKGKTXNHRNHRRKPKQYHSGHRHGQRLHDXNTKSNGNKGQNXQMGSNXTKELLRQQKKLPSEXTRNLQNGRKFVQSIYLTKG

SEQ ID NO: 37862 - protein, 63 aa, Homo sapiens
  misc_feature (1)...(63): Xaa = X or * as defined in Table 2
QTERTSTQNPICTSPSSKTKGRXNHKDGEKTEQKNWKLXKAERLSSSKGMQLLSSNGTKLDGE

SEQ ID NO: 37863 - protein, 934 aa, Homo sapiens
  DOMAIN (585)..(640): kw TRANSCRIPTASE REVERSE II ORF2 domain identified by eMATRIX, accession number DM01354Q, p-value=1.000e-40, raw score of 9.23
  DOMAIN (534)..(813): Reverse transcriptase domain identified by PFam, accession name rvt, E-value=5.1e-66, PFam score of 232.7
MYGTGYRDVAGKWAIDPDSKREFLDVTQEGIQGCDFSGTCRQTLSILTQPLRQWGLEGIKKPNSWIISEESVSNGGPPLLIPRQTASGVDLQQTPTDLQLRVLTVRRKTNKQKGIASTSTKRTSTPKPHLYVTIIKDQSYIKPQRWGKNIAEKLKILKIRVALSLQRNAAPHQQWNKAGRRMSLMSSQKKASEVIESQMNEIKGEEKFREKRVKRNEQSLQEIWDYVKRPDLRLIGVPDSDGENGTRLENTLQDIIRENFPNLARQASIQIQEIQRTPQRYSSRRATPRHIIVRFTKVEMKEKMLRAAREKELKIKKLTQNCLTTWKLNNLLLNDYWVHNEMKGEIKMFFETNENIDTTYQNLWHTFKAVCRGKFIALNAHKRKQERSKIDTLASQLKEIEKQEQTHSKASRRQEITKIRVELKEIETQKSLQKINESRSWFFEKINKIDRPLPRLIKKKREKNQIDTIKNDKGDITTNPTEIQTISREYYKHLYANKLENLEEMDKFLDTYTLSGLNKEEVESLNTSITGSEVEAIINSIPTKKKSRTRWIHSRILPELSRDTTKKENFRPISLMNIDVKILNKMLANGIQQHIKKLIHHDQVGFIPGMQGWFNIHKSINVIQHINRTKDKNHMIISIDAEKAFDKIQQPFMLKTLNKLDIDGTYLKIIRAIYDKPTANIILNGQKLEAFPLKSSTRQGCPLSPHLFNIVLEVLARAIRQEKEIKGIQLGKEEVKLSLFADDMIVYLENPIISAQNLLKLISNFSKVSGYKINVQKSQAFLYTSNRQTESQIMSELPFTIASKRIKYLEIQLTRDVKDLFKENYKPLLNEIKEDTNKWKNIPCSWIGRINIVKMAILPKDDKKCVSDDHDADNDSDNDGDNFLQVSAAKSYISHYFPVIRLLTAYWRRLSNSLEKAKGHDVEGPCGKELVVGL

SEQ ID NO: 37864 - protein, 54 aa, Homo sapiens
HTDGFLVWMSFLFLSFPSNSQDPQLQVCWSLLEVHSRPCLPGYQQQRLQNSRYW

SEQ ID NO: 37865 - protein, 50 aa, Homo sapiens
  misc_feature (1)...(50): Xaa = X or * as defined in Table 2
LLEGKLTNRKEXHQHQQKGHPHQNPICTSPSSKTKVTXNHKDGEKTXQKS

SEQ ID NO: 37866 - protein, 90 aa, Homo sapiens
  misc_feature (1)...(90): Xaa = X or * as defined in Table 2
GQKKKLMIIGINSRNHHGPQXPALQKMPASXVTEIMNNHFLFCFRKGKGRIKLVNSRVEHQAGSWGPWFQSLVAGQYFWTCSGPDGSPLP

SEQ ID NO: 37867 - protein, 1971 aa, Homo sapiens
  DOMAIN (1678)..(1713): Caspase family histidine proteins domain identified by eMATRIX, accession number BL01121E, p-value=8.364e-28, raw score of 23.71
  DOMAIN (1558)..(1656): ICE-like protease (caspase) p20 domain identified by PFam, accession name ICE_p20, E-value=2.1e-31, PFam score of 107.5
  misc_feature (1)...(1971): Xaa = X or * as defined in Table 2
MKHTLIPRIKNACLQMSSLAVPVNSLVCLGKILEYLDKWLVLDGILPFLQQIPSKESAVLMGILGIYKCTFTHKLGITKEQLTGKVLPHLIPLSIENNLNQFNSFISIIKEMLNRLESEHKTKLEQLHIMQEQQKSLDIGNQMNVSEETKVTNIGNQQIDKVFSHIGADLLTGSDSENKEDGALNVPPAGAKPTQQRPTDMSALNNLFGPQKPKVSMNQLSQQKPNQWLNQFVPPQVSPATGSSVMGTQMNMIGQSAFDVCSNEDLPEVELVSLLEEQLPQYRLKVDTLFLYENQDWTQSPHQRQHASDALSPVLAEETFRYMILGTDRVEQMTKTYNDIDMVTHLLAERDRDLELAARIGQALLKRNHVLSEQNESLEEQLGQAFDQVNQLQHELCKKDELLRIVSIASEESETDSSCSTPLRFNESFSLSQGLLQLEMLQEKLKELEEENMALRSKACHIKTETVTYEEKEQQLVSDCVKELRETNAQMSRMTEELSGKSDDXFDTKKSFPLFCHRLXTFTHKLGITKEQLTGKVLPHLIPLSIENNLNQFNSFISIIKEMLNRLESEHKTKLEQLHIMQEQQKSLDIGNQMNVSEETKVTNIGNQQIDKVFSHIGADLLTGSDSENKEDGALNVPPAGAKPTQQRPTDMSALNNLFGPQKPKVSMNQLSQQKPNQWLNQFVPPQVSPATGSSVMGTQMNMIGQSAFDVCSNEDLPEVELVSLLEEQLPQYRLKVDTLFLYENQDWTQSPHQRQHASDALSPVLAEETFRYMILGTDRVEQMTKTYNDIDMVTHLLAERDRDLELAARIGQALLKRNHVLSEQNESLEEQLGQAFDQVNQLQHELCKKDELLRIVSIASEESETDSSCSTPLRFNESFSLSQGLLQLEMLQEKLKELEEENMALRSKACHIKTETVTYEEKEQQLVSDCVKELRETNAQMSRMTEELSGKSDELIRYQEELSSLLSQIVDLQHKLKEHVIEKEELKLHLQASKDAQRQLTMELHELQDRNMECLGMLHESQEEIKELRSRSGPTAHLYFSQSYGAFTGESLAAEIEGTMRKKLSLDEESSLFKQKAQQKRVFDTVRIANDTRGRSISFPALLPIPGSNRSSVIMTAKPFESGLQQTEDKSLLNQGSSSEEVAGSSQKMGQPGPSGDSDLATALHRLSLRRQNYLSEKQFFAEEWQRKIQVLADQKEGVSGCVTPTESLASLCTTQSEITDLSSASCLRGFMPEKLQIVKPLEGSQTLYHWQQLAQPNLGTILDPRPGVITKGFTQLPGDAIYHISDLEEDEEEGITFQVQQPLEVEEKLSTSKPVTGIFLPPITSAGGPVTVATANPGKCLSCTNSTFTFTTCRILHPSDITQVTPSSGFPSLSCGSSGSSSSNTAVNSPALSYRLSIGESITNRRDSTTTFSSTMSLAKLLQERGISAKVYHSPISENPLQPLPKSLAIPSTPPNSPSHSPCPSPLPFEPRVHLSENFLASRPAETFLQEMYGLRPSRNPPDVGQLKMNLVDRLKRLGIARVVKNPGAQENGRCQEAEIGPQKPDSAVYLNSGALTTTFEELHFEIKPHDDCTVEQIYEILKIYQLMDHSNMDCFICCILSHGDKGIIYGTDGQEAPIYELTSQFTGLKCPSLAGKPKVFFIQACQGDNYQKGIPVETDSEEQPYLEMDLSSPQTRYIPDEADFLLGMATVNNCVSYRNPAEGTWYIQSLCQSLRERCPRQSQYYVMYFRGDDILTILTEVNYEEPEAAACNGKTIRLPGEMDLKTTLSHRTEQTQKLEDKCPVLFCIETRTQPPLLIPRQTGSRVDLQQTPTDLQLRVLTVRRKTNKQKGYPHQNPICTSLSSKTKEKSLKDLMELKTMAQEVCDKCTSLSSRFDQLEERVSVMEDQMNEMKQEEKFRKKRIRRNEQSLQEIWDYVKRPNLRLIGVPESDRENGTKLENTLQDIIQENFPNRARQANNQIQEIQRTA

SEQ ID NO: 37868 - protein, 452 aa, Homo sapiens
  DOMAIN (135)..(180): kw TRANSCRIPTASE REVERSE II ORF2 domain identified by eMATRIX, accession number DM01354N, p-value=1.000e-40, raw score of 13.17
MLTLRDLGSRYSEIRGPCLGLSPTRVVGKEELVMSYMDGTLNTGASHMRNQQLQAQLLLWMCLHYLHLADPQLFVHEKIDFITYKTSLPGKMSSDRALRKQQQLNNLVYVVTNQAKPGDRIVDFCSEIQTTIREYYKHLYANKLENLEEMDKFLDTYTLPRLNQEEVESLNRPITGSEIEAIINSLPTKRSPGPDGFTAEFYQRLKQCRKAHLDPVSLTHRSGPGAREDRLSDSGDASRGCWNLSQHAAVTSPESEERRIRTLSCRSVGVCRRSTPDPVCLGISSGGCRTVNIGEQQMLLPDRSSGSFVSEGYRPCEVSAPTGGCPPVRCLMINTVSLIGVKFTEVFDSINISEHLELACLQDHNSLLAREQNWTEDEFDELTEVGFRRWVITNSSELKKHVLVRCKEAKNLEKTLEELLTRITSLEKNINDLMELKNTTQELREAYTSINS

SEQ ID NO: 37869 - protein, 214 aa, Homo sapiens
  misc_feature (1)...(214): Xaa = X or * as defined in Table 2
YPGKQGLEWTSSKLQQTCCXGSXLLEGKRTNRKDINTKNPSVRHHHQRPKMGEKTEQKNRKLKIRAPLLLQRNTAPHHAMEQSWMENDFDELREEGFRRSNYSELKEEVRTNAKEVKNFEKKLDEWITRITNAEKSLKDLMELKTTAENYVTNAQAPVANATNXKKGYQRWKTKXMKXSEKRSLEKKEXKEKKQSLQEIWDYVKRPNLCLIGVP

SEQ ID NO: 37870 - protein, 99 aa, Homo sapiens
  misc_feature (1)...(99): Xaa = X or * as defined in Table 2
HTDGVSVWMSFLFVSFPSNSQDPQLQVCWSLLEVHSRPCLPGYQQQRIRLEPFKINVTXADHEAYRKTAVRRCSQTTQQAWEQSAHQQHIRHXSCRYPG

SEQ ID NO: 37871 - protein, 91 aa, Homo sapiens
MDAGFSRVDDFVASPVASFSLTGEPGGGGTFRGRPAELLARRPASERSDRLWSRQTEGQRHRQTARKFRHELGHGAVGSVRQLRQAYTMGN

SEQ ID NO: 37872 - protein, 216 aa, Homo sapiens
  DOMAIN (98)..(143): kw TRANSCRIPTASE REVERSE II ORF2 domain identified by eMATRIX, accession number DM01354N, p-value=1.000e-40, raw score of 13.17
  misc_feature (1)...(216): Xaa = X or * as defined in Table 2
HPDITIKRTREARANTFKSXQKARNNXDERRTEGNRDTKNPSKKSVNRRSWFFEKFNKIDRRLARLIKKKREKNQIDAIKNDKRDITTDPTEIQTTIREHYKHLYANKLENLEEMDKFLDTYTLPRLNQEEVESLNRPITGSEIEAIINSLPTKKSPGPDGLTAKFYQRYKEEPGTIPSETIPINRKRGNPPXLILXGLHHPDTKAWQRHYKKREF

SEQ ID NO: 37873 - protein, 206 aa, Homo sapiens
  misc_feature (1)...(206): Xaa = X or * as defined in Table 2
FRATSAADTQANRVWSGPPANSNRSAAEDPDCXKENXPTKGHPHQNPICTSPSSKTKARQANIQIQEIQRMPQRYSSRRATPRCIIVRFTKVEMKEKMLRAAREKGQVTHKGNPIRLTADLLVKTLQARREWGPIFNILKEKNFQPRISYPAKLSFISEGEIKSFTDKQMLRDFGTTRPALKELLKEALNMERNNQYQPLQKHVRL

SEQ ID NO: 37874 - protein, 388 aa, Homo sapiens
  DOMAIN (274)..(320): kw TRANSCRIPTASE REVERSE II ORF2 domain identified by eMATRIX, accession number DM01354O, p-value=1.000e-40, raw score of 8.73
MFFETNENKDTTYQNLWDAFKAVCRGKFIALNAYKRKQERSKIDTLTSQLKELEKQEQTHSKAGRSQEITKIRAELKEIETQKTLQEINESRSWFFERINKIDRLLARLIKKKREKNQIDTIKNDKGDITTDPTEIQTTIREYYKHLYANKLENLEEMDTFLKWALSTIEIQAWRSKQPPLLILRQTGSGVDLQQTPTDLQLRVLTVRRKTNKHKGHPHQNPICTSPSSKTKENLEETDKFLDTYTLPRLNQEEVESLKRPITCSEIEAIINSLPIKKSPGPDGFTAKFYQRYKEELVPFLLKLFQSTEKEAILPNSFYETSVILIPKPGRDTTKKENFRPISLKNIDSKILDKILANRIQQHIKKLSTMIKWASSLGRKPGSTYANQ

SEQ ID NO: 37875 - protein, 634 aa, Homo sapiens
  DOMAIN (221)..(269): Guanylate kinase proteins domain identified by eMATRIX, accession number BL00856C, p-value=1.675e-25, raw score of 29.21
  DOMAIN (209)..(302): Guanylate kinase domain identified by PFam, accession name Guanylate_kin, E-value=1.6e-07, PFam score of 38.0
  misc_feature (1)...(634): Xaa = X or * as defined in Table 2
RRARCSCAPSSTTTLGRTGPSLARRRACPSSAGRSWRWXARTTPRGGRPSESGTPTFEPASSPPRGSRRDFQEGQSWVRGWQLWTSTVGCSPHIFWCVDCETCDCEGYLKGHYVAGLRRSFRLGCRERLGGSQEGKMSSGAESPELLTYEEVARYQHQPGERPRLVVLIGSLGARLHELKQKVVAENPQHFGVAVPRAPWDVKLQWAEDPGSECDKEDEEEENEGARFLEHGEYKENLYGTSLEAIQAVMAKNKVCLVDVEPEALKQLRTSEFKPYIIFVKPAIQEKRKTPPMSPACEDTAAPFDEQQQEMAASAAFIDRHYGHLVDAVLVKEDLQGAYSQLKVVLEKLSKDTHWPPLVIPRQTGSGVDLQQTPTDLQLRVLTVRRKTKKQKGHPHQNPTCTSPSSKTKVGERVSVIEDQMKEMKREKKFREKRVKRNEQSLQEIWDYVKRPNLRLIGVPESDGENGTKLENTLQDIMRENFPNRARQANIQIQEIQRMPQRYSSRRATPRHIIIRFTKVEMKEKMLRAAREKGWVTHKGKPIRLTADLLAETLQARREWEPIFNILKGKNFQPRISYPAKLNFISEGEIKSFTDKQMLRDFVITRPALQELLKEALNLERNNWYQPLQKHAKL

SEQ ID NO: 37876 - protein, 170 aa, Homo sapiens
  misc_feature (1)...(170): Xaa = X or * as defined in Table 2
QHAIVTGDAVGMDDIPQEARQYRHNQAYAYSIQGDGAEDDDERIVRFHTRCLNGRVLLXDKIFQRNDQAATFAAHQYPLFCSLHCXYPGTQGLEWTSSKHQQTCSXGSXLLWPGDERLWPSWEEQKKLSLPTDPDTWLXGSPQAAQGPRCVPPPGAQPLSSVTASLCHCA

SEQ ID NO: 37877 - protein, 744 aa, Homo sapiens
  DOMAIN (553)..(598): kw TRANSCRIPTASE REVERSE II ORF2 domain identified by eMATRIX, accession number DM01354N, p-value=1.000e-40, raw score of 13.17
  DOMAIN (146)..(379): AP endonuclease family 1 domain identified by PFam, accession name AP_endonucleas1, E-value=2.8e-05, PFam score of -36.5
  misc_feature (1)...(744): Xaa = X or * as defined in Table 2
SSENILTVHEQANVESLKETKQNCKDLDEDANGITDEGKEINEKSSQLKNLSELQDTSLQHDDEEESTVISVSEDMNSEGNVDFECDTKLYTFLSSDESQQSENSENEEDTLCFVENSGQRESLSGDTGSLSCDNALFVIDTTPGMSADKNFYLEEEDKASEVAIEEEKEEEEDEKSEEDSSDHDENEDEFSDEEDFLNSTKAKLGRLTPHMAGYSSETKLPEERPGSNICCSPISAVLQPPLLIPRQTGSGVDLQQTPTDLQLRVLTVIKKTNKQKGHPHQNPICTSPSSKTKDRSTRQKVNKDIQELNSALHQADLIDIYRTLHPKSTEYTFFAAPHCTYSKIDHIVGSKALLSKCKRTEIITNCLLDHSAIKLELRIKKFTQNCSTTWKLNNLLLNDYWAHNEIKAEIKMFFETNENKDTTYQNFWDTFKAVCRGKFIALNAHKRKQERSKIDTLTSQLKELEKQEQTHSKASRRQEITKITAELKEIETQKTLQKINESRSWFFEKINKIETASKTNKKREKNPIDAIKNDKGDITTNPTEIQTTIREYYKHLYANKLENLEEMNKFLDTNTIPRLNQEEVESLNRPITGSEIEAIINSLPTKKSPGPHGFTARFYQEYKEEPGTIPSETIPINRKRGNPPXLILXGQHHPDTKAWQRHNKKREFXTNIPDDHQCKNPQXNTGKPNPAAHQEAYPPXSSGLHPWDARLVQNMQINKRNPAYKQNQRQKPHDYLNRCRKGL

SEQ ID NO: 37878 - protein, 124 aa, Homo sapiens
  DOMAIN (48)..(101): Clathrin light chain proteins domain identified by eMATRIX, accession number BL00224B, p-value=3.455e-09, raw score of 16.94
  misc_feature (1)...(124): Xaa = X or * as defined in Table 2
DHNCATVLQPGXQSEILXKEEREREREKKERKKERKKERKKERKKEGKQXRKGGRKKERKEKEIKKERRKGKKEKKEEEKRRKERKKERERKKRRKEGRKKEYTRKAKRIHRPFEGNGSPLPAP

SEQ ID NO: 37879 - protein, 277 aa, Homo sapiens
  DOMAIN (190)..(231): kw TRANSCRIPTASE REVERSE II ORF2 domain identified by eMATRIX, accession number DM01354I, p-value=3.618e-28, raw score of 15.55
MCNAQVLEYMGKSSSLLTSDLQLVRDALRSLRNSFSGHDPQHHTIDSLEQGISSLMERLHVMETQKKQERKPPLVIPRQTGSGVDLQQTPTDLQLRDLTVRRKTNEQKGIASASTKRTSTPKPHRRSPTSKTKAPHCTYSKIYHIIGSKTLFSKCKRKEITTNSLSDHGAIKLELRIKKLTQNGTTTWKLDNLLLNDCWLNNEMKAEIKMFFETNEIKDTMYKNPWDTFKAVCTGEFISLNAHKRKQERSKIDIRTSQLKELEKQEQTNSKLVEGKK

SEQ ID NO: 37880 - protein, 304 aa, Homo sapiens
MAMDKDFMTKTPKAMATKANIDKWDLIKLKSFCTAKETIIRVKRYSSETKLPEERSGSSICGSPISAVLEPLLLIPRQTGSGVDLQQTPTDLQLRVLTVRRKTNKQKGHPHQKRICTSPSSKTKEKSLKDLMELKTTARELCDECTSLSSQRDQLEERVSAMEDEMNEMKREEKVREKRIKRNEQSLQEIWDYVKRPNLRLIGVPESDGENGTKLENTLQDIIQENFPNLARLANIQIQEIQRTPQRYSSRRATPRHIILRFTKVEMKEKMLRAAREKGRVTHKGKPVRLTADLSAETLQARRQ

SEQ ID NO: 37881 - protein, 221 aa, Homo sapiens
  misc_feature (1)...(221): Xaa = X or * as defined in Table 2
MVDVFGVGSCDGLEQGIRTWVLRSVGGGLECPKVFADVEPGGCMISGFETKEDQFDSLDKHTQWGIDFLERYAKFVKERIEIEQNYAKQLRENSVAHLYLTAQREFKLSEEEVXVRTLSCRSVGVCWRSTPDPVCVGISSGGCRTADIGEQQMLLPDRSSESFVSEEYLAMVFPKTEPKQQKKEEEEKGELSPDKEVLTKEKEELKGEEKFWQSFSVQKLF

SEQ ID NO: 37882 - protein, 154 aa, Homo sapiens
  DOMAIN (109)..(142): ESICULAR LUMEN DOMAIN domain identified by eMATRIX, accession number DM01292C, p-value=4.672e-09, raw score of 12.45
  misc_feature (1)...(154): Xaa = X or * as defined in Table 2
SCWLCPGPCCPAQPQNTAPFIPEAXTPAMAERGPATAAGQLEFTGGALQTLFAWVSAAAAAEQWILVNRKCCCLIVPLEVLSQRSTWPCIGLVMPVLPGLLRDIVHSDSIASHYGVLLALYALMQFLCAPVLGALSDRFGRRPGLLASLLGATI

SEQ ID NO: 37883 - protein, 285 aa, Homo sapiens
  misc_feature (1)...(285): Xaa = X or * as defined in Table 2
IQCHPHQATKNFLHRIGKNYFKVHMEPKKGPHCQVNPKPKEQSWRYVKQSKKIAVYAERSRCSPGTEFAGTLILDFPSSRTAPSSRGRPGRLTRPGTPLRQSFQRNDQAATFAVQQYSLFCSLCCXYPGKQGLEWTSSKLQQYLQLRERSSSPATEQSWMENDFDELREGFRRSNYSKLKEEVQTHCKEAKNLEKRLDEWITRITNVEKSLNDLMELKNMAKELRDERTSFSSEFNQLEERVSVIENQMNEMKREEKFREKRVKRNEQSLQEIWDYVKRPDEIYI

SEQ ID NO: 37884 - protein, 815 aa, Homo sapiens
  DOMAIN (441)..(482): kw TRANSCRIPTASE REVERSE II ORF2 domain identified by eMATRIX, accession number DM01354I, p-value=5.929e-38, raw score of 15.55
  DOMAIN (89)..(777): Reverse transcriptase domain identified by PFam, accession name rvt, E-value=8.6e-13, PFam score of 55.9
MKVQKLLAATFSITVQPALGGRLTPHTAGYSSETKLPEERSGSSICCSPIFAVLQPQLLISRQTGSGVDLWQTPTDLQLRVLSVRRKTNKQKGHPPQKPICTSPSSKNKVAKLTAPYENSKGTPYVPSNKDLRPNRFVSIQEIEFFLLRGARIEVVADPYRSEFATDAEKAVDKIHHLFMIKTLSKMDIKGTYLKVIKIIYDKPTANIILNGEKFKAFPQRTGAKQGCPFSPFLFNTLSEVLARAIKQEKEIKGIQMGKEEVKLLLFAEDMTVYLENPKDSSKKLLELPLLLIPRQTGSGVDLQQAPTDLQLRVLTVRRKTNKQKGHPQQNPICTSPSSKTKDRSMRQKVNKDIQELNSALHQADLIDIYRTLHPKSTEYTFFSEPHHTCSKIDHIVGSKALLRKCKRTEIITNCLSDHSAIKLELRIKKRTQNRSTTWKLNNLLLNDYWVHNEMKAEIKIFFETKENKDTTYQNLWDAFKAVCRGKFIALHAHKRKQERSKIDTLTSQLKGPEKQEQTHSKTSRRQEITKIRAELKEIETPKTLQKLNESRSCFFEKINKIDRPLARLIKKKREKNQTDAIKNDKGDITTDPTETQTTIRDYHKHLYAIKLENLEEMDKFLDTYTLPRLNQESLNRPITGSEIEAIINSLPTKKKYRTRRIHSRILSEVQGGAVLEVLARAIRQEKEIKCIQLGKEEVKLSLFADDMIVYLENPTVSAQNLLKLISNFSKVSRYKINVQKSQAFLYTNNRQTESQIMSELPFTIASKRIKYLGIQLTRDVKDLFKENYKPLLNEIKEDTNGRAFHAHGLEESIS

SEQ ID NO: 37885 - protein, 1150 aa, Homo sapiens
  DOMAIN (37)..(83): kw TRANSCRIPTASE REVERSE II ORF2 domain identified by eMATRIX, accession number DM01354O, p-value=1.000e-40, raw score of 8.73
  DOMAIN (70)..(348): Reverse transcriptase domain identified by PFam, accession name rvt, E-value=1.5e-78, PFam score of 274.3
MDKFLDIYTLPRLNQEEVESVNRPITGSEIEAIINSLPTKKSPGPDRFTAELYQRYKEELVPFLLKLFQSIEKEGILPNSFYEASIILISKPGRDTTKKENFRPISLMNIDAKILNKILANQIQQHIKKLIHHHQVGFIPGMQGWFNILKSINVIHHINRTKDKNHMIISIEAEKAFDKIQQPFMLKTLNKLGIDGTYLTYLKIIRAIYDKPTANIILNGQKLEAFPFKTGTRQGCPLSPLLFNIVLEALARAIRQEKEIKGIQLGKEDVKLSLFADDMIVYLENPIVSAQNLLKLISNFSEVSGYKINVQKSQAFLYTNNRQTESQIMSELPFTIASKRIKYLGIQLTRDVKDLFKENYKPLLNEIKEDTNKWKNIPCSWIGRINIVKMAILPKVIYRFNAIPIKLPITFFTELEKTTLKFIWNQKRARIAKTILSQKNKAGGITLPDFKLYYKATVTKTAWYWYQNSDIDHWNRTEPSEIMPHIYNYLIFDKSDKSRKWGKDFLFNKWCWENWLAVCRKLKLDLFLTPCRKINSRWIKNLNVRPKTIKTLEENLGNTIQDIGMGKDFMSKTPKAMATKAKIDKWDLIKLKSFCTAKETTVRVNRQPTEWENIFAIYLSDKGLISRIYKELKQIYKKKANNPIKKWAKDMNRYFSKADIHEADEHMKKSSTSLIIREMQIKITLRYQLAPVRMAITKKSKNDMLTGTRQECPLLLLFFNIVVEVMSGAIRQEKEIKGIQIEKPPLVIPRQTGSGVDLQQTPTDLQLRVLTVRKKTNKQKGHPYQNPICTSPMGRNQSRKAENSKNESASSPPKECSSSPATEQSWMENDFDKYTEVGFRQLVITNFSELKEDVQTHHKEAKNLEKRLDEWLTRINSIENTLIDLMELKTMARELRDSCTSFSRQFDQVEERVSVIEDQMNEMKREEKFREKKMLEVLPRAIRQEKEIKGIQLGKEEVKLSLFADNMTVYLENPIISAQNLPKLISNFSKVSGYKINVQKSQAFLYTNNRQTESQIMSELSFTIASKRIKYLGIQLKRDVKELFKNYKPLLKEIKEDTNKWKNIPCSWVGRTNIVKMAILPKIIYRFNAIPIKPPMTFFTELEKTTLKFIRNQKRAHIAKTILSKKNKAGGIMLPDFKLYYKATVTKTAW

SEQ ID NO: 37886 - protein, 190 aa, Homo sapiens
  DOMAIN (58)..(87): Regulator of chromosome condensation (RCC1) proteins domain identified by eMATRIX, accession number BL00625A, p-value=3.432e- 12, raw score of 16.21
  DOMAIN (2)..(83): Regulator of chromosome condensation (RCC1) domain identified by PFam, accession name RCC1, E-value=8.1e-05, PFam score of 22.0
MSAACGQNYTLALMEMGSVFAFGENKMGQLGLGNLTDTIPSPAQIIYNGQPITKMAFGAEFSMIMDCKGNLYSFGCHEYGQLGHNSDGKFIARARRTDGYGRLGHAEQDEMVPHLVKLFDFPGHRVSQIYTGYTCSFAISEVGGLFFQGATNTSRESTTYPKAVQDLCGWIIQSLACGKSSIIVATERAP

SEQ ID NO: 37887 - protein, 468 aa, Homo sapiens
  DOMAIN (147)..(181): Regulator of chromosome condensation (RCC1) proteins domain identified by eMATRIX, accession number BL00625B, p-value=6.034e- 17, raw score of 17.69
  DOMAIN (111)..(322): Regulator of chromosome condensation (RCC1) domain identified by PFam, accession name RCC1, E-value=1.1e-18, PFam score of 70.5
MSLGLASERLWAGLGLPALPLADEGGECGETLFVWRSQKLEGSKCKGQLLIFGATNWDLIGRKEVPKQQAAYRNLGQNLWGPHRYGCLAGVRVRTVVSGSCAAHSLLITTEGKLWSWGRNEKGQLGHGDTKRVEAPRLIEGLSHEVIVSAACGRNHTLALTETGSVFAFGENKMGQLGLGNQTDAVPSPAQIMYNGQPITKMACGAEFSMIMGLQRKPLFLWGALNMGQLGTQLRMGKFHSPGAQRIEYDCELVPRRVAIFIEKTKDGQILPVPNVVVRDVACGANHTLVLDSQKRVFSWGFGGYGRLGHAEQKDEMVPRLVKLFDFPGRGASQIYAGYTCSFAVSEVGGLFFWGATNTSRESTMYPKAVQDLCGWRIRSLACGKSSIIVAADESTISWGPSPTFGELGYGDHKPKSSTAAQEVKTLDGIFSEQVAMGYSHSLVIARDESETEKEKIKKLPEYNPRTL

SEQ ID NO: 37888 - protein, 158 aa, Homo sapiens
MVAEDASVGSTECLAAHRTPLAPSIVTLIFPYNHACFGDSREVAMSPGRVFIPKEKPIETRKEEKVTLDPELEEALASASDTELYDLAAVLGVHNLLNNPKFDEETANNKGGKGPVRSKLMCNLWFCKALEPPELLDHLGFEQSNQNRAADNESSIWR

SEQ ID NO: 37889 - protein, 157 aa, Homo sapiens
  DOMAIN (110)..(145): ENV polyprotein (coat polyprotein) domain identified by PFam, accession name ENV_polyprotein, E-value=4.3e-09, PFam score of 32.7
  misc_feature (1)...(157): Xaa = X or * as defined in Table 2
PNINRFLKHYREPVPKKRERNYSTLWPLCPSTLNKIYTIMSYLSPATKEYPFFLLLLEQECXAEXLLALAVSQPLLSSTTNCLKNXMVTWNGSLIPWSPCKINLTPXPAVVLQNRRALDLLTAESGGTFLFLEEKCCCYVNQSGIITEKVKEIQGRI

SEQ ID NO: 37890 - protein, 392 aa, Homo sapiens
  DOMAIN (161)..(172): RNase H domain identified by eMATRIX, accession number PF00075B, p-value=6.276e-12, raw score of 12.56
  DOMAIN (94)..(273): Reverse transcriptase domain identified by PFam, accession name rvt, E-value=3.9e-29, PFam score of 110.2
  misc_feature (1)...(392): Xaa = X or * as defined in Table 2
MPESPTPLLGRDILAKAGAIIHLNIGEGTPVCCPLLKEGINPEVWATEGQYGRAKNAHPVQVKLKDSASFPYQRQYPLRPEAQQGLQKIVKDLKVQGLVKTCNSPCDTPILGVQKPNGQWRLVQDLRIIDEAIVPLYPAVPNPYTLLSQIPEEAELFTVLDLKDAFFCIPVHPESQFLFAFEDPSIPMSQLTWTVLPQGFRDSPHLFHHTLAQDLSQFSYLDTLVLCLPLRNQQECHQATQVLLNVLATCGYKVSKQKAQLCSQQVKYLGVKLSKGTRALQQXRTDRTXLSTSNCSNLRHSRGPSRGSLDXSQPQLVYXWKFFCRKRTSKRGVCSGQXXWNTXKKSPHSRNXCSAGGTNSPPSGTRIRRRKKGLIRIYMLPLILSAPYDHLH

SEQ ID NO: 37891 - protein, 446 aa, Homo sapiens
  DOMAIN (360)..(445): ENV polyprotein (coat polyprotein) domain identified by PFam, accession name ENV_polyprotein, E-value=7.6e-22, PFam score of 76.0
MAKIKERNPYNEENIEHNCQQVIAQTYAARGDLLEVPLTDPSLNLYTDGSSFVEKGLRKVGYAVVSDNGILESNSFTPGTSAQLAELIALSQALELGEGKGTEKAQEVIKALVHEIIPRCGLPRGLQSDNGPAFKATVTQGLSQMSDTSWEGRYPVILSTPTAVKVAGVESRIHHTRVKPWLLPKEPGNPGDNASYSCEPLEDLGLLFKQQPPHISIPVPEQWNNFSTEINTTSILVGPLVSNLEITHTSNLTRVKFSNTIDTTNSQCIRWVTPPTQIVCLPSGIFFVCGTSAYHCLNGFSESMCFLSFLVHPMTIYTEQDLYNYVVPKPRNKRVPILPFVIRAGMLGRLGTGMGSITTSTQFYYKLSQELNGDMERVADSLVTLQDQLNSLAAVVLQNRRALDLLTAERGGTCLFLGEECCYYVNQSGIITEKVKEIRDGIQRRA

SEQ ID NO: 37892 - protein, 40 aa, Homo sapiens
MKKSLALLANLTLGLGLGPGKPLLLQLSILLNGYWLSEFP

SEQ ID NO: 37893 - protein, 22 aa, Homo sapiens
  misc_feature (1)...(22): Xaa = X or * as defined in Table 2
LLRLALLLQXQKEEWVLFCCGA

SEQ ID NO: 37894 - protein, 44 aa, Homo sapiens
  misc_feature (1)...(44): Xaa = X or * as defined in Table 2
VEVVILPMPVPNLPSIPARITKGRMGTLLLRGLGTTXLYKSCSV

SEQ ID NO: 37895 - protein, 891 aa, Homo sapiens
  DOMAIN (582)..(627): kw TRANSCRIPTASE REVERSE II ORF2 domain identified by eMATRIX, accession number DM01354N, p-value=1.000e-40, raw score of 13.17
  DOMAIN (714)..(774): Immunoglobulin domain identified by PFam, accession name ig, E-value=6.6e-12, PFam score of 43.4
TKETCFIRGPKTPVPVTDWEGSLPLVFNHCRDTSVIIHPRFKGVRPRRDACLGPSPLAASPAFLGKGQAELGPNSSSASAPPPYNLFIASPPHTWSGLQFRSVTSPPPPAQQFTLKKVAGAKGIVKRLKTDTARSPWKTPRPSRTPSFRKAERTKGLLKIHLTKLSHQLKKDWTILLPLSLLRIQACPRNATRLATGQLGYPFISQSYVLVNGFQTVEDLCEAADLRVSVADLRVSVTALKVARLELFVPPGGLVVSLASAVKLQTFAVLQLIKAKRWDWGTLEQGAALIGEARDAQEPTEGVGGSGMAGCRSRDLPRGKAAKARREIERSAGLTIKKERCIRNGYSKEKMKLIVVSHGLHVNDLQHKLTLFTKETYTYLARDSEKQKQGYLAGLEGAHANRVNQQISDNLVVKTGALPPPYRTKGEKLYFYMSRQNCLFSVSGQLLQGFFPNGGQAAPNPYALLSQIPEEAEWFTVLDLKDDFFCIPVHPDSQFFFAFEDPSNPTSQLTWTVLPQGFRHLFGQALAQDLSQFSYLDTLVLCGVLKSPIIIVWELNQIDTIKNDKGDITTDPTEIQTTIREYYKHLYTNKLENLEEMDKFLNTYTLPRLNQEEVESLNRPITGAEIEAIINSLPTKKSPGPDGFTAEFYQRVADVKLREEKDENMLLVPLSDLLYQVHAPIPQLPEVLAANSPTCHLDPPTITESKSNEATTGRQASLKCEASAVPAPDFEWYRDDTRINSANGLEIKSTEGQSSLTVTNVTEEHYGNYTCVAANKLGVTNASLVLFTGCSADQANPEKNRQLVSLCQPAAAAGRDPEPEPLKSWRLFIFIDKTKEKVLIVLTFTSKHWLLAMQAPPSPYPTYLEKALTSEEARYKLSLVNNFPYTVIAAS

SEQ ID NO: 37896 - protein, 153 aa, Homo sapiens
MAVRYTDENVLRKGTREAGTMMRLRGTTECCADFAAWDVTHDALRATGGELPGAQVMLTTTECGRHVDFCDRAVWLPRMWGYPLALPGEMRKLYTVRMAGRDILAKAGAIIHLNIGEGTPVRCPLLEGINPEVWKTEGQYRQAKNARPVQVKL

SEQ ID NO: 37897 - protein, 302 aa, Homo sapiens
  DOMAIN (183)..(194): RNase H domain identified by eMATRIX, accession number PF00075B, p-value=6.276e-12, raw score of 12.56
  DOMAIN (118)..(297): Reverse transcriptase domain identified by PFam, accession name rvt, E-value=5.7e-31, PFam score of 116.3
YFSQPLSYDWGALFFSHAFLIMLESPTTLLGRDILAKAGAIIHLNIGEGTPVCCPLLEEGINPEVWATEGQYGRAKNARPVQVKLKDSASFPYQRQYPLRPEALTKGFQKIVKDLKAQGLVKPCNSPCSTPILGVQKPNGQWRLVQDLRIIDEAIVPLYPAVPNPYTLLSQIPEEAELFTVLDLKDAFFCIPVHPESQFLFAFEDPSIPMSQLTWTVLPQGFRDSPHLFHHTLAQDLSQFSYLDTLVLCLPLRNQQECHQATQVLLNVLATCGYKVSKQKAQLCSQQVKYLGVKLSKGTRAL

SEQ ID NO: 37898 - protein, 372 aa, Homo sapiens
  DOMAIN (120)..(137): RNase H domain identified by eMATRIX, accession number PF00075A, p-value=2.600e-13, raw score of 14.44
  DOMAIN (100)..(313): Reverse transcriptase domain identified by PFam, accession name rvt, E-value=5.4e-10, PFam score of 46.6
  misc_feature (1)...(372): Xaa = X or * as defined in Table 2
NPAARTPFFVIKKGGKRGRDILAKAGAIIHLNIGGTPVCCPLLEEGINLEDWATEGQYGRAKNARPVQVKLKDSASFPHQRQYPLRPEAQQGLQKIKDLKAQGLVKACNSPYNNPTLGVQKPSGQWRLVQDLRIINEVTVPLYLAVPNPYILLSQIPEEAEWFTDLDLKDAFFCIPVHPDSQFLFAFEDPSNPMSQLTWTVSPQGFRDSPHLFGQALAQDLSRFSYLGTLVLWPCISILCTXTMEQLQHRNKHHFRFSRTSCFQSGNNPYLKPHLCKIXQYCRHNQLPMHQCPHDHLHXTRFIPIMLYLSPTTKEYSFFLLLSEQECXVDXVLALAVPQPLLSSTTNYLKNSMVTWNGLPTPWSPCKINLTS

SEQ ID NO: 37899 - protein, 694 aa, Homo sapiens
  DOMAIN (128)..(145): RNase H domain identified by eMATRIX, accession number PF00075A, p-value=4.400e-13, raw score of 14.44
  DOMAIN (108)..(292): Reverse transcriptase domain identified by PFam, accession name rvt, E-value=8.2e-39, PFam score of 142.4
  misc_feature (1)...(694): Xaa = X or * as defined in Table 2
MPLLQMIATPLQQSLISTEDEMDELTEVGFERWVITNFTEEPSPALGFTPEHKGNVGHAGKGPLESSSPDPFLCGQEKQEKGAGLLHRQYPLRLEAKQGLKKIVKDLKAQGLVTPCSSPCNTPTLAVQKPNGQWRLVQDLRIINEAVVPLYPAVPNPYILLSQIPEEAEWFTVLDLKDAFFCIPVHPDSQFLFAFEDPSNPMSQLTWTVLPQGFRDSLHLFGQALAQDLSQFSYLDTLVLQYMDDLLLVTHSETLCHQATQALFNFLATCGYMVSKPKAQLCSQQRYLGLKLSKGTRALSEEHIQPILAYPHPKTLKQLRGFLGVIGFCRKWIPRYGEIARSLNTLIKETQKANTHLVRWTTEVEVAFQALTQAPVLSLPTGQDFCSYVTEKTGIALGVLTQIRGMSLQPVAHLTKEIDVVAKGXPHCLRVVVAVAVLVSEAVKIIQGRDLTVWTSHDVNGILTAKGDLWLSDNCLLKCQALLLEGPVLRLCTCATLNPATFLPDNEEKIKHNCQQVISQTYATRGDLLEVPLTDPDLNLYTDGSSFVEKGLRKVGYAVVSDNGILESNPLTPGTSAQLAELIALTWALELGEEKRANIYTDSKYAYLVLHAHAAIWKEREFLTSERTPIKHQEAIRKLLLAVQKPREVAVLHCRGHHKGKEREIQENCQAYIEAKRAARQDPPLEMLIKLPLV

SEQ ID NO: 37900 - protein, 200 aa, Homo sapiens
  misc_feature (1)...(200): Xaa = X or * as defined in Table 2
LCCNMPAAQHRERASNESRHGGCCPPPWLLSSAPPHDAFTTPQEAVLSAPSALPSSAATSLLSLLTPQQMFCSKTAGPKPFSSNPHPRLKAPTSSCPLXPQAAPSGNAHCYXGHRRGRTVPEDPGCLSPRARPHRTSGTSSPPSLQPSRTIPPASSAPKQGDAGSPPYQAVPEKNKPGATPRTCAESPKRLPRPGPKSFL

SEQ ID NO: 37901 - protein, 267 aa, Homo sapiens
  DOMAIN (34)..(69): Matrix protein (MA) p15. domain identified by eMATRIX, accession number PF01140D, p-value=8.116e-09, raw score of 15.54
  misc_feature (1)...(267): Xaa = X or * as defined in Table 2
GLLQATALQPAQQIXIFLXKKEEEEEGGGGEGEEKKKKKKTEEEEEEEEERKKEEEEGEEEGEEEEEEEEKEERTGAGDSSEDEGFDEIPSPGDSRQKTEGNAANIISGCDQRYEESEMDLGTRGIVSGHRYIFTFRVSPLEAIGELLFPFSVAPAQGGLGFRRVDQLALPMGAQSLERPFCVDGGSRPPLNYAVSSVEDLLNGNNFKCPTTLRTIEITVGNLIISPRQKQLNANIGKNFNAAENHENAKTTTRSSTVGADTHLTAG

SEQ ID NO: 37902 - protein, 62 aa, Homo sapiens
  misc_feature (1)...(62): Xaa = X or * as defined in Table 2
SSHPVFSPRWVLSPHPQSQCYTXGSGAQNLTASPPFCVCRGDRGNHLRKDTKVEVKRKTCWL

SEQ ID NO: 37903 - protein, 633 aa, Homo sapiens
  DOMAIN (320)..(375): Disintegrins proteins domain identified by eMATRIX, accession number BL00427, p-value=7.592e-26, raw score of 13.93
  DOMAIN (306)..(382): Disintegrin domain identified by PFam, accession name disintegrin, E-value=1.1e-26, PFam score of 83.5
  misc_feature (1)...(633): Xaa = X or * as defined in Table 2
HVGASDPDAGPGWGGLTSRPRLVTPRSAPRGRAFQGATVGLAPVEGMCRAESSGGVSTDHSELPIGAAATMAHEIGHSLGLSHDPDGCCVEAAAESGGCVMAAATGVRGWGVGAAAGRLVLGTSSAAFLWSSLSFLFCKMGIMIIVSASGWFMRLKGKKLRQSGFSTVXRLFSEXPGEVTPTPGGAPSGRDSTLGPGLLTIGASSSPVPLVVXLCAGYFPSLGSARLAAVAKPRGGDQRSAGVGGLSLHAQCPPRAGRHPFPRVFSACSRRQLRAFFRKGGGACLSNAPDPGLPVPPALCGNGFVEAGEECYCVSGQECRDLCCFAHNCSLRPGAQCAHGDCCVRCLLKPAGALCRQAMGDCDLPEFCTGTSSHCPPDVYLLDGSPCARGSGYCWDGACPTLEQQCQQLWGPGSHPAPEACFQVVNSAGDAHGNCGQDSEGHFLPCAGRDALCGKLQCQGGKPSLLAPHMVPVDSTVHLDGQEVTCRGALALPSAQLDLLGLGLVEPGTQCGPRMVCNSNHNCHCAPGWAPPFCDKPGFGGSMDSGPVQAENHDTFLLAMLLSVLLPLLPGAGLAWCCYRLPGAHLQRCSWGCRQGPCVQWPQRWPTQGPPPGRRSPHGVGPHSHWTALAPGP

SEQ ID NO: 37904 - protein, 92 aa, Homo sapiens
  DOMAIN (1)..(81): Hsp90 protein domain identified by PFam, accession name HSP90, E-value=1.7e-45, PFam score of 164.6
ELFSELAEDKENYKKFYEAFSKNLKLGIHEDSTTRRRLSELLRYHTSQSGDEMTSLSEYVSRMKETQKSIYYISGESKEQVPLSHLAPPAGV

SEQ ID NO: 37905 - protein, 422 aa, Homo sapiens
  DOMAIN (54)..(75): 90 KD HEAT SHOCK PROTEIN SIGNATURE domain identified by eMATRIX, accession number PR00775A, p-value=1.692e-24, raw score of 9.90
  DOMAIN (52)..(422): Hsp90 protein domain identified by PFam, accession name HSP90, E-value=1e-204, PFam score of 693.5
MKLRWKLGPDVKVEGKGECYCKQHSARTPLTREHLRIGLKKMPEEVHLGEKEVETFAFQAEIAQLMSLIINTFYSNKEIFLWELISNASDALDKIRYESLTDPSKLDSGKELKIDIIPNTQEHTLTLVDTGIGMTKADLINNLGTIAKFQDQTEYLEEMQVKEVVEKHSQFLGYPITLYLEKEREKEISDGKAEEEKGEKEEENKDDEEKPKIEDVGSDEEDDSGKDKKKKTKKIKEKYIDQEELNKTKPIWTRNTEDITQEEYGEFYKSLTNDWKDHLAVRYFSVEEYVSRMKEIQKSIYYITGESKEQVANSAFVEQVWKRDSRVVYMTEPIDGYQLKEFDGKSLVSVTKEGLELPEDGEEKKRMEERKAKFENLCKFMKETLDKKVEMVTVSNRLVSSSCCIVTSTYSWTANMEQIMKA

SEQ ID NO: 37906 - protein, 152 aa, Homo sapiens
  DOMAIN (17)..(72): Heat shock hsp90 proteins family proteins domain identified by eMATRIX, accession number BL00298G, p-value=1.000e-40, raw score of 24.57
  DOMAIN (13)..(97): Hsp90 protein domain identified by PFam, accession name HSP90, E-value=9.2e-47, PFam score of 168.8
LQQSQIFEIHSQKTIVKKCLDLFFELAEEKENYKNFFEAFSKNLKLGIHEDSTNRRRLSELLRYHTSQSGDEMTSLSEYVSRMKETQKSIYYITGSPCWCLVFFSLSCPCVEGSKLRVSSPIPSLLLTAGLDVVYCGLFYFLHFVLKLKYAK

SEQ ID NO: 37907 - protein, 287 aa, Homo sapiens
  DOMAIN (54)..(99): Heat shock hsp90 proteins family proteins domain identified by eMATRIX, accession number BL00298A, p-value=1.000e-40, raw score of 10.97
  DOMAIN (52)..(287): Hsp90 protein domain identified by PFam, accession name HSP90, E-value=2.1e-131, PFam score of 449.9
MKLRWKLGPDVKVEGKGECYCKQHSARTPLTREHLRIGLKKMPEEVHLGEKEVETFAFQAEIAQLMSLIINTFYSNKEIFLWELISNASDALDKIRYESLTDPSKLDSGKELKIDIIPNTQEHTLTLVDTGIGMTKADLINNLGTIAKFQDQTEYLEEMQVKEVVEKHSQFLGYPITLYLEKEREKEISDGKAEEEKGEKEEENKDDEEKPKIEDVGSDEEDDSGKDKKKKTKKIKEKYIDQEELNKTKPIWTRNTEDITQEEYGEFYKSLTNDWKDHLAVRYFSVE

SEQ ID NO: 37908 - protein, 145 aa, Homo sapiens
  DOMAIN (40)..(95): Heat shock hsp90 proteins family proteins domain identified by eMATRIX, accession number BL00298G, p-value=1.000e-40, raw score of 24.57
  DOMAIN (1)..(134): Hsp90 protein domain identified by PFam, accession name HSP90, E-value=1.2e-81, PFam score of 284.6
  misc_feature (1)...(145): Xaa = X or * as defined in Table 2
IPEFLNFIRGVVTLGLPLNISREMLQQSKILKVIRKNIVXECLFELLSELAEDKENYKKFYEAFSKNLKLGIHEDSTNRRRLSELLRYHTSQSGDEMTSLSEYVSRMKETQKSIYYITGESKEQVANSAFVERVPLSHLAPPAGV

SEQ ID NO: 37909 - protein, 55 aa, Homo sapiens
MMKKNPKIEDVGSDEEDDIGKDIEEENLRKIQRGITFDPGKELKPRPKPYLDQKP

SEQ ID NO: 37910 - protein, 88 aa, Homo sapiens; identical to SEQ ID NO: 34957

SEQ ID NO: 37911 - protein, 278 aa, Homo sapiens
PECVIGIDILSSWQNPHIGSLTGRVRAIMVGKAKWKPLELPLPRKIVNQKQYHILGGTVEISATIKDLKDTEAVTPTTSPFNSPIWPVQKTDGSWRMTVDYCKLNQVVTPIAAAVPDVVSLLEQINTSPGTWFEWSPKKALQQVQAAVQAALPFGPYDPADPMVLEVSVADRDAIWSLWNAAIGESQRRPLGFWSKALLSSADNYSPFERQLLASYWALVETERLTVGHQVTLRPELPIMNWVLSDPSSHKVSGAQQRSIIKLKWYIHDWVRAGPEGT

SEQ ID NO: 37912 - protein, 133 aa, Homo sapiens
  DOMAIN (106)..(133): Integrase core domain identified by PFam, accession name rve, E-value=0.0074, PFam score of 13.9
MDRIPPPPSTVSGAIRCREGQQGTEGGFQPTALEEVNPVENHMTTPVIAQWAHEQSGHDGRDGGCTWAQQHGLPLTKADLATATAECPICQQQRPTLSPRYGTIPQGDQPATWWQVDCTGPLPTWKGQKFVLT

SEQ ID NO: 37913 - protein, 88 aa, Homo sapiens; identical to SEQ ID NO: 34957

SEQ ID NO: 37914 - protein, 559 aa, Homo sapiens
  DOMAIN (526)..(553): MARCKS family proteins domain identified by eMATRIX, accession number BL00826C, p-value=3.813e-09, raw score of 7.63
  DOMAIN (147)..(337): Reverse transcriptase domain identified by PFam, accession name rvt, E-value=6.9e-07, PFam score of 28.1
KLKHASLSLKGVEERKQESSIRKSTVPDTVMPVVEPGVKTQVPAGSRCKVQSVTNEEVRYTPKEQSFLTYKAEIWRTVPECIIGIDILSSWQNPYIGSLTGRVRPIMVEKAKWKALELPLPRKIVSQKQYHNPGGIAEISATIKDLKDAGVVIPTISPFNFPIWPVQKTDGSWRMTVDYCKLNQVVTPTAAAVPDVVSLLEQINIYPCTWYTAIDSTNAFFSIPVHKAHQKQFAFSLQSQQYTFTVLPQGYIKSPALCHNFVHRDLDHFSLPQDITLVYSTDDIMRIGPSESQQRPLGFWSKALPSSADTYSPFETQLLACYWALVETEGLIMGHQVTMRPELLRRHKDVEPPNLLRGAQPQSRKAAAAATVDDNEQQQEQQGADEGEEDNVGSSVPLGLKGLIPVSCWSPHTSRAITPSSSMNNRPILAEAPWHQQLHQTPPGQKPAKAVQVAGGLQVVCIWQGFECLHLVLGTAEPSQTPRSLQSSPVSDEVKTNSRIIATANAPGQDQPFKFSHVVPAGAECGSRAAAAAERRGREEQTQEAMAAAAAAADAGAGC

SEQ ID NO: 37915 - protein, 142 aa, Homo sapiens [sequence omitted]

SEQ ID NO: 37916 - protein, 245 aa, Homo sapiens
EWDDYQVAERYSYQKQSEMPDKMAKWQLLKEFNGYINSPVLCSNVIQRELNHFSLLQDITLVHYIDDIMLIGSSEQELANTLDLLVRHLFARGWEINLTKIQGLSTSVKFLGVQCCQACQDMPSKWAHEQSSHGGRDGGYTLAQQHGLPLTKADLAMDTAERPICEQQKPTLSPQYGTIPWGLSASHLVAALSLTKALTLWLKKCGSGLVLMEFTGLTMFPIILSSWIERMMGWPFEVTITTPTR

SEQ ID NO: 37917 - protein, 287 aa, Homo sapiens
  misc_feature (1)...(287): Xaa = X or * as defined in Table 2
VIPTTSQFNFPIWPVQKTDGSWRMTVDYCKLNQEENFNNQVDRMTHSVDTTQPLSPATHVITQWAHEQSGHGGRDGGYTRVQQHGLPLTKADLATAGKVFQKAVXALNXHSIYGTLSLIARIHRSRNQGVEVEVAPLTISPSDPPAKFLLPVPPTLRSAGLEFLVPEEGMLPSGDTTVPLNWKLRLPPGHFGLLFPLHQQANKGRLSPHSRERGTSVFASSNSQPVTALNNEPAGPNKRDIGKAKGLKFHHPGPHRQERDMLESMLXPWGYPVGKQWNHLIKKQGRH

SEQ ID NO: 37918 - protein, 284 aa, Homo sapiens
VTASLSPVVATSPPQPMLPSDFPPLSEEINPMLPEATVIASPKEIARQDNVDSPQEPPPTPQFSSRPITRLKSQWAPRGPECVIGIDILSSWQNPHIGSLTGRVREGYMVGKAKWKPLELPLPRKIVNQKQYCIPGEIAEISTTIRDLKDTGVVIPTTSPFNSSIWPVQKTDGSWRMTVDYCKLDQVVTPIAAAVPDMVSLVKQINTSPGTWQHITHLDVLLWRIYQVTQKAASFEWGPEQEKALQQVQAAVQALCHLGHMTQQIQWCLRRNGEMCDYILIYGL

SEQ ID NO: 37919 - protein, 202 aa, Homo sapiens
  misc_feature (1)...(202): Xaa = X or * as defined in Table 2
MAPGMVPIPPPGKYHSPKKLIYSTPPKPGTYGISDSLSQYPTSAKAEPVPTHKNPRRESPIPHSSPSSFTDGPSPNSPGDARPHPQNKTSGRGRPAPRQRVPTTITTPAPPARSPNSAHSPAFRDLPFRAEKGTAAARVPREPHSPAPPKNKGSLQPPAGELLQRGARTTLPRILGTAPGPHLPGCSAPPGAPXRPAAPIGL

SEQ ID NO: 37920 - protein, 121 aa, Homo sapiens
  misc_feature (1)...(121): Xaa = X or * as defined in Table 2
HTRLHSHPQLRGFPSWLFHSVSIRSPASGHLEFPSFARSSGSGSTSPLSFGAMTTEKQALGGRAAFPPKYKXAQGRAACFVLTSQQQPSWQXGVTVTATGSPMHRGTFWHSCTGTPGSGDR

SEQ ID NO: 37921 - protein, 187 aa, Homo sapiens
  misc_feature (1)...(187): Xaa = X or * as defined in Table 2
VPGERPRGQSGPQVLPYGPTWCSSNTPEPQSLRAPQXLQVPVPLQSRGQRXQPQPMPVRSQPKAPXVQMPPTPSSAKGPHLDGVRVPAANPEXPTAGPTRAAILRATPAPSLPMPGTNRPSPRGNSLQDSAPASDAGWPPTEAVTCPPWSRENPPQRNLXAHRPQGPRPVPGTERRNGRGGAGCRQL

SEQ ID NO: 37922 - protein, 268 aa, Homo sapiens
  DOMAIN (169)..(178): N-6 Adenine-specific DNA methylases proteins domain identified by eMATRIX, accession number BL00092, p-value=2.000e-09, raw score of 5.35
MAVGAPVAKEKEVLAVKHQYLLMGCDRTPEKLLNGVVLPQSPGDSVWGPTPEKVTPGRLTAASRKQIDQCASGHRSPLSVMLALEHREGFTRPGTSSTVREEGTDNEERIACVSAPSVYQKLRELCRENFSIYIFEYDKRFAMYGEEFIFYDYNNPLDLPERIAAHSFDIVIADPPYLSEECLRKTSETVKYLTRGKILLCTGKKRQTLVVCVTDLKVGVDPKSAIMEEQAAELLGVKMCTFVPRHTRNLANEFRCYVNYDSGLDCGI

SEQ ID NO: 37923 - protein, 216 aa, Homo sapiens
  misc_feature (1)...(216): Xaa = X or * as defined in Table 2
TTCEMSDLEDDETPQLSAHGTLAALQEFYAEQKQQIEPGEDDKYNIGIIEENWQLSQFWYSQETALQLAQEAIAAVGEGGRIACVGSPXCLPETHESCAEKTFSIYIFEYDKRFAMEXKELIFYDYNNPLDLPERIAAHSFDIVIADPFPYLSGECLRKTSETVQVLTRGKILLCTGAHHGRTGSRTPLEXRCARLFPRHTRNFGKWSFRLVYVNL

SEQ ID NO: 37924 - protein, 202 aa, Homo sapiens
  DOMAIN (136)..(169): Ribosomal protein L23 proteins domain identified by eMATRIX, accession number BL00050A, p-value=8.784e-21, raw score of 23.71
  misc_feature (1)...(202): Xaa = X or * as defined in Table 2
MAPKAKMEAPAPPEAEAKVKALKAKKVVLKGVHSHKKKKKIRTSPTFRXPLRLRRQPKYPWESVPRRTSTQISSGERPLENKQPRYPRESSPPPGEQAPKYPPEERSPGETRLDHLCLSIKFPLTHXVLPMKKIEDNNTLVPLVNVKANKHQIKQAVKKLYDIDVAKVNTLIRPDGEKNGICSDLAPDYDALGCLPTKFGII

SEQ ID NO: 37925 - protein, 613 aa, Homo sapiens
  DOMAIN (196)..(241): kw TRANSCRIPTASE REVERSE II ORF2 domain identified by eMATRIX, accession number DM01354N, p-value=1.000e-40, raw score of 13.17
  misc_feature (1)...(613): Xaa = X or * as defined in Table 2
DKDSLCDSCKTSCSYNCSKPRSSWQDQDISSGTGLHSRLTLANTGKESKTVQASLDQQLGRLLSVSLRLGVEPSLQSSGNLLVSLLLSRFITYKVTIVEWVKTYALGLDLKKSERPGFESELHSHNSCECAVSHLKPVHLRVSPMGHSEYYLVTTADYSEANGSQSAGDEFFQTQSFPSRQQALFRPKIQITIREYYKHLYANKLENLEEMDKFLNTCTLQRLNQEEVESLNRPITGSEIEAIINSLPTKKRPGPDGFTAKFNQRYKEELVIYKKFQIPCIVPELNSTISANSTNADTCTPKYVTFNSKGTAQNADSDSAGLECEPDVLHIXXSLRLGVEPSLQSSGNLLVSLLLSRFITYKVTIVEWVKTYALGLDLKKSERPGFESELHSHNSCECAVSHLKPVHLRVSPMGHSEYYLVTTADYSEANGSQSAGDEFFQTQSFPSRQQALFRPKIQITIREYYKHLYANKLENLEEMDKFLNTCTLQRLNQEEVESLNRPITGSEIEAIINSLPTKKRPGPDGFTAKFNQRYKEELVIYKKFQIPCIVPELNSTISANSTNADTCTPKYVTFNSKGTAQNADSDSAGLEWSLMFCISDKVSGDDDADAVDS

SEQ ID NO: 37926 - protein, 189 aa, Homo sapiens
KEETFSAWYVDGRVLVVIVTFGIILPLCLLKNLGYLGYTSGFSLSCMVFFLIVVIYKKFQIPCIVPELNSTISANSTNADTCTPKYVTFNSKTVYALPTIAFAFVCHPSVLPIYSELKDPSQKKMQMVSNISFFAMFVMYFLTAIFGYLTFYDNVQSDLLHKYQSKDDILILTVRLAVIVAVILTVPVL

SEQ ID NO: 37927 - protein, 276 aa, Homo sapiens
  misc_feature (1)...(276): Xaa = X or * as defined in Table 2
MSELEDRLFENTQSEESKGKRIKKNEVCLQDLKYSLKRANLRDTGLKEEVIYKKFQIPCIVPELNSTISANSTNADTCTPKYVTFNSKKKMQMVSNISFFAMFVMYFLTAIFGYLTFYDNVQSDLLHKYQSKDDILILTVRLAVIVAVILTVPVLFFTVRSSLFELGLRKQRFNLWPSIPVVTCILLVVINLVGDLHTPPXRIFFGVVGSYILLNMLIFILPSIFFILKITDQDGDKGTQRIWAALFLGLGVLFSLVSIPLVIYDWACSSSSDEGH

SEQ ID NO: 37928 - protein, 371 aa, Homo sapiens
  DOMAIN (56)..(74): Cadherins extracellular repeat proteins domain proteins domain identified by eMATRIX, accession number BL00232C, p-value= 2.756e-12, raw score of 10.65
  misc_feature (1)...(371): Xaa = X or * as defined in Table 2
FNCEIFYSFSYGDEEISKTFALNERRGEIKIIRKLDFEKIVSYQVDIKASDGAGLSGKCTVIIQVVDINDNAPELTMASFTSPIRENSPETVAALFSIQDRDSFALRSLDYEALQEFEFRVGASDPGFPALSSEALVRVLVLDANDSSLFVLFPLQNGSAPCTELIPGRAAEPGYLVTKQLLKATEPGLFGVWAHNGEVRTARLLSERDATKHRLVVLVKDNGEPPRSATATLHVLLVDGFSQPYLPLPEAAPAQAQAEADLLTVYLVVALASVSSLFLLSVLLFVAVRLCRRSRAASVGRCSVPEGPFPGHLVDVSDTRTLSQRYKYEVFLTRGSGTNEFKFLKSVIPQASGRCEXWEEKSNFVNGFGFN

SEQ ID NO: 37929 - protein, 254 aa, Homo sapiens
  DOMAIN (37)..(50): Transferrins proteins domain identified by eMATRIX, accession number BL00205F, p-value=4.286e-09, raw score of 9.47
TRPGAHGASLTDLANLSEGVSLAERGSFGAMDDPFKNKALLFSNNTQELHPDPFQTEDPFKSDPFKGADPFKGDPFQNDPFAEQQTTSTDPFGGDPFKESDPFRGSATDDFFKKQTKNDPFTSDPFTKNPSLPSKLDPFESSDPFSSSSVSSKGSDPFGTLDPFGSGSFNSAEGFADFSQMSKGKSTPVSQLGSADFPEAPDPFQPLGADSGDPFQSKKGFGDPFSGKDPFVPSSAAKPSKASASGFADFTSVS

SEQ ID NO: 37930 - protein, 271 aa, Homo sapiens
  misc_feature (1)...(271): Xaa = X or * as defined in Table 2
MGFCHVGQASLKLLASDPFGTLDPFGSGSFNSAEGFADFSQMSKTDPQVRSELLKGTAARLVTRLDPLVSGPHTRXPELTVALVPDSCRASPDAGSVVGAHLXGLGTTGAADGGTPNSNRSFVLGVIIVVWSMCQLYLVPPPPSGPFTSSLGGAGFSDDPFKSKQDTPALPPKKPAPPRPKPPSGHRLPVPDGGGPGPPCSPDPEXQQMPWDPVWGARGSPRPSCPGPRKCRMCVVPRVIQHPSLLLPSLVGRRSQPQIWRSHPMPAAPPS

SEQ ID NO: 37931 - protein, 345 aa, Homo sapiens
  DOMAIN (7)..(37): Glutathione S-transferases domain identified by eMATRIX, accession number PF00043, p-value=3.647e-22, raw score of 21.83
  DOMAIN (3)..(307): Glutathione S-transferases domain identified by PFam, accession name GST, E-value=9.1e-38, PFam score of 127.6
  misc_feature (1)...(345): Xaa = X or * as defined in Table 2
GSLMFQQVPMVEIDGMKLVQTRAILNYIASKYNLYGKDIKERALYAMTHDDEAELRTPAAACKLXSECQFRTRVDAVRTMMIPAFTQVLKSHRQDYLVGNKLSWADIHLVELFYYVEELDSSLISSFPLLKVKLLASSVKPVPLPSALRWPAHAVAQNIVTSWLTGGRFIELKTVQILDRLELEKPCIDAEDECFNTEWSTEFTLLKAWDEYLKAWFALHLLEAMFQPSDSGKSFIFNMSVGYNLEGQPLNPKNYPSQGVPRVLKSHRQDYLVGNKLSWADIHLVELFYYVEELDSSLISSFPLLKPHTHVDNTKKGSHPHMCAYTDYVNNPNDRMPQREITFVS

SEQ ID NO: 37932 - protein, 230 aa, Homo sapiens
  DOMAIN (60)..(90): Glutathione S-transferases domain identified by eMATRIX, accession number PF00043, p-value=3.647e-22, raw score of 21.83
  DOMAIN (13)..(190): Glutathione S-transferases domain identified by PFam, accession name GST, E-value=2.3e-48, PFam score of 162.5
  misc_feature (1)...(230): Xaa = X or * as defined in Table 2
NQKTVTMAGKPKLHYFNGRGRMEPIRWLLAAAGVEFEEKFIGSAEDLGKLRNDGSLMFQQVPMVEIDGMKLVQTRAILNYIASKYNLYGKDIKERALIDMYTEGMADLNEMILLLPLCPAEEKDAKIALIKEKIKSRYFPAFEKVLQSHGQDYLVGNKLSRADISLVELLYYVEELDSSLISNFPLLKALKTQNPATLPHGXRSFLQPGSPRKPPADAKALEEARKIFRF

SEQ ID NO: 37933 - protein, 240 aa, Homo sapiens
  DOMAIN (15)..(214): Glutathione S-transferases domain identified by PFam, accession name GST, E-value=9e-27, PFam score of 91.4
  misc_feature (1)...(240): Xaa = X or * as defined in Table 2
RNLQETAIMAEKPKLHYFNARGRMEPPRWLLAAAGVEFEEKFIKSAEDLDKLRNDGYLMFQQVPMVEIDGMKLVQTKAILNLHLPANYNLLMGKDIKGREPXFDYVFXEGFSQILGLNXSSFLPVCPPEEKDAQALPLIQEKTKNRYFPAFEKVLKSHGQDYLVGPTSLSRGWTFIWWELLYYVEGAWTPRLISSFPLLKALKTRISNLPTVKKFLQPGSPRKPPMDEKSLEEARKIFRF

SEQ ID NO: 37934 - protein, 418 aa, Homo sapiens; identical to SEQ ID NO: 33996
  DOMAIN (112)..(280): Reverse transcriptase domain identified by PFam, accession name rvt, E-value=0.00062, PFam score of -13.7

SEQ ID NO: 37935 - protein, 172 aa, Homo sapiens
  misc_feature (1)...(172): Xaa = X or * as defined in Table 2
MTVDYCKLNQVVIPIAAAVSDVVSLLEQINTSPGTWYAAIDLANAFFSIPVHKAQQKQFAFSWQGQQYTFTVLPQWYINSPALCHNLIRRDLDCFSLPLDITLVHYIDDIMLIGSTIKWVVHSSDSIIKWKWYVHDWARAGPEGTTNGLAGXSGTCKKHEWKTGDKGIRGRG

SEQ ID NO: 37936 - protein, 232 aa, Homo sapiens
  DOMAIN (50)..(73): CATION-TRANSPORTING P-TYPE ATPASE A SIGNATURE domain identified by eMATRIX, accession number PR00940D, p-value=8.935e- 09, raw score of 8.92
MTGQSYLRMMCIELDMTKLLQRSQVDFMEPILTKYLQPILPSQKPTWYLAQSVSIVTGDVWPFTRVTMHWGKGNNQTFQRLLDTGCELTLILEDSKHHHGPPVKVGAYGDQVIDGLLAQVQLTVGPEGPQTHPVVISPVPECIIVIDILRSWQNPYIGSLTGRKTDGSWRMTVDYCKLNQVVTPIAVAVPDVVSLLKQINTSPGTWYAAIDLENAFFSIPVHKAHQNQCAFS

SEQ ID NO: 37937 - protein, 337 aa, Homo sapiens; identical to SEQ ID NO: 30463
  DOMAIN (160)..(331): Reverse transcriptase domain identified by PFam, accession name rvt, E-value=8.8e-05, PFam score of -1.7

SEQ ID NO: 37938 - protein, 279 aa, Homo sapiens
  DOMAIN (112)..(238): Reverse transcriptase domain identified by PFam, accession name rvt, E-value=0.0011, PFam score of -17.4
MSLWSSSKVEAYGSQVLKGVLAQVQLTVGPVGPRTHPVVIFPVPECIIGIDMLSSRQNPHTGSLTGRVWTIMVRKAKWKPLELPLPRKIVNQKQYHIPEGIVEISATIKDLKDAGVVIPTTSPFNSPIWPVQKTDGSWRMTVGYCKLNQVVTPIAAAVPDVVSLLEQINTPPGTWYAAIDLANDFFPIPVHKAHQKQFAFRWQGRQYTFTVLPQGRWEINMTKIQGPSTSVKFLGVQWCGACQDIPSKVKDKLLHLVPPTTKKEHNAYLDFGGNTFLIW

SEQ ID NO: 37939 - protein, 864 aa, Homo sapiens
  DOMAIN (470)..(536): Integrase core domain identified by PFam, accession name rve, E-value=0.00036, PFam score of 18.4
  misc_feature (1)...(864): Xaa = X or * as defined in Table 2
MVRKAKWKPLQLPLPRKIVNQKQHRIPGGTVEISAITKDLKDAGVVIPTTSPFNSPIWSVQKTDGCWRMTVDYCKLTQVMTPIAAVVPDVVSLLKQINTYPGTCKFLGVQWCGACRDIPSKVKDKLLHLAPPTTKKEAQHLVGLFGFWREHIPHLGVLLQPMYQVTRKAASFEWGLEQEKALQQVQAAVQAALPFGPYDSADPTVLEMSVADRVAVWSLWQAPIGESQWRPLGLWSKALPFSADNYSPFERRLLACYWALMETEGLTMGHQVTMQPELPIMNWVLSDPSRHKVGHAQQHSIIKLKWYICDQARAVPEGTCXLNKEVAQMPMGTTRKWTAAALQSLSGISLKDSGEGKSSQWTELQAVHLVVHFAWKEKWPGTWKKHDWKTGDNEIWGRGIWMDCSEWSKTVKIFVSHAHEPSGHGGRDGGYAWAQEHELSFTKADLATGIVECPICQQQRPTLSPRYGTIPQGQTFILTGINTYSIYGFAYPAHNASAKITIRGLTECLIHHHGIPHSIVSDXGTHFTAKDVETRIHRPRNQGVEVEVAPLTITRSDTLAKFLLPVPTTFRSANLEVLLLEGGTLPPGDPTTIPLNWKLRLPRGHFGLPLPLSQQAKKGVSVLAGVTDLDYQDEFSLLLHNRVTAAFPSLLHSSFAYLDNMIEKANKCHVEGVDHVSDPAQRRECDRHTGSSCHLLRGPPQLQSQLVSGPRSPKSDSGESCLAWDPTFKAEVSPLAQGSPRNSVQEPSPRTGSPKSLLGALIALWPSWYLSSDPDPQGSNSRNLEISACQKYLSPAFGNSDYSTAEDFNSDYTLKSPENSIGYARLEKHRRLYGGDGGDGGGDDVRGGKRGDDSASRKGVTERV

SEQ ID NO: 37940 - protein, 72 aa, Homo sapiens
VLSGLLSAPVGFLVNKDLKNCLWTEAPYQCMRHTPTLPSFPGTLLAARLMGGLVCVDMCSLSLCCGSSWGGS

SEQ ID NO: 37941 - protein, 75 aa, Homo sapiens
  DOMAIN (6)..(17): Nuclesosome assembly protein (NAP) domain identified by eMATRIX, accession number PF00956D, p-value=9.151e-09, raw score of 7.51
NPENNRSFFGWFSNHSSIESDKIVEIINEELWPNPLQFYLLSEGARVEKGKEKEGRQGPGKQPMETTQPGVSKSN

SEQ ID NO: 37942 - protein, 94 aa, Homo sapiens
  misc_feature (1)...(94): Xaa = X or * as defined in Table 2
ETGMLPLRLLKPFLSDFAGPLHTSIMPTRRFCSKSPTXHTLATALSQGLSXGTXNEASLTKEKVGKNRCRYSPSYPPSGIREGKAQLCFYTHWK

SEQ ID NO: 37943 - protein, 601 aa, Homo sapiens
  DOMAIN (295)..(313): Nuclesosome assembly protein (NAP) domain identified by eMATRIX, accession number PF00956C, p-value=5.500e-17, raw score of 7.72
  DOMAIN (256)..(391): Nucleosome assembly protein (NAP) domain identified by PFam, accession name NAP_family, E-value=3.1e-16, PFam score of 61.5
  misc_feature (1)...(601): Xaa = X or * as defined in Table 2
MSGRSRGRKSSRAKNRGKGRAKARVRPAPDDAPRDPDPSQYQSLGEDTQAAQVQAGAGWGGLEAAASAQLLRLGEEAACRLPLDCGLALRARAAGDHGQAAARPGPGKAASLSERLAADSVFVGTAGTVGRPKNAPRVGNRRGPAGKKAPETCSTAGRGPQVIAGGRQKKGAAGENTSVSAGEEKKEERDAGSGPPATEGSMDTLENVQLKLENMNAQADRAYLRLSRKFGQLRLQHLERRNHLIQNIPGFSGQAFXNHVLLASFLNSQEKEVLSYLNSLEVEELGLARLGYKIKFYFDRNPYFQNKVLIKEYGCGPSGQVVSRSTPIQWLPGHDLQSLSQGNPENNRSFFGWFSNHSSIESDKIVEIINEELWPNPLQFYLLSEGARVEKGKEKEGRQGPGKQPMETTQPGPLSFVWVAVSPSWLPGQQGPQELPVDRGPLPVHETHTYPPQLSRNPTGCQTDGRAGLPVTPCDKKALPCAQCFVSHLLYCMGLQPRQKEKINPEVSSITNVAPKDMEKVHAGALDKPMCGRQGKESQGATHHATPSAISPAPSHPLGSSETLDIDGLAHFLEHSQINPSLLSRVLIQRQHLRHVAVTNG

SEQ ID NO: 37944 - protein, 46 aa, Homo sapiens
MHRHAHACASSLCSKGTHLREQAGPGIGEASREIPEAHQLPKPTRN

SEQ ID NO: 37945 - protein, 538 aa, Homo sapiens
  misc_feature (1)...(538): Xaa = X or * as defined in Table 2
VQASQAEADQQQTCLKQLQSQLSRLXKQAIELREAVEQHKVKNNDLREKNWKAMEALATAEQACKEKLHSWTQAKEESERNQLCLIEAQTMEALLALLPELSVLAQQNYTEWLQDLKEKGPTLLKHPPAPAEPSFGTWAFQVXGEAEETQSTICRAEFDQYRSILGGDGRALLRDLQKSVEEEEQVWRAKVGAAEEELQKSRVTVKHLEEIVEKLKGELESSDQVREHTLHLEAELEKHMAAASAECQNYALEVAGLRQLLLESQSQLRLPPKNRNPQKTEPMSFALGQASSXVKLKSHVEDGDIAGAPASSPEAAPQPSRDPRSAXRTQLELDQKPIPWRMRQTTSRQKLHGPSFEEASDLRACSVYKEGFWEKLPHSAAPPRSFFRNRREAFTAXRRDLEKRGRSLTSDLGRARPRRLQELSERRTQEQLGKGRRTRVKKLQEQLEKAEDGSSSKEGTSVLSFLFGKKKLLFQLYQNALTHSFTIKPTNLHSVYPGPNFPVLREKAHEETSLFRRPQEVRTFPGGPILLNGTCVNI

SEQ ID NO: 37946 - protein, 81 aa, Homo sapiens
  DOMAIN (49)..(61): UBIQUITIN C-TERMINAL HYDROLASE (C12) FAMILY SIGNATURE domain identified by eMATRIX, accession number PR00707D, p-value=8.667e- 13, raw score of 9.57
  DOMAIN (1)..(78): Ubiquitin carboxyl-terminal hydrolase, famil domain identified by PFam, accession name UCH, E-value=2.4e-05, PFam score of -52.9
FEDGSVLKQFLSETEKMSPEDRAKCFEKNEAIQAAHDAVAQEGQCRVDDKVNFHFILFNNVDGHLYENIYPPMQSKMLQYL

SEQ ID NO: 37947 - protein, 127 aa, Homo sapiens
  DOMAIN (8)..(33): Ubiquitin carboxyl-terminal hydrolase family 1 cysteine activ domain identified by eMATRIX, accession number BL00140C, p-value= 7.052e-17, raw score of 11.80
  DOMAIN (1)..(127): Ubiquitin carboxyl-terminal hydrolase, famil domain identified by PFam, accession name UCH, E-value=0.0014, PFam score of -78.0
  misc_feature (1)...(127): Xaa = X or * as defined in Table 2
GQEFSPKVYFVNQTMGNSCGPIGLFNAVANNQDKLGFEYGPLLNQFLFXNRXKCPPKDRAKCFERNEAIRAAHDAVDKEGQCRVDDQGEFPFLFCLQNVDGPPSMNLDGRMPFPRGPMAPSFRRTPC

SEQ ID NO: 37948 - protein, 544 aa, Homo sapiens
  DOMAIN (191)..(236): kw TRANSCRIPTASE REVERSE II ORF2 domain identified by eMATRIX, accession number DM01354N, p-value=1.000e-40, raw score of 13.17
  DOMAIN (275)..(544): Reverse transcriptase domain identified by PFam, accession name rvt, E-value=6.1e-75, PFam score of 262.4
RGLGGGLAEQELQPWSPERSPVHNNRMQEKSLKDLMELKTMAQELRDECTSLSSRFDQLEEKVSVMEDEINEMKQEEKVREKRIKRNEQSLQEIWDYVKRPNLHLIGVPESDRENGTKLENTLQDIIQENFPNLARQANIQIQEIQRMPQRYSSRRATPRHIIVRFTKVEMKEKMLRAAREKEIQTTIREYYKHLYTNKLENLEEMDKFLDTYSLPRLNQEEVESLKRPITGSEIGAIINSLPTKKSPGPDGFTAEFYQRYKKELVPFLLKLFQSTEKERILPNSFYEASIILIPKPGRDTTKKENFRPISLMNINAKILNKILANQIQQHIEKLIHHDQVGFIPGMQGWFNIRKSINVIQHINRTNEKNHMIISIDAEKAFDKIQQPFMLKTLNKLGIDGTYLKIVRAIYDKLTANIILNGQKLEAFPLKTGTRQGCPLSPLLFNIVLEVLARAIRQEKEIKGIQLGKEQVKLSLFADDMIVYLENPIVSAQNLLKLISNFSKVSGYKINVQKSQAFLYTNNRQTESQIMSELPFTIASKRIK

SEQ ID NO: 37949 - protein, 197 aa, Homo sapiens
MAGAPPPASLLPCSLISDCCASNQRDSVGVGPSEPGAGHNLVVHRFFKPVRKAQYSGGSDPIFQGNTSLCYQTKTAFLQFPFPYKAKALFSGYVFSIATASDSGIANCTRCRQPHPAQKPSNSQRYTGIQHVHRIGMAERMWCDRNRERHTVSSSGGNRLPNPGPDRSVRHFPDPRFLCPSCATVTPLHELIANKYL

SEQ ID NO: 37950 - protein, 103 aa, Homo sapiens
  misc_feature (1)...(103): Xaa = X or * as defined in Table 2
TLACLARLGKFSWIISCRVFSNLVPFSPSLSGTPIRRRFGLENRVTATRILRFSDRLKKRRTTRLYPTPGSEGPTPTESRXLLAQQSEIKLQGGSEAGGGAPA

SEQ ID NO: 37951 - protein, 359 aa, Homo sapiens
MAGAPPPASLPPCSLISDCCASNQRDSVGVGPSEPGVGYSLVVRRFLSRSEKRNIRVGVTRFSREEGFRRSNYCELREDIQTKGKEVENFEKNLEECITRITNTEKCLKELMELKTKARELREECRSLRSRCDQLEERVSALEDEMNEMKREGKFREKRIKRNEQSLQEIWDYVKRPNLRLIGVPESDVENGTKLENTLQDIIQENFPNLARQANVQIQEIQRTPQRYSSRRATPRHIIVRFTKVEMKEKMLRAAREKARVTLKGKPIRLTADLSAEILQARREWGPIFNILKEKNFQPRISYPAKLSFISEGEIKYFIDKQMLRDFVTTRPALKELLKEALNMERNNWYQPLQNHAKM

SEQ ID NO: 37952 - protein, 116 aa, Homo sapiens
MAGPPPTASLPPCSLISDCCASNQRDSVGVRTLRARDFADFGTTIKQDFRLLGQTSVDRLLQLSQGQAVKGNQLLPVSLVKRKTTLAPNTQTASPRALADSLMQLARQVSRLESGQ

SEQ ID NO: 37953 - protein, 277 aa, Homo sapiens
MAGAPAPASLPPCSLISDCCASNQRDSMGVGPSEPGAGYNLVPVGKAQYSGGSDRIFQVLSVTPFFDSERELPDPLGFSSEAMPRPASARARSGVPKPQTMNQYQSWPEPGLTAGVSGLTFKSLIHLQLIVAYDVFRVSSFWWVRGLAGSGVKLQTFAVSVTALKAARLELFVPPDGLVVLLGSGVKLQIFAVSVTAHKSSVDPETLEWSMGLGTVEQGAALVGDARAAQEPTEWVGGAGMAGCRSRALPCGKAAKVRCQYQKTRDNSYTPEPTEII

SEQ ID NO: 37954 - protein, 60 aa, Homo sapiens
  misc_feature (1)...(60): Xaa = X or * as defined in Table 2
LIAYQPKXAQDYMDSQLNSTRGTKKSCXGRLXGSGVIHIGSMPVPTRTAGPLPFFAGPCR

SEQ ID NO: 37955 - protein, 54 aa, Homo sapiens
  misc_feature (1)...(54): Xaa = X or * as defined in Table 2
ILRFSDRLKKRRTTRLYPTPGSQGPTPRESRXLLAQQSEIKLQGGNEAGGGAPA

SEQ ID NO: 37956 - protein, 208 aa, Homo sapiens
MAGAPPPASLPPCSLISDCCASNQRDSVGVGPSEPGAGYNLVVRRFLSPSEKRSIRVGVTRFSRWLPSPLSLAQKGNSLNPCTSQVLTPAPEKQPDNKLPLPRRGSRDPTEYFHGQEVRDKSDEHVDHVSQIHSFRDEVKRLGAEDSSNAETPTELHEFNTGGVYRPPNSTSVIQPLDQGVIRTFKPCYTKYSLEKIVSAVEENPDRT

SEQ ID NO: 37957 - protein, 85 aa, Homo sapiens
  misc_feature (1)...(85): Xaa = X or * as defined in Table 2
DGQQLIALHRLALRELQQAVHAGLPQQAKILFDGGSEIGKIHXLRCAHCPLSSRETCRASCINESATRGERPFAYWAPGWFFFHQ

SEQ ID NO: 37958 - protein, 159 aa, Homo sapiens
TSFPYFPVSLYGKQKMAIVILLSLHLLCEEETKPESLGPPLSSRRSSEWPRSDQTPIPDCCASNQRDSVGVGPSEPGVGYSLVVRRFLSPSEKRNIRVGVTRFSRDIDGAGSHYRHQQTNAGTENQTPHVFTYNWELNDQSTCTHGGEKHTLEPVSGGK

SEQ ID NO: 37959 - protein, 87 aa, Homo sapiens
TDGLMSHQALQNFQRYTGIQHVHRIGMAERMWCDRNRERHTVSSSGGNRLPNPGPDRSVRHFPDPRFLCPSCATVTPLHELIANKYL

SEQ ID NO: 37960 - protein, 396 aa, Homo sapiens
IFGITRFLPFIYQKIHIFSKEQLPDLHSHFSDLNLEAHMYASQWFLTLFTAKFPLCMVFHIIDLLLCEGLNIIFHVALALLKTSKEDLLQADFEGALKFFRVQLPKRYRAEENARRLMEQACNIKVPTKKLKKYEKEYQTMRESQLQQEDPMDRYKRENRRLQEASMRLEQENDDLAHELVTSKIALRNDLDQAEDKADVLNKELLLTKQRLVETEEEKRKQEEETAQLKEVFRKQLEKAEYEIKKTTAIIAEYKQICSQLSTRLEKQQAASKEELEVVKGKMMACKHCSDIFSKEGALKLAATGREDQGIETDDEKDSLKKQLREMELELAQTKLQLVEAKCKIQELEHQRGALMNEIQAAKNSWFSKTLNSIKTATGTQPLQPAPVTQPPKEST

SEQ ID NO: 37961 - protein, 561 aa, Homo sapiens
  misc_feature (1)...(561): Xaa = X or * as defined in Table 2
IFGITRFLPFIYQKIHIFSKEQLPDLHSHFSDLNLEAHMYASQWFLTLFTAKFPLCMVFHIIDLLLCEGLNIIFHVALALLKTSKEDLLQADFEGALKFFRVQLPKRYRAEENARRLMEQACNIKVGVYTGTELQXDFSLDSLVWSWDSSCCCGKASWQDDGRNLHYGSLXRPCFQPAARXRLPHXSGGHQQAQVYGTNKKLKKYEKEYQTMRESQLQQEDPMDRYKFVYLXVTPAVAFILGIFIRSXEKERGKRKWLSTFKNETKRKNGKVLFXLCMSYPQRLLAGELFQDXHKDVSNLPLSVENVKNTNSLGRKNKNHKRENRRLQEASMRLEQENDDLAHELVTSKIALRNDLDQAEDKADVLNKELLLTKQRLVETEEEKRKQEEETAQLKEVFRKQLEKAEYEIKKTTAIIAEYKQICSQLSTRLEKQQAASKEELEVVKGKMMACKHCSDIFSKEGALKLAATGREDQGIETDDEKDSLKKQLREMELELAQTKLQLVEAKCKIQELEHQRGALMNEIQAAKNSWFSKTLNSIKTATGTQPLQPAPVTQPPKEST

SEQ ID NO: 37962 - protein, 205 aa, Homo sapiens
MKTINIQKKAKTQSKEAKEYNKKIRDIIDEMAILRKNQTDLIELKNPLQEFHNTITSVSSRIDQTEERISELEDCLISDCCASNQRDSVGVGPSEPGVGYSLVVRRFLSRSEKRNIQVGVTRFSRDFADFGTTIKQDFRLLGQTSVDRLLQLSQGQAVKGNQLLPVSLVKRKTTLAPNTQTASPRALADSLMQLARQVSRLESGQ

SEQ ID NO: 37963 - protein, 791 aa, Homo sapiens
  DOMAIN (384)..(405): CALRETICULIN SIGNATURE domain identified by eMATRIX, accession number PR00626F, p-value=8.200e-20, raw score of 15.79
  DOMAIN (148)..(403): Calreticulin family domain identified by PFam, accession name calreticulin, E-value=2.5e-136, PFam score of 443.6
  misc_feature (1)...(791): Xaa = X or * as defined in Table 2
MAGAPPPASLPPCSLISDCCAINQRDSVGVRPSKPGAGYNLVVRRFLSLLEKRSIPVGVTRFSRCRPSPLSLTRKGNSLTPCASRIINMHFQAFWLCLGLLFISINAEFMDDDVETEDFEENSEEIDVNESELSSEIKYKTPQPIGEVYFAETFDSGRLAGWVLSKAKKDDMDEEISIYDGRWEIEELKENQVPGDRGLVLKSRAKHHAISAVLAKPFIFADKPLIVQYEVNFQDGIDCGGAYIKLLADTDDLILENFYDKTSYIIMFGPDKCGEDYKLHFIFRHKHPKTGVFEEKHAKPPDVDLKKFFTDRKTHLYTLVMNPDDTFEVLVDQTVVNKGSLLEDVVPPIKPPKEIEDPNDKKPEEWDERAKIPDPSAVKPEDCALGLELWSMTSDIYFDNFIICSEKEVADHWAADGWRWKIMIANANKKKHKDTEYKKTDICIPQTKGVLEQEEKEEKAALEKPMDLEEEKKQNDGEMLEKEEESEPEEKSEEEIEIIEGQEESNQSNKSGSEDEALAEQPREGPGVPGPIPPKRPSRSPIPEPRAAKRLPTQELRGESYTMSASGTARGPSPKERLGLTTKTGEKEVAQGFCREPGLRRPPNAQARDRSSRAPATHRKELKPEREHISCSRSHIRYQEWSVLRDTVHRNLVLDTKRHPALILVEYKERTSSPATEQSCMENDFDELREEGFRRSVITNFSELKEDVQTHHKEAKNLEKRLDKWLTRINSVEKSLNDWMELKTKARELREECRSLRSRCDQRGRKGISSGRXNEXNEARREVXRKKNKKK

SEQ ID NO: 37964 - protein, 624 aa, Homo sapiens
PQHWGAFHFPTVNKGKEFSCGRFLALVGQRPLFFTYQECQSSAPGGAQLRGFFTIADGESEASFDVHLLPDEVPEIEEDYVIQLVSVEGGAELDLEKSITWFSVYANDDPHGVFALYSDRQSILIGQNLIRSIQINITRLAGTFGDVAVGLRISSDHKEQPIVTENAERQLVVKDGATYKVDVVPIKNQADRQLIQESSGWHLAGAPLGRSFQRKEQAAIFAVLQPLLVISRQTGSGVDLQQTPADLQQRDLTVRRKTNRKEQHIHTENASVHHHHQRPKVDKTTKMGKKQNRKTGNSKTQSTSPPPKERSSSPATDQSWMENDFDELREEGFRRSNYSELREDIQTKGKEVENFEKNLEECITRITNTEKCLKELMELKTKARELREECRSLRSQCDQLEERVSAMEDEMNEMKQEGKFREKRIKRNEQSLQEIWDYVKRPNLRLIGVPESDAENGTKLENTLQDIIQETFPNLARQANVQIQEIQRTPQRYSSRRATPRHIIVRFTKVEMKEKMLRAAREKGRVTLKGKPIRLTADLSAETLQARREWGPILNILKEKNFQPRISYPAKLSFISEGEIKYFTDKQMLTDFVTSRPALKELLKEALNMERNNRYQPLQNHAKM

SEQ ID NO: 37965 - protein, 557 aa, Homo sapiens
  DOMAIN (434)..(448): ANNEXIN TYPE III SIGNATURE domain identified by eMATRIX, accession number PR00199H, p-value=9.735e-09, raw score of 12.62
  DOMAIN (373)..(557): TBC domain identified by PFam, accession name TBC, E-value= 2.6e-09, PFam score of 27.4
MAGAPPPALLPPCSLISDCCASNQRDSVGVGPSKPGVGYSLVVRPFLSRSEKRNIRVGVTRFSRIIDQSSNVEIASFPIYKVLFCARGHDGTTESNCFAFTESSHGSEEFQIHVFSCEIKEAVSRILYSFCTAFKRSSRQVSDVKDSVIPTPDSDVFTFSVSLEVKEDDGKGNFSPVPKDRDKFYFKLKQGIEKKVVITVQQLSNKELAIERCFGMLLSPGRNVKNSDMHLLDMESMGKSYDGRAYVITGMWNPNAPVFLALNEETPKDKQVYMTVAVDMVVTEVVEPVRFLLETVVRVYPANERFWYFSRKTFTETFFMRLKQSEGKGHTNAGDAIYEVVSLQRESDKEEPVTPTSGGGPMSPQDDEAEEESDNELSSGTALRAEVWQLLAGCHDNQAMLDRYRILITKDSAQERAITRDIHRTFPAHDYFKDTGGDGQESLYKICKAYSVYDEDIGYCQGQSFLAAGLLLHMPEEQAFCVLVKIMYDYGLRDLYRNNFEDLHCKFYQLERLMQEQLPDLHSHFSDLNLEAHMYASQWFSHSFYCQVPTLHGVPHH

SEQ ID NO: 37966 - protein, 141 aa, Homo sapiens
MSYVSRYGCGGRKNVATVSKGWAGSLAWPGGFPRKVKGGGSWRPSGGVDVAAPVRARLALLLSGPIASESPLTTNPHSHSARRPRTYIGHAPALRVTNPESFSYWGTRGPSATMACDGLTRTGHSSPSRARSPPLLCARSL

SEQ ID NO: 37967 - protein, 199 aa, Homo sapiens
  misc_feature (1)...(199): Xaa = X or * as defined in Table 2
RPLPSRPHAAPPGHHTISSGPCGHRKFSPKAGDSNTPRTRSRPRVSCALPPDVRGSWLSXKWNQIWYHTLPQPQENTPKSQENKPKSKPQPTQRXTRGPWPSSRCRVRSGTHRRPGLFLSXKQPSESIGHSRALSAFTPAEMISTLPPPPTSKSPLAARAAPPGNGXSPKAGDSNTPRTRSRPRVSCALPPDVRGSWLS

SEQ ID NO: 37968 - protein, 477 aa, Homo sapiens
  misc_feature (1)...(477): Xaa = X or * as defined in Table 2
MQDTCSEIISPADFPTFSSSLKIRFSTDSPSQIFKKHCIQKIVLILLPKNSYTRRLLVSNQMYLESFEHQCRKTHILCKRTAGSGPFCSCPTGQPRHNSSASKCPASERGLCLKPKSKREKREPGPVAPAPLHAAPSSPGLGAPQLRXPGRTRSFGRDHVGSPGPPRAGPRLFAPRPVLSRCSANPSGSPHTQSPKQSSTGQISGRADQVCGCWIRKRGVPGAARGSPGCARTCHSRGHPHAAPFPQCNSLAPSAPAGLWRTQNAGPSGHAQPSCPPPVPLXPPHPHPXGLSFSSCSRSWVPNTPPEPREGEGQVPGRRAASAPGASFSAPGTPRAPQPLPHPFPVAQSPPAAVAASSESCKREAARRSPGASALHLPPKSARPRQAPCPTLTDGGHIFPASAARPXHKGHQTAEGKNPGRADTSTSPFATFPFISGGEEKSRSPVLPERTRQREEAPGPPSSPLRGLWLTFWFVFL

SEQ ID NO: 37969 - protein, 203 aa, Homo sapiens
  DOMAIN (33)..(76): p53 tumor antigen proteins domain identified by eMATRIX, accession number BL00348F, p-value=8.780e-10, raw score of 23.19
MEDSMDMDMSPLRPQNYLFGCELKADKDDHFKVDNDENERQLSLRTASLGLRSAPGGGSKVPQKKVKLAADEDDDDDDEEDDDEDDDDDDFDDEEAEEKAPVKKSIRDTPAKNAQKSNQNGKDSKPSTPRSKGQESFKKQEKTPKTPKGPSSVEDIKAKMQASIEKGGSLPKVEAKFINYVKNCFRMTNQEAIQDLWQWRKSL

SEQ ID NO: 37970 - protein, 215 aa, Homo sapiens
  DOMAIN (114)..(148): Amyloidogenic glycoprotein extracellular domain proteins domain identified by eMATRIX, accession number BL00319C, p-value= 2.881e-11, raw score of 17.12
  misc_feature (1)...(215): Xaa = X or * as defined in Table 2
AKDELHIVEQGHDIRGRSIKITLATLKMSVQPTFSLGGFEIQPTVVXGLKCVSGPCHISGQHLVAVEEDAESEDEEEENVKLLSISERRSAPGVVSMVPQKKVKLAADEDDDDDDEEDDDEDDDDDDFDDEEAEEKAPVKKSIRDTPAKNAQKSNQNGKDSNPYSHPRSQGQDPFRKQEKTPKTPKGPSSVEDIKAKMQASIGKKRIEPVLGTYM

SEQ ID NO: 37971 - protein, 330 aa, Homo sapiens
  DOMAIN (197)..(231): Amyloidogenic glycoprotein extracellular domain proteins domain identified by eMATRIX, accession number BL00319C, p-value= 1.940e-11, raw score of 17.12
PWCDSVLRGCSLEQRSFISVRLLSYLSACRHPMEDSMDMDMSPLRPQNYLFGCELKADKDYHFKVDNDENEHQLSLRTVSLGAGAKDELHIVEAEAMNYEGSPIKVTLATLKMSVQPTVSLGGFEITPPVVLRLKCGSGPVHISGQHLVAVEEDAESEDEEEEDVKLLSISGKRSAPGGGSKVPQKKSKTCMLMKDDDDDDEEDDDEDDDDDDFDDEEAEEKAPSERNLYRDTPSAKNAQKSNQNGKDSKPSSTPRSKGTRIPSKKQEKTPKTPKGPSSVEDIKAKMQASIEKGGSLPKVETKFINYVKNCSRMTDQEAIQDLWQWRKSL

SEQ ID NO: 37972 - protein, 87 aa, Homo sapiens
  misc_feature (1)...(87): Xaa = X or * as defined in Table 2
GRVCKALWHSDWHTARVLCINSTTTITASCNPRHTARRSLTTPTXMCRLENWTKNLLFNGPVPVLVMSLLFIASVFMLHIWGKYTRS

SEQ ID NO: 37973 - protein, 103 aa, Homo sapiens
MPAVGPRSAGRTNRRQAPGRDVAILHTKYITWASKVGPCVQYLVMKSSVHRFLYLCCYIWGKVHSVRRIQLHPSCHLEEGGKNPNISWTKSIVTICFMREIFL

SEQ ID NO: 37974 - protein, 96 aa, Homo sapiens
  misc_feature (1)...(96): Xaa = X or * as defined in Table 2
ATPSPPSPPGVPTXRPELLGPRRERLLGPEGSPGGGALPGVPPSRFVRTASSTLFLPPSPRPAFPPSSIPLVPSPPRHCARSRETWPRTLRIGSAP

SEQ ID NO: 37975 - protein, 143 aa, Homo sapiens
  DOMAIN (9)..(59): ENV polyprotein (coat polyprotein) domain identified by eMATRIX, accession number PF00429, p-value=6.691e-16, raw score of 31.08
  DOMAIN (8)..(113): ENV polyprotein (coat polyprotein) domain identified by PFam, accession name ENV_polyprotein, E-value=4.6e-17, PFam score of 59.8
  misc_feature (1)...(143): Xaa = X or * as defined in Table 2
LALQFSFLQNRQGLNLLIAEKGRLCIFLNEECCFYLNQSGLVYDNIKKLKDRVQKLANQANNYAEPPWALSNWMSWVLPILSPLIPVFLLLLFGPCVFCLVSQFIQNRIQAIANNSIXQMLLLTTPQYQPLPQNLSSVESLPL

SEQ ID NO: 37976 - protein, 511 aa, Homo sapiens
  DOMAIN (374)..(396): Domain in SPla and the RYanodine Receptor domain identified by eMATRIX, accession number PF00622B, p-value=6.885e-15, raw score of 21.00
  DOMAIN (390)..(510): SPRY domain identified by PFam, accession name SPRY, E-value= 1.9e-23, PFam score of 91.3
MASFLAFLLLNFRVCLLLLQLLMPHSAQFSVLGPSGPILAMVGEDADLPCHLFPTMSAETMELKWVSSSLRQVVNVYADGKEVEDRQSAPYRGRTSILRDGITAGKAALRIHNVTASDSGKYLCYFQDGDFYEKALVELKVAALGSDLHVDVKGYKDGGIHLECRSTGWYPQPQIQWSNNKGENIPTVEAPVVADGVGLYAVAASVIMRGSSGEGVSCTIRSSLLGLEKTASISIADPFFRSAQRWIAALARTLPVLLLLLGGAGYFLWQQQEEKKTQFRKKKREQELREMAWSTMKQEQSTRVKLLEELRWRSIQYASRGERHSAYNEWKKALFKPADVILDPKTANPILLVSEDQRSVQRAKEPQDLPDNPERFNWHYCVLGCESFISGRHYWEVEVGDRKEWHIGVCSKNVQRKGWVKMTPENGFWTMGLTDGNKYRTLTEPRTNLKLPKPPKKVGVFLDYETGDISFYNAVDGSHIHTFLDVSFSEALYPVFRILTLEPTALSICPA

SEQ ID NO: 37977 - protein, 75 aa, Homo sapiens
MDLGTPTYDENPMKASKKPKTAEADTSSELAKKSKEVFRKEMSQFIVQCLNPYRKPDCKVGRITTTEDFKHLARK

SEQ ID NO: 37978 - protein, 211 aa, Homo sapiens
  DOMAIN (99)..(113): Protein phosphatase 2C proteins domain identified by eMATRIX, accession number BL01032G, p-value=2.565e-09, raw score of 8.33
  DOMAIN (98)..(164): Protein phosphatase 2C domain identified by PFam, accession name PP2C, E-value=1.1e-07, PFam score of 30.5
  misc_feature (1)...(211): Xaa = X or * as defined in Table 2
ELWTRGPRKRQNGSSKPLWLLYGESGAQKSVVEVTKPRLLWPQWIQHRARRPCLQQAPCSSRPHAPASLPPSSSPTARDTKHRAQVKTTDSGARRRDGRVLGVLEVSRSIADGQYKRCGVTSVPDIRRCQLTPQXPGSILLACDGLFKVFTPEEAVNFILSCLEDEKIQTREGKSAADVRYEAACNMLANKAVAAGARPDNVTVMVVRIGH

SEQ ID NO: 37979 - protein, 433 aa, Homo sapiens
  DOMAIN (343)..(365): RECOVERIN FAMILY SIGNATURE domain identified by eMATRIX, accession number PR00450C, p-value=6.280e-10, raw score of 12.22
MVYMRKGQELYVAGAQNSIHGMLWKVGQTNQCQPPKGYRARITVATALIGQETDFSTFLLACLRPYDLNVPDLIRNIKVPLQAVSALGGMPSPVTLWFLQTCRGIALVVLDKIRKNSLDYQAEESLPMSTTTTGPQGVLSVNNCCSVKAQGPFTPLMMNAAKPGTHPSGQVCPEMPSKSQGLLLGTHKSHVVLSPTVTELQKESLLVATTALNMQVTPETSMSQVSPKAYGVYYLVTATDYSGPKGSLAPSTAPYRQSLARRQQAKGNGFCRVWDRPHHDKAKYSISLDEFKSFCHFTTHLEDFAIAMQMFSLAHRPVRLAEFKRAVKVATGQELSNNILDTVFKIFDLDGDECLSHEEFLGVLKNRMHREQRAQCQTFHNYRFKDSASHARQRCSRGRERKRALEVSPGFITAIIKIEYLPARSQCSVLERV

SEQ ID NO: 37980 - protein, 421 aa, Homo sapiens
  DOMAIN (368)..(390): RECOVERIN FAMILY SIGNATURE domain identified by eMATRIX, accession number PR00450C, p-value=6.280e-10, raw score of 12.22
  misc_feature (1)...(421): Xaa = X or * as defined in Table 2
SCARVAAWGGKLRRGLAVSRQAVRSPGPLAAAVAGAALAGAGAAWHHSRVSVAARDGSFTVSAQKNVEHGIIYIGKPSLRKQRFMQFSSLEHEGEYYMTPRDFLFSVMFEQMERKIQSRSXQKRFIEDTLSGIPTAGCGSSFFQRPWAIKGLISYNRVIFFFALQSSLNPIPGFHVAFKMLDTDGNEMIEKKENFLSCRRSXVNKMTXLTVKTNETWISGSNKXKNLKLDTTLQMRFFGKRGPRKLHYKEFRRFWENLQTEIQGNVEFLQFSKGLSFMRKRRTLQSGYFFSTNTENKDIYWKNVREKLSAGESISLDEVKAFCHCTRQIGTLCYSAMQMFTLAHRPVRLAEFKRAVKVATGQELSNNILDTVFKIFDLDGDECLSHEEFLGVLKNRMHRGLVGTTTSEYTRILEVCEERKH

SEQ ID NO: 37981 - protein, 114 aa, Homo sapiens
  misc_feature (1)...(114): Xaa = X or * as defined in Table 2
QNRGPGRTXDFLPNSVGEKILSFCNCSLGSIGALGPACCRVLSELSEEQVFHVNYLDVEELSLSRLCQCLVELSFQLATAYHGSATTREAARGEAACRAHLMFWCLCIWQFCRL

SEQ ID NO: 37982 - protein, 388 aa, Homo sapiens
  DOMAIN (227)..(241): Double-stranded RNA binding motif domain identified by eMATRIX, accession number PF00035B, p-value=9.400e-13, raw score of 12.08
  DOMAIN (53)..(382): Double-stranded RNA binding motif domain identified by PFam, accession name dsrm, E-value=2.8e-58, PFam score of 207.0
VGCVLGRVEAAVTVAPAGTEEGMSEEEQGSGTTTGCGLPSIEQMLAANPGKTPISLLQEYGTRIGKTPVYDLLKAEGQAHQPNFTFRVTVGDTSCTGQGPSKKAAKHKAAEVALKHLKGGSMLEPALEDSSSFSPLDSSLPEDIPVFTAAAAATPVPSVVLTRSPAMELQPPVSPQQSECNPVGALQELVVQKGWRLPEYTVTQESGPAHRKEFTMTCRVERFIEIGSGTSKKLAKRNAAAKMLLRVHTVPLDARDGNEVEPDDDHFSIGVGFRLDVLQNRGPGCTWDSLRNSVGEKILSLRSCSLGSLGALGPACCRVLSELSEEQAFHVSYLDIEELSLSGLCQCLVELSTQPATVCHGSATTREAARGEAARRALQYLKIMAGSK

SEQ ID NO: 37983 - protein, 108 aa, Homo sapiens
KVLEMEHTQQMKLKERQKFFEEAFQQDMEQYLSTGYLQIAERREPIGSMSSMEVNVDMLEQMDLMDISDQEALDVFLNSGGEENTVLSPALGPESREATPDGGEDSDS

SEQ ID NO: 37984 - protein, 363 aa, Homo sapiens
  misc_feature (1)...(363): Xaa = X or * as defined in Table 2
LEASLDQHXASVHSFRSHIHVISRTHRKSQRDPSELDAEHAQKVLEMEHTQQMKLKERQKFFEEAFQQDMEQQYLSTGYLQIAERRGEWGLGLLVWGLTGCAGCHDSSWGLVRWYKCYSFKFVDEPCLQFERNCKPIGSMSSMEVNVDMLEQMDLMDISDQEALDVFLNSGGEENTVLSPALGRVDKLALAEPGQYRCHSPPKLQQWCGSVMNSSQRFDMLHSGNFEIHLSLLLVVKDWRLQGGADSPAGLTGNSSLFVRQAFRGVPAMGKAMGSSQVLQAPGPESSTCQNEITLQVPNPSELRAKPPSSSSTCTDSATRDISEGGESPVVQSDEEEVQVDTALATSHTDREATPDGGEDSDS

SEQ ID NO: 37985 - protein, 301 aa, Homo sapiens
  misc_feature (1)...(301): Xaa = X or * as defined in Table 2
QRGVGGVGPRGRQRQQQPEAXGEETAAAAMLETLRERLLSVQQDFTSGLKTLSDKSREAKVKSKPRTVPFLPKYSAGLELLSRYEDTWAALHRRAKDCASAGELVDSEVVMLSAHWEKKKTSLVELQEQLQQLPALIADLESMTANLTHLEASFEEVENNLLHLEDLCGQCELKRCKHMQSQQLENYKKNKRKELETFKAELDAEHAQKVLEMEHTQQMKLKERQKFFEEAFQQDMEQYLSTGYLQIAERREPIGSMSSMEVNVDMLEQMDLMDISDQEALDGLPELWRRREHCAVPRLRA

SEQ ID NO: 37986 - protein, 41 aa, Homo sapiens
RVIMRIVNELAILDWNDQSARITGVSHHAQPGYCILILGFC

SEQ ID NO: 37987 - protein, 168 aa, Homo sapiens
  misc_feature (1)...(168): Xaa = X or * as defined in Table 2
CCLIKNDIKEKLHYSDCRLNVGQPCILPRNAFEFDLLIFYLGNLHFYISEIGLLGYCTFFFFFFEMESCSLTQAGVQXCNLGPLQPLPPGLEXFSCLSLPSSWDYRHVPPHWLIFVFLVEMGFCYVGQAGLEFLTSGDPPTSASQSARITGVSHHAQPGYCILILGFC

SEQ ID NO: 37988 - protein, 129 aa, Homo sapiens
ILLGRREMSETSELWQIKLVLEFFSSRSHQERLQNHPKRGLFMNSEFLPVVKCTIDNTLDQWLQVLSSVGSVPFVSLTVGGDMCVHAYLSGQPLEESQLSMLACFLVYHSVPAPQHLPPIGLEGSTSFA

SEQ ID NO: 37989 - protein, 602 aa, Homo sapiens
  misc_feature (1)...(602): Xaa = X or * as defined in Table 2
MKKVGGRVFWAKERASAEALRHELAGLLKKCKGSAADADQGGLGQGCRRHSKRWEGFTRGASRAARLGNEEQDAASAGPGPNGCGHLGAEEPSAAASGMDQCVTVERELEKVLHKFSGYGQLCERGLEELIDYTGGLKHEILQSHETCLSVVLLSLPMVMAGSGNLKVLQLCRFLHMKTGGEMNYGFHLAHHMALGTSIFGEEGRYSLSTSNSSIAALLCALYPHFPGFTALDNRYHLQALRHLYVLAAEPRAFLVPVGCGTQTRPCYALLGSLPYKGTQWYEQTKEDLMAPTLLPELHLLKQIKVKGPRYWELLIDLSKGTQHLKSILSKDGVLYVKLRAGQLSYKEDPMGWQSLLAQTVANRNSEARAFKPETISAFTSDPALLSFAEYFCKPTVNMGQKQEILDLFSSVLYECVYPRETPEMLPAYIAMDQLIRRLGEREMSETSELWQIKLVLEFFSSRSHQERLQNPPLKRGALLMELGNSPPFCKCTINNTLDTWLQVRGDICVNAYLTGQPLEESQLDMLACFLVFHFVPSSTALPTLXDXKGSTSFAELLFKFKASLKMPSAELCLRLAPLPSLEIPQPNGDVTVSGGEPTPET

SEQ ID NO: 37990 - protein, 48 aa, Homo sapiens
  misc_feature (1)...(48): Xaa = X or * as defined in Table 2
MLQWCCCQQQLVGESTDIGSLLSLVKKSWMLVLRVVPSAVEITLLARX

SEQ ID NO: 37991 - protein, 378 aa, Homo sapiens
  misc_feature (1)...(378): Xaa = X or * as defined in Table 2
HSHRAACPDTNRLVPGASRXHYLHRCRSRHSSSNIGKNIHSLRAGAVNNQSRPQSHSSGEFSLLHDHEAWSSSGSSPIQYLKRQTRSSPVLQHKISETLESRHHKIKTGSPGSEVVTLQQFLEESNKLTSVQIKSSSQENLLDEVMKSLSVSSDFLGKDKPVSCGLARSVSGKTPGDFYDRRTTKPEFLRPGPRKTEDTYFISSAGKPTPGTQGKIKLVKESSLSRQSKDSNPYATLPRASSVISTAEGTTRRTSIHDFLTKDSRLPISVDSPPAAADSNTTAASSEYHLHQWSSHILDIPTHTIGSCAQNDLAIDMPEPLYAQARNSRTGRSHFLNQTFATIRMPSDAFGMLAKDKHRTIYCGPFISAILIPEYRIS

SEQ ID NO: 37992 - protein, 239 aa, Homo sapiens
HNCALHADSTMRGKAPLFRPTYKLMEQLLLRIFRWISQKCQNVEVTSICWFCTCTYSGWVEAYPTRTEKPYKKGKNDPSCTKGQCNPLELVITNPLNPHWKKGERVTLGIDRARLDPRVNILVRGGEVYERSPEPVFQTFYDELNVPVPEIPGKTRNLFLQLAECVAQPLNVTSCYVCGGTVTGYQWPWKARELVPVDPVPDEFLAQKNYPDNFWVLKPSITGQYCIAREGKKFTHPVG

SEQ ID NO: 37993 - protein, 570 aa, Homo sapiens
  DOMAIN (140)..(269): RNase H domain identified by PFam, accession name rnaseH, E- value=2.5e-16, PFam score of 67.7
MAVGVLTQTVRLWPRPVAYLSKQLDGVSKGWPPCLRALAAMALLAQEADKLTLGQNLNIKAFHTVVTLMNTKGHHWLTNARLTKYQSLLCENPRIITDVCNTLNPATLLPVSESLVKHNCVDMLDSVYSSRPDLRDQPWASADWELYMDGSNFINPHGERCAGYAVVTLNAVIEAKPLPQGTSAQKAELIALTRALELSEVHGALYKEKGLLNSRGKDIKYQQEILQLLEAVWKPQKVAVMHCRGHQRASTSVALGNSQTDSEARKAASTPYCASVAAPLLPQTPDLVPTYSKEEKDFFHTEVGQVIKEGWIRLPDGKVAVPQLLRATVVLAMHETTLLGQESLEKLLGRYFYISHLPALAKAVAQCIQAYGAAPFEGLQVDFTEMPKCEGNKYLLVLVCTYSGWVEAYPTQTEKAYEVTRVLLRDLIPRFGLPLRIGSHNGPVFVADLDCVEINVDTGVIWATWIKNEKDPVQLQKGKSGPSCTKGQCNPLELVITNPLDPRWKKGERVTLGINGAGLDPRVNILVRGEVYKHSPEPVLQTFYDELNVPVPEIPGKTRNLFLQLAKHVA

SEQ ID NO: 37994 - protein, 187 aa, Homo sapiens
KLYNGTKKTVTCWSSNHTERNPFSKFPKLQTVWTHLESHRDWTAPTGLYWPIKTGELLGFPVYASHKKGSIAIENWKDDEWPPERLIQYYGAATWAQDGSWGYWTPIYKINQIIRLQAVLEIITNKTGRALTVLAWQETQMRNAIYQNRLALEYLLAAEGGVCRKFNLTNCCLHIDVQGQVVEDIEI

SEQ ID NO: 37995 - protein, 213 aa, Homo sapiens
  DOMAIN (12)..(27): Isocitrate and isopropylmalate dehydrogenases proteins domain identified by eMATRIX, accession number BL00470C, p-value=1.000e- 08, raw score of 15.43
MLSIQSTHAEKELENFFQNTEDWYFHTSHHLATWIKQKSEKDPVHLQKGKNGPSCTKGQCNPLELVITNPLDPCWKKEERVTLGIDGAGLDPQVHILVRGEVYKHSPEPVFQTFCDELNVPVPEIPGKTRNLFLQLAWHVAQCLNVTSCYVCGRTIIGDQWPQEAQELVPTDPVPDEFLAQKNHPDNFWVLKPSIIGQYCIAREGKEFTHPIG

SEQ ID NO: 37996 - protein, 203 aa, Homo sapiens
  DOMAIN (4)..(80): Integrase core domain identified by PFam, accession name rve, E-value=1.5e-12, PFam score of 47.4
IQAYGAAPFEGLQVDFTEMPKCEGNKYLLVLVCTYSGWVEAYPTQTEKAYEVTRVLLRDLIPRFGLPLRIGSHNGPVFVADLDCVEINVDTGVIWATWIKNEKDPVQLQKGKSGPSCTKGQCNPLELVITNPLDPRWKKGERVTLGINGAGLDPRVNILVRGEVYKHSPEPVLQTFYDELNVPVPEIPGKTRNLFLQLAKHVA

SEQ ID NO: 37997 - protein, 572 aa, Homo sapiens
  DOMAIN (12)..(27): Isocitrate and isopropylmalate dehydrogenases proteins domain identified by eMATRIX, accession number BL00470C, p-value=1.000e- 08, raw score of 15.43
  misc_feature (1)...(572): Xaa = X or * as defined in Table 2
MLSIQSTHAEKELENFFQNTEDWYFHTSHHLSSLRFFSARESNCSMKLYEEAYMERYRDFLPATMWSAHTEVDVPGQATWIKQKSEKDPVHLQKGKNGPSCTKGQCNPLELVITNPLDPCWKKEERVTLGIDGAGLDPQVHILVRGEVYKHSPEPVFQTFCDELNVPVPEIPGKTRNLFLQLAWHVAQCLNVTSCYVCGRTIIGDQWPQEAQELVPTDPVPDEFLAQKNHPDNFWVLKASIIGQYCIAREGKEFTHPIGXLSCRRQKLYNGTTKTITWRGSSNHTERNPFSKFPKLQTVWTHLGVPRAWEQPPLGFLLGYVRAWSLLTGLLDHWAGSCCLLGTIKPSFFPTAPXKQGKLLGFPVYASREKRIIAIENWKDDEWPPPERIIQYYGPVTWAQDGLWGYQTPIYVLNRIIRLQAALEIITDKISRALTILAWQETQMRNAISQNRLALDYLLAAEGGVYGKFNLTNCCLHVDDQGQVVEDIVRDRTKLAHVPVQVWHEFDPGAMFGKWFPALGGFKTLIIGVLIVIGTCLLLPCLLPVLLQMIKSFIATLVHQNASAQVYYVNHY

SEQ ID NO: 37998 - protein, 135 aa, Homo sapiens
  DOMAIN (51)..(88): Alanine dehydrogenase & pyridine nucleotide transhydrogenase domain identified by eMATRIX, accession number BL00836D, p-value= 1.391e-27, raw score of 22.30
  DOMAIN (1)..(135): Alanine dehydrogenase/pyridine nucleotide t domain identified by PFam, accession name AlaDh_PNT, E-value=1e-07, PFam score of - 73.1
TLISFIYPAQNPELLNKLSQRKTTVLAMDQVPRVTIAQGYDALSSMANIAGYLIVGGGVAGLASAGAAKSMGAIVRGFDTRAAALEQFKSLGAEPLEVDLKESGEGQGGYAKEMSKEFIEAEMKLFAQQCKEVDI

SEQ ID NO: 37999 - protein, 78 aa, Homo sapiens
PPGPVICLQGNWGVRKLGTHINMANLLKTVVTGCSCPLLSNLGSCKGLRVKKDFLRTFYTHQELWCKAPVKPGKVSLQ

SEQ ID NO: 38000 - protein, 326 aa, Homo sapiens
  DOMAIN (191)..(228): Alanine dehydrogenase & pyridine nucleotide transhydrogenase domain identified by eMATRIX, accession number BL00836D, p-value= 7.113e-24, raw score of 22.30
  DOMAIN (47)..(326): Alanine dehydrogenase/pyridine nucleotide t domain identified by PFam, accession name AlaDh_PNT, E-value=3.6e-46, PFam score of 166.8
MWKQLWNWVTGRGWNSLEGSEEDRKTWESLELPRDLLNSFDQNADNVMDNEIQAEVVSDGDEELVGNWGKGDSCYVLAKRMTAFYPTLEVRAPMVNPTLGVHEADLLKTSGTLISFIYPAQNPELLNKLSQRKTTVLAMDQVPRVTIAQGYDALSSMANIAGYKAVVLAANHFGRFFTGQITAAGKVPPAKILIVGGGVAGLASAGAAKSMGAIVRGFDTRLIPLVVATLPPGGNLGYQIPCSSQQRENLLLNHGLAAALEQFKSLGAEPLEVDLKESGEGQGGYAKEMSKEFIEAEMKLFAQQCKEVDILISTALIPGNSNCGDK

SEQ ID NO: 38001 - protein, 12 aa, Homo sapiens
MLEGLTGSFPLS

SEQ ID NO: 38002 - protein, 135 aa, Homo sapiens
SSAPAFFPPGPLHPIAARSPNQKATSRNAPLSSKASYPQGPFHSRGQAKPLCLCLGLRPPAQPPRFPSASPCQSNLVPNAAAEVFRDTFASPLEEPVTKRDVLSGVPSEQRNREAAEYKRLNCICLCFQKIHVQL

SEQ ID NO: 38003 - protein, 571 aa, Homo sapiens
  DOMAIN (195)..(231): Alanine dehydrogenase & pyridine nucleotide transhydrogenase domain identified by eMATRIX, accession number BL00836F, p-value= 6.143e-28, raw score of 23.58
  DOMAIN (304)..(541): NAD(P) transhydrogenase beta subunit domain identified by PFam, accession name PNTB, E-value=4.4e-140, PFam score of 478.8
MAKSKNHTTHNQSRKWHRNGIKKPRSQRYESLKGVDPKFLRNMHFAKKHNKKGLKKMQANNAKAMSARAQAIKALVKPKEVKPKIPKGVSRKLDPLAYIAHPKLGKRVCACIAKGPRLCWPKAKAKDQTKAQAAAPASVPAQAPKGKKAPVLFNKEMIESMKEGSVVVDLAAEAGGNFETTKPGELYIHKGITHIGYTDLPSRMATQASTLYSNNITKLLKAISPDKDNFYFDVKDDFDFGTMGHVIRGTVVMKDGGFLVTQRMLDMFKRPTDPPEYNYLYLLPAGTFVGGYLAALYSGYNIEQGTARLGNALGMIGVAGGLAATLGVLKPGPELLAQMSGAMALGGTIGLTIAKRIQISDLPQLVAAFHSLVGLAAVLTCIAEYIIEYPHFATDAAANLTKIVAYLGTYIGGVTFSGSLIAYGKLQGLLKSAPLLLPGRHLLNAGLLAASVGGIIPFMVDPSFTTGITCLGSVSALSAVMGVTLTAAIGGADMPVVITVLNSYSGWALCAEGFLLNNNLLTIVGALIGSSGAILSYIMCVENFRTISALRVIQESDTSSGDPGKGSGHKP

SEQ ID NO: 38004 - protein, 1114 aa, Homo sapiens
  DOMAIN (242)..(256): ubiH/COQ6 monooxygenase family proteins domain identified by eMATRIX, accession number BL01304A, p-value=5.645e-10, raw score of 8.05
  DOMAIN (70)..(468): Alanine dehydrogenase/pyridine nucleotide t domain identified by PFam, accession name AlaDh_PNT, E-value=4e-264, PFam score of 890.8
  misc_feature (1)...(1114): Xaa = X or * as defined in Table 2
GNWGARKLGTHINMANLLKTVATGCSCPLLNNLGSCKGLRVKKDFLRTFYTHQELWCKAPVKPGIPYKQLTVGVPKEIFQNEKRVALSPAGVQNLVKQGFNVVVESGAGEASKFSDDHYRVAGAQIQGAKEVLASDLVVKVRAPMVNPTLGVHEADLLKTSGTLISFIYPAQNPELLNKLSQRKTTVLAMDQVPRVTIAQGYDALSSMANIAGYKAVVLAANHFGRFFTGQITAAGKVPPAKILIVGGGVAGLASAGAAKSMGAIVRGFDTRAAALEQFKSLGAEPLEVDLKESGEGQGGYAKEMSKEFIEAEMKLFAQQCKEVDILISTALIPGKKAPVLFNKEMIESMKEGSVVVDLAAEAGGNFETTKPGELYIHKGITHIGYTDLPSRMATQASTLYSNNITKLLKAISPDKDNFYFDVKDDFDFGTMGHVIRGTVVMKDGKVIFPAPTPKNIPQGAPVKQKTVAELEAEKAATITPFRKTMSTASAYTAGLTGILGLGIAAPNLAFSQMVTTFGLAGIVGYHTVWGVTPALHSPLMSVTNAISGLTAVGGLALMGGHLYPSTTSQGLAALAAFISSVNIAGGFLVTQRMLDMFKRPTDPPEYNYLYLLPAGTFVGGYLATLYSGYNIEQIMYLGSGLCCVGALAGLSTQGTARLGNALGMIGVAGGLAATLGVLKPGPELLAQMSGSDGFGVGTIGIXQFAKRIQIFLILPQLVAAFSQFSGVLAAVTXLCIAEYIIEYPHFATDAAANLTKIVAYLGTYIGGVTFSGSLIAYGKLQGLLKSAPLLLPGRHLLNAGLLAASVGGIIPFMVDPSFTTGITCLGSVSALSAVMGVTLTAAIGGADMPVVITVLNSYSGWALCAEGFLLNNNLLTIVGALIGSSGAILSYIMCVAGNRSLANVILGGYRTTSTAGGKPMEISGTHTEINLDNAIDMIREANSIIITPGYGLCAAKAQYPIADLVKMLTEQGKKVRFGIHPVAGRMPGQLNVLLAEAGVPYDIVLEMDEINHDFPDTDLVLVIGAKDTANSTAQEDPNSIYWQGMPVLEVXKSKQVIVMKRSLGVGYAGSGTIPIFYKPNTAMLLGDAKKTCDALRGKVXENSKCLSCAYFLC

SEQ ID NO: 38005 - protein, 96 aa, Homo sapiens
  misc_feature (1)...(96): Xaa = X or * as defined in Table 2
EFPATIQSNRARGAKPGRRVDRGPQARCFDVGGCPRSAPSNGLRNSEPSPXGRCGRSPVSPALSSSRDVNLPCMLSSGTDSGACSEVLVGTLYRPL

SEQ ID NO: 38006 - protein, 156 aa, Homo sapiens
  misc_feature (1)...(156): Xaa = X or * as defined in Table 2
RFHMSSLSASPPPRRLWTQMNTQCLVFSASHLPRCQEMLFQGTVXEKPHSPRCFSPAKKPRPAGAPAASHKCRCTPXPGPPSEPTVPSDKAPLVGNAESQRVASPSGPPAPCSPVGWPGTYKAIPASGTVAPTPLSAGTTDMTRLCPLSLEFLLND

SEQ ID NO: 38007 - protein, 230 aa, Homo sapiens
  misc_feature (1)...(230): Xaa = X or * as defined in Table 2
RAGAGRSERAVAEESXGGLSGSCGRHNPGQSRLQRRPSQDVELEDCCRGCXSGSLWLRTLRPKRPAPFGGFSVPASSAASIPTGSAVVQPGPLPGPTGKSPPVFAGSGPSSNPQPAFSNMRTRDGSKPGSASFAPLTPPLEPPAGLRAPSSGVSPLLPATIQSNRARARSPGDAXAAPPRPGVLTSAVPLPRRVTCLRNSRAFAPAVRTNAVTPXPGGVSGPSQRRAEAA

SEQ ID NO: 38008 - protein, 78 aa, Homo sapiens
PKKSRVRFSNIMEIRQLPSSHALEAKLSRMSYPVKEQESILKTVGKLTATQWFLANLSYQEALSDTQVAIVNILSSTS

SEQ ID NO: 38009 - protein, 24 aa, Homo sapiens
KETYCVSSSRFFRPCQVYQYNASN

SEQ ID NO: 38010 - protein, 276 aa, Homo sapiens
  misc_feature (1)...(276): Xaa = X or * as defined in Table 2
FGGFLANLSYQEALSDTQVAIVNILSSTSGLFTLILAAVFPSNSGDRFTLSXELLAVILSIGGVGLVNLAGSEKPAGRDTVGSIWSLAGAMLYAVYIVMIKRKVDREDKLDIPMFFGFAGLFNLLLLWPGFFLLHYTGFEDFEFPNKVVLMCIIINGLIGTVLSEFLWLWGCFLTSSLIGTLALSLTIPLSIIADMCMQKVQFSWLFFAGAIPVFFSFFIVTLLCHYNNWDPVMVGIRRIFAFICRKHRIQRVPEDSEQCESLISMHSVSQEDGAS

SEQ ID NO: 38011 - protein, 102 aa, Homo sapiens
  DOMAIN (12)..(44): LBP / BPI / CETP family proteins domain identified by eMATRIX, accession number BL00400A, p-value=1.771e-25, raw score of 21.59
FLALLAGAHAEFPGCKIRVTSKALELVKQEGLRFLEQELETITIPDLRGKEGHFYYNISEVKVTELPPHRPQQLSEPSIPKLAAVIQDPNPSQPLFSHIHSL

SEQ ID NO: 38012 - protein, 131 aa, Homo sapiens
  DOMAIN (41)..(88): LBP / BPI / CETP family proteins domain identified by eMATRIX, accession number BL00400B, p-value=4.250e-30, raw score of 31.87
FPGCKIRVTSKALELVKQEGLRFLEQELETITIPDLRGKEGHFYYNISEVKVTELQLTSSELDFQPQQELMLQITNASLGLRFRRTGLLMSGRPLPPHRPQQLSEPSIPKLAAVIQDPNPSQPLFSHIHSL

SEQ ID NO: 38013 - protein, 320 aa, Homo sapiens
  DOMAIN (264)..(301): LBP / BPI / CETP family proteins domain identified by eMATRIX, accession number BL00400D, p-value=2.658e-31, raw score of 23.26
MSEATSVVDVDPGPRPIDMTGHVSAERSPPPDGQWGSQLLARQLQDFWKKSRNTLAPQRLLFEVTSANVVKDPPSNTWFVDSTVMLNTTDDRLRSNLRLKYRSHLTGNRLQSQKCDRRGRWRSRLLHRLRHALAGDGPGEAAASPEAEQFPESSELEDDDAEGLSSRLSGTLSFTSAEDDEDDEDEDDEEAGPDQLPLGDGTWRKGAMTQVIKNFKTVTAEPYTKLMAFLNVGGCAAVQGAFFPLTERNWSLGNRAVEPQLQEEERMVYVAFSEFFFDSAMESYFRAGALQLLLVGDKVPHDLDMLLRATYFGSIVLLLL

SEQ ID NO: 38014 - protein, 476 aa, Homo sapiens
  DOMAIN (239)..(276): LBP / BPI / CETP family proteins domain identified by eMATRIX, accession number BL00400D, p-value=8.714e-29, raw score of 23.26
  DOMAIN (1)..(435): LBP / BPI / CETP family domain identified by PFam, accession name LBP_BPI_CETP, E-value=0.00013, PFam score of -43.9
  misc_feature (1)...(476): Xaa = X or * as defined in Table 2
KIRVTSKALELGKAQGQTGTDGSGRGWGRPNSGGKEGHFYYNISEXVGGGASRSGAGPRRWRRGPRMLQITNASLGLRFRRQLLYWFLXGPSTLRGVESGSGGLEVLWGSRDPAGRMKVSNVSCQASVSRMHAAFGGTFKXAPAPTPAHPFRAPQLICLAQVWAATGRRVARVGMLSLXEGPGELVAGESGCAAVMQHLRAGPFRALLFTSNLDMDFRVSCLGWCMTSDFLTRPLSLLSLQEEERMVYVAFSEFFFDSAMESYFRAGALQLLLVGDKVCHGLFVGWAREGLXQSSLPHCAGGGRDRATCTPVRPRRGAAIKPSGTTISVTASVTIALVPPDQPEVQLSSMTMVRVPEWGLLAGGQGKMGCGLLSRXAGALPCTSVIGGQSHLSTGMGWAGFVRSXPSPSPRKARGVRMEEERGVNWAGPDXATNHAVSGGRMGKEGGPSPLSIAPQCHRPADVRASTAPTPSTAAV

SEQ ID NO: 38015 - protein, 128 aa, Homo sapiens
  misc_feature (1)...(128): Xaa = X or * as defined in Table 2
MALRGKALRTTSDLRRFRIYSNHSATWKSLALXIPLQAPLKTMLPELGXMPQCSNERTWRGVQDPHYPEGIKLCAMKVVTNPCGIPSPIGAXSPTFAKGLREVIEKNRPADVRASTAPTPSHSSCLSP

SEQ ID NO: 38016 - protein, 63 aa, Homo sapiens
SPRSLLWWSPRAEHRIRRWQRKLRSGPKSDTPISPVFQGLAQSSCRAGPEDARDGGSFVRAPF

SEQ ID NO: 38017 - protein, 84 aa, Homo sapiens
  misc_feature (1)...(84): Xaa = X or * as defined in Table 2
KCDILPTALDSIHHSSHRVHLAHSPHSLQXXHPHPLAQPSQQDRPSVPLXXMSLADPESHLSESHSHFHLXPACRVXAYDLLPL

SEQ ID NO: 38018 - protein, 22 aa, Homo sapiens
FGLFYVCLQVKSLRALPCTPAL

SEQ ID NO: 38019 - protein, 374 aa, Homo sapiens
  misc_feature (1)...(374): Xaa = X or * as defined in Table 2
PNGLRPPCPSPASETPGNAPVCDPGSSSQGAQGKLNAWWAPGMAASRSLHSLHPVRRACALPAQSLLGPLRSFRCHLSDPVFRTGAPPGQGSWQYKVLVHAQERELTQLREKLREGRDASRSLNEHLQALLTPDEPDKSQGQDLQEQLAEGCRLAQHLVQKLSPENDNDDDEDVQVELAEKVQKSSAPREMQKAEEKEVPEDSQEECAITYSNSHGPYDSNQPHRKTKITFEEDKVDSTLIGSSSHVEWEDAVHHYSRKXKXXXGRGRKRASVSQKPEETPSPRPEPPPRGSGEAERSVGSWDASSRSLRRLHPLREPVPTLPSRFRGRCGASAAIFGSCVPHGGSTRAGMMGSKEVGKGGDPGEETSPVALFS

SEQ ID NO: 38020 - protein, 1886 aa, Homo sapiens
LLEKLRQRIHDKAVALERAIDEKFSALEEKEKELRQLRLAVRERDHDLERLRDVLSSNEATMQSMESLLRAKGLEVEQLSTTCQNLQWLKEEMETKFSRWQKEQESIIQQLQTSLHDRNKEVEDLSATLLCKLGPGQSEIAEELCQRLQRKERMLQDLLSDRNKQVLEHEMEIQGLLQSVSTREQESQAAAEKLVQALMERNSELQALRQYLGGRDSLMSQAPISNQQAEVTPTGRLGKQTDQGSMQIPSRDDSTSLTAKEDVSIPRSTLGDLDTVAGLEKELSNAKEELELMAKKERESQMELSALQSMMAVQEEELQVQAADMESLTRNIQIKEDLIKDLQMQLVDPEDIPAMERLTQEVLLLREKVASVESQGQEISGNRRQQLLLMLEGLVDERSRLNEALQAERQLYSSLVKFHAHPESSERDRTLQVELEGAQVLRSRLEEVLGRSLERLNRLETLAAIGGAAAGDDTEDTSTEFTDSIEEEAAHHSHQQLVKVALEKSLATVETQNPSFSPPSPMGGDSNRCLQEEMLHLRAEFHQHLEEKRKAEEELKELKAQIEEAGFSSVSHIRNTMLSLCLENAELKEQMGEAMSDGWEIEEDKEKGEVMVETVVTKEGLSESSLQAEFRKLQGKLKNAHNIINLLKEQLVLSSKEGNSKLTPELLVHLTSTIERINTELVGSPGKHQHQEEGNVTVRPFPRPQSLDLGATFTVDAHQLDNQSQPRDPGPQSAFSLPGSTQHLRSQLSQCKQRYQDLQEKLLLSEATVFAQANELEKYRVMLTGESLVKQDSKQIQVDLQDLGYETCGRSENEAEREETTSPECEEHNSLKEMVLMEGLCSEQGRRGSTLASSSERKPLENQLGKQEEFRVYGKSENILVLRKDIKDLKAQLQNANKVIQNLKSRVRSLSVTSDYSSSLERPRKLRAVGTLEGSSPHSVPDEDEGWLSDGTGAFYSPGLQAKKDLESLIQRVSQLEAQLPKNGLEEKLAEELRSASWPGKYDSLIQDQARELSYLRQKIREGRGICYLITRHAKDTVKSFEDLLRSNDIDYYLGQSFREQLAQGSQLTERLTSKLSTKDHKSEKDQAGLEPLALRLSRELQEKEKVIEVLQAKLDARSLTPSSSHALSDSHRSPSSTSFLSDELEACSDMDIVSEYTHYEEKKASPSHSDSIHHSSHSAVLSSKPSSTSASQGAKAESNSNPISLPTPQNTPKEANQAHSGFHFHSIPKLASLPQAPLPSAPSSFLPFSPTGPLLLGCCETPVVSLAEAQQELQMLQKQLGESASTVPPASTATLLSNDLEADSSYYLNSAQPHSPPRGTIELGRILEPGYLGSSGKWDVMRPQKGSVSGDLSSGSSVYQLNSKPTGADLLEEHLGEIRNLRQRLEESICINDRLREQLEHRLTSTARGRGSTSNFYSQGLESIPQLCNENRVLREDNRRLQAQLSHVSREHSQETESLREALLSSRSHLQELEKELEHQKVERQQLLEDLREKQQEVLHFREERLSLQENDSSGPCLSLVRLQHKLVLLQQQCEEKQQLFESLQSELQIYEALYGNSKKGLKAYSLDACHQIPLSSDLSHLVAEVRALRGQLEQSIQGNNCLRLQLQQQLESGAGKASLSPSSINQNFPASTDPGNKQLLLQDSAVSPPVRDVGMNSPALVFPSSASSTPGSETPIFNRANGLGLDTSPVMKTPPKLEGDATDGSFANKHGRHVIGHIDDYSALRQQIAGGQARWSKKIVSLVRSACSFPGLEAQGTEVLRAGKGIHELSGGRHQLPLHHALEESASLLTMFWRAALPSTHIPVLPGKVGESTERELLELRTKVSKQERLLQSTTEHLKNANQQKESMEQFIVSQLTRTHDVLKKARTNLEVKSLRALPCTPAL

SEQ ID NO: 38021 - protein, 365 aa, Homo sapiens
MKKGSNGYGFYLRAGSEQKGLGLDTSPVMKAPPKLEGDATDGSFANKHGRHVIGHIDDYSALRQQIVEGKLLVKKIVSLVVDLVRKSGNSVTLLVLDGDSYEKSMKTRVDLKELGQSQEEQRLGLSRELLDEKEPEVLQDSLDRCYSTPSVYLGLTDSCQPYRSAFYVLEQQRIGLAVDMDGEIPKGSAMYSSLVTLAFQEPCKKRSHRKSLKQQERLGGKNQVDCRGSPEGACAHPAQSLSGPLRSFRCHLRILCPARGLHQGRDDGLGLDTSPVMKAPPKLEGDATDGSFANKHGRHVIGHIDDYSALRQQIVEGKLLVKKIVSLEPVWRWEEVVFCPDACLRPRRRFESAFRNNRRLRAVSR

SEQ ID NO: 38022 - protein, 1887 aa, Homo sapiens
  DOMAIN (2)..(15): Laminin-type EGF-like (LE) domain proteins domain identified by eMATRIX, accession number BL01248, p-value=3.793e-13, raw score of 11.02
  DOMAIN (1071)..(1702): Laminin G domain identified by PFam, accession name laminin_G, E-value=0.00061, PFam score of 18.1
  misc_feature (1)...(1887): Xaa = X or * as defined in Table 2
HCQRNTTGEHCEKCLDGYMIKSXDSLFGDVWNXLPIFASNFSFAELXKXGFVRDYHKXTFVCSCLLNPXGPEFVGKKIKRKKNHDAKYLNVXYSCFRCAPGYYGNPLLIGSTCKKCDCSGNSDPNLIFEDCDEVTGQCRNCLRNTPGKYCHILSIKKCISRLLFLFPTVCNCGGGPCELHXEQNFWFKNYFNSRHPLPQTDVSWCSAKTACLXHAFDLXFXRNVSPPGCDKCVWDLTDALRLAALSIEEGKSGVLRVLCTFFKTWCAHXLFSKHILLQTKLSERENQYALRKPKSHKLHPPSYGFCLNFPFXILQPSTGKSYSPFPPLMSGIPLKDAHPSVFINTQCSKDAPFGAADLVPYLCLYNILFSYIXSSLYTDYLXENQASRKGQLVQKECSLAFLVPGHLSLLPCFTMFFLSEINNKMLYYGEEHELSPKEISEKLVLAQKMLEEQNAGRNGSEQEKATLSLYLHFFPVLSQAESWQRLHNETRTLFPVVLEQLDDYNAKLSDLQEALDHYCSPQRFPXRHIHFTLPYSSFPQKQQERVREQMEVVNMSFGAXEKCFKFFXIQCIYXNFFLXNASGIYAEIDGAKSELQVKLSNLSNLTSIKHGPIPQEGKKEKXQCLFINRKLHSSDMNGLVQKALDASNVYENIILQLXIADFFCCHFYPLLSIPLXAVSGIDTQIKSLTSSITSVLQFCTSNFKCYFPELLIYVQSIQNTANTADDCIVQMRSFLVEMESFSRHLGSTSTSFCCSSTGSDEAVADTSRRVGGAGVLMFPNKYPASLQSEXPCALCKGDAQQRLGQSRLITEEANRTTMEVQQATAPMANNLTNFYIXFLKYNIELFSXMINSLLTAVRNLTEVVPQLLDQLRTVEQKRPAGKHGKALCPFLQSTFNETVVSLQIQVSMMFDGQSAVEVHSRTSMDDLKAFTSLSLYMNPLKKMMFILMNFIXMTSYFLIFQAKKEYMGLAIKNDNLVYVYNLGTKDDILTFKKYFLXIIXXQVKIIYLNRVGKHGKVFLTVPSLSSTAEEKFIKKGEFSGDCLFCDVXVKYDHETSGFTFSIAXLPTSLNLPGFVGCLELATLNNVKGLHLKSITETVVFKXPLCFHFRDKLAFTQSRAASYFFDGSGYAVVRDITRRGKFGHKFSXIXLYSHNRCSYLTIPFSPQSMFFRLEMRNGYLHVFYDFGFIXKSSKNXILNSXSRLTIYYLSQISIIYHNDKKMILVVDRRHVKSMDIHSLHMQGNIIIMAVSVRLTFFSRALRAHLPLDINFRGCMKGFQFQKXNIDSFKHLIILKNTISTCSGTQISRRAYFNGQSFIASIQKISFFENVENISVFWIPRLPTYMPVLAFQSDVFSISLDNGTVIMDVKGIKDPTXSGSRXNASSVVCKEAFFFCRYELIVDKSRVGSKNPTKGKIEQTQASEKKFYFHNIHHVILNNIFNIYFFLCYKHRVDRDVEVEDFQRYTEKVHTSLYECPIESRTSQITFCCXYVTFIPXFGLLLXGGKSKDAPSWDPVALKLPERNTPRNSHCHLSNSPRAIEHDFKKLEIILSLILHMVIPFFSFTRSQFSIRLRTRSSHGMIFYVSDQEENDFMTLFLAHGRLVYMRKHSLFCNLGMYLRCAIVLLFIQVIFIRERSSGRLVIDGLRVLEESLPPTEALILLPLGAFVLRKLILRNIFFPQINSIYSFSGCLSNLQLNGASITSASQTFSVYKITPXLQIXSCCSWEFIVFLSTDESFNIGLKFEIAFEVRPRSSYLRNSVLSQXGQTKSYNVSYLLQVIVKVNNGIVFLRLKIHHSSATYDQSLPCISVIRDSNVVQLDVDSEVNTRKXYLGLEYLNCNLCFYFLLFSESLLTPRLAPSKPFTGGHPVSFSKAALVSGAVSINSCPAA

SEQ ID NO: 38023 - protein, 236 aa, Homo sapiens
  DOMAIN (39)..(99): Laminin G domain identified by PFam, accession name laminin_G, E-value=0.0015, PFam score of 16.7
  misc_feature (1)...(236): Xaa = X or * as defined in Table 2
TPCFESPNETGTYFSTKAGYVLLNESSNIGIEFEIAFKVRPRSSSGTLVHGHSVNGEYLNVHMKNGQVIVKVNNGIRDISTSVTPKQSLCDGRWHRITVIRDSNVVQLDVDSEVNHVVGPLGIQKPIDHREPVLVGGVPRILYXHPRFCPPQNPFTGCIRHFVIDGPPQWSFQVKAAPGQAGARKASNSLSQQPGHGQKHSCPKYKVPLRALEKEHKASPGGTVTLSFGVGSFSSS

SEQ ID NO: 38024 - protein, 106 aa, Homo sapiens
  misc_feature (1)...(106): Xaa = X or * as defined in Table 2
DGVSHCRPGWSAVAXSQLTATSTSWVQMIACFTLPSSWDYRCTPPCLTNFCVCIFSRDRVWAMLAGWLKNSXPQAIRPPQPPKVLGITGHEPRAPGQKILTFHILT

SEQ ID NO: 38025 - protein, 159 aa, Homo sapiens
  DOMAIN (4)..(65): Zinc finger, C2H2 type domain identified by PFam, accession name zf-C2H2, E-value=0.058, PFam score of 19.9
YSPPECPFCGKIEEHSEDMETHVKTKHANLLDIPLEDCDQPLYDCPMCGLICTNYHILQEHVDLHLEENTFSKAWIESSVLVIYNWLTSFSKKKTERGDPEESRQEIEEFQKLQRQYGLDNSGGYKQQQLRNMEIEVNRGRMPPSEFHRRKADMMESLA

SEQ ID NO: 38026 - protein, 94 aa, Homo sapiens
  DOMAIN (19)..(69): Zinc finger, C2H2 type domain identified by PFam, accession name zf-C2H2, E-value=0.0015, PFam score of 25.3
RSSMWQLLASGPLLVNTMLSCNICGETVTSEPDMKAHLIVHMESEIICPFCKLSGVNYDEMCFHIETAHFEQNTLERNFERINTVQYGTSDNKK

SEQ ID NO: 38027 - protein, 369 aa, Homo sapiens
  DOMAIN (50)..(60): Eukaryotic thiol (cysteine) proteases cysteine proteins domain identified by eMATRIX, accession number BL00139A, p-value= 2.723e-09, raw score of 10.29
  DOMAIN (105)..(280): Zinc finger, C2H2 type domain identified by PFam, accession name zf-C2H2, E-value=5.3e-06, PFam score of 33.4
  misc_feature (1)...(369): Xaa = X or * as defined in Table 2
MHCIETGVERRILGLLLFRGSLASVIRPGEVLDAAHALVCQRGPKGKPSGAQCGSCWPLGRPKALTQLVPASFVCLACAFGAERLGDSALRSSDLTHHLLVNTMLSCNICGETVTSEPDMKAHLIVHMESEIICPFCKLSGVNYDEMCFHIETAHFEQNTLERNFERINTVQYGTSDNKKDNTLQCGMEVNSSILSGCASNHPKNSAQNLTKDSTLKHEGFYSENLTESRKFLKSREKQSSLTEIKGSVYETTYSPPECPFCGKIEEHSEDMETHVKTKHANLLDIPLEGMDRVQCSGDLQLAHQLQQEEDRKRRSEESRQEIEEFQKLQRQYGLDNSGGYKQNNYEIWRXKXIGEECLHLNFIGEKLI

SEQ ID NO: 38028 - protein, 100 aa, Homo sapiens
VCTRELCVFSFYTLGVMSGAAEEVATGAEGSYLEIKKQMDKLDALAHPLLQWIISSNRSHIVKLPLSRWVHIENWHSILRNGLVNASYTKLQEWEKDSTG

SEQ ID NO: 38029 - protein, 45 aa, Homo sapiens
  misc_feature (1)...(45): Xaa = X or * as defined in Table 2
RTVTCYHRNSRACHPQQITSCPXHRALPCLPLWSPKCPSRWPWFG

SEQ ID NO: 38030 - protein, 43 aa, Homo sapiens
  misc_feature (1)...(43): Xaa = X or * as defined in Table 2
MKWVYCSVTGMGKGQHRMPSKGXGWVQRYNRDGIPSPRVLELF

SEQ ID NO: 38031 - protein, 395 aa, Homo sapiens
  DOMAIN (28)..(45): GLYCOSYL HYDROLASE FAMILY 20 SIGNATURE domain identified by eMATRIX, accession number PR00738G, p-value=1.000e-20, raw score of 15.05
  DOMAIN (20)..(390): Glycosyl hydrolase family 20 domain identified by PFam, accession name Glyco_hydro_20, E-value=1.6e-59, PFam score of 211.1
MSTIDDPRLQGRRMCLMLRGTPEQKALVIGGEACMWGEYVDNTNLVPRLWLCPPSTQDLANEGIREMTILHRHIPDRGKGVMRSCSFRTPRPFTLACGPEKSLMDPQSQSNSEGASSSLVVKLADTDRERALRRMQQMAGHLGAFHPAPLPLGACGAYTTAILQHQAALLAAAQGPGLGPVAAVAAQMQHVAAFSLVAAPLLPAAAANSPPGSGPGTLPGLPAPIGVNGFGPLTPQTNGQPAPTRSTITGSPLISGWSQSRPILRIMKYAEQRIPTLNEYCVVCDEQHVFQNGSMLKIQPDTIIQVWREDIPVNYMKELELVTKAGFRALLSAPWYLNRISYGPDWKDFYIVEPLSFEGTPEQKALVIGGEACMWGEYVDNTNLVPRLWAHRIQL

SEQ ID NO: 38032 - protein, 241 aa, Homo sapiens
  DOMAIN (218)..(240): Ribosomal protein L11 domain identified by PFam, accession name Ribosomal_L11, E-value=6.2e-05, PFam score of 22.3
  misc_feature (1)...(241): Xaa = X or * as defined in Table 2
MHVQHRVQAGVESLYKSTNDHTGQSTQHKQEKSLLLAKGTGMPAGQLKFMHTSHQFLLLSSPPAKEARFRTAKKLYGSTFAFPVYLSIFMSCVGENGGSHIENWHSILRNGLVNASYTKLQDIKGQFWNDDDSEGDNESEEFLYGVQGSCAADLYRHPQLDADIEAVKEIYSENSVSIREYGTIDDVDIDLHINNQFPGMKKSLQPGKHFDPNEIKVVYLRCTGGEVGATSALAPKIGPLX

SEQ ID NO: 38033 - protein, 226 aa, Homo sapiens
DSMLKGKLGVPELRVGRLMNRSISCTMKNPKVEVFGYPPSPQVSGHCKNIPTLEYGFLVQIMNGSSLATWSHIVKLPLSRQLKFMHTSHQFLLLSSPPAKEARFRTAKKLYGSTFALHGSHIEELGIRSWRQWAGSMAFLHQTAGMGKGQHRMPSKDELVQRYNRMNTIPQTRSIQSPVPAESESKLYRHFVEVITSKDLQKAWGTSGVLPCVPTHVLHKIPSFVI

SEQ ID NO: 38034 - protein, 59 aa, Homo sapiens
AREVWKSPAAPGHPDDALPTSPADTNVLRYIQLTQLKMNRCSLQREDSGAGSQTRDVIG

SEQ ID NO: 38035 - protein, 240 aa, Homo sapiens
  DOMAIN (72)..(93): PROTEIN REPEAT DOMAIN TPR NUCLEA domain identified by eMATRIX, accession number PD00126A, p-value=1.931e-09, raw score of 22.53
  misc_feature (1)...(240): Xaa = X or * as defined in Table 2
MQRGALSPVLMLSAAPEPPPRPPPGLSPPGSGPGSGSRHGSARPGPTPEPSGSLGAALDSSLRAAVAFKAEGQRCYREKKFREAIGKYHRALLQLKAALGGPPXRPARPRPPGPTSSPGPARLSEEQRRLVESTEVECYDSSPACLLQSELVNYERVREYCLKVLEKQQGNFRPPYRAGIAFYPLGDYARALRFLQEAPSREPPDTNVLRYIQLTQLKMNRCSLQREDSGAGSQTRDVIG

SEQ ID NO: 38036 - protein, 87 aa, Homo sapiens
  DOMAIN (17)..(31): Regulator of G protein signalling domain proteins domain identified by eMATRIX, accession number PF00615C, p-value=4.375e- 11, raw score of 10.06
  DOMAIN (4)..(39): Regulator of G protein signaling domain identified by PFam, accession name RGS, E-value=1.5e-12, PFam score of 48.9
  misc_feature (1)...(87): Xaa = X or * as defined in Table 2
NGKEPGRYTFEDAQEHIYKLMKSDSYPRFIRTSAYQELLQAKKKGRNIPIFPCHKNCTPTLRASTNLLXKEGKSLTSKRLTSLAQSY

SEQ ID NO: 38037 - protein, 464 aa, Homo sapiens
  DOMAIN (386)..(413): Mrp family proteins domain identified by eMATRIX, accession number BL01215A, p-value=4.964e-11, raw score of 9.75
KYHTVNGHNCEVRKALSKQEIASASCSQRGRSGSGNFGGDRGGGFGGNDNFGRGGNFSGHGGFGGSCCGGGYGGSGDGYNGFGNDASNFGGGGSSMSLALQQSIFPFWTPERGNFGGRSSCLLGVPQPQLMLKDLTPSELKMRAGLKDKPLGEGMEGQEEIKGEGQTNRTVCLSEKKILKWPYKGKDVRDTGGGAFNAGRRAPAVALIPCPSESCGSGHPGLSHRRKTVSVGPKLACPAVLVKLACLRFDSRDPPMSCKYQGPSGKDSHRMHSTAYLCKRTMQNKARLELADSEAVSTKDLLAKIVIECTAPGARKITRRWRIGEAADLVGVSSHAIIDAEKAGRLPHPDMEIRGRVEQRVGYTIEQINHMRDVFGTRLRRAEDVFPPVIGVAAHKGGVYKTSVSVHLAQDLALKGLRVLLVEGNDPQGTASMYHGWVPDLHIHAEDTLLPFYLGEKDDVTYAI

SEQ ID NO: 38038 - protein, 512 aa, Homo sapiens
  DOMAIN (433)..(447): Regulator of G protein signalling domain proteins domain identified by eMATRIX, accession number PF00615C, p-value=4.375e- 11, raw score of 10.06
  DOMAIN (383)..(463): Regulator of G protein signaling domain identified by PFam, accession name RGS, E-value=2.2e-30, PFam score of 112.0
  misc_feature (1)...(512): Xaa = X or * as defined in Table 2
MAQGNNYGQTSNGVADESPNMLVYRKMEDVIARMQDEKNGIPIRTVKSFLSKIPSVFSGSDIVQWLIKNLTIEDPVEALHLGTLMAAHGYFFPISDHVLTLKDDGTFYRFQTPYFWPSNCWEPENTDYAVYLCKRTMQNKARLELADYEAESWARGLQRAFAPKWEFIFMQAGAQAKVDKKRDKIERKILDSQERAFWDVHRPVPGCVNTTEVDIKKSSRMRNPHKTRKSVYGLQNDIRSHSPTHTPTPETKPPTEDELQQQIKYWQIQLDRHRLKMSKVADSLLSYTEQYLEYDPFLLPPDPSNPWLSDDTTFWELEASKEPSQQRVKRWGFWAWDEGIGKTQLGRRNSFLKIFXEFRISGSGNFKVLGWASGRTLKKRPFKEVPSRVQEIWQEFLAPGAPSAINLDSKSYDKTTQNVKEPGRYTFEDAQEHIYKLMKSDSYPRFIRSSAYQELLQAKKKGKSLTSKRLTSLAQSYLNGSSCSMNADWSHCTHFVAQCCDLEQRTLEQDVA

SEQ ID NO: 38039 - protein, 119 aa, Homo sapiens
  misc_feature (1)...(119): Xaa = X or * as defined in Table 2
MXXXXXXXXXXXXXXXXXXXXXXXXXXXXXXXXXXXXXXXXXXXXXXXXXXXXXXXXXXXXXXXXXXXXXXXXXXXXXXXXXXXXXXXXXXXXXXXXXXXXXXXXXXXXWGKAKGNIFL

SEQ ID NO: 38040 - protein, 51 aa, Homo sapiens
  misc_feature (1)...(51): Xaa = X or * as defined in Table 2
GWQWLHRPPGATQHCGGNLPAEESLPARATNXARPAAHTRGGRGQDLPPGG

SEQ ID NO: 38041 - protein, 112 aa, Homo sapiens
  misc_feature (1)...(112): Xaa = X or * as defined in Table 2
LHCQVHLSLIDLPLLISFLLLLFXDXVSLLLPRLECSGAISSHCSLHLGPGSRDSPASASXVAGITGTCHHVQLIFVFLLETGFHRVSQDGLDLLNLVIRLPRPPKVLGLQA

SEQ ID NO: 38042 - protein, 31 aa, Homo sapiens
  misc_feature (1)...(31): Xaa = X or * as defined in Table 2
XYVFIASIYLLGEKLNHWKWGDMRQPRKKRK

SEQ ID NO: 38043 - protein, 275 aa, Homo sapiens
PTEGRQKVLKTFTVPRSALAMTKTSTCIYHFLVLSWYTFLNYYISQEGKDEVKPKILANGARWKYMTLLNLLLQTIFYGVTCLDDVLKRTKGGKDIKFLTAFRDLLFTTLAFPVSTFVFLAFWILFLYNRDLIYPKVLDTVIPVWLNHAMHTFIFPITLAEVVLRPHSYPSKKTGLTLLAAASIAYISRILWLYFETGTWVYPVFAKLSLLGLAAFFSLSYVFIASIYLLGEKLNHWKWVSVQILQRWRLESVGICFQWPDWKSPAKHQLVKNIR

SEQ ID NO: 38044 - protein, 70 aa, Homo sapiens
MEAGHGQASILWLYFETGTWVYPVFAKLSLLGLAAFFSLSYVFIASIYLLGEKLNHWKWGDMRQPRKKRK

SEQ ID NO: 38045 - protein, 269 aa, Homo sapiens
  misc_feature (1)...(269): Xaa = X or * as defined in Table 2
AEIVAQEVSEEGGKSRKGPQFGKSQYQELIRRSECGLNRGEGESIKANMQQVIYIFPITLAEVVLRPHSYPSKKTGLTLLAAASIAYISRXEWLYFETGTWVYPVFAKLSLLGLAAFFSLSYVFIASIYLLGEKLNHWKWVSVRNSTLILYIRMAKSHTQSPTSLAHMPFCSIKIEMAEVPSSAQSMNWCEKLLVFPPRXCCFLRPRDSVSPPVFAWFILMHFNTRLFQEAFPGQPQILQRWRLESVGICFQWPDWKSPAKHQLVKNIR

SEQ ID NO: 38046 - protein, 120 aa, Homo sapiens
  misc_feature (1)...(120): Xaa = X or * as defined in Table 2
GKAVLPIMRETLGDFHYQIHCCPDLPGTDLGHPGSPDLGEVKFLSQTXEVTSLQVSGKVWRXWTAICTHTSQSLSISLLFCLRSASATSLTLSHCVNVVKGLLDFKKRRGHSIGGAPEQR

SEQ ID NO: 38047 - protein, 255 aa, Homo sapiens
  DOMAIN (199)..(214): G-PROTEIN BETA WD-40 REPEAT SIGNATURE domain identified by eMATRIX, accession number PR00320B, p-value=4.774e-11, raw score of 12.19
  DOMAIN (68)..(212): WD domain, G-beta repeat domain identified by PFam, accession name WD40, E-value=1.9e-13, PFam score of 58.1
MKTVGSWEVVRDYNLQLFLQENAVFHKPQPFQFQPCDSDTKKRGHSLGGAPEQRYQIIPVCVAARLPTRAQDVLDAHLSEVNAVRFGPNSSLLATGGADRLIHLWNVVGSRLEANQTLEGAGGSITSVDFDPSVRNSAPVAWDCALSDLHTGQGYQVLAATYNQAAQLWKVGEAQSKETLSGHKDKVTAAKFKLTRHQAVTGSRDRTVKEWDLGRAYSPKRQRPSRTGHDDDGGFVEKKRGKCGEKRDQIVTVSV

SEQ ID NO: 38048 - protein, 429 aa, Homo sapiens
  DOMAIN (221)..(236): G-PROTEIN BETA WD-40 REPEAT SIGNATURE domain identified by eMATRIX, accession number PR00320B, p-value=4.774e-11, raw score of 12.19
  DOMAIN (109)..(318): WD domain, G-beta repeat domain identified by PFam, accession name WD40, E-value=7.9e-19, PFam score of 76.0
  misc_feature (1)...(429): Xaa = X or * as defined in Table 2
QARVSQELKKAAKRTVSISEGPDTLGDGMRERRETLALAPEPEPLEKEACEKWKRPFRSASATSLTLSHCVDVVKALLDFKKRRGHSIGGAPEQRYQIIPVCVAARLPTRAQDVLDAHLSEVQCCSFGPNSSLLATGGADRLIHLWNVVGSRLEANQTLEGAGGSITSVDFDPFGSNQVLAATYNQAAQLWKVGEAQSKETLSGHKDKVTAAKFKLTRHQAVTGSRDRTVKEWDLGRAYFSRTIQCSFSYCNDVVCGDHIIISGHNDQKIRFWDSRGPHCTQVIPVQGRVTSLSLSHDQLHLLSCSRDNTLKVIDLRVSNTARGFRADGFKCGSDWTKAVFSPDRSYALATLPVMGPFXIWECGTPGKNWKKQELTGTPIALPVQTPWPWCLLPGSPHGETWTQGRKGCAFGSRAHDLPALGWRLLPEA

SEQ ID NO: 38049 - protein, 113 aa, Homo sapiens
  misc_feature (1)...(113): Xaa = X or * as defined in Table 2
DVEVGLISQLQDCELGGCIPLKVFPAVFRLPLSLHTFLPLPLSRTLASGGDGATSASCCRCPGAVSISXLXQTVASPXVLVFVHSRKETGKTARAIRDMCLEKDTLGLFLREG

SEQ ID NO: 38050 - protein, 163 aa, Homo sapiens
  DOMAIN (96)..(135): DEAD-box subfamily ATP-dependent helicases proteins domain identified by eMATRIX, accession number BL00039A, p-value=5.836e- 10, raw score of 18.44
  DOMAIN (107)..(159): DEAD/DEAH box helicase domain identified by PFam, accession name DEAD, E-value=8.1e-13, PFam score of 43.4
MGHRLGVGEDEEPDLTSREERSRRERVRQSRMDTDLETMDLDQGGEALAPRQVLDLEDLVFTQGSHFMANKRCQLPDGSFRRQRKGYEEVHVPALKPKPFGSEEVMFNLVSNSDDNVFVGAPTGSGKTICAEFAILRMLLQSSEGRCVYITPMEALAEQSLVE

SEQ ID NO: 38051 - protein, 141 aa, Homo sapiens
MVGAPPSALLPPCSLISDCCASNQGDSVGIGPSKPACETQLPVSFRHLILPEKYPPPTELLDLQPLPVSALRNSAFESLYQDKFPFFNPIQTQGFGDNWDKQIVSYCPEGRWFLDLKKDDTMAISLFFWFLRFPQQDSFPY

SEQ ID NO: 38052 - protein, 299 aa, Homo sapiens
MVSRPLQAFLPDVVFLPQRLATYGITVAELTGDHQLCKEEISATQIIVCTPEKWDIITRKGGERTYTQLVRLIILKITTKNAFGLHLIDFMSEILKQKDTEPTNFKVAAGTLDASTKIYAGRVDAVHADVYRVLGGAGQRCTVFCFLHCTEKDLIPYLEKLSDSTLKETLLNGVGYLHEGLSPMERRLVEQLFSSAYQRFSKYCLGLLAVNSFDPPKNLVRQMVGHANRPLQDDEGRCVIMCQGSKKDFFKKFLYEPLPVESHLDHCMHDHFNAEIVTKTIENKQDAVDYLTWTFLTAA

SEQ ID NO: 38053 - protein, 608 aa, Homo sapiens
  DOMAIN (107)..(123): PROTEIN TYROSINE PHOSPHATASE SIGNATURE domain identified by eMATRIX, accession number PR00700E, p-value=1.000e-08, raw score of 17.57
  DOMAIN (208)..(284): DEAD/DEAH box helicase domain identified by PFam, accession name DEAD, E-value=2.2e-08, PFam score of 29.3
GFEGAGAQRFPVRVLPANQTSSPGTNPVASVQGQRLPTTWLCPHEGPHGSATEMGTTKKAVKPKKKHLHRTIEQNINNLNVSEADRKCETASDDRECENQLVLLLGFNTFDFIKVLRQHRMMILYCTLLASAQSEAEKERIMGKMEADPELSKFLYQLHETEKEDLIRLLKMAQGHRVETEHYEEIEDYDYNNPNDTSNFCPGLQVYMDWYEKFQDRLNKKVVLLTGETSTDLKLLGKGNIIISTPEKWDILSRRWKQRKNVQNINLFVVDEVHLIGGENGLEPPGELMIPKRRILPPGDIDAFWLQRQLSRFYDDAIVSQKKADEVLEILKTASDDRECENQLVLLLGFNTFDFIKVLRQHRMMILYCTLLASAQSEAEKERIMGKMEADPELSKFLYQLHETEMDFADFGTTIKQDFRLLGQTSVDRLLQLSQGQAVKGNQLLPVSLVKRKTTLAPNTQTASPRALADSLMQLARQVSRLESGQPCLSERLNVWLSAVGPYDPQHAAQRAPARRSRSRRPGSSPPTQYKLLPAQTPVAQRAGAAASPHRVSVRTEAPVGLLGEWRGRGHTLSAARPPWGGKWGTAVPAVSCTQLSSVENRLTRIRV

SEQ ID NO: 38054 - protein, 189 aa, Homo sapiens
MGGSSSALAAMELAQMVTQAMWSKDSYLKQLPHFISEHIKRCTDKGVKSVFDIMEMEDEERNTILQLTDSQITDEVVDKDSIRSGGPAVVLVQLEREEEVTGPVIAPLFPQKREEGWWVVIGDTKSNSLISIKRLILQQKAKVKLDFVAPATGAHNYTLYFMSDAYMGCDQEYKFSMDVKEAETDSDSD

SEQ ID NO: 38055 - protein, 1582 aa, Homo sapiens
  DOMAIN (203)..(250): kw SKI2W SKI2 NUCLEOLAR HELICASE domain identified by eMATRIX, accession number DM01537B, p-value=5.500e-27, raw score of 21.63
  DOMAIN (7)..(961): DEAD/DEAH box helicase domain identified by PFam, accession name DEAD, E-value=6.9e-44, PFam score of 141.7
  misc_feature (1)...(1582): Xaa = X or * as defined in Table 2
EISATQIIVCTPEKWDIITRKGGERTYTQLVRLIILDEIHLLHDDRGPVLEALVARAIRNIEMTQEDVRLIGLSATLPNYEDVATFLRVDPAKVLFYFDNSFRPVPLEQTYVGITEKKAIKRFQIMNEIVYEKIMEHAGKNQVLVFVHSRKETGKTARAIRDMCLEKDTLGLFLREGSASTEVLRTEAEQCKNLXLKDLLPYGFAIHHAGMTRVDRTLVEDLFADKHIQVLVSTATLAWGVNLPXHTALFKGTQVYSPEKGRWTELGALDILQMLGRAGRPQYDTKGEGILITSHGELQYYLSLLNQQLPIESQMVSKLPDMLNAEIVLGNVQNAKDAVNWLGYAYLYIRMLRSPTLYGISHDDLKGDPLLDQRRLDLVHTAALMLDKNNLVKYDKKTGNFQVTELGRIASHYYITNDTVQTYNQLLKPTLSEIELFRVFSLASEFKNITVREGEKLELQKLLERVPIPVKESIEEPSAKINVLLQAFISQLKLEGFALMADMVYVTQSAGRLMRAIFEIVLNRGWAQLTDKTLNLCKMIDKRMWQSMCPLRPFRKLPEEVVKKIEKKNFPFERLYDLNHNEIGELIRMPKMGKTIHKYVHLFPKLELSVHLQPITRSTLKVELDHHGQTFQWDEKVHGSSEAFWILVEDVDSEVILHHEYFLLKAKYAQDEHLITFFVPVFEPLPPQYFIRVVSDRWLSCETQLPVSFRHLILPEKYPPPTELLDLQPLPVSALRNSAFESLYQDKFPFFNPIQTQVFNTVYNSDDNVFVGAPTGSGKTICAEFAILRMLLQSSEGRCVYITPMRPWQSKVYMDWYEKFQDRLNKKVVLLTGETSTDLKLLGKGNIIISTPEKWDILSRRWKQRKNVQNINLFVVDEVHLIGGENGPVLEVICSRMRYISSQIERPIRIVALSSSLFNAKDAAHWLGCSATSTFNFHPNVRPVPLELHIQGFNISHTQTRLVSLAKPVYHAITKHSPKKPVIVFVPSRKQTRLTAIDILTTCAADIQRQRFFAHCTEKDLIPYLEKLSDSTLKETLLNGVGYLHEGLSPMERRLVGAALSASGAIQVVVVASRSLCWGMNVAAHLVIIMDTQYYNGKIHAYVDYPIYDVLQMVGHANRPLQDDEGRCVIMCQGSKKDFFKKFLLLSHLPVESHLDHCMHAHFNAEIVTKTIENKQDAVDYLTWTFLYRRMTQNANYYSLQGISHRHLSDHLSELVEQTLSDLEQSKCISIEDEMDVAPLNLGMIAAYYYINYTTIELFSMSLNAKTKVRGLIEIISNAAEYENIPIRHHEDNLLRQLAQKVPHKLNNPKFNDPHVKTNLLLQAHLSRMQLSAELQSDTEEILSKAIRLIQACVGCPFQQMGWLSPAPGKLWNWAQMVTQAMWSKDFIPXKQLPPFTFXGIFKRCTGQGEWRVFFDIMEMEDEERNALLQADLTARFADVPRFCKLPTPNIETTLRRWWNKDSIRSGGPSVMCLVQLEREEGSHRPLLNAPFLPQKREEGWWVVIGDAKSNSLISIKEADLCQPEGPKGESLDFFGPQPTGLPTNLHSGTFHEVTPXHGDVPQEYKFKRGMXKKPETDSDSD

SEQ ID NO: 38056 - protein, 172 aa, Homo sapiens
AGSAVMLWDPALPRLAVYASCLFFSCGDAHEGPVHGPRGRGEGGRGSERQRVRPGGGGGAGSVHIHLEEEDGAEDQDHRDEDWITQKLTNPESAVHVKMMPEFQKSSVRIKNPTRVEEIICGLIKGGAAKLQIITDFDMTLSRFSYKGKRCPTCHNIIDNCKLVTDECRKKV

SEQ ID NO: 38057 - protein, 362 aa, Homo sapiens
  misc_feature (1)...(362): Xaa = X or * as defined in Table 2
CSGIPRFRDSQSTRAACFFPAWTRMRAPSMDRAAVARVGAVASASVCALVAGVVLAQYIFTLKRKTGRKTKIIEMMPEFQKSSVRIKNPTRVEEIICGLIKGGAAKLQIITDFDMTLSRFSYKGKRCPTCHNIIDNCKRLQMNVEKSYCQLKEKYYAIEVDPVLTVEEKYPYMVEWYTKSHGLLVQQALPKAKLKEIVAESDVMLKEGYENFFDKLQQHSIPVFIFSAGIGDVLEEVIRQAGVYHPNVKVVSNFMDFDETGVLKGFKGELIHVFNKHDGALRNTEYFQSNXKTNSNIILLGDSQGDLRMADGVANVEHILKIGYLNDRSGMSFXEKYMDSYDIVLVQDESLEVANSILQKIL

SEQ ID NO: 38058 - protein, 147 aa, Homo sapiens
  misc_feature (1)...(147): Xaa = X or * as defined in Table 2
PQTPRLKQSYHVSLPSSWWDHPVAGKRAXHAHXFYIMAQLFLPAASPGPTPASQQPLWTQCLPISWRPWSAHSFLKPSSPGPGPTPASQQGLWTQLPRSFQRPWPKSSSSRPGNGPGRAASRPPRAQLRPLGGLSRFNDGHGNFLAQ

SEQ ID NO: 38059 - protein, 155 aa, Homo sapiens
  misc_feature (1)...(155): Xaa = X or * as defined in Table 2
RCPGCPTTASARESREAESRGRGSSGASWGAVQWEEPQPRRLLRGTDDCMIFWAPHGSSTWRRRCVHSRSTAADPVLTPSPASTPSSNCSGSGTSLAALPLPLPQTLGPXQPGWKGTPQPCLNTWGVSITSTGRWATPKIPGLTVPPENMDSMWG

SEQ ID NO: 38060 - protein, 114 aa, Homo sapiens
MASGRGAPLGPAWASRRPSQAQIVPKSGSPGLAPASRRPLQAQGVLKSAWKWAWEEQQVRPPWAQLRPLRAASPGCKTSSSSASPGPSFFLASQWPLSAQPSSWLSAAFPGPRF

SEQ ID NO: 38061 - protein, 104 aa, Homo sapiens
  misc_feature (1)...(104): Xaa = X or * as defined in Table 2
PDLKXSTCLGLPKCWDYRWRATMPGWENIFSSMNHTLNALTGAVTSTRDNSXLHRVSCISSPWCCCLSPCPCRVSAGTGRVPSCLCHSGAWNRLDQDINRNNSC

SEQ ID NO: 38062 - protein, 122 aa, Homo sapiens
  misc_feature (1)...(122): Xaa = X or * as defined in Table 2
FLHTKYLLFCGIKAPHKYFIRSIIFFFFLRQSLYSIAQGGVQWGNLGSLQPPSPGFKQLSCLSLPSSWNYRCAPPCPANFVFLVEMGFHWIKPGXSRNXPRDPPASASQSAGITGVSHHAQP

SEQ ID NO: 38063 - protein, 148 aa, Homo sapiens
  misc_feature (1)...(148): Xaa = X or * as defined in Table 2
MPILFTTVSSALSGAQHIADAQCDRKGHRTTIQGSRVNLVQPSVGPKVEETQCWGPGRGMPGAPEAPRERRVRSGSRSGDPGVAPRAASGVGGRYAITRGRASAAVPCRSGGARRGGAGGQAADCGPGHXKESESRGPEGPAEGSQPL

SEQ ID NO: 38064 - protein, 248 aa, Homo sapiens
  misc_feature (1)...(248): Xaa = X or * as defined in Table 2
GGLIPRAQRESKRRSRGRARAASGVVWALCYHPRQSECCGTLXKWRSSPRRCWRTSGDCGPGHXKESESRGPEGPAEGISASLKMXWFASGTCLSRCLTLRQRKXLKKIKIIWIKKSEKPAEATXSEGQPPFXGPRQTGAEGFXLEPPQPGMSLKLFKVILKGXDSRTKMGDQQPPRVHGRTHGPLQPLTPVKGQGSCPVKGPSPSGIWPXKPLLXCLATLXWQEGTFSLSGLLGPGTPGASVGHKIY

SEQ ID NO: 38065 - protein, 111 aa, Homo sapiens
  DOMAIN (82)..(103): Glyceraldehyde 3-phosphate dehydrogenase proteins domain identified by eMATRIX, accession number BL00071E, p-value=5.333e- 11, raw score of 11.48
  DOMAIN (5)..(111): glyceraldehyde 3-phosphate dehydrogenases domain identified by PFam, accession name gpdh, E-value=3.2e-40, PFam score of 136.9
  misc_feature (1)...(111): Xaa = X or * as defined in Table 2
SYNTHGITFHVPTANVLVVDLMCHLEKLAKYDDIKKMVKQALEGPLKGILDYTEQQVVSSNFTSDTHSFTFDAGAGTAFNNHFFKLIFXYDNEFGYSNRVVELMFHPASKG

SEQ ID NO: 38066 - protein, 257 aa, Homo sapiens
  misc_feature (1)...(257): Xaa = X or * as defined in Table 2
QARRARSRNSRGLSQSAARPLAAKTAWRTVAPPQPWAAAPRXRSSCPHSSCSATSPGPARACQSSAHSPSPRLQAPPPPTSSSGSSVPEAATAPLAASARRGTPRPRTGRPSWAGTRQGSWAGTQRPWVWAPAPAGPPRAAAAAARXGRDKSQLTCPPRHSTPPGSAAGASRHRRRGLAGPAPSPPGCRAARPPWPSAAAALGLGGRGPDLVALHCEIHWPLEFQSLCCCLLTSRGGEASCHPEFHLFMHDFLPGSF

SEQ ID NO: 38067 - protein, 185 aa, Homo sapiens
  misc_feature (1)...(185): Xaa = X or * as defined in Table 2
MQTLFTLLQPSSQTPGIPQPIVCCVYAESGARDSGQPPSKVPVPSFCTPAATQRGXREPGCSHPAGDCSAPQQCSXPGQRISRGDKVLASNTYLPGPPGLPGGQGPPGTWMKVETITQQTNTGTENRVFSLSLYMTISKQYLSEEQGSHWLSCLINALQAFFSNAAIWLVTWFELSRVLDGAEND

SEQ ID NO: 38068 - protein, 179 aa, Homo sapiens
  DOMAIN (28)..(57): Speract receptor repeat proteins domain proteins domain identified by eMATRIX, accession number BL00420A, p-value=3.492e- 09, raw score of 20.42
  DOMAIN (50)..(109): Collagen triple helix repeat (20 copies) domain identified by PFam, accession name Collagen, E-value=0.00045, PFam score of 16.2
  misc_feature (1)...(179): Xaa = X or * as defined in Table 2
LGKYITGDKVLASNTYLPGPPGLPGGQGPPGSPGPKGSPGFPRYAGLLGQPGSRGSIGTHGTISXSGLPTKQGRRGPVGPPGPPERDGSKGERGAPGPRGSPGPPGSFDFLLLMLADIRNDITELQEKVFGHRTHSSAEEFPLPQEFPSYPETMDLGSGDDHPRRTETRDLRAPRDFYP

SEQ ID NO: 38069 - protein, 76 aa, Homo sapiens
IWRPSHQILTFQVSTPVVKQGPVSQSATQQPVTADKQQGHEPVSPRSLQRSSSQRSPSPGPNHTSNSSNASNATVV

SEQ ID NO: 38070 - protein, 301 aa, Homo sapiens
  misc_feature (1)...(301): Xaa = X or * as defined in Table 2
CQGNSPLSGVWPSGDWEDKHSQXCPVVCSPQNILSQTSRHNDRDYRLPRAETHSSSYAQYSTPSNLVVHPTATPSTVPSSPFTLQSDYQPKKSFDANGASTLSKLPTPTSSVPAQKTERKESTSGDKPVSHSCTTPSTSSASATESTTSAPPTSASAGPCFSCSTARQYLPYFRDPNLLRTIAVLLCKATVAALINSXCGTYLKIKXSSYSSCDTSLTAVYNSXVSYCWTICFQHNVSDFSSCSAPTQAQPSNQSPMSLTSDASSPRIICFSKEXGTPQTNTVPIQTFGFSTPPVSSQAKG

SEQ ID NO: 38071 - protein, 455 aa, Homo sapiens
  misc_feature (1)...(455): Xaa = X or * as defined in Table 2
MHLIPPATNCDTLVECCLPGKLTRDLVCTAFTGFGTSYSPQENSHNHSALHSSNSHSSNPSNNPSKTSDANILSQTSRHNDRDYRLPRAETHSSSTPVQHPIKPVVHPTATPSTVPSSPFTLQSDHQPKKSFDANGASTLSKLPTPTSSVPAQKTERKVLQQLSKHNRKVMIRSALITSIILDLLYIEKDLRYQKNIESTSGDKPVSHSCTTPSTSSASGLNPTSAPPTSASAVPVSPVPQSPIPSLTSGPKSSXTIAPALQATLQLNNSNVDISKINEAQPSNQSPMSLTSDASSPRSYVSPRISTPQTNTVPIKPLISTPPCFITAKGXLLQXLSQGTSVHSQPHTAACNCXPSSKSHEPVSPRSLQRSSSQRSPSPGSQFILLNSSNGIQMATVVPQEFFLARFHVFHLTPGTRRPPFQWKISLKHVSRDGPADSWQEEGRASRFTAEGRRH

SEQ ID NO: 38072 - protein, 418 aa, Homo sapiens; identical to SEQ ID NO: 33996
  DOMAIN (112)..(280): Reverse transcriptase domain identified by PFam, accession name rvt, E-value=0.00062, PFam score of -13.7

SEQ ID NO: 38073 - protein, 1141 aa, Homo sapiens
  DOMAIN (798)..(813): Kinesin motor domain proteins domain identified by eMATRIX, accession number BL00411A, p-value=4.977e-09, raw score of 11.31
  misc_feature (1)...(1141): Xaa = X or * as defined in Table 2
XGKPEKFSFGLLDLPFRVGVPFNIPLEFQDEFGHTSQLVTDIQPVLEASGLSLHYEEITNGPNCVIRGVTAKGPVNSCQGKVAPNLPVYVVDCSSSGTSILTGSAIQVQNIKKDQTLKARIEIPSCKDVAPVEKTIKLLPSSHVARLQIFSVEGQKAIQIKHQDEVNWIAGDIMHNLIFQMYDEGEREINITSALAEKIKGLLPDVQVPTSVKDMRYCQVSFQDDHVSLESAFTVSMLELLQLMVSLKTSNLLNNFRPLPDEPKHLKCEMKGGKTVQMGQELQGEVVIIITDQYGNQIQAFSPSSLSSLSIAGVGLDSSNLKTTFQSIPVINGRDLQNPIIVQLCDQWDNPAPVQHVKISLTKASNLKVKAIYNKSIIEGPIIKLMILPDPEKPVRLNVKYDKDASFLAGGLFTGYVRPVPVPRSLNSDISYFGVGGKQAVFFVGQSARMISKPADSQDVHELVLSKEDFEKKEKNKEAIYSGYIRNRKISMFEKGKVPKIVNLREIQDDMQTLYVNTAADSFEFKAHVEGDGVVEGIIPYHPFLYDRETYPDDPCFPSNNFGISFVHSLEVILXLKDEDDEDDCFILEKAARGKRPIFECFWNGRLIPYTSVEDRGLAPIECYNRISGALFTNDKFQVSTNKLTFMDLELKLKDKNTLFTRILNGQEQRMKIDREFALWLKDCHEKYDKQIKFTLFKGVITRPDLPSKKQGPWATYAAIEWDGKIYKAGQLEPQALYDEVRTVPIAKLDRTVAEKAVKKYVEDEMASLWILGYKPVQHMTVLSTAGNCNTTFWKKINITVILRCRSLTKVLLATERTFETAGVGGLILGQVEEARLKEAQLRNELKIHNIDIPTTQQVPHIEALLKRKLSEQEELKKKPRRSCTLPNYTKGSGDVLGKGQSTGLGPVEVTQSSPSSRTSEYFWLTKFCWLEDWASGESLRLLPLMVEGEGEPVYAEIIWQKRDETVKDGVTLYLLQSVNQLLLTATKERIDFLPHYDTLVKSGMYEYYASEGQNPLXIYTHVGDREAQAALKLGRWSHPRTPNAVGAPGPPEGAGGGDAVTSQSALLTFSRTRFASGAHAGAHPVLLRNEEEKGAPALVAPIFSAEGPTCSLWWTLRPASTAGLKLPARRVHATQPERAH

SEQ ID NO: 38074 - protein, 196 aa, Homo sapiens; identical to SEQ ID NO: 35437

SEQ ID NO: 38075 - protein, 186 aa, Homo sapiens
  DOMAIN (1)..(159): Reverse transcriptase domain identified by PFam, accession name rvt, E-value=0.023, PFam score of -36.0
MTVDYRKLNQVVSPIAAAVPDVVLLLEQINTSPDTWYAAIDLANAFFSIPVHKAQQKQFAFSWQGQQYTFTVLPQGYISSLALCHNLIRRDLDGFLLLQNITLLVHYVDDIMLIGSSEQEVANALDLLVFSDHLAIKWVMHSSIASSSGSGICVIRLKKVLKAQPAPMASWGVLYDQLTEEEKIRA

SEQ ID NO: 38076 - protein, 397 aa, Homo sapiens
  misc_feature (1)...(397): Xaa = X or * as defined in Table 2
MEKNDIDQSRRRKVVEMNENVQLVRYGEQASDLKTATKFKSPSEVKHIRFIQQAFIGSKLLMRPWTTVTKQILSLKSAKIALSESLIPCRKRAEFVEKQTQAFIMQVSDLQQKVHAQPSQVSTVKVKALIGKEWDPATWNGDVWEGPDEAGDTEFVNSDEAFLPEATAFPSPEVGNDQTVWGLLDTGSELMLIPGDPKYYRGPPVKVGAYGGQVINRGLAQIQLSMDPVGHRTRPVVSSPLPECIIGTDILSSRQNPHIGSLTDITLVHYIDDIMLIGSSEQEVTITLDLLVQAVAQAALPVGPYDPADPMELKVSVADRDAVWSLWQAPIVTMRPERPIMNWVLSDPSSHKVGCAQQHSIIKWKWYIRDWARSGPEGTNHSRRVCSLHRSRRRQRX

SEQ ID NO: 38077 - protein, 76 aa, Homo sapiens
  misc_feature (1)...(76): Xaa = X or * as defined in Table 2
NSWCRWFNFRYXYPTFYWESXNTXIPLREWFGXNHDASCPXTLDSKSFSFETRTGSPCSSSLQTAYCGTLWIVQGV

SEQ ID NO: 38078 - protein, 157 aa, Homo sapiens
MTPGDLKHHCGLPVKLGAHGSQGYINSPALCHNLIWRDLDRFSLPQDITLVHYIDDIMLTGSSDQEIANTLDLLPALMASWGVPYDQLTEEKKIRACFTDGSASYADNTRKWRAAALQPLSRTSLKDNNEGKSSQWAELRAVHLVVHFEWKEKWPDV

SEQ ID NO: 38079 - protein, 1127 aa, Homo sapiens
MKNIKRNEHERHLATVYVFPILSSTIYRSVLLTSSQTIIYTHVGDREAQAALKLGRWSHPRTPNAVGAPGPPEGAGGGDAVTSQSALLTFSRTRFASGAHAGAHPVLLRNEEEKGAPALVAPIFSAEGPTCSLWWTLRPASTAGLKLPAAASTRPSQRGLTADGGGPGGASVGTEEDGGGVGHRTVYLFDRREKESELGDRPLQVGERSDYAGFRAYETVKDGVTLYLLQSVNQLLLTATKERIDFLPHYDTLVKSGMYEYYASEGQNPLRYVRPVPVPRSLNSDISYFGVGGKQAVFFVGQSARMISKPADSQDVHELVLSKEDFEKKEKNKEAIYSGYIRNRKPSDSVHITNDDERFLHHLIIEEKEKDSFTAVVITGVQPEHIQYLKNYFHLWTRQLAHIYHYYIHGPKGNEIRTSKEVEPFNNIDIEISMFEKGKVPKIVNLREIQDDMQTLYVNTAADSFEFKAHVEGDGVVEGIIRYHPFLYDRETYPDDPCFPSKLKDEDDEDDCFILEKAARGKRPIFECFWNGRLIPYTSVEDFDWCTPPKKRGLAPIECYNRISGALFTNDKFQVSTNKLTFMDLELKLKDKNTLFTRILNGQEWKELSMEGYPLPSPPPQRSCHLPLIGKQLRGHPHLFLKPASFWWVESPASEQMISFSQVRGLKAQHHAEAAKVWDFHPLKPQPKLYVGPFQPWLEWLGTGHQVPRLHTADVKKQQQMAALTKEKDQLSQSIVMYKSLFEASQQLLNEMKCQVEEARLKEAQLRNELKIHNIDIPTTQQVPHIEALLKRKLSEQEELKKKPRRSCTLPNYTKGSGDVLGKIAHLAQIEDDRAAMVISWHLASDMDCVVTLTTDAARRIYDETQGRQQVLPLDSIYKKTLPDWKRSLPHFRNGKLYFKPIGDPVFARDLLTFPDNVEHCETVFGMLLGDTIILDNLDAANHYRKEVIVEVLPNQPVKLVPKIKPPTPAVSNVRSVASRTLVRDLHLSITDDYDNHTGIDLVGTIIATIKGSNEEDTDTPLFIGKVRTLEFPFVNGSAEIMLFDETQGKPAVAVIDNGRGMTSKQLNNWAVYRLSKFTRQGDFERALFAKHSGVESSGVIYQNVLVENILNEDVTGKTKCAKSHQT

SEQ ID NO: 38080 - protein, 111 aa, Homo sapiens
MIRHFRDHWTCSELTLIPGDPKPHCGPPVKVEAYGGQAHQKQFAFSWQGQQYTVTVLPQGYINSLTLCHNLIWRDLGRFSLLQDITLVHYIDDIVLIGSSEQEVANTLDLL

SEQ ID NO: 38081 - protein, 130 aa, Homo sapiens
  DOMAIN (45)..(61): AUXIN BINDING PROTEIN SIGNATURE domain identified by eMATRIX, accession number PR00655E, p-value=9.000e-09, raw score of 8.06
GNCALGKGNDQTFRGLLDTGSELTLIPGDPKHHCDPPVKCAAIDLANAFFSIPVHKAHQKQFAFGWQGQQYTFTVLHQGCMNSLALCHNLIQRELDCFLTPEDITLDHYIDDIMLIGSSEKEVANTLDLL

SEQ ID NO: 38082 - protein, 242 aa, Homo sapiens
  DOMAIN (24)..(35): RNase H domain identified by eMATRIX, accession number PF00075B, p-value=3.077e-09, raw score of 12.56
  DOMAIN (1)..(134): Reverse transcriptase domain identified by PFam, accession name rvt, E-value=0.063, PFam score of -42.2
AVPDVVSLLEQINTSPATWYAAIDLGNAFFSIPVHNTHQKQFAFSWQGQQYIFTILLQVYINSPALCHNLIGRDFDCFLLLQAITLVHYIDDIMLNGSNTLDSWVRNLHARGWKINPTKIQGASTSVKFLGIQWPYDPADPMVLEVLMADRDAVWILWQAPIGESQQRPLGFWSKALPSSADNYSPFERLLLACYWAFVETERLTMGHQVIVRRELPIMNWMLSDSSGHKVGHAQQHHEIEV

SEQ ID NO: 38083 - protein, 115 aa, Homo sapiens
MTVDYCKLNQVVTPIAAVVPDVISLLEQINTFPGTWYAATGLASAFFSISIHKAHKKQFDFNWQGQQYTFTVLPQGHINFPALHHNLIWKDLDCFLLSQDITLVHYIDDIMLIGS

SEQ ID NO: 38084 - protein, 279 aa, Homo sapiens
  DOMAIN (112)..(238): Reverse transcriptase domain identified by PFam, accession name rvt, E-value=0.0011, PFam score of -17.4
CHCGPPVKVEAYGSQVLKGVLAQVQLTVGPVGPRTHPVVIFPVPECIIGIDMLSSRQNPHTGSLTGRVWTIMVRKAKWKPLELPLPRKIVNQKQYHIPEGIVEISATIKDLKDAGVVIPTTSPFNSPIWPVQKTDGSWRMTVGYCKLNQVVTPIAAAVPDVVSLLEQINTPPGTWYAAIDLANDFFPIPVHKAHQKQFAFRWQGRQYTFTVLPQGRWEINMTKIQGPSTSVKFLGVQWCGACQDIPSKVKDKLLHLVPPTTKKEAQCLSGFRREHIPHL

SEQ ID NO: 38085 - protein, 156 aa, Homo sapiens
SDVQCRGKQAVFFVGQSARMISKPADSQDVHELVLSKEDFEKKEKNKEAIYSGYIRNRKPSDSVHITNDDERFLHHLIIEEKEKDSFTAVVITGVQPEHIQYLKNYFHLWTRQLAHIYHYYIHGPKGNEIRTSKEVEPFNNIDIEISMFEKGKVRY

SEQ ID NO: 38086 - protein, 194 aa, Homo sapiens
YPASAGLMLQNFGVIGLRYHFAIHSPAAGGLLDGLHAVAAIQGITKIETTPNHQRAPAHWTLLTQQAHLQPSPLHFNLPLTLCLMHCPTAIPHCFADARTWVNLPTSSLIGHKKENLKEFISGSLIVHEILEEVLQAEGDFQPFTRVTVHWGKGNDQTFRGLLDTGSELTLIPGDPKHHYGPPVKVGAYGAQLL

SEQ ID NO: 38087 - protein, 211 aa, Homo sapiens; identical to SEQ ID NO: 37055
  DOMAIN (42)..(58): AUXIN BINDING PROTEIN SIGNATURE domain identified by eMATRIX, accession number PR00655E, p-value=6.556e-09, raw score of 8.06

SEQ ID NO: 38088 - protein, 476 aa, Homo sapiens
  DOMAIN (163)..(341): Reverse transcriptase domain identified by PFam, accession name rvt, E-value=3e-07, PFam score of 33.2
MWEDPDEAGDTELVNSDEPFLLEETASSSPVVAKSPPQSMLPSAFPPLFEEINSLLPEAIVMASPEAVASQDNVDSPQKPPPILLFASRPITRLKSWQAPRDLTVGTTVTQLQNLNTMGIIGSRGGRGQVAVLNHQRQEKVNQKQYCIPGEKAEIHATIEDLKDTGVMIPTTSPFNSPIWPVQKIDGSWRMTVDYCKLNQAVTSIAAAVPNVVSLLEQINISPGTWYAANLANAFFSIPRSNLPSASKASNIPLLSYLRGISTLWLCVIILFREVLIAFHFHKISALVHYIDDIMLIGSSEQQLANTLDLLVRHLHARGREIHLTKIQGTSTSVKFLGVHWCGACRDIPSKEHIPYWGVLLWPVYQVTRKAASFKWGPKQEKALQWVQAAVQAALPLGPCDPADPMVLEVSVADRNAVWSLWQTPINKTQQMPLRFWSKALPSSADNHSLFERQLLACYWALMKTERLTMGHQVAM

SEQ ID NO: 38089 - protein, 291 aa, Homo sapiens
  DOMAIN (240)..(252): RNase H domain identified by eMATRIX, accession number PF00075C, p-value=9.135e-09, raw score of 11.58
  DOMAIN (143)..(289): Reverse transcriptase domain identified by PFam, accession name rvt, E-value=5.8e-05, PFam score of 0.9
MEGPEHILLTNTLLNRYVKAAPASLKSPLTALLFMSDLTVGTTFSQLQNLNTMGIFGSSCDRSQVAALNHQRQVPECKIVIDILNIWRIPHIGSLTGRVREIMVGKAKWKPLEQPPPRKIVIQKQYHIPGAITEISATIEDLKETGVVILTTSPFKSSIWPLQKTDGSWRMTVNYHKLNQVETPIAAAVPDVVSLLEQINTSPGTWYAAIDLVNVFFSIPVYKAHQKQFAFSWQGQQYTFTFLPQGYINSPALCHNLIGRDFDCFLLLQAITLVHYIDDIMLNGSNTLDSW

SEQ ID NO: 38090 - protein, 199 aa, Homo sapiens
  misc_feature (1)...(199): Xaa = X or * as defined in Table 2
MVVVFLHKCLHYFHSTQLVISRYNSPTSEYFQALDLTWRALGTVGSAPPILPDLGGTNRRQPFPILSHSGLHRNVLQPETDSQSEDRLPVTWLAVSACCQQQMVGGNPTRSKLXRTGSHYHLPGWEPXRPHFPHAGSLAWQWLLCSSLEHSFGAXELPCNPCKGWCLCPCHFIFYIFFNSFLSNCPIQLCNWHSSYFII

SEQ ID NO: 38091 - protein, 1059 aa, Homo sapiens
  DOMAIN (425)..(604): Reverse transcriptase domain identified by PFam, accession name rvt, E-value=3.9e-23, PFam score of 90.3
  misc_feature (1)...(1059): Xaa = X or * as defined in Table 2
MAEGKEEQVLSYTDGSRQRENEEDAKAETPDKTIRSHETYSLPREWYEGNRPHDSITSQWVPPTTRGNYGSTIQDEIWVGDHSGYVRPVPVPRSLNSDISYFGVGGKQAVFFVGQSARMISKPADSQDVHELVLSKEDFEKKEKNKEAIYSGYIRNRKDDYDNHTGIDLVGTIIATIKGSNEEDTDTPLFIGKVRTLEFPFVNGSAEIMLMPSNQQHKTDEKGRANLGVFSVFAPRGEHTLQVKAIYNKSIIEGPIIKLMILPDPEKPVRLNVKYDKDASFLAGGLFTAPPLPAQLMSSLSCAWIIESVLNSWRKGCNKLRNQRALHKKQDRGKLPEDRELQHTKKQTNWAGLLIPAMNNNVDMTARKLQRDLQPFTSVTVHCRKGNDQTFGGPLDAGSELTLIPGDPKHHCGPPVKVGAYGGQVINGVLAHPLIWLVQKTDGSWRMTVDYCKLNQVVIPIAAAVSDVVSLLEQINTSPGTWYAAIDLANAFFSIPVHKAQQKQFAFSWQGQQYTFTVLPQWYINSPALCHNLIRRDLDCFSLPLDITLVHYIDDIMLIGSSEQEVANTLDLFVRHLRARGWEINPTKIQGPSTSVKFLGFQWCGACQAIPSKMRDKLLHLVPPTTKKEAQCLQLLACYWALVETEHLTISHQVTMRPELPIMNWVLFDPSSHKVGCAQQHSIIKWKWYVHDWARAGPEGTTHPCHFPMAPXTMWPWWQGWRLCMGSAMXTSTHXGXPEYSHRXAPNLPTAETNTEPSIWHHSSGXSTSYLVVGXLYGISSIMERAEVCPHWNRYLLWIWVCLSCMQCFCQDCHLWTHGMPYPPSXYPTQHCLXPRHSLYGXRSAAVGSXSWNSLVLPCFPSSXSSWIDRMVEWPFEVTITVSTRXQYLAGLGQSSPEGRVCSESASNIWYCFSHSQDSQVQESRARSGTTHHHPXGSTSKIFASFSCNITVCWPRGLSSRGRNAATRRHNDSIKLEVKIATQTLWAPPTFKSTGXEGSYSVGWGDXPGLXRXNHSPTPXWRXGRVCMEYRRSIRASLNITMPYDXGQWETTTAQARSS

SEQ ID NO: 38092 - protein, 417 aa, Homo sapiens
  DOMAIN (278)..(294): AUXIN BINDING PROTEIN SIGNATURE domain identified by eMATRIX, accession number PR00655E, p-value=7.222e-09, raw score of 8.06
  DOMAIN (203)..(397): Reverse transcriptase domain identified by PFam, accession name rvt, E-value=1.8e-08, PFam score of 41.6
VRVLSPVEKELKLWKNTHKLLSYPTVGAAVTQLQNLTAMGVIGSHGARGQVVALNRQRQGDLQPFTRVTVHWGKGNMQIFGGLLDTGSELTLIPGDPKHHCGPPVKVGAYGGQVINGVLAQVQITVGPQTHPVVISPVPECIIGIDILSSWQNPHIGSLTGRVRAIMVGKAKWKPLELPLPRKIVNQKQYCIPGGTEEISATIKELKDAGEVIPIPTTFPLNSPIWPVRKTDGCWRMTVDYCELNQVVTPTAATVPDVVSLLEQINTSPGTWYADIDLANAVFSIPVHKAHQKQFAFSWQGQQYTFTVLPQEYINSLGLCHNLIWRDLDGFLLLQNITLLVHYVDDIMLIGSSEQEVANALDLLVSMASSRVPYDQLTEEEKARFTDGSARYAGTTRKWTAAALQPLSRISLKDSGE

SEQ ID NO: 38093 - protein, 609 aa, Homo sapiens
  DOMAIN (328)..(380): ELEMENT TRANSPOSABLE INSERTION PROTEIN TRANSPOSITION DNA domain identified by eMATRIX, accession number PD02455C, p-value= 2.350e-09, raw score of 29.23
  DOMAIN (264)..(419): Integrase core domain identified by PFam, accession name rve, E-value=4.3e-30, PFam score of 108.1
  misc_feature (1)...(609): Xaa = X or * as defined in Table 2
RGYVFCSWKKTDGSWRMTVDYCKLNQVVIPIAAAVSDVVSLLEQINTSPGTWYAAIDLANAFFSIPVHKAQQKQFAFSWQGQQYTFTVLPQWYINSPALCHNLIRRDLDCFSLPLDITLVHYIDDIMLIGPRQLLACYWALVETECLTLGHQVTIXPELPIMNWVLSDPSSHKVGHEQQHSIIKWKWYVHDWARAGPEGTTTPVISQWPHEQCGHGGRDGGYAWAQQCRLPLTKADLNTATAKRPICQQQRPTLSPQYGTIPQGDQPATWWWVDYMGSLPSWKGQRFVLTGIDTYSGYGFAYPACNASAKTAICGLTECLIHHHDIPHSIASDQGTHFMAKEVRQWAHDHGIHWSYHVSHHPEAAGLIEWWNGLLKSQLQCQLGDNTWQGWGKVLQKVVYALNQHPIYGTVSPIAKIHRSRNQGLEVAPLTITPRDPLAKFLLPFPATLQSAGLEVLVPEEGTLPPGDTMIPLNWKLRLPPRHFGLLLPLNQQAKKGVTVLAGVTDLDYKDEITLLLHNGGKEEYAWNTGDPLGLLLILPCPMIKVNGKLQQLKPEALVPKGVVFPPGDTTMLSLSWKLRLPSGHVGLLMPLSQQVQKGVTVLAGVIDP

SEQ ID NO: 38094 - protein, 39 aa, Homo sapiens
SYWLFTLPGCKPLQGRGLSRVQCCIPAAGHGTWSMAFNK

SEQ ID NO: 38095 - protein, 183 aa, Homo sapiens
  misc_feature (1)...(183): Xaa = X or * as defined in Table 2
RWGSHTVAQAGVQWCDHGSLQPRSPGVKXSSHLSLLGSWNHRHATTTPGXFCFFSRIRSHCVAQAGLXLLTSNHPPALASQTVGITGVSHWTWPNTGFSVLTATNKNLKFFHYAISKCLVRAKLSSRLLKIEERNKALSAPVVSVSIFDRVLRLLGYSASDWQPEFVETAVSNFVIYGIFRGQ

SEQ ID NO: 38096 - protein, 223 aa, Homo sapiens
  DOMAIN (49)..(71): WAP-type 'four-disulfide core' domain proteins domain identified by eMATRIX, accession number BL00317B, p-value=9.167e- 15, raw score of 14.58
  DOMAIN (32)..(73): WAP-type (Whey Acidic Protein) 'four-disulfi domain identified by PFam, accession name wap, E-value=2.3e-06, PFam score of 34.6
  misc_feature (1)...(223): Xaa = X or * as defined in Table 2
MPACRLGLLATALIISLLLFGFTIVSGTGAEKTGVCPELQADQNCTQECVSDSECADNLKCCSAGCATFCSLPNGQLAEXFEESEESSLDTVSPFVVFQSISSTLRIEXARAGDSSQDKEGSCPPGVTIXLFPSSGLCRDQVPGGTAQCPGQMKCCRNGCGKVSCVTAQFLSSSHHQAEQVRRDSFLPGPASGFQAHLPSPFFGTLYSLFGLTTSFSLSQPIK

SEQ ID NO: 38097 - protein, 656 aa, Homo sapiens
  misc_feature (1)...(656): Xaa = X or * as defined in Table 2
MAVNGCLEGPSSNFLSCLFIVALVGSESTHPLCLEQPATQETRYQLLQLRPAQRASWIGYAIAYHLLEDYEMAAKILEEFRKTQQTSPDKVDYEYSELLLYQNQVLREAGLYREALEHLCTYEKQICDKLAVEETKGELLLQLCRLEDAADVYRGLQERNPENWAYYKGLEKALKPANMLERLKIYEEAWTKYPRGLVPRRLPLNFLSGEKFKECLDKFLRMNFSKGCPPVFNTLRSLYQDKEKCAIIEKLVVGYETSLKSCRLFNPNDDGKEEPPTTLLWVQYYLAQHYDKIGQPSIALEYINTAIESTPTLIELFLVKAKIYKHAGNIKEAARWMDEAQALDTADRFINSQCAKYMLKANLIKEAEDMSSKFTRGGTSAVENLNEIQCMWFHTECAQAYKAMNKFGEALQKCHEIERHFIEITDDQFDFHTYCMRKITLRSYVDLLKLEDVLRQHPFYFKEQARIAIEIYLKASXQPPYRXGIKGTRRLDTAKLSDKELKKLRNKQRRAQKKAQIEEEKKNAEKEKQQRNQKKKKDDDDEEIGGPKEELIPEKLAKVETPLEEAIKFLTPLKNLVKNKIETHLFAFEIYFRKAAKMVYYLDPSSQKRAIELATTLDESLTNRNLQTCMEVLEALYDGSLGDCKEAAEIYRANCP

SEQ ID NO: 38098 - protein, 69 aa, Homo sapiens
  DOMAIN (7)..(58): Neuromodulin (GAP-43) proteins domain identified by eMATRIX, accession number BL00412D, p-value=4.575e-15, raw score of 16.54
  misc_feature (1)...(69): Xaa = X or * as defined in Table 2
HRAAPATSDTQEXHRSNAFGEEEEEEEEEEEEEEEEEEEEEEEEEEEEEEEEEEEEEEEEEEETLFSNM

SEQ ID NO: 38099 - protein, 227 aa, Homo sapiens; identical to SEQ ID NO: 37326
  DOMAIN (167)..(219): Ubiquitin domain proteins domain identified by eMATRIX, accession number BL00299, p-value=5.424e-15, raw score of 28.84
  DOMAIN (70)..(227): Ubiquitin family domain identified by PFam, accession name ubiquitin, E-value=9.2e-29, PFam score of 93.5

SEQ ID NO: 38100 - protein, 92 aa, Homo sapiens
HGILLYSKLFFHYYRFRGHMCKVVCHLNHSCVDFCNLLNLGKSFDVIDKSLECLLADAIYILLGDITPSSCCGLHLKLLMFNCYNPAEQLMM

SEQ ID NO: 38101 - protein, 502 aa, Homo sapiens
  DOMAIN (63)..(108): RIBOSOMAL PROTEIN 40S ZINC-FINGER METAL domain identified by eMATRIX, accession number PD01457A, p-value=6.382e-12, raw score of 16.51
MVRPFLYKKIKEEEEEEEEEEEEEEEEGEEEEEEEEEEEEEEEEEEDKDDEEERRRKKKKKKKKKKKKKRKKKKKKRKKKKKKKKKNILYRIQIWERKKTKDKGKENLPVGLPSHPFHLEAPIPWALDNSLRSWRSDTWTLIHQQRLSDTNQAASQSTEVATLLITTEALMSLGVPLEEQMDPQPHCFAPHQLLPHAGPNALLSTQWTLHEHLLLDPFSLANAAIRLDSPKRLCAPFPLLVLEDCTVNTISTGLTRITCQTLDKASKDSLQASHNETLSICSLPLTWPHSEKAERNPQCGKKHCLKTPAHSTASWGTKPLQRINNSKTLEEGGGGEGRGEEGEEEGEREAEGEGEGEGEGEGEGKGEGEVGEGEGGENYPTVFCSGYTIPNSNDINLSSCSTRGTQSLKAMTNDSTVAQTEEMGQKKNCGKEDVAKRTNSRWTCIPECGDHLGNTKGQARSIPLFLGMYVPGTNYCQRMCVEVMVSLPGSKCGSPISLLLAG

SEQ ID NO: 38102 - protein, 259 aa, Homo sapiens
  misc_feature (1)...(259): Xaa = X or * as defined in Table 2
MPVDHPPIKAFSEKRTSQSVNMLAKTHPYNPLWAQLEWFKLLEISPKSPINTDKFLLKRLSVPGSDSCRVRMENVLASQVLHPGQLMMXEGSGWAEARITVCSXAANPXKWHPASLPLPWXCRVRMENVLASQVLHPGHADDVGGKWLGRSKDHRAPEQQTRESGIRLPSLFPGSAEQPWRGNAQWHLSWKALRGVFGMIPDSLLYEFHQSAKKSSHFKPPQPLLYWTLVNFLIPFSLHSSTWFMWSSNQGIMCKEEVL

SEQ ID NO: 38103 - protein, 1605 aa, Homo sapiens
  DOMAIN (292)..(335): 1 kw MIND INHIBITOR DIVISION CONTROL domain identified by eMATRIX, accession number DM01756B, p-value=4.822e-15, raw score of 22.91
  DOMAIN (257)..(371): ParA family ATPase domain identified by PFam, accession name ParA, E-value=6.4e-29, PFam score of 109.5
  misc_feature (1)...(1605): Xaa = X or * as defined in Table 2
TQNRRACSPDTEQLARQSGTYPVSLGQATVLEDSKAALPGLGPTLMAVTVVTTEAAVAIGCEAAHSSREDFTNHQLWRRTVEGKKGEGKNKFMSGGVNTTVPLLKTSRKGSPDSPHLREKPSLEKVTFQIGSFASPESDFESRMKKMEERVKACGPSLEASEAADVAQDPQVSRSPFKPGFQENVCCPQNRLSEGDEGESDKGFAEDRGSRNDMAADIAGQLSHAADLGTASHDDVTYAIKPTCWPGLDIIPSCLALHRIETELMGKFDEGKLPTDPHLMLRLAIETVADDYDVIVIDSAPNLGIGTINVVCAADVLIVPTPAELFDYTSALQFFDMLRDLLKNVDLKGFEPDVRILLTKYSNSNGSQSPWMEEQIRDAWGSMVLKNVVRETDEVGKGQIRMRTVFEQAIDQRSSTGDLYGAIGSPVRLTRTVVVGKQKDLVQRILYVLTYFLRCSELQENQLTWSGIMVSVFVWPKLCQLDAPSLGIPCDLYGAVGSPVRLTRTVVVGKQKDLVQRILYVLTYFLRCSELQEIPADREWQSWXRXPPHWNSTTVLVGKSASRVWLCHPRRKASWMLDSGQLRSPKQKGSSHLREHYGTTASSCGLSLLVDGFGVKSLQIPRGTIWNLYSVPRIAEPVWLTMMSGTLEKNQLCQRFLKEFTLLIEQINKNQFFAALLTAVLTYHLAWVPTVMPVDHPPIKAFSEKRTSQSVNMLAKTHPYNPLWAQLGKSPSSNFLSKILGKNYLVQRPLRNEDLGFGEFKPWSSRMATQVQLYWGPAHRCVQRAPGLVLFTNIPCGDDNKRANFRTEGDIPRNESSDSALGDSDDEACASAMLDLGHGGKSPEVPRKRSCLCQEKVRGWQQMLHKYNFDIDTPCGLSPADQSSICLKEHLRNTASSCGLSLLVDGVRGQEAANPKHPVLDEPIAEAVCIIADTDKWSVQVATSQRKVTDNMKLGQDVLVSSQVSSLLQSILQLYKLHLPADFPPRMGSEERLRPAAAPSGREVRGSPRTASRPVREGAQFLTGYTSTAQGMGTPVLVHLDCSNKIPYTEWLISNRNLEDGKFRIKAPADLVSRFCRFRNHHQTAFSPAGANQRVPLAATLSGPGGEGQSAVARLTGEKKNHPGAQYANRLSPRVGRFINAAGTTGFPTGKRAVSATQLMDFADFGTTIKQDFRLLGQYQRGPLAATLSGPGGEGQSAVARLTGEKKNHPGAQYANRLSPRVGRFINAAGTTGFPTGKRARLSSAKGQTASSSGSLTPVYPDWETPPSRGRQNLIQESSGWNLVGAPLGRSFQRKEQAAIFAVLQPPLVIPRQTGSVVDLQQTTADLQQTGLLEGKLTSRKQPHQHQQKGRPLRDPIRRSPTITAPHQQGNKTGWRIEFDELTEVGFRRWVITNSSELKKHVLTQCKEAKNLEKRHSLGTKEPAALKGRTQYWQDSSPADLRPWLCATLLKQYKPTVFSHSTVAVHPRAGFLNLSTVDQHPVLDEPIAEAVCIIADTNKWSVQVATSQRKVPHNLKLGQDVLVSSQVSSLLQSILQLYKLHLPADFVGDILLDNNLKCVFQLGSILPVTFRSHDPYDGEGTDELRTAGLAAQTPSNWPGSQAHTQ

SEQ ID NO: 38104 - protein, 599 aa, Homo sapiens
  misc_feature (1)...(599): Xaa = X or * as defined in Table 2
MAEKEAGMSYMVAEVLGFVAVIIEAESLKRIRFFENFTVAEERSTDETFSLAEETCSSNPAMVRRKKIAISIIFSLCEKEEAQRNFQDFFFSHFPLFESHMNRLKSAIEKAMISCRKIAESSLRVQFYVSRLMEALGEFRGTIWNLYSVPRIAEPVWLTMMSGTLEKNQLCQRFLKEFTLLIEQINKNQFFAALLTAVLTYHLAWVPTVMPVDHPPIKAFSEKRTSQSVNMLAKTHPYNPLWAQLGDLYGAIGSPVRLTRTVVVGKQKDLVQRILYVLTYFLRCSELQEIPADLEWQSWXRXPAMVRRKKIAISIIFSLCEKEEAQRNFQDFFFSHFPLFESHMNRLKSAIEKAMISCRKIAESSLRVQFYVSRLMEALGEFRGTIWNLYSVPRIAEPVWLTMMSGTLEKNQLCQRFLKEFTLLIEQINKNQFFAALLTAVLTYHLAWVPTVMPVDHPPIKAFSEKRTSQSVNMLAKTHPYNPLWAQLGDLYGAIGSPVRLTRTVVVGKQKDLVQRILYVLTYFLRCSELQENQLTWSGNHGEGDQVLNGSKIITALEKGEVEESEYVVITVRNEPALVPPHPTTNSSRETQPLADRVS

SEQ ID NO: 38105 - protein, 91 aa, Homo sapiens
  misc_feature (1)...(91): Xaa = X or * as defined in Table 2
FSLSNLVQFFRVCNDHLYTKLHFCFLQAEVKASNFCIYDSLGHALGSHHTVECIATDEHTLHLTSPMGXSQGKQFLHLRFSWACPGIPPHS

SEQ ID NO: 38106 - protein, 182 aa, Homo sapiens
  misc_feature (1)...(182): Xaa = X or * as defined in Table 2
MQPELPIMNWVLSEPSSHKVGHGQQHSIIKWRWYICDWAVVGRESTTNGLAGWSGTWKKHDWKINDNEIWGKSMWIDLSEWSKTVKIFVSHESAHHITXKSSAEEDFNNQWDGMTCSVDTTHPLSLTTSVIAKWAHEQSDHGGRYGGYAGAQQHGLPLTKADLAMTTAECPICQQQRPSLSP

SEQ ID NO: 38107 - protein, 261 aa, Homo sapiens
MTKIQEPSTSVKFLGVQWSGAYQDIPSKVKDKLLHLAPPTTTKEAYLGLFGFWRQHIPHLGTEQEKTLQHVQAAVQVALFLEPYDPADPMVLEVSVADRDAIWSLWQAPISESQWRPQGFWSKALPSSAANYSPFERQLLAYYWALVETEHLTMGHQVTKQPELPIMNWVLSDPSSHKVGCAQQHSIIKWKWYICDRARAGPEGTTTPVITQWAHEQSGHGGRDGGYTWAQQQGLPLTKADLATATAECPICQQQRPTLSP

SEQ ID NO: 38108 - protein, 55 aa, Homo sapiens
SLKHKKTNKKPPVKYTIMIIDVLSIKSCVFKMKNTQPGTNIHISICDLLHWHEFW

SEQ ID NO: 38109 - protein, 704 aa, Homo sapiens
  DOMAIN (497)..(540): Chaperonins TCP-1 proteins domain identified by eMATRIX, accession number BL00750A, p-value=6.625e-23, raw score of 20.07
  DOMAIN (504)..(652): TCP-1/cpn60 chaperonin family domain identified by PFam, accession name cpn60_TCP1, E-value=8.7e-33, PFam score of 122.4
MDTLLDSEDIEQFHHRRKFCLDSTALGYNRWGLSAEVKPYQLALPTPDVTDQNDGMFQAVFDVDKKKGLTLIELWEGLTVDDVQKSTGCDFAKKDRSWRMKVVYHMLNQVVTPVAAAVSDEVSLLEQINTSGTWYVATDLENAFSSIPVITATRSNLPSAGKASNILLLSYLRDISTLQPTPMTSWGVPCDQLTRKIRLGLSPQMVLHDMQAPPETTPVIAQWAHEQSGHSGRDGGYAWAQQHGLPLTKADLAIATAECPICQQQRPTLGPRYGIIPRVDQPDSWWQVDYIWALPSWKGQRFVLSGMDTYSGYRFAYPACNASAKTTICELMECLIHCHGIPHSIASDQGTHFTAKEVWQWAHTHGIHQSYQDSHHPEAAGLIEWWNGLLKSQLQHQLGDNTLQGWGKVLQKAMYALNWHPIYARIHGSRNQRVEVEVAPLTINPSDPLAKFLLPVPATLHSAGLEVLVPEGRTMPPGAGDMRMIQLNWKIATWTLLGPPTSSIANTVKSSLGPVGLDKMLVDDVGDVTITNDGAAILRLPEVVITDPEKLDQIRQKESDIIKERIPKILATDANIILIAGGIDDMCQKVGAMAIRRALKRDLKCIAETSGGTVLSTLANLKGEETFETAVSGQVEEVVQERICDDELILIKTMKKVLESKSMMLVGDAVEAAFSIYPENCETSMESQEQLAIAESARPLPVIH

SEQ ID NO: 38110 - protein, 82 aa, Homo sapiens
SFRLQMTIENMNHLKFIPHKDYTANRLADCQIHLQPQLIPPNMEEYMNSLLSAVLPSVLNKFRIYLTLLRFLEYSISDEITK

SEQ ID NO: 38111 - protein, 429 aa, Homo sapiens
  misc_feature (1)...(429): Xaa = X or * as defined in Table 2
MAAAACLDASGEARPGLRPPWSQQGRKQAGALPPTKLAGLLAQLQPAEAPDLGIPVLSATREDPLSPQARKCLLPLPGLSPCSQHLLWCRASCGRAWGPSRPSRVCTGLDTAVTPAPCRLSPLWTSGADKRGREASRGEGSSKWACRHPSAQTAWAVEGDRHRFLSRKGQITGKTPPSSQGQPEAWGLSCSCPHTLHTSFFLDTGPLNGGTEKAVTQTGPKHAPCSPGCGQQGGKGCGPSGTPDLGALRARAVTVGLCSSWHLQASGHHCIPQYLQQKLLVVHLVQPQPCTKPVPVPSFRLQMTIENMNHLKFIPHKDYTANRLVSGLLQLPSNTSLVIDETLLEQGQLDTPGVHNVTALSNLITWQKVDYDFSYHQMEFPCNIKVFITSEGRSLLPADVPDSLTAPANSTKHGGSTXTAFSQRCCLPC

SEQ ID NO: 38112 - protein, 851 aa, Homo sapiens
  DOMAIN (48)..(65): Zinc finger C2H2 type, domain proteins. domain identified by eMATRIX, accession number BL00028, p-value=2.059e-14, raw score of 16.07
  DOMAIN (18)..(805): Zinc finger, C2H2 type domain identified by PFam, accession name zf-C2H2, E-value=4e-144, PFam score of 492.2
  misc_feature (1)...(851): Xaa = X or * as defined in Table 2
MPSHLNQHQIIHTKEKSYKCEECGKSFKRSSNCTTHKRIHTGEKPYRCEECGKAFRWPSNLTRHKRIHTGEKPYTCEECGQAFRRSSTLTNHKRIHTGERPYKCEECGKAFSVSSTLNDHKRIHTGEKPYTCEECGRAFNCSSTLKTHKRIHTGEKPYKCEECDKAFKRHSSLAKHKIIHTGEKPYKTGSCILLQRYCWSTTXTIHFKKXSXENPGSCDLNTLRLKKDYQRVGNCKGQKSSYNGIHQCLSATRSKTCQYNKCGKAFGLCSIFTEHKKIFSREKCYKCEECGKDCRLSDFTIQKRIHTADRSYKCEECGKACKKFSNLTEHNRVHTGKKPYKCEECGKTFTCSSALTKHKRNHTGDRPYKCEECHKAFRWCSDLTKHKRIHTGEKPYKCKECHKAFRCCSDLTKHKRIHTGEKPYKCNECGKAFMWISALSQHNRIHTGEKPYICEECGKAFTYSSTLISHKRIHMELRPYKCEECGKTFKWFSDLTNHKRIHTGEKPYKCEECGKSFTCSSNLIKHKRIHMEVRPYKCEECGKTFKWFPDLTNHKRIHTGEKPYKCEECGKTFTCSSSLIKHKRSHTGDRPYKCKECGKAFRWFSALLNISKHKRIHTGEKPYICEECGKAFIRSSTLTSHKRIHMEERPYKCEECGKTCIIHIGEKPYKCNECGKGFMWISALRKHKRIHTGETPYIHEECGKAFTYSSILINHKRIHMEEGPYKCEECGKTFMWLSDFTNHKRIHPGEKPYKCEECGKVLSSFSHAIRHKTIHSREKLHKCXKCGKAFNNSSYCVQHQRLTTEQMXYKGYYDVCNEDEYNGAICFXILNNYLQNFILLFSVENMTSLVC

SEQ ID NO: 38113 - protein, 83 aa, Homo sapiens
TEEHLYSPHWKGCGRKVKRLFQVRRGRGWIQTRQPGSMVKEPPLSEAGAESHVSCRQGDCSRPPSFPLSPERVTPWLPDSHTW

SEQ ID NO: 38114 - protein, 461 aa, Homo sapiens
  DOMAIN (351)..(406): Domain present in ZO-1 and Unc5-like netrin receptors domain identified by eMATRIX, accession number PF00791B, p-value=3.394e- 09, raw score of 28.49
  DOMAIN (278)..(418): Ank repeat domain identified by PFam, accession name ank, E- value=2.4e-14, PFam score of 61.1
  misc_feature (1)...(461): Xaa = X or * as defined in Table 2
AAAERELELLRASLEHQRGVSELLRGRLRELEEAREAAEEAAAGARAQLREATTQTPWSCAEKAAQTESPAEGPPXLRRARPDPWTETRAVAPAGILKSIMKKRDGTPGAQPSSGPKSLQFVGVLNGEYESSSSEDTNDSDGDSENGGAEPPGSSSGSGDDSGGGSDSGTPGPPSGGDIRDPEPEAEAEPQQVAQGRCELSPRLREACVALQRQLSRPRGVASDGGAVRLVAQEWFRVSSQRRSQAEPVARMLEGVRRLGPELLAHVVNLADGNGNTALHYSVSHGNLAIASLLLDTGACEVNRQNRAGYSALMLAALTSVRQEEEDMAVVQRLFCMGDVNAKASQTGQTALMLAISHGRQDMVATLLACGADVNAQDADGATALMCASEYGRLDTVRLLLTQPGCDPSILDNEGTSALAIALEAETGMKVAALLHAHLSSGHPDTQSGVTPLAPQTANTW

SEQ ID NO: 38115 - protein, 135 aa, Homo sapiens
RPALLRCPDNSDPLTSMKDVLKITTCVEMLIKEQMRKYKVKMEEISQLEAAESIAFRRLSLLRQNANKSPKTRDIQEEELEVLLEEEAAGGDEDREKEILIERIQSIKDEKEDITYRLPELDPRGSDEENLDSET

SEQ ID NO: 38116 - protein, 36 aa, Homo sapiens
  misc_feature (1)...(36): Xaa = X or * as defined in Table 2
MLQGEKLTSSSEKALANQFLAPGVXPTTARERVPCQ

SEQ ID NO: 38117 - protein, 391 aa, Homo sapiens
  DOMAIN (150)..(186): Transposases IS30 family, proteins. domain identified by eMATRIX, accession number BL01043A, p-value=8.457e-31, raw score of 21.20
MNKSPKTRDIQEEELEVLLEEEAAGGDEDREKEILIERIQSIKEEKQKGLGLAAGWTADVSSRRPGASQLPPPPTHPIPQYRGWGPPDQHLLSTLWTNVGSYKSGSFLQLGGWCMNLDMDLNSEESRWLFRRHWDTGGIKPHERKRAVAHLTLSEREEIRAGLSAKMSIRAIATALNRSPSTISREVQRNRGRRYYKAVDANNRANRMAKRPKPCLLDQNLPLRKLVLEKLEMKWSPEQISGWLRRTKPRQKTLRISPETIYKTLYFRSREALNHLNIQASCEVALALAWRALYTGMAREVPLPFGPGTHFGWFPNFCKEGSGAVGGASLAAKRLFPLVCDRRLILLRGDALSPTRVDTSYCAVNTTCGRGSGALYDGESVNGLFLFLFLE

SEQ ID NO: 38118 - protein, 135 aa, Homo sapiens
  misc_feature (1)...(135): Xaa = X or * as defined in Table 2
LQMHRLCGGHSLSGCGWHTARGQELVGQCFLXGGGQLLGLQHPLAENPTFQEYSLITSEAGLLEGRKKKNKTSRGPSGPATCPLGLPRTSPGATRPGPVSHAAIASQRDSSRTRFSSSLDAAIIARPYTTPSATK

SEQ ID NO: 38119 - protein, 986 aa, Homo sapiens
  DOMAIN (45)..(91): Myosin head (motor domain) domain identified by PFam, accession name myosin_head, E-value=0.0056, PFam score of 11.9
  misc_feature (1)...(986): Xaa = X or * as defined in Table 2
MAASRLELNLVRLLSRCEAMAAEKRDPDEWRLEKVGVTYSVASGRVLFQDFTEQFQVLLPKDAQPCREVISTLLEKMKIDKRNYQIGKTKVEPGVEAWPLRRVRRQPDQRQGLGAHRAGEAPGTRGDARPVHRGPLPQVGCCQPHSGAPAGAADRPRSSQAGELPHPRHHRGAEAVAAGAARAPHDLRTVRRLPPSRRAAGEAGAAGCHRMPSWSTFQKPTTTPWRDSSSTLSSNHPLTASGCAGWPCSRMSTGMSPGALAIIFAPCLLRCPDNSDPLTSMKDVLKITTPWRGDAHGTCPPLAPSGQQHRHAAGEKRTKEPGGKGKKNRNVKIGKITVSEKWRESVFRQITNANELKYLDEFLLNKINDLRSQKTPIESLFIEATEKFRSNIKTMYSVPNGKIHVGYKDLMENYQIVVSNLATERGQKDTNLVLNLFQSLLDEFTRGYTKNDFEPVKQSKAQKKKRKQERANDIPLVPQARWYITGSNLVSDLFGFWNIPRSVARLCSPLALQCAPDTWLCRRMMLCFWCRTASRPGCVTAARFICRKCRRSSTIRNQLCSSRICPHHLPVQRLLQGLPLRLLQEDLAWLRAAGYLSVRGTIPRTSYVSXGLSTRTSRLPLSSLPVFLPHFXXALWTGAPPPPTLKXKPLXNYSSGAGXNEPRDRGGRCAAHLPGGRFHARMSSLGRSTVCAPGPGALEVRSHRWPRTTSVILAXLPLSPCGVTCQAEALWCDHAKWVPADTDHSRCVEMLIKEQMRKYKVKMEEISQLEAAESIAFRRLSLLRQNANKSPKTRDIQEEELEVLLEEEAAGGDEDREKEILIERIQSIKEEKQVAQEDITYRLPELDPRGSDEENLDSETSASTESLLEERAGRGASEGPPAPALPCPGAPTPSPLPTVAAPPPTKAVVLRNGQSEDPPADPHHVHGQHQAPTRPALPPASLGTGCPGGGCPSAAPGATCPPPGPDTFRVHHARGRPASAGRPWSP

SEQ ID NO: 38120 - protein, 6 aa, Homo sapiens
MRGQRK

SEQ ID NO: 38121 - protein, 22 aa, Homo sapiens
MRMTLARRSPDTTRINLPSLPH

SEQ ID NO: 38122 - protein, 323 aa, Homo sapiens
MARPLVPSCRRRCCWSSRGCRKSRSGIPRDTGGRGRSIQLGVAIFGPPNTYYEGGYFSLSVPDQDVAPNIYEVSAAPTGLKSSPPGPRVLGASRPHPSGTGALGASRPRPPGPGALEPHVLVLPGPEALGASVLVLPGPGALGASRPRLHVLILRDLGHWEPVLTLTCSDLSSSCADGGRVISILHPPVDDPQSGELPQRGGTPRRTSGCGAKADSGPASWRSWASLYLHVLSRGLRHRVSVQTPPGPQAGPTVWNHLEVSPILSPGAFSLPSRLWVGTSCHVCRLGLVPSPTLLARKRGRLRDVQEVEKSKGKDREYTDIIR

SEQ ID NO: 38123 - protein, 600 aa, Homo sapiens
  DOMAIN (50)..(98): Ubiquitin-conjugating enzymes proteins domain identified by eMATRIX, accession number BL00183, p-value=4.600e-25, raw score of 28.97
  DOMAIN (1)..(296): Ubiquitin-conjugating enzyme domain identified by PFam, accession name UQ_con, E-value=2e-24, PFam score of 94.6
MARPLVPSSQKALLLELKGLQEEPVEGFRVTLVDEGDLYNWEVAIFGPPNTYYEGGYFKARLKFPIDYPYSPPAFRFLTKMWHPNIYEVSAAPTGLKSSSSGTQGAGSLTSSSFRDPGRWEPHVLVLRDPGRWEPHTGDVCISILHPPVDDPQSGELPSERWNPTQNVRLWRQGLIRDLPAGGPGPRCTCTVLSRGLRHRVSVQTPTRTPGRPHRLEPPRGVPPSSVLGPSPYPAVSGLVTSCHVCRLGLVPRTILLSVISLLNEPNTFSPANVDASVMYRKWKESKGKDREYTDIIRTQEHPGHLPSCTRWYLVSWGHLGAASWCWAVSALSSHAQVPLSCVGQAAVEPGLVRDVGLAEQDLQTVLQLMLAVCRRHLHGAVPSPGHCQSPPQPIGELGKQSLASAGSRHPGTSLRPDACPPRVMHPHKKHWACGLGLGLSVCSLVPSHAGTVGPAHPGSSQPQSPEPCLVGDRGSSPLPAAAASFLFSVKWGQRAAWPCCATPGSPFASSPGGTFLTRVLEVEPGAGSSKQVLGTKVDAERDGVKVPTTLAEYCVKTKAPAPDEGSDLFYDDYYEDGEVEEEADSCFGDDEDDSGTEES

SEQ ID NO: 38124 - protein, 307 aa, Homo sapiens
  DOMAIN (112)..(160): Ubiquitin-conjugating enzymes proteins domain identified by eMATRIX, accession number BL00183, p-value=8.920e-36, raw score of 28.97
  DOMAIN (63)..(236): Ubiquitin-conjugating enzyme domain identified by PFam, accession name UQ_con, E-value=4.1e-31, PFam score of 116.8
  misc_feature (1)...(307): Xaa = X or * as defined in Table 2
IAAAPELLERSGSPGGGGGAEEEAGGGPGGSPPDGARPGPSRELAVVARPRAAPTPGPSAAAMARPLVPSSHKALLLELKGLQEEPVEGFRVTLVDEGDLYNWEVAIFGPPNTYYEGGYFKARLKFPIDYPYSPPAFRFLTKMWHPNIYETGYVCISILHPPVDTDPQSGELPSERWNPTQNVRDHSSXVXSSLLERRPNTFLRPANVGRLPWMLQGSWEREQGGRIRELHRTSFRKQVLGTKVDAERDGVKVPTTLPEYCVKDQGRRAPDEGSDLFYDDYYEDARVEEEADSCFGDDEDDSGTEES

SEQ ID NO: 38125 - protein, 98 aa, Homo sapiens
  misc_feature (1)...(98): Xaa = X or * as defined in Table 2
LSLSFFFVKAHFYVKSMLHSKDASGISGMDFYVVQXFSWQTAYAGEVGRWLSPALTERGSGQTLXTWCWRVFCVCLEGHMWVTEAYVTVKHXNYSKVK

SEQ ID NO: 38126 - protein, 53 aa, Homo sapiens
  misc_feature (1)...(53): Xaa = X or * as defined in Table 2
SPGEIXGXVPPLLGXGVLLYQPPLFKIWEAPLLPDLLQQXKLYSLWLNKALGK

SEQ ID NO: 38127 - protein, 245 aa, Homo sapiens
  misc_feature (1)...(245): Xaa = X or * as defined in Table 2
ELCALVFGVNTFFATIVKTIITFIVSDVRGLGLPVRKQDSVVVFLDCPSIWXLRYIDLLILRVHLQIHLWGLRGRRAEFKHIRSAEEKKLTRIPSVNGEXTGKSPAPANSPPRGARDMWRTGRPAPRRPLVGGPSPSDRGPASTTSPELAVGAVNGGPSSANISRGFWQQSFHGNMCWFCAEPGVAGVPFTANIAGTEPGGLGQGRQCSLATQCHKPELKLQAKPAFPFSFSLSLFFFLLKHILM

SEQ ID NO: 38128 - protein, 759 aa, Homo sapiens
  DOMAIN (523)..(561): Receptor tyrosine kinase class III proteins domain identified by eMATRIX, accession number BL00240E, p-value=4.073e-15, raw score of 11.56
  DOMAIN (519)..(552): Eukaryotic protein kinase domain identified by PFam, accession name pkinase, E-value=4.2e-05, PFam score of 22.3
CWTSRNRRPIPGSCHPMELPRPFRGKAKVQNHQLVHHNKALINRGSLTFWLDDGAIQAWHCPVKTYYQYTPVSSKAMYDAFWNGKFRDCAFHSWLNEDPFVCEYQGQSSDLPQPPVNAGGGSGGGSGGGSEGGGSEGGGSEGGGSEGGGSEGGGSGGGSGSGDFDYEKMANANKGAMTENADENALQSDAKGKLDSVATDYGAAIDGFIGDVSGLANGNGATGDFAGSNSQMAQVGDGDNSPLMNNFRQYLPSLPQSVECRPYVLSAGSEIGAACASRSGYDNKGVRDIGYTDCKRSEDLDPLRHQILGGKKAIQFTLQGFPTLPEGAPAGNSGSLAVHKTAQSSYRHHALLILTPMSGTRFPPIPGPVVNIRVFPFAPSSECRICYSWSWVPGSPVHCQSDGSVPIPSYAPLASQYSSSFLFFRNRQPYAPYDYLSVMTPSRTLREQIRIRYAPSAPRLPPPEVYCSNSTIVYVRNNPSGPTPGFAGGTLLEGRSGGPFRFYAKRAKGDVLKPFSLNLPLQTLIRFMVDIACGMEYLSSRNFIHRDLAARKCMYEFWRTRGWETAAAYYGGGTTFFRKESQKLQQSAKKRDAELANGALGIIELNNDYTLKKVMKPLITSNTVTDEIERANVFKMNGKWYLFTDSRGSKMTIDGINSNDIYMLGYVSNSLTGPYKPLNKTGLVLQMGLDPNDVTFTYSHFAVPQAKGNNVVITSYMTNRGFFEDKKATFAPSFLMNIKGNKTSVVKNSILEQGQLTVN

SEQ ID NO: 38129 - protein, 174 aa, Homo sapiens
RRFVSADNCRSLRWKSLYTPLDADASVLISTGIDATQTNHGRQHLDETQVRVFGQHLMQGSYTTQDGRSDVAISCSCKLEMCAQQSYDQLLAASTENWRQWWQKRRITVNGGGSSPASDADQTPAPGFRRDVGDRDWFAWRQCLLKSALTRRRPVAYIVISSAMSGSCLPKQSD

SEQ ID NO: 38130 - protein, 36 aa, Homo sapiens
YRRCPTSGTSGKVWSAPSGTARSPTTPSRRRWLARA

SEQ ID NO: 38131 - protein, 53 aa, Homo sapiens
  misc_feature (1)...(53): Xaa = X or * as defined in Table 2
ARRQQVSVKSYRWEEEDQHCGELQGSEXVSDGLFKPPXSXHGWVEEERQKEQN

SEQ ID NO: 38132 - protein, 59 aa, Homo sapiens
  misc_feature (1)...(59): Xaa = X or * as defined in Table 2
VKQSTALLPHAVACXPKVISSGARGLKSILVLIRIVVMMVSMLPQLALSGWGRFRVLPG

SEQ ID NO: 38133 - protein, 109 aa, Homo sapiens
  misc_feature (1)...(109): Xaa = X or * as defined in Table 2
AAGGEPGDAPWVPGVWEPPESVCRGPPPSSTFPHPVLSTFGASGPENSRDCSWLSPQHXAAXVASGNNGPQAAQGSLSGIPDAATLSGIXRASILHVSVVEIISSPGFR

SEQ ID NO: 38134 - protein, 256 aa, Homo sapiens
  DOMAIN (76)..(97): O-SIALOGLYCOPROTEIN ENDOPEPTIDASE (M22) METALLO-PROTEASE FAMILY SIGNATURE domain identified by eMATRIX, accession number PR00789B, p-value=5.821e-19, raw score of 10.48
  DOMAIN (1)..(254): Glycoprotease family domain identified by PFam, accession name Peptidase_M22, E-value=2.2e-13, PFam score of 34.6
  misc_feature (1)...(256): Xaa = X or * as defined in Table 2
MRVLGIETSCDETGIAIYDDEKGLLANQLYSQVKLHADYGGVVPELASRDHVRKTVPLIQAALKESGLTAKDIDAVAYTAGPGLVGALLVGATVGRSLAFALGRFGDPCTPYWRASVSARCWKIPAPNFRCALLGSAAYAVNHGTGLSKKPTTLGSDHSKTPAQLAKRAGEARRNGWQGALFPWESARSGEEETPVICRHXHSHRAAAKSGLGAGGTSSGGRYRLGGYSILADHGGXKFHCAXRHGATSGDGKVLD

SEQ ID NO: 38135 - protein, 277 aa, Homo sapiens
  DOMAIN (132)..(149): METHIONINE AMINOPEPTIDASE-1 SIGNATURE domain identified by eMATRIX, accession number PR00599B, p-value=5.339e-09, raw score of 12.01
  misc_feature (1)...(277): Xaa = X or * as defined in Table 2
VGRVEIADQYQDLAILWNCLGSDHASSRQRRPFRGKAKVQNHQLVHLQQSSHQPWLPHFLAGXWGDSGLGGGSEGGGSEGGGSEGGGSEGGGSGGGSGSGDFDYEKMANANKGAMTENADENALQSDAKGKLDSVATDYGAAIDGFIGDVSGLANGNGATGDFAGSNSQMAQVGDGDNSPLMNNFRQYLPSLPQSVECRPYVFGAVRHDVRRIRVTGVTRVTPPEEVDTSVHSRGAHRIRSGFAPKRSVRVTTDTCIKRNSTCGVKSLSLWDGGGFR

SEQ ID NO: 38136 - protein, 348 aa, Homo sapiens
  DOMAIN (89)..(107): KINASE TYPE RESISTANCE ANTIBIOTIC TRANSFERASE AM domain identified by eMATRIX, accession number PD01929D, p-value=9.143e- 20, raw score of 9.28
  DOMAIN (1)..(138): Aminoglycoside phosphotransferase domain identified by PFam, accession name APH, E-value=4e-08, PFam score of -4.2
MVPAPGCIRFPVGNCPFNSVRVFVLVQAQSGMNTGLVNRSDFDDERNGWPVEQVWKEMHKLLPFSPDSVVTHGDFSLDNLIFDEGKLIGCIDVGRVGIADRYQDLAILWNCLAMYDAYWNGKFRDCAFHSGFNEDPFVCEYQGQSSDLPQPPVNAGGGSGGGSGGGSEGGGSEGGGSEGGGSEGGGSEGGGSGGGSGSGDFDYEKMANANKGAMTENADENALQSDAKGKLDSVATDYGAAIDGFIGDVSGLANGNGATGDFAGSNSQMAQVGDGDNSPLMNNFRQYLPSLPQSVECRPYVFGAGQFCVSGFLVDIKEKEKGGEEEKGQGEIERERERKGKKGRKDIS

SEQ ID NO: 38137 - protein, 490 aa, Homo sapiens
  DOMAIN (221)..(238): METHIONINE AMINOPEPTIDASE-1 SIGNATURE domain identified by eMATRIX, accession number PR00599B, p-value=5.339e-09, raw score of 12.01
  DOMAIN (56)..(138): Signal recognition particle 14kD protein domain identified by PFam, accession name SRP14, E-value=0.019, PFam score of 3.8
  misc_feature (1)...(490): Xaa = X or * as defined in Table 2
GVVGERAGMARPGRPREGGGSGGYSRPVPPAGGPGPXRGRTRISGLANGAGPVVFQFLTELTRLFQKCRTSGSVYITLKKCKQREGSRAMLPGFPYTPVSSKAMYDAYWNGKFRDCAFHSGFNEDPFVCEYQGQSSDLPQPPVNAGGGSGGGSGGGSEGGGSEGGGSEGGGSEGDGSEGDGSGGGSGSGDFDYEKMANANKGAMTENADENALQSDAKGKLDSVATDYGAAIDGFIGDVSGLANGNGATGDFAGSNSQMAQVGDGDNSPLMNNFRQYLPSLPQSVECRPYVFGAGKPYEFSIDCDKIKILRGVFAFLLYVATFMLPVIANIAIPQKRPFMQQTRCEVQCREDIEVQKLKSYDKLLASINKKPGVNGWQKRRITVNAGEAHDQQALDYALYHLRIMTPAHDERSSIAAKGLTGEGYKGHVFWDTEVFLLPFHLFSDPTVARSLLRYRWHNLPGRARRKRDGNGWAGGAPISVGKARAAAKK

SEQ ID NO: 38138 - protein, 84 aa, Homo sapiens
LLTDTCCPGGLKAIQKYLFFGMGLVRTVILLQGDIGRWPDVRALLEKVWSAPVRNCSALQQHQLAATLARLPRLKPLAVRAGVD

SEQ ID NO: 38139 - protein, 214 aa, Homo sapiens
  misc_feature (1)...(214): Xaa = X or * as defined in Table 2
MAQGQRKFQAHKPAKSKTAAAASEKNRGPRKGGRVIAPKKARVVQQQKLKKVSLCCSGWSXTPGLKASSRLCLPKCWDYRRDTLWLFLSATFICRWNLRKSESGKKIEHDVVMKASSSLPRKLALLKAPSPRRNGAAAATSSKTPSLRTAGPQLQGQHPTPLPSIWGPLQVNSHRLSLFRMRTLSPSDWASPRHSSGGPKGAENPGNDQGRYSH

SEQ ID NO: 38140 - protein, 872 aa, Homo sapiens
  DOMAIN (422)..(468): DEAD-box subfamily ATP-dependent helicases proteins domain identified by eMATRIX, accession number BL00039D, p-value=7.750e- 31, raw score of 21.67
  DOMAIN (125)..(336): DEAD/DEAH box helicase domain identified by PFam, accession name DEAD, E-value=2.5e-68, PFam score of 219.0
MKDLYKENYKPLLNEIKEDTNKWKNIPCSRVGRISIMKMAILPKEKFFRILSFKTKDTKKAKTENKGKSEEESAETTKETENNVEKPDNDEDESEVPSLPLGLTGAFEDTSFASLCNLVNENTLKAIKEMGFTNMTEIQHKSIRPLLEGRDLLAAAKTGSGKTLAFLIPAVELIVKLRFMPRNGTGVLILSPTRELAMQTFGVLKELMTHHVHTYGLIMGGSNRSAEAQKLGNGINIIVATPGRLLDHMQNTPGFMYKNLQCLVIDEADRILDVGFEEELKQIIKLLPTRRQTMLFSATQTRKVEDLARISLKKEPLYVGVDDDKANATVDGLEQGYVVCPSEKRFLLLFTFLKKNRKKKLMVFFSSCMSVKYHYELLNYIDLPVLAIHVSDDDELIENRGKQKQNKRTTTFFQFCNADSGTLLCTDVAARGLDIPEVDWIVQYDPPDDPKEYIHRVGRTARGLNGRGHALLILRPEELGFLRYLKQSKLEKLIEKNYFLHKSAQEAYKSYIRAYDSHSLKQIFNVNNLNLPQVALSFGFKVMYRKEQREGSVLSTVSDIHWGSRNVSLEDKGELPYSLGAVCDCSGRMVQARDKRQPDLTSLARFRYEGASYWYHVQRQCSGQCPGAECSVHGTGLRASYVKNLLPYSSRYRGSSQTVSQSGLWHTGFLTVWISWNSGEQTWALESGPVLQHLPKQRALGCADSGQLLRRGRLRLSEQQLVILDLPLLAGERYRGFILSSLRKERSECRGRVGQTRDPVMPRACAEGDVERGVGLQAAEAPDQPWEGQSYPDATVVSRQPWEGQSYPDATAELPFPPCCPQGRLLVSSDAGRRNPPAPESLARTRPGGAGAKTQRMWPPSLVTDGYQGGFG

SEQ ID NO: 38141 - protein, 168 aa, Homo sapiens
  DOMAIN (115)..(161): DEAD-box subfamily ATP-dependent helicases proteins domain identified by eMATRIX, accession number BL00039D, p-value=2.000e- 26, raw score of 21.67
  DOMAIN (19)..(102): DEAD/DEAH box helicase domain identified by PFam, accession name DEAD, E-value=2.4e-23, PFam score of 76.7
MGGSNRSAEAWKLANGINIIVATSGRLLDHMQNTPGFMYKNLQCLVIDEADRILDVGFEEELKQIIKLLLTHRQTMLFSATQTQKVEDLARISLKKEPFMLVMMMIMLMKQYLGTLLCTDVAARGLDITEVDCIVQYDPPDDPKEYIHSVGRTARGLNGRENWVFFAT

SEQ ID NO: 38142 - protein, 356 aa, Homo sapiens
  DOMAIN (41)..(67): DEAD-box subfamily ATP-dependent helicases proteins domain identified by eMATRIX, accession number BL00039B, p-value=8.744e- 12, raw score of 19.19
  DOMAIN (3)..(118): DEAD/DEAH box helicase domain identified by PFam, accession name DEAD, E-value=1.5e-25, PFam score of 83.7
  misc_feature (1)...(356): Xaa = X or * as defined in Table 2
MAEIQHKTIRPLLEGRDLLAAVKTGSGKTLAVLIPAIELVVKLKFMPRNGTGVLILSPTRQLAMQTFGVLKELMTHHVHTYGLIIGGSNRSAEAQKLANGINIIVVTPGRLLDHTQNTPGFMYKNLQVEDLARISPKKEPLYVGVDEDKANATVDGLEQGHFVCPSEKRYLLLFTFLKKNQKKKLMVFFSACMSVKYPYGLLKYIDLPVLAIHGKQKQNKHTTTFFXYCNADSGTLLFQLEKLIEKNYFLHKSAQETYKSYIRAYDSYSLKQIFNINNLNLPHIALSFGFKLPPFVDLNMNSNEGKQKKQGGFGYQKTKKVEKSIIFKHISKKSSAAGSSLTQEMPVFILNNFVLT

SEQ ID NO: 38143 - protein, 615 aa, Homo sapiens
  DOMAIN (423)..(469): DEAD-box subfamily ATP-dependent helicases proteins domain identified by eMATRIX, accession number BL00039D, p-value=7.750e- 31, raw score of 21.67
  DOMAIN (137)..(348): DEAD/DEAH box helicase domain identified by PFam, accession name DEAD, E-value=2.5e-68, PFam score of 219.0
SKQKPMNVGLSETQNGGMSQEAVGNIKVTKSPQKSTVLTNGEAAMQSSNSESKKKKKKKRKMVNDAEPDTKKAKTENKGKSEEESAETTKETENNVEKPDNDEDESEVPSLPLGLTGAFEDTSFASLCNLVNENTLKAIKEMGFTNMTEIQHKSIRPLLEGRDLLAAAKTGSGKTLAFLIPAVELIVKLRFMPRNGTGVLILSPTRELAMQTFGVLKELMTHHVHTYGLIMGGSNRSAEAQKLGNGINIIVATPGRLLDHMQNTPGFMYKNLQCLVIDEADRILDVGFEEELKQIIKLLPTRRQTMLFSATQTRKVEDLARISLKKEPLYVGVDDDKANATVDGLEQGYVVCPSEKRFLLLFTFLKKNRKKKLMVFFSSCMSVKYHYELLNYIDLPVLAIHGKQKQNKRTTTFFQFCNADSGTLLCTDVAARGLDIPEVDWIVQYDPPDDPKEYIHRVGRTARGLNGRGHALLILRPEELGFLRYLKQSKVPLSEFDFSWSKISDIQSQLEKLIEKNYFLHKSAQEAYKSYIRAYDSHSLKQIFNVNNLNLPQVALSFGFKVPPFVDLNVNSNEGKQKKRGGGGGFGYQKTKKVEKSKIFKHISKKSSDSRQFSH

SEQ ID NO: 38144 - protein, 301 aa, Homo sapiens
  DOMAIN (74)..(95): 70 KD HEAT SHOCK PROTEIN SIGNATURE domain identified by eMATRIX, accession number PR00301D, p-value=9.379e-23, raw score of 15.51
  DOMAIN (2)..(290): Hsp70 protein domain identified by PFam, accession name HSP70, E-value=6.5e-06, PFam score of -251.9
  misc_feature (1)...(301): Xaa = X or * as defined in Table 2
MVFDAKYLTGWRFEDTVVQSNMKHQPFIVVNKHNVQVEYKGETKSFYPEEVFFMVLIKMKEIAETYLGKTVTNAVVTVPAYFNDSQHQATKDAGTIVSLNVLRIISKPTAAATAYRQKGIDFNTSIFHALFEELNAYLFHGTLDSVEKALGNAKLDKSQIHDIVLGPFEQGRHXMYGPGSXEIQSXRXEAEGQDVIQEFSXKLCIRYESSCXRXETSRQDXRXGQTEDSXXGYXNYQLAGXESDSEEGRISTSKSGESLQPHNYQPVPEYRRHTRRNAWGIPXWWSSLCWSFPRAPIEEAD

SEQ ID NO: 38145 - protein, 292 aa, Homo sapiens
  DOMAIN (32)..(69): Heat shock hsp70 proteins family proteins domain identified by eMATRIX, accession number BL00297A, p-value=1.000e-40, raw score of 17.58
  DOMAIN (31)..(292): Hsp70 protein domain identified by PFam, accession name HSP70, E-value=3.9e-26, PFam score of 100.3
ARGACSSWVFCGFLRYWSQAYTPATMSKGPAVGIDLGTTYSCVGVFQHGKVEIIANDQGNRTTPSYVAFTDTERLIGDAAKNQVAMNPTNTVFDAKRLIGRRFDDAVVQSDMKHWPFMVVNDAGRPKVQVEYKGETKSFYPDEVSSMVLTKMKEIAEAYLGKTVTNAVVTVPSYFNDSQRQATKDAGTIAGLNVLRIINEPTAAAIAYGLDKKVGAERNVLIFDLGGGTFDVSILTIEDGIFEVKSTAGDTHLGGEDFDNRMVNHFIAEFKRKHKKDISENKRAVRRLRTTK

SEQ ID NO: 38146 - protein, 123 aa, Homo sapiens
  DOMAIN (52)..(69): 70 KD HEAT SHOCK PROTEIN SIGNATURE domain identified by eMATRIX, accession number PR00301F, p-value=5.765e-20, raw score of 13.98
ASIEIDSLYEGIDFYTSITRARFEELNADLFRGTLDPVEKALRDAKLDKSQIHDIVLVGGSTRIPKIQKLLQDFYEAVAYGAAVQAAILSGDKSENVQDLLSLDVTPFPLGIETAGGVMTVPH

SEQ ID NO: 38147 - protein, 72 aa, Homo sapiens
NEIINWLDKNQTAEKEEFEHQQKELEKVCNPIITKLYQSAGGMPGGMPGGFPGGGAPPSGGASSGPTIEEVD

SEQ ID NO: 38148 - protein, 300 aa, Homo sapiens
  DOMAIN (148)..(203): Heat shock hsp70 proteins family proteins domain identified by eMATRIX, accession number BL00297G, p-value=8.759e-39, raw score of 21.87
  DOMAIN (2)..(300): Hsp70 protein domain identified by PFam, accession name HSP70, E-value=2.4e-38, PFam score of 140.8
YYHSYQADTHLGGEDFDNRMVNHFIAEYKRKHKKDISENKRAVRRLRTACERAKSTVSSSTHASTEIDSLSEGIDIYTSSTCASFEELNADLFLSTLDPVEKALRDAKLDKSQIHDIALSINPDEAVAYGAAVQAAILSGDKSENVQDLLLLDVTPLSLGIETAGRVITDLIKHNTTIPTKQTQTFTTYSDNQPGVLIQLYEGEHTMTKDDNLLDKFELTGIPPAPRGVPQIEVTFDTNSNGILNVSAVDKSTRKKNKITITNDKGHLSKEDIEYMVQEAEKYKAEDQKQRDKVSSKNSL

SEQ ID NO: 38149 - protein, 64 aa, Homo sapiens
ARADNQPGVLIQVYEGERAMTKDNNLLGKFELTGMPGGMPGGFPGGGAPPSGGASSGPTIEEVD

SEQ ID NO: 38150 - protein, 494 aa, Homo sapiens
  DOMAIN (300)..(354): Heat shock hsp70 proteins family proteins domain identified by eMATRIX, accession number BL00297H, p-value=1.000e-40, raw score of 15.46
  DOMAIN (2)..(461): Hsp70 protein domain identified by PFam, accession name HSP70, E-value=2.7e-184, PFam score of 625.6
  misc_feature (1)...(494): Xaa = X or * as defined in Table 2
MVFDAKRLIAHRFDDAVVQSEMKHWPFMVVNDAGRPKVQVEYKGESKSFYPEKVSSMVLTNMKEIAEAYLGKTVTHAVVAVPAYFNDSQRQATKDAGTIVGLNVLRIINEPTAAAYGLDKRHRSSLPILTASLGAGSGLXSTQASIEIDCLYEGINFCTSITHARFEELNADLFRGTLDPVEKALRDAKFDKSQIHDIVLAGGSTRIPKIQKLLQDFFNGKELNKGINADEAVAYGIAVQAAILSGDKSENVQDLLLFDVTPLSLGIETAGGTQILTTYSDSQPGVLIQAYEGKHAMTKDNNLLGKFELMGIPPAPRGVPQTEVTFDSDANGILNVSAVDKSTGKENKITITNDKGCLSKEDIERMVQEAEKYKAEDEKQRDKVSSKNSLESYAFNMKATVEDEKLQGKINDEDKEKILDKCNEIIIWLNENETAKKEEFEHQQKELEKVCNPIITKLYQSAGGMPGRMPGGFPGGGAPPSGGASSGPTIEEVD

SEQ ID NO: 38151 - protein, 731 aa, Homo sapiens
  DOMAIN (38)..(75): Heat shock hsp70 proteins family proteins domain identified by eMATRIX, accession number BL00297A, p-value=1.000e-40, raw score of 17.58
  DOMAIN (37)..(701): Hsp70 protein domain identified by PFam, accession name HSP70, E-value=3.1e-171, PFam score of 582.3
  misc_feature (1)...(731): Xaa = X or * as defined in Table 2
PRVRPRVRSPAALGFFVASFVIGARPTPQQPWSKGPAVGIDLGTTYSCVGVFQHGKVEIIANDQGNRTTPSYVAFTDTERLIGDAAKNQVAMNPTNTVFDCQTVXLDGRFDDAVVQSDMKHWPFMVVNDAGRPKVQVEYKGETKSLYPEEVSSMVLTKMKEICRSLTLGKTVTNAVVTVPSYFNDSQRQATKDAGTIAGLNVLRIINEPTAAAIALQKFRQKRFGAERNVLIFDLGGGTFDVSILTIEDGIFEVKSTAGDTHLGGEDFDNRMVNHFIAEFKRKHKKDISENKRAVRRLRTACERAKRTLSSSTQGSIKIDSLXEGIDFYTSITRARFEELNADLFRGTLDPGEKALRDAKLDKSQISXYLSWVGGSTSYSPRLQKSCCQDFFQWEKELELRSINPGWKAVAFIGAAVPGQPFLSGRQVLENVQDLLLLDVTPLSPWVLKTAGGVHDCPPSKRNTTIPTKQTQTFTTYFWTTQPGCGLFRFYEGRALPWTKDNQPALASFELTGIPPAPRGVPQIEVTFDIDANGYTPWSLAVDKKYGKKRTKITITNXQGPFXAREDIGTYGSREAEEVTKLEGGGRQEGTRVSSNDFTXGPMPFNMKSTLLKDEKLQGRINDEGQNRRFLDQVXLKLSNWLXXESRLLEKEEFEHQQKELEXVCNPIITQAGTQSARRHCQGGNPWGAFLGGGAPPLGGCFLQGPPFEEVDLSPTQVLDVALFPHILKPF

SEQ ID NO: 38152 - protein, 251 aa, Homo sapiens
  DOMAIN (3)..(251): Mov34/MPN/PAD-1 family domain identified by PFam, accession name Mov34, E-value=4.4e-66, PFam score of 233.0
  misc_feature (1)...(251): Xaa = X or * as defined in Table 2
PFPGGRVVRLHPVILASTVDSYERRNKGAARVIGTLLGTVNKHSVEVTSCFSVSHNESDEVAVDMEFAKNMYELHXKVSPNELILGWHDITEHSVLIHEYYSREAPNPIHLTVDTSLQNGHMSIKAYVSTLMGVPGRIVGVFTPLTVKYAFYDTECIRVDLIMKTCFSPNRVVGLSSDLQQVGGASARIQDTLSIVLQYAEDILSGKVSADNTIRKVGHFLMSLVNQVPKIVPDDFETMLHSNINDLLMVT

SEQ ID NO: 38153 - protein, 607 aa, Homo sapiens
  DOMAIN (462)..(484): AAA-protein family proteins domain identified by eMATRIX, accession number BL00674B, p-value=3.314e-10, raw score of 4.46
  DOMAIN (101)..(371): Mov34/MPN/PAD-1 family domain identified by PFam, accession name Mov34, E-value=4.5e-07, PFam score of 0.2
MRKGGPPKPLLLSTLTTHATLALPQASTATTLKHPQRIPSYIRVLFAILKMPSTTGRQKAFSTCASHLTSVTLFYGTANMTYLQPKSGYSPETKKLISLAYTLLTPLLNPLIYSLRNIDLIMKTCFSPNRVIGLSSDLQQVGGASARIQDALSTVLQYAEDVLVAVDMEFAKNMYELHKKVSPNELILGWYATGHDITEHSVLIHEYYSREAPNPIHLTVDTSLQNGRMSIKAYVRCSSFGVFLVIYVVTLMGNAIITVIISLNQSLHVPMYLFLLNLSVVENVDLKGFEPDVRILLTKWGGSNGSQSPWMEEQIGDAWGSMVLKNVVRETDEVGKAAFALLCGTPSPAGFGPLSPAAREHRLLRTLCRESSEQPPSSSGRQKGGRRRANEDDYREVYREHVRCLEEWQEAGVNGRYNQVLLVAKPSSESAESLACPFPEQELESVTVEALFDSGEKPSLAPSLVVLQGSAGTGKTTLARKMVLDWATGTLYPGRFDYVFYVSCKEVVLLLESKLEQLLFWCCGDNQAPVTEILRQPERLLFILDGFDELQRPFEKKLKKRGLSPKESLLHLLLRDIHSHVLPSITTRPLLLRIWKPCLNQQQMFIS

SEQ ID NO: 38154 - protein, 231 aa, Homo sapiens
MATPAVPVMCSSGHANPSPGGGPSLSSSANASTGCGSGSRCGSSLILRPCGSSGCNCGSWPDPRPQRKLQRRPQRPLCLVLLFQGPSPAAAWLHPSHFGPPLWTSYEETQRGVLPRVIGTLLGTVRQTLKWRSPIAFQCRTMSQKMKLAVDIGISLRICMNLHKKVSPNEAHPWAWYRYGAIDITEALCLGFHEYLQPERPPNPIQLTVGTQVFQERAGMEAFKGLTFRHF

SEQ ID NO: 38155 - protein, 119 aa, Homo sapiens
  DOMAIN (4)..(25): PROTEIN REPEAT DOMAIN TPR NUCLEA domain identified by eMATRIX, accession number PD00126A, p-value=2.552e-09, raw score of 22.53
  DOMAIN (1)..(30): TPR Domain domain identified by PFam, accession name TPR, E- value=0.00017, PFam score of 28.3
GRLGLALSSLNKHVEAVAYYKKALELDPDNETYKSNLKIAELKLREAPSPTGGVGSLDIAGLLNNPGFMSMASNLMNNPQIQQLMSGMISGGRRAHGAVVPAAGLSVGASWGSLAPGRL

SEQ ID NO: 38156 - protein, 355 aa, Homo sapiens
  DOMAIN (148)..(178): LEISHMANOLYSIN (M8) METALLOPROTEASE FAMILY SIGNATURE domain identified by eMATRIX, accession number PR00782G, p-value=3.077e- 09, raw score of 16.34
  DOMAIN (172)..(240): TPR Domain domain identified by PFam, accession name TPR, E- value=7.4e-16, PFam score of 66.1
  misc_feature (1)...(355): Xaa = X or * as defined in Table 2
GVAPWGRGRAAPRCASATVGGSGIGRLRGITSSGLKMDNKKRLAYAIIQFLHDQLRHGGLSSDAQESLEVAIQCLETAFGVTVEDSDLALPQTLPEIFEAAATGKEMPQDLRSPARTPPSEEDSAEAERLKTEGKPKQMKVENFEAAVHFLTEKPFELNPSQRPSYFCNRAAAYSKLGNYAGAVQDCERAICIDPAYSKAYGRMGLALSSLQQHLEAVAYYKKALELDPDNETYKSNLKIAELKLREAPSPTGGVGSFDIAGLLNNPGFMSMASNLMNNPQIQQLMSGMISGGNNPLETPGTSPSQNDLASLIQAGQQFAQQMQSVGIPRVVXXSAQESSIRSRTPSASNDDQQE

SEQ ID NO: 38157 - protein, 57 aa, Homo sapiens
  misc_feature (1)...(57): Xaa = X or * as defined in Table 2
FIIDYTNSCIFHQNICLICSNRNFRQSNVVMICHYXTLQEIKTFCXMNSSLWSIIIF

SEQ ID NO: 38158 - protein, 36 aa, Homo sapiens
MKWMVIIQMENNNLDELNKSKIIVKKKPKQLNPFHL

SEQ ID NO: 38159 - protein, 76 aa, Homo sapiens
  misc_feature (1)...(76): Xaa = X or * as defined in Table 2
HKDQPIQTENDHPSTNFSFVLKLHDPLLNEMDLIVWVSFXQXSCFYLVHPNCCSPLVXHPXSENPKFSNEYFLRVS

SEQ ID NO: 38160 - protein, 289 aa, Homo sapiens
MAVEHSASCPFLMDIADANTLKGPQIKQTSSQESHCHLAVKTECGRTEKKLFYVGKDRKQNRLVIVSEEEKKKVLRECHENDSGAHHGISRTLTLVESNYYWTSVTNDVKQWPRDLVHCVLAAPAMEERGQGTAQAVASEGGSPNSYQLLHSIESVSAQMSRIEVWEPLPRFQKIYENAWMPRKKFAAGVGPSWRTSATAVQKGNVGSEMPCRVLTGGAPSGAVRRGPPSSRPQTGRSMESLHRVPEKAKDIQCQPVKATGREAIPCKPQGCRCQRIWEPTYCISVTWM

SEQ ID NO: 38161 - protein, 380 aa, Homo sapiens
  DOMAIN (105)..(260): Integrase core domain identified by PFam, accession name rve, E-value=1.9e-10, PFam score of 40.1
  misc_feature (1)...(380): Xaa = X or * as defined in Table 2
EEQQTNLASKKKSCIMLEKTENKIRLVIVSEEEKKKVLKRMPXKMTVRAHHGISRTPHSWVESNYYWDICDQWMSEPVGYMPCQHCQVAKNTVIVAPKQHLLQGGKIPWSLVTVDLMGAFSYKPQKSNVYAIIMTDLFTKWIVILPLCDVSASEVSKAIINIFFLYGPPQKIIMDQRDEFIQQINIELYRLFGIKQIVISHTSGTVNPTESTPNTIKAFLSKHCADHPNNWDDHLSAVSFAFNVTHLEPTKNTPYFQMFKVEKNPLYYLPETSDSLHEVDGDNTSMFAKILDAIKEADKIMENKTTSLGQMENNNLDELNKSKIIVKKKPKQLNPFHLKVGHGSFKTKEKLVGRMVVFQSWNGVGPLCHRLYYRKWMCCP

SEQ ID NO: 38162 - protein, 148 aa, Homo sapiens
  misc_feature (1)...(148): Xaa = X or * as defined in Table 2
MADRLTQLQDAVNSLADQFCNAIGVLQQCVPPASFNNIQTAINKDQPANPTEEYAQLFAALIARTAKDIDVLIDSLPSEESTAALQAASLYKLEEENHEAATCLGGMLFIEGDMLLGGRYKGALADIAQSQLEGQGSGYPXASLFPDS

SEQ ID NO: 38163 - protein, 110 aa, Homo sapiens
  DOMAIN (23)..(64): IMP dehydrogenase / GMP reductase proteins domain identified by eMATRIX, accession number BL00487F, p-value=8.984e-22, raw score of 18.79
GWPCEHLGQINLFPPSMMVAGAGADFVMLGGMLAGHSESGGELIERDGKKYKLFYGMSSEMAMKKYAGGVAEYRYVWRPRSLVIVWRQNSWLLRGGWYSSQRSMVNRGSM

SEQ ID NO: 38164 - protein, 359 aa, Homo sapiens
  DOMAIN (185)..(226): IMP dehydrogenase / GMP reductase proteins domain identified by eMATRIX, accession number BL00487F, p-value=8.984e-22, raw score of 18.79
  DOMAIN (117)..(342): IMP dehydrogenase / GMP reductase C terminus domain identified by PFam, accession name IMPDH_C, E-value=1.3e-42, PFam score of 155.0
MPHIDNDVKLDFKDVLLRPKRSTLKSRSEVDLTRSFSFRNSKQTYSGVPIIAANMDTVGTFEMAKVLCKFSLFTAVHKHYSLVQWQEFAGQNPDCLEHLAASSGTGSSDFEQLKQILEAIAQMKYICLDVANGYSEHFVEFVKDVRKRFPQHTIMAGNVVTGEMVEELILSGADIIKVGIGPGAGADFVMLGGMLAGHSESGGELIERDGKKYKLFYGMSSEMAMKKYAGGVAEYRYVWRPRSLVIVWRQNSWLLRGGWYSSQRSMVNRGSMLGSVEKSLGLRNPEGEDNKVFPTLRASEGKTVEVPFKGDVEHTIRDILGGIRSTCTYVGAAKLKELSRRTTFIRVTQQVNPIFSEAC

SEQ ID NO: 38165 - protein, 220 aa, Homo sapiens
  DOMAIN (29)..(74): IMP dehydrogenase / GMP reductase proteins domain identified by eMATRIX, accession number BL00487E, p-value=5.579e-26, raw score of 16.12
  DOMAIN (4)..(212): IMP dehydrogenase / GMP reductase C terminus domain identified by PFam, accession name IMPDH_C, E-value=3.2e-79, PFam score of 276.6
  misc_feature (1)...(220): Xaa = X or * as defined in Table 2
WPSDEAEGYSEHFVEFVKDVRKRFPQHTIMAGNVVTGEMVEELILSGADIIKVGIGPGSVCTTRKKTGVGYPQLSAVMECANAAHGLKGHIISDGGCSCPGDVAKAFGAGADFVMLGGMLAGHSESGGELIERDGKKYKLFYGMSSEMAMEEVLLGGVAEYRTSEGKTVEVPFXREMLEHTIPRHPXGGIRSTCTYVGAAKLKRRXARTNYLHPEVHPAR

SEQ ID NO: 38166 - protein, 363 aa, Homo sapiens
  misc_feature (1)...(363): Xaa = X or * as defined in Table 2
EGGHHFGGQGADSAAPFGSASILPIKLDVHPHDGRRRAEKSKPGGNPQRQLYCQPPAGCLPGAVYRPRRSRGARMYSRYSPAERRNPDQRAGYCQAPDRLRFSRADDCRSRWRHVFHGTSRHCAGDRAVRPPPHSAAEALPVALPVFQXPTADQVLFPSLIAACYNNHQNKIILEQEMSCVLLATFIQTRAQQRKYKRRNNRGIPRESTAREQARHNANKAQQPRKHARNGASPAQQRKNRAAARDKDEKPAQQKDKARQSAPEKKNRAIRGTNSREQAAKAERNRRQRGGQKGAQGGQHREEAGEPTYVDEKAQAATSPPPQTPHPAPDHDDAEDHRTRDTNRNAHQPKVYTHKDTPTNESR

SEQ ID NO: 38167 - protein, 209 aa, Homo sapiens
  misc_feature (1)...(209): Xaa = X or * as defined in Table 2
RRIQTNGRTFHAHGGPSRGLPEELGKDHREKETSSRTLXQFQPNAKSPGQNLRESMNPVCMTQQARRLQRLAKDLLKQVQVQDSGSWANNKVSALDRTLGEITRILEKERSRRGKGPSKEDLEGAANGVRRTMWMSGNLVKESQPHPTHRPNILTXYPSIFPXRSTLLTLWLKVQLQQKLXKMEKSGKKIKKKPKRXKPGXTSGTLNTL

SEQ ID NO: 38168 - protein, 225 aa, Homo sapiens
  DOMAIN (56)..(91): Troponin domain identified by eMATRIX, accession number PF00992A, p-value=9.239e-10, raw score of 16.67
MWWSLGTLTWYNSPGSMRLGPVATRSQEWQDTAVSWALWGREQCSNNHSLERDREERLAALTAAQQEAMEELQKKIQLKHDESIRRHMEQIEQRKEKAAELSSGRHANTDYAPKLTPYERKKQCSLCNVLCGLGCPNEVLPGGCHRSSYPRRPCLTIGELLWMGPCWRATTHSLSPPLSGSCMDFATMLLLAPVQVWTPLPLPCHHQCANTVHTLPAATACMWNL

SEQ ID NO: 38169 - protein, 370 aa, Homo sapiens
  DOMAIN (80)..(115): Troponin domain identified by eMATRIX, accession number PF00992A, p-value=4.316e-09, raw score of 16.67
  misc_feature (1)...(370): Xaa = X or * as defined in Table 2
AQEEEAKVNEIAFINTLEAQNKRHDVLSKLKEYEQRLNELQEERQRRQEEKQARDEAVQERKRALEAERQARVEELLMKRKEQEARIEQQRQEKEKAREGAARERARDREERLAALTAAQPRSYGRVTEKNSAQAXXKYSKAHRNRLNKEKKKLLSXAVGDMQILIMPPNXPLYERKKQCSLCNVLISSEVYLFSHVKGRKHQQAVRENTSIQGRELSDEEVEHLSLKKYIIDIVVESTAPAEALKDGEERQKNKKKAKKIKARMNFRAKEYESLMETKNSGSDSPYKAKLQRLAKDLLKQVQVQDSGSWANNKVSALDRTLGEITRILEKENVADQIAFQAAGGLTALEHILQAVVPATNVNTVLRNSS

SEQ ID NO: 38170 - protein, 120 aa, Homo sapiens
  misc_feature (1)...(120): Xaa = X or * as defined in Table 2
MINVPIMHHFPQYKSGMFVRNHWELYXXXXXXXXXXXXXXXXXXXXXXXXXXXXXXXXXXXXXXXXXXXXXXXXXXXXXXXXXXXXXXXXXXXXXXXXXXXXXXXXXXXXXXXXXXXXXX

SEQ ID NO: 38171 - protein, 377 aa, Homo sapiens
MGFRHVGQAGLELLTSGDPPTSGSQTAGITGTTKVDPRLKPGHSLCSVSACPLVLQMGGPPGAIGNTRNCTAVQLVVDPSHPQGNSTPRGEDSPWMRTTMSRTKKEEGKNTRRGRRKSPECLEGTQVALGSAASKRQRSTLVGRGRMPPNQWLGKDQGSSGLVETHPRNTNVTDIAEAYYKLPPNPRCHCPEIDGYFGEARFYAITAWGPGAPPSGGRAAGPGRRERRLEAVTPVLVPPPPASPPPPLSKLARNRLLHSISPPQPPLPAGPGGRRDVVGAAQAPLPVYGGEGGGPRKTRLRKMCLPARSRCQECLVNFWTLAFQLYIQLRKCRLVSKMNYHELANIAQKMAGSQGPGPFGGTELSPANQRLTGTWRM

SEQ ID NO: 38172 - protein, 119 aa, Homo sapiens
  misc_feature (1)...(119): Xaa = X or * as defined in Table 2
FLFFIFFNYFFFGGRKCPLLVAPRLEVQMAVILGSLQPSPPGFKXFSLPQPSPSSWDYRHAPTHAQPNFVFLVETGFHHIGQAGLELQTSGDPPTSASQTAGITGVSHRAWPGTILFLK

SEQ ID NO: 38173 - protein, 285 aa, Homo sapiens
  DOMAIN (18)..(35): BAND 41 PROTEIN FAMILY SIGNATURE domain identified by eMATRIX, accession number PR00935D, p-value=4.656e-14, raw score of 10.20
  DOMAIN (4)..(38): FERM domain (Band 4.1 family) domain identified by PFam, accession name Band_41, E-value=6.1e-14, PFam score of 45.9
  misc_feature (1)...(285): Xaa = X or * as defined in Table 2
FVDIFQRWKECRGKSPAQAELSYLNKAKWLEMYGVDMHVVRGRDGCEYSLGLTPTGILIFEGANKIGLFFWPKITKMDFKKSKLTLVVVEDDDQGREQEHTFVFRLDSARTCKHLWKCAVEHHAFFRLRTPGNSKSNRSDFIRLGSRFKFSGRTEYQATHGSRLRRTSTFERKPXXTLSIPETFNVQSKQPSDSSPALLLKQIQKSNNYQPPISILISIPSPAPGGILTPQMSGHPFQDDRSHWKASASGDDSHFELCPTTQNPEGTLGGMPKYDVSEINVMTAL

SEQ ID NO: 38174 - protein, 312 aa, Homo sapiens
MELTHLQPHEPQEDVHAVGLLLGLREQHHMVSEGPRQQSWQEERTELAAVSRLLFNMYPLLIHKNHASPGIPNLLLHPRGLRAITIAVFGKQNTYIRLEPFKINVLEQITKHIEKLQCGEHNFPEQEIQEGKSHQNQHEAHFVVELCKYFLCQEYLPSQITILTTYTGQLFCLRKLMPAKTFAGVRVHVVDKYQGEENDIILLSLISNRICVALSRAKKGMYCIGNMQMLAKVSLWSKIIHTLRENNQIGPMLRLCCQNHPETHTLVSKASDFQKVTEEGCMLPCEFRLGCGHVCTRAWHPYDSSHKEFQCM

SEQ ID NO: 38175 - protein, 120 aa, Homo sapiens
DVSIVDLMGKKVKSSFTPAKGFSGPCRRQWLFQLQKLISPTPLRPVFSGPAGETLCVKEPTPRPSHSSIMECFQCWKQIHSLSCTGPFMRLSQCWGEMYFCRYCSRRTPRMVHSRVLAPS

SEQ ID NO: 38176 - protein, 544 aa, Homo sapiens
TSLKLHHRPTEPESAFLAEKHPKALLQLTQQNTCFGFSGPFYLAPGKTYVGLKIVQALLTNESVWQISLQKFPILVVCYTNHALDQFLEGIYNCQKTSIVRVGGRSNSEILKQFTLRELRNKREFPRNLPMHLRRAYMSSYRTMPIYPTYNEVHLDERPFLRPNIISGKYDSTAIYLDTHFRLLREDFVRPLREGILELLQSFEDQGLRKRKFDDIRIYFDTRIITPMCSSSGIVYKVQFDTKPLKFVRWQNSKRLLYGSLVCMSKDNFETFLFATVSNREQEDLCRGIVQLCFNEQSQQLLAEVQPSDSFLMVETTAYFEAYRHVLEGLQVVQEEDVPFQRNIVECNSHVKEPRYLLMGGRYDFTPLIENPSATGEFLRNVEGLRHPRINVLDPGQWPLKEALKLDDSQMEALQFALTRELAIIQGPPGTVLHTASPLFQQREGDTPIPRLLQDTPPVYMAATGKSGKSEIVPRNRQQQGGKQQRHLDLWLDQPPRTGQVCSKAQSTASEGGPLQKDCRGGFSENWVTGYLDASNLAEQRNIR

SEQ ID NO: 38177 - protein, 120 aa, Homo sapiens
CHRAQWHQGGCGRAEDKDGGEKADSEAGKEAPGPSKVKTGKPEEASLDSREKKTNLAPKSTAMNESSSGKAGKPPCGATKRSIADSEESEAYKSLFTTHSSAKRSKEESAHWVTHTSYCF

SEQ ID NO: 38178 - protein, 332 aa, Homo sapiens
  misc_feature (1)...(332): Xaa = X or * as defined in Table 2
GRVGFFFAGNPGSDSFGGLLLGLTPVLRWVADGGTIPKRHELVKGPKKVEKVDKETELVAQWNYCTLSQEKLRRPIVALCNFADFYNKEPVIEFLLDKSAEKGSSGRQASHIKTHXRIVDRAESFPDNPCPGKGIKGNDXKVDKHDDLQAGASSSSPVGGPGRWNGRHRFLLPSGGCGLCCFSXAEPWKEIKAGVCHTCGAGLSRRMMIIVLNGTKEDVDLLKTMMEERRLXSEAGKENKENPRQQSLFQNQDVSERSPRAIKSXDRGSLKKPAFDSREKKTNLAPKSTAMNESSSGKAGKPPCGATKRSIADSEESEAYKSLFITHSSAKR

SEQ ID NO: 38179 - protein, 185 aa, Homo sapiens
  misc_feature (1)...(185): Xaa = X or * as defined in Table 2
MGCDGGTIPKRHELVKGPKKVEKVDKDAELVAQWNYCTLSQEILRRPIVACELGRLYNKDAVIEFLLDKSAEKALGKAASHIKSIKNVTELKLSERALKEIKAEVCHTCGAAFQEDDVIMLNGTKEDVDVLKTRWRREGXERRGKKKTKKPKAAEVCFQNPDVSGRKPQGPSKVKTREALKKPSP

SEQ ID NO: 38180 - protein, 60 aa, Homo sapiens
YVACMPAWPNVTVANQLFNVYFPARDMTVPSSPGQPVVDQLSTQGQARRDALEVVGYEDS

SEQ ID NO: 38181 - protein, 125 aa, Homo sapiens
  misc_feature (1)...(125): Xaa = X or * as defined in Table 2
LRPADPRSLVPGWALGLGPGAILGPGRVTFPGGRPPPTHPPSLSFPPGGRQPLWVPALPAEEGRERLGREREEGRGKAGAGMAXAGLVLXCLQLQVQGQPLGGSWLSTRLRSPRCHPWLLRRHLP

SEQ ID NO: 38182 - protein, 98 aa, Homo sapiens
  DOMAIN (21)..(70): APOLIPOPROTEIN E PRECURSOR APO-E GLYCOPROTEIN PLAS domain identified by eMATRIX, accession number PD02807C, p-value=1.940e- 31, raw score of 8.91
  misc_feature (1)...(98): Xaa = X or * as defined in Table 2
YKSELEEQLTSVAEEMRARLSKELQAXKDRLGENMEKVRGRLVKYRGEVQAMLGESIEELRVRLALYLRKLCTGFLRDADHLXRPAGREYGESKRTLG

SEQ ID NO: 38183 - protein, 1212 aa, Homo sapiens
  DOMAIN (149)..(188): PROTEIN ZINC FINGER ZINC-FINGER METAL-BINDING NU domain identified by eMATRIX, accession number PD01066, p-value=1.938e-28, raw score of 19.43
  DOMAIN (330)..(713): Zinc finger, C2H2 type domain identified by PFam, accession name zf-C2H2, E-value=2.3e-87, PFam score of 303.7
METSSVSSGTDFILLGFSDRPQLEHIISVVVFIIYIVTLKTYNKYTVLRLSPAISQNSNMKMEQCPWQQRSKKLQADAVVLLDESSGPPSQLLWTRQDTQLPQESALLPAPYPAFTKDGSQGNLPQADITLMSQAQDSRSILFQESVTFEDVAVNFTNREWQCLTYAQRHLYKDVMLENYGNMVSLGFPFPKPPLISHLEREVDPCVQDPQDRESLSCSYPVSADKMWPENEKASSQQEIFENGEAYWMKFNSLLKVDSRDPKVREVCVQDVKLENQWETSIREKLREEKEGSEEVTCKKGKNQKVLSKNLNPNSKHSQCNKVLIAQKLHECARCGKNFSWHSDLILHEQIHSGEKPHVCNECGKAFKTRNQLSMHRIIHTGEKPFNCTQCGKAFNSRSALCRHKKTHSGEKPHECRDCGKAFKTRNRLCMHQLIHTGEKPYKCNCCGKAFQFKHSLTIHGRIHTGEKPYECEECGKAFSGSSDLTKHIRIHTGERPYECSKCGRAFSRSSDLSKHKRIHTREKHYGCPQCGKDFSIKAELTKHRRIHTEEKRYRCEECGKAFRHNCKRRAHEREHTGEKPYQCRDCGKTFQDKHCLTIHQRIHTGEKPYKCLECGKAFSGKSNLTNHRRIHTGEKPHKCEVCGMAFHHSSVLRQHKRIHTGEKPYTCSECGTSFRQGSALIGHKRVHTGEKPYECEECGKAFRRHQRTSGSCSAATHPEPPTRCFRTDGSSEEGNRRILDALPLRHRCSLWKVTPGWSPDAAERVSSGFGRRNSTKKRGAVRKSAVLAVYEARRKGQLIKQLQVIIVTELVLGHTARDWNLVSIWKGLLGEIHECTEEWGGAQSSLQRNGVLTDIMWSRITQSLIGRQQSLSPVLSLSSPDSKSFTTRSTFSTNYRSLGSVQAPSYGSQPVCSAASVYAGAGGSGSRISASPSTSFWGGMGSGGLAAGMAGVLAGMGGIQNEKETMQSLKDRLASYLDRVRSMETKNRKLESKIREHLEKKGRQSVESDIHGFRKVIDDTNVTRLQLETEIEALKEELLFLKKNQEEEVKGLQAQIAISGLTVEECEALLNIKVKLEAEIATYRRLLEDGEDFSLRDALDSSNSMQTIRKTTTRPIVRSGGSSVQNKRGKSSGISSDFLHLIQVLEAARASPTSAAPCSTAPSPIDHPRDEECERMAWGWQATPPATPVRDPLGEASWDPESGGDVENLYV

SEQ ID NO: 38184 - protein, 267 aa, Homo sapiens
  DOMAIN (182)..(229): Intermediate filaments proteins domain identified by eMATRIX, accession number BL00226D, p-value=6.023e-26, raw score of 19.10
  DOMAIN (5)..(229): Intermediate filament proteins domain identified by PFam, accession name filament, E-value=6e-69, PFam score of 242.5
  misc_feature (1)...(267): Xaa = X or * as defined in Table 2
IQHPRLSADDFRVNCETEPAMXHAVENDIHGLCELQLETEIQAFKEELLFMKKNHEEEVKGLQAQIASSGLTVVVDAPISQDFAKIMADIWAQYDEVAQKNREELDNNRSQQIEESTTVVTTQSTEVGAAKAMLTELTRTVQFLEINLDSMRNLKASLENSLREVVARYALQMEQLNGILLHLESELAQTWAEGQCQAQEYQALLNIKVKLEAAIATYRRLLEDGKDFNLGDTLDCSNSMQTIQKTTTRQRMDGKVLSETNDTKLRH

SEQ ID NO: 38185 - protein, 48 aa, Homo sapiens
RTSHSNFSFSNWVPLPAPGGPSSTARMPLGYSGSAAGTLGAMSAEVSH

SEQ ID NO: 38186 - protein, 63 aa, Homo sapiens
  DOMAIN (1)..(50): Intermediate filament proteins domain identified by PFam, accession name filament, E-value=1.2e-17, PFam score of 70.1
MKKNHEEEVKGLQAQIASSGLTVEVDAPKSQDLAKIMADIRAQYDELARKEPRGARQVLVSAD

SEQ ID NO: 38187 - protein, 57 aa, Homo sapiens
  misc_feature (1)...(57): Xaa = X or * as defined in Table 2
ICQMILKRRVLSXTQKHQATHGWNSAYSLTAPFPVSCQDHLCXPLXAEAQISIKEEP

SEQ ID NO: 38188 - protein, 106 aa, Homo sapiens
  misc_feature (1)...(106): Xaa = X or * as defined in Table 2
FFFETEFHSVAQTGVQWHDPSSPQPPPPRFKXLSRPSLPSSWDYRHVPSHPGNFLHFQXKRGSTNQAGLELPTSGDLAAFASPSARITGVSHCARPNYQCFLEFKY

SEQ ID NO: 38189 - protein, 302 aa, Homo sapiens
  misc_feature (1)...(302): Xaa = X or * as defined in Table 2
MLLTLAGGALFFPGLFALCTWALRRSQPGWSRTDCVMISTRLVSSVHAVLATGSGIVIIRSCDDVITGRHWLAREYVWFLIPYMIYDSYAMYLCEWCRTRDQNRAPSLTLRNFLSRNRLMITHHAVILFVLVPVAQRLRGDLGDFFVGCIFTAELSTPFVSLGRVLIQACMNEMTESLKQQHTLLYKVNGILTLGNFFPCRILLFPFMVWSYGRKKGLSLVPSTLQHPILTATWANAFPRXAPQIYWFCLLLQKAVRLFDTPQAKKDGXMLLGVRRSLTPAASSTQHSMDQIVPWVASDFGY

SEQ ID NO: 38190 - protein, 94 aa, Homo sapiens
  misc_feature (1)...(94): Xaa = X or * as defined in Table 2
SCHCTPAWILALSPRLECSGAILAHCNLHLWGXSDSPASASRVAGTAGAHCRAWLIFCVLVEMGFHRVAPGLVLNSXAQTIRLPRPPKVLGLQA

SEQ ID NO: 38191 - protein, 343 aa, Homo sapiens
  DOMAIN (51)..(69): RIBOSOMAL PROTEIN L7A FAMILY SIGNATURE domain identified by eMATRIX, accession number PR00882B, p-value=9.031e-13, raw score of 9.47
  DOMAIN (132)..(241): Ribosomal protein L7Ae domain identified by PFam, accession name Ribosomal_L7Ae, E-value=0.00016, PFam score of 24.8
  misc_feature (1)...(343): Xaa = X or * as defined in Table 2
PKVRSPRIKRLAPAPAFVRKQELKKIVDPLLXKKSXEFGHLDRDIQPQKRPPPLLXKWPRYIRVQGRRAILYKRLKGPFCDYPGFTQGPGTPQTSXSSLLKLAHKYRPRDKAQRSKQRLLARAEKKAAAKGAVPQERAHPVLRAGVNPVSPPLVGEQEKLSLVVIAHDRGSPSELVVFLPALGRVKMGVPYCIIKGKGKTGDGLVHQKALHPLSAFTQVNSEDKGAFALKLVGSYQGPNYNDRYDEVRGSFTQNTVIHKSFSQITGWLNLXEVLSDDQLGTAKQNXRNXXPXKSQKTVSQANCLFLSFQIRRHWGGNVLGPKSVARIAKLEKAKAKELATKLG

SEQ ID NO: 38192 - protein, 156 aa, Homo sapiens
GRGVAYRGPSPRGTGPGRGDERLQHGGGSREGPPAAPAAAAPGYGQSCCLIEDGERCVRPAGNASFSKRVQKSISQKKLKLDIDKSVDLFQLQVNTLRRYKRHYKLQTRPGFNKAQLAETVSRHFRNIPVNEKETLAYFIYMVKSNKSRLDQKSEG

SEQ ID NO: 38193 - protein, 209 aa, Homo sapiens
  misc_feature (1)...(209): Xaa = X or * as defined in Table 2
GRGVAYRGPSPRGTGPGRVRXTASARRRTAAKGPPPPQLPPPRATAKSCCLNEDGERCVRPAGNASFSKRVRKSISQKKLKLDIDKSVRHLYICDFHKNFIQSVRNKRKKEDQVYDGRENSSPSTDTDIPEVDLFPACQVNTLRRYKRHXQVARPRPGFNKAPVSRQLXVDTFRNIPVDXKETLALLSSSMVKSNKSRLDQKSGGWQAA

SEQ ID NO: 38194 - protein, 174 aa, Homo sapiens
DFIAVITTRKQLKTKYNAHHSKQAITKHFSPKISDLILCLKKKIMNRHFSKEDIYAAKKHMKKCSPSLAIREMQIKTTMRYHLTPVRMAIIKKSGNNRCRRGCGEIGTLLHCWWDCKLVQPLCKSMWRFLRDLDPAIPLLGIYPKDYKSCCYKDTCTRMFIAALFTIAKTWNQP

SEQ ID NO: 38195 - protein, 60 aa, Homo sapiens; identical to SEQ ID NO: 37268

SEQ ID NO: 38196 - protein, 625 aa, Homo sapiens
  DOMAIN (13)..(68): kw TRANSCRIPTASE REVERSE II ORF2 domain identified by eMATRIX, accession number DM01354Q, p-value=1.000e-40, raw score of 9.23
  DOMAIN (1)..(241): Reverse transcriptase domain identified by PFam, accession name rvt, E-value=2.7e-50, PFam score of 180.5
MQNKGIDAKILNKILAKQIQQHIKKLMHHDQVGFIPGMQGWFNIRKSINVIQHINRAKDKNHMIISTDAEKAFDKIQQPFMLKTLNKLGIDGMYFKIIRAVYDKPTANIILNGQKLEAFPLKTGTRQGCPLSPLLFNIVLEVLARAIRQEKEIKGIQLGKEEVKLSLFADDMIVCLENPIVSAQNLLKLISNFSKVSGYKINVQKSQAFLYTNNRQTESQIMSELPFTIASKRIKYLGIQLTRDVNDLFKENYKPLLKEIKEDTNKWKNIPCSWVGRINIMKMAIMPKVIYRFNAIPIKLPMTFFTELEKTTLKFIWNQKRARITKSILSQKNKAGGITLPDFKLYYKATVTKTAWYWYQNRDIDQWNRTEPSEITPHIYNYLIFDKPEKNKQWGKDSLFNKWCWENWLAIWRKLKLDPFLTPYAKINSRWIKDLNVRPKTIKTLEENLGNTIQDIGMGKDFMSKTPKAMATKDKIDKWDLIKLKSFCTAKETTIRVNRQPTKWEKIFATYSSDKGLISRIYNELKQIYKKKTNNPIKKWAKDMNRHFSKEDIYAAKKHMKKCSSSLAIREMQIKTTMRYHLTPVRMAIIKKTGNNSTTYWQSLTGPAGKQENCSQSQPQDPKYT

SEQ ID NO: 38197 - protein, 260 aa, Homo sapiens
  DOMAIN (186)..(231): kw TRANSCRIPTASE REVERSE II ORF2 domain identified by eMATRIX, accession number DM01354N, p-value=1.000e-40, raw score of 13.17
KPRLENYVKNAEASGADAINWKKGYLVMEDEMNEMKREGKFREKRIKRNEQSLQEIWDYVKRPTLHLIDVPETLNAHKRKQERSKTDTLTSQLKELEKQEQTHSKASRRQEITKIRAELKEIETEKTLQKINESRSWFFERINKIDRPLARLIKKKREKNQIDAIKNDKGDITSDPTEIQTTIREYYKHLYANKLENLEEMDKFLDTYTLPRLNQEEVESLNRPITGSEIVAIINSLPTKKSPGPDGSTAEFYQRYKEEL

SEQ ID NO: 38198 - protein, 713 aa, Homo sapiens; identical to SEQ ID NO: 34589
  DOMAIN (57)..(100): kw TRANSCRIPTASE REVERSE II ORF2 domain identified by eMATRIX, accession number DM01354T, p-value=1.000e-40, raw score of 9.48
  DOMAIN (1)..(179): Reverse transcriptase domain identified by PFam, accession name rvt, E-value=2.8e-15, PFam score of 64.2

SEQ ID NO: 38199 - protein, 1203 aa, Homo sapiens; identical to SEQ ID NO: 34339
  DOMAIN (121)..(166): kw TRANSCRIPTASE REVERSE II ORF2 domain identified by eMATRIX, accession number DM01354N, p-value=1.000e-40, raw score of 13.17
  DOMAIN (211)..(387): Reverse transcriptase domain identified by PFam, accession name rvt, E-value=3.5e-23, PFam score of 90.5
  misc_feature (1)...(1203): Xaa = X or * as defined in Table 2

SEQ ID NO: 38200 - protein, 1189 aa, Homo sapiens; identical to SEQ ID NO: 32525
  DOMAIN (562)..(607): kw TRANSCRIPTASE REVERSE II ORF2 domain identified by eMATRIX, accession number DM01354N, p-value=1.000e-40, raw score of 13.17
  DOMAIN (646)..(871): Reverse transcriptase domain identified by PFam, accession name rvt, E-value=4.9e-50, PFam score of 179.7

SEQ ID NO: 38201 - protein, 540 aa, Homo sapiens
  DOMAIN (35)..(78): kw TRANSCRIPTASE REVERSE II ORF2 domain identified by eMATRIX, accession number DM01354T, p-value=1.000e-40, raw score of 9.48
  DOMAIN (2)..(157): Reverse transcriptase domain identified by PFam, accession name rvt, E-value=1.4e-06, PFam score of 23.8
LNKLGIDGTYLKIIRAIYDKPTANIILNGQKLEAFPLKTGTRQGCPLSPLLFNIVLEVLARAIRQEKEIKGIQLGKEEVKLSLFADDMIVYLENPIVSAQNLLKLISNFSKVSGYKINVQKSQAFLYTNNRQTESQIMGELPFTIASKRIKYLGIQLTRDVKDLFKENYKPLLKEIKEDTNKWKNIPCSWVGRINIVKMAILPKVIYRFNAIPIKLPMTFFTELEKTTLKFIWNQKRARIAKSILSQKNKAGGITLPDFKRYYKATVTKTAWYWYQNRDIDQWNRTEPSEIMPHIYNYLIFDKPEKNKQWEKDSLFNKWCWENWLAICRKLKLDPFLTPYTKINSRWIKDLNFRPKTIKTLEENLGITIQDIGVGKDFMSKTPKAMATKAKIDKWDLIKLKSFCTAKETTIRVNRQPTTWEKIFATYSSDKGLISRIYNELKQIYKKKTNNPIKKWAKDMNRHFSKEDIYAAKKHMKKCSSSLAIREMQIKTTMRYHLTPVRMAIIKKSGNNRCWRGCGEIGTLLHCWWDCKLVPAYSHS

SEQ ID NO: 38202 - protein, 839 aa, Homo sapiens
  DOMAIN (124)..(165): kw TRANSCRIPTASE REVERSE II ORF2 domain identified by eMATRIX, accession number DM01354I, p-value=1.000e-40, raw score of 15.55
  DOMAIN (226)..(451): Reverse transcriptase domain identified by PFam, accession name rvt, E-value=8.5e-07, PFam score of 26.9
MEGVQRDLDSHTLIMGDFNTPLSILDRSTRQKVNKDTQELNSALHQADLIDIYRTLHPKSTEYTFFSAPHHTYSKIDHILGSKALLSKCKRTEIITNCLSDHSAIKLELRIKTLTQSHSTTWKLNNLLLNDYWVHNEMKAEIKMFFETNENKDTTYQNLWDAFKAVCRGKFIALNAHKRKQERSKIDTLTSQLKELEKQEQTHSKASRRQEITKIRAELKEIETQKTLQKINESRSWFFERINKIDRPLARLIKKKREKNQIDTIKNDKGDITTDPTEIQTTIREYYKHLYANKLENLEEMDTFLDTYTLPRLNQEEVESLNRPITGAEIEAIINSLPTKKSPGPDGFTAEFYQRAIRQKKEIKGIQLGKEEVKLSLFADDMIVYLENPIVSAQNLLKLISNFSKVSGYKINVQKSQAFLYTKNRQTESQIMSELPFTIASKRIKYLGIQLTRDVKDLFKENYKPLLKEIKEDTNKWKNIPCSWVGRINIVKMAILPKVIYRFNAIPIKLPMTFFTELEKTTLKFIWNQKRARIAKSILSQKNKVGGITLPDFKLYYKATVTKTAWYWYQNRVIDQWNRKEPSEITPHTYNYLIFDKPEKNKQWGKDSLFNKWCWENWLAICRKLKLDPFLTPYTKINSRWIKDLNVRPKTIKTLEENLGITIQDIGMGKDFMSKTPKAMATKAKIDKWDLIKLKSFCTAKETTIRVNRQPTTWEKIFTTYSSDKGLISRIYNELKQIYKKKTNNPIKKWVKDMNRHFSKEDIYAAKKHMKKCSSSLAIREMQIKSFQRKDQAAIFAILQPPLVITRQTGSGVDLKQTPTDLKLRDLTVRRKMNKQKER

SEQ ID NO: 38203 - protein, 472 aa, Homo sapiens; identical to SEQ ID NO: 35776
  DOMAIN (57)..(100): kw TRANSCRIPTASE REVERSE II ORF2 domain identified by eMATRIX, accession number DM01354T, p-value=1.000e-40, raw score of 9.48
  DOMAIN (1)..(179): Reverse transcriptase domain identified by PFam, accession name rvt, E-value=1.3e-14, PFam score of 62.0

SEQ ID NO: 38204 - protein, 644 aa, Homo sapiens; identical to SEQ ID NO: 34693
  DOMAIN (110)..(151): kw TRANSCRIPTASE REVERSE II ORF2 domain identified by eMATRIX, accession number DM01354I, p-value=1.000e-40, raw score of 15.55
  DOMAIN (287)..(570): Reverse transcriptase domain identified by PFam, accession name rvt, E-value=2.8e-49, PFam score of 177.1

SEQ ID NO: 38205 - protein, 782 aa, Homo sapiens; identical to SEQ ID NO: 34341
  DOMAIN (40)..(86): kw TRANSCRIPTASE REVERSE II ORF2 domain identified by eMATRIX, accession number DM01354O, p-value=1.000e-40, raw score of 8.73
  DOMAIN (73)..(298): Reverse transcriptase domain identified by PFam, accession name rvt, E-value=2.9e-46, PFam score of 167.1
  misc_feature (1)...(782): Xaa = X or * as defined in Table 2

SEQ ID NO: 38206 - protein, 569 aa, Homo sapiens
  DOMAIN (253)..(298): kw TRANSCRIPTASE REVERSE II ORF2 domain identified by eMATRIX, accession number DM01354N, p-value=2.080e-40, raw score of 13.17
MDEAGNHHSQQTIARTKNQTLHVLTHSNLNIWTQTAPAILEETLEIRGSSSMKTTAALRNQYSVPIFKRSAIKLELRIKKFTQNRSTTWKLNNLLLNGYWVHNEMKGEIKMFFETNKNKNTTYQNLWDTFKAVCRGKFIALNAHKRKHERSKIDTLTSQLKELEKQEQTHSKASRRQEMTKIRTELKEIETQKTLQKINESRSWFFEKINKIDRPLARLIKKKREKNQIDVIKNDKGDITTDPTEIQTTIREYYKHLYANKLENQEEMDKFLNTYTLPRLNQEEVESLNRPITGSQIEAIINSLPTKKSPGPDGFTAEFYQRYKEELATVTKTAWYWYQNRDIDQWKRTELLEIMPHIYNYLIFDKPDKKKKWGKDSLFNKWCWENWLDICRKLKLDPFLTPYTKINSRWIKDLHVRPKTIKTLQENLGNTIQDIGVGKDFMSKTPKAMATKAKIDKWDLIRLKSFCTAKETTIRVNRQPTEWKKIFATYSSDKGLGLISRIYNELQQIYRKKTNNPIKKWVKDMNRHFSKEDIYAAKKHMGKMLIITGHQRNANQNHNEIPSISHQLE

SEQ ID NO: 38207 - protein, 754 aa, Homo sapiens; identical to SEQ ID NO: 32653
  DOMAIN (208)..(254): kw TRANSCRIPTASE REVERSE II ORF2 domain identified by eMATRIX, accession number DM01354O, p-value=1.000e-40, raw score of 8.73
  DOMAIN (241)..(418): Reverse transcriptase domain identified by PFam, accession name rvt, E-value=6.7e-11, PFam score of 49.6

SEQ ID NO: 38208 - protein, 713 aa, Homo sapiens
  DOMAIN (110)..(151): kw TRANSCRIPTASE REVERSE II ORF2 domain identified by eMATRIX, accession number DM01354I, p-value=1.000e-40, raw score of 15.55
  DOMAIN (547)..(703): Ferritins domain identified by PFam, accession name ferritin, E-value=3.8e-86, PFam score of 292.3
MGDFNTPLSTLDRSTRQKVNKDIQEFNSALHQADLIDIYRTLHPKSTEYTFFSAPHHTYSKTDHIVGSKALLSKCKRTEIITNCLSDHSAIKLELRIKKLTQNRSTTWKLNNLLLNDYWVHNKMKAEIKMFFETNENKDTTYQNLWDTFKAVCRGKFIALNAHKRKQGRSKIDTLTSQLKELEKQEQTHSKASRRQEITKIRAELKEIETQKNLQKINESRGWFFEKINKIDRLLARLIKKKREKNQIDAIKNDKGDITTNPTEIQTTIREYYKHLYANKLENLEEMDKFLDTYTLPRLNQEEVESLNRPITGSEIEAIINSLPTKKSPGPDGFTAEFYQRYKEELKIKYLGIQLTRDVKDLFKENNKPLLYEIKEDTNKWKNIPCSWVGRINIVKMAILPKEIYRFNAIPIKLPMTFFTELEKTTLKFIWNQKRAHIAKSILSQKNKAGGITLPDFKLYYKATVTKTAWNMDEAGNHHSEQTIARIENQTPHVLTHRWEFNNENTWTQAAALATAPTSPVCSPALALPAMATAQPSQVRQKYDTNCDAAINSHITLELYTSYLYLSMAFYFNRDDVALENFFRYFLRLSDDKMEHAQKLMRLQNLRGGHICLHDIRKPECQGWESGLVAMESAFHLEKNVNQSLLDLYQLAVEKGDPQLCHFLESHYLHEQVKTIKELGGYVSNLRKICSPEAGLAEYLFDKLTLGGRVKET

SEQ ID NO: 38209 - protein, 597 aa, Homo sapiens
  DOMAIN (217)..(264): kw TRANSCRIPTASE REVERSE II ORF2 domain identified by eMATRIX, accession number DM01354V, p-value=1.000e-40, raw score of 12.97
MGKKQNRKTGNSKMQSASPPPKECSSSPAMEQSWMENDFDELREEGFRLSNYSELQEDIQTKGKEVENFERNLEECISRITNTEKCLKELMELKTKARELREECRSLRSRCDQLEERVSAMEDEMNEMKLNQEEVESLNRPITGAEIVAIINSLPTKKSPGPDGFTAEFYQRYKEEQLISNFSKVSGYKINVQKSQAFLYTNNSQTESQIMSELPFTIASKRIKYLGIQLTRDVKDLFKENYKPLLKEIKEDTKKWKNIPCSWVGRINIVKMAILRKVIYRFNAIPIKLPMTFFTELEKTTLKFIWNQKRAPVAKAILSQKNKAGGITLPDFKLYYKATVTKTAWYWYQNRDIGQWNRTEPSEITPHVYNYLIFDKPEKTKQWGKDSLFNKWCWENWLAICRKLKLDPFLTPYTKINSRWIKDLNVRPKTIKTLEENLGITIQDIGMGKDFMSKTPKAMATKDKIDKWDLIKLKSFCTAKETTIRVNRQPTEWEKTFATYSSDKGLISRIYNELKLIYKKKTNNPIKKWAKDMNRHFSKEDIYAAKKHMKKCSSSLAIREMQIKTTVRYHLTPVRMAIIKKSGNNRDMDEVGNHHSQ

SEQ ID NO: 38210 - protein, 626 aa, Homo sapiens
  DOMAIN (7)..(54): kw TRANSCRIPTASE REVERSE II ORF2 domain identified by eMATRIX, accession number DM01354V, p-value=1.000e-40, raw score of 12.97
  DOMAIN (348)..(580): Reverse transcriptase domain identified by PFam, accession name rvt, E-value=1.7e-43, PFam score of 157.9
MSELPFTIASKRTKYLGIQLTRDVKDLFKENYKPLLKEIKEDTNKWKNIPCSWVGRINIMKMATLPNVLYRFNAIPIKLPVTFFTELEKSTLKFIWNQKRARIAKSILSQKNKAGGITLPDFKLYYKATVTKTAWYWYQNRDIDQWNRTEPSEITPHIYNYLIVDKPEKHKQWGKDSLFNKWCWENWLAICRKLKPDPFLTPYTKINSRWIKDLNVRPKTIKTLEENLGITIQDIGMGKDFMSKTPKAMATKAKIDKWDLIKLKSFYTAKETTIRVNRQPTKWENIFATYSSDKGLISRIYKELKQIYKKKTNNPIKKWAKDMNRHFSKEDIYAAKKHMKKCSSSLAIREMQIKTTTRYHLTPLRMAIIKKSGNNRIQGWFNISKSINVTHHTNRTKNKNHMIISIDAEKAFNKIQYPFMLKTLNKLGVDGTYLKTVTAIYDKPTVNIILNGQKLEAFPLQTSTRQGCSLSPLLFNTVLEVLARAIRQEKEIKGIQIGGEEVKLSLFADDMTVYLQNPIISAQNLLKLISNISKVSGYKINVQKSQAFLYTNNRQTERQIMSELPFTIASKRRKYLGIQLTRDVKDLLKENYKPLLKEIREDTNKWKNIPYSWIGRINIVKMAILP

SEQ ID NO: 38211 - protein, 697 aa, Homo sapiens; identical to SEQ ID NO: 37095
  DOMAIN (424)..(449): 7 kw REVERSE TRANSCRIPTASE RNA POLYMERASE domain identified by eMATRIX, accession number DM00895E, p-value=4.517e-10, raw score of 15.72
  DOMAIN (395)..(620): Reverse transcriptase domain identified by PFam, accession name rvt, E-value=6.2e-48, PFam score of 172.7

SEQ ID NO: 38212 - protein, 583 aa, Homo sapiens
  DOMAIN (57)..(100): kw TRANSCRIPTASE REVERSE II ORF2 domain identified by eMATRIX, accession number DM01354T, p-value=1.000e-40, raw score of 9.48
  DOMAIN (1)..(179): Reverse transcriptase domain identified by PFam, accession name rvt, E-value=8.5e-14, PFam score of 59.3
  misc_feature (1)...(583): Xaa = X or * as defined in Table 2
MIISIDAEKAFDKIQQPFMLKTLNKLGIDGTYFKIIRANYDKPTANIILNGQKLEALPLKNGTRQGCPLSPLLFNTVLEVLARAIRQEKEIKGIQLGNVEVKLSLFADDMIVYLENPIVSAQNLLKLISKFSKVSGYKINVQKSQAFLYTNNRQTESQIMSELPFTIASKRIKYLGIQLTRDVKDLFKENYKPLLKEIKEDTNKWKNIPCSWVGRINIMKMAILPKVIYRFNAIPIKLPMPFFTELEKTTLKFIWNQKRARIAKSILSQKNKAGGITPPDFKLYYKATVTKTAWCWYQNRDIDQWNRTEPSEITPHIYNYLIFDKPEKDKQWGKDSLFNKRCWENWLAICRKLKLDPFLTPYTKINSRWIKDLKVRPKTIKTLQENLGFTIQDIGMGKDFMSKTPTAMGTKDKIDKWDLIKLKSFCTAKETTIRVNRQPTKWEKIFTTYSSDNGLISRIYNELKQIYKKKTNNPIKQWAKDMNRHFSIEDIYAAKKHMKKCSSSLAIREMQIKTTMRYHLTPVRMAIIKKSGNNRNHLDFKHIRILGICYLDXKIYQPXLHLVSRNRKPEKLSPKQAAGFPYR

SEQ ID NO: 38213 - protein, 846 aa, Homo sapiens
  DOMAIN (222)..(267): kw TRANSCRIPTASE REVERSE II ORF2 domain identified by eMATRIX, accession number DM01354N, p-value=1.000e-40, raw score of 13.17
  misc_feature (1)...(846): Xaa = X or * as defined in Table 2
MGDFNTPLSTLDRSTRQKVNKDTQELNSALHQPDLIDIYGTLHPKSTEYTFFSAPHHTYSKIDHILGSKALLSKCKRTEIITSYLSDHSAIKLELRIQNLTQNHSTTWKLNNLLLNDYWLHNEMKAEIKMFFETNENKDTTYQNLWDAFKAVCRGKFIALNAHKRKQERSKTNTLTSINKIDRPLARLIKKKREKTQIDAIKNDKGDITTDPTEMQTTIREYYKHLYANKLENLEEMDKFLNTYTLPRLNQEEVESLNRPITGAEIVAIINSLPTKKSPGPDGFTAEFYHELLKENKIPRNPTYRGCEGPLQGELQTTAQXNKRGYKQMEEHSMLMDRKNQYRENGHTAQGNLQIQCHPHKATNDFLHRSGKNYFKVHMEPKKSPHRQVNPKPKEQSWRHHAIXLQTILQGYSNQNSMVLVPKQRYRSMEKNRALRNNAAYLQLSNLXQTXEKQAMGKGFLIXXMVLGKLASHMXKAETGSLPYTLYKNQFKMDXRLKHXTXNHKNPRRKPRHYHSGHRHGQGLHVXNTKSNGNKSQNXQMGSNXTKELLHSKRNYHQSEQATYKLGENFCNLPIXPRANNQNLQXTQTNLQEKNKQPHQKVGKGHEQTLLKRRHLCSQKTHEKMLSITGHQRNANQNHNEIPSHTSXNGNHXKVRKXQVLNGLDDVQLFRXNKQPCCSHKACLVVSSYRRAXSLVSXLGLGDLPWEINPPSSCSLLREKDPPTTSGPQTYQPKKHLTNFKSACFERIKACYHSPAKAWPFKAYKLSLQFPHFTCLKTRQALQVSSGSMPYQPNGFAYPPHGAKPIYSPILNTSLHNPLFCSGSQTCFLYYSFAPVIPASLRFHLH

SEQ ID NO: 38214 - protein, 531 aa, Homo sapiens
  DOMAIN (236)..(281): kw TRANSCRIPTASE REVERSE II ORF2 domain identified by eMATRIX, accession number DM01354N, p-value=1.000e-40, raw score of 13.17
  misc_feature (1)...(531): Xaa = X or * as defined in Table 2
MGKKQNRKTGNSKKQSTSPPPKERSSSPAMEQSWMENDFVELREEGFRRSNYSELQEDIQTKGKEVENFEKNLEECMTRITNTEKCLKELMELKTKARELHEECRSLRSRCDQLEERVSAMEDEMNEMKREGKFREKRIKRNEQSLQEIWDYVKRPNLHLMGVPESDGENGSKLENTLQDIIQENFPNLARINKIDRPLARLIKKKREKNQIDTIKNDKGDITTNPTEIQTTIREYYKHLYANKLENLEEMDTFLDTYTLPRLNQEEVESLNRPITGAEIVAIINSLPTKKSPGPDGSIAEFYQRYKEEPADKQLQQSLSIQNQCTKITSILIHQQQTNREPNHEXTPIHNCFKENKIPRNPTYKGCEGLLPGELQTTAQGNKRGYKQTEEHSMLMGRKNQYRENGHTAQGNFXIQCHPHQATNAFLHRIGKNYFKVHMEPKKSPHRQVNPKPKEQSWRHHTTXLQTILQGYSNQNSMVLVPKQGYRSMEQNRALRNNAAYLQLSDLXQTXEKHAMGKEFPIXXMVLGKLA

SEQ ID NO: 38215 - protein, 778 aa, Homo sapiens; identical to SEQ ID NO: 32655
  DOMAIN (218)..(264): kw TRANSCRIPTASE REVERSE II ORF2 domain identified by eMATRIX, accession number DM01354O, p-value=1.000e-40, raw score of 8.73
  DOMAIN (251)..(476): Reverse transcriptase domain identified by PFam, accession name rvt, E-value=4.4e-42, PFam score of 153.2

SEQ ID NO: 38216 - protein, 558 aa, Homo sapiens
  DOMAIN (244)..(291): kw TRANSCRIPTASE REVERSE II ORF2 domain identified by eMATRIX, accession number DM01354V, p-value=1.000e-40, raw score of 12.97
  DOMAIN (35)..(257): Reverse transcriptase domain identified by PFam, accession name rvt, E-value=2.3e-05, PFam score of 6.6
MGDFNTLLSILDRSTRQKVNKDIQDLNSALHQADLIDIYRTLHPKSTEYTFFSAPHRTYSEIDHIVGSKALLTKCKRTEITANCLSDHSAIKLELRIKKLPQNHTTTWKLNNLLLNDYWVNNKMKAEIKMFFETNENKDTMYQHLWDTFKAVCRVLEILARAIRQEKEIKGIQLGKEEVKLSLFADDMIVYLENPNVSAQNLLKLISNFSKVSGYKISVQKSQAFLYTNNRKTESQITSELPFTIATKRIKYLGMQLTRDVKDLFKENYKPLLNKIKEVTNKWKNIPCSWMGRINIVKMAILPKIIYRFNAIPIKLPMIFFTELEKTTLKFIWNQKRAHITKTILSKKNKAGGITLPHFKLYYKTTATKTAWYWYQNRDIDQGNRTEASEMTPHIYNHLILDKPDKNKKWGKDSLFNKWCWENWLAICRKLKLDPFLTPYTKINSRWIKDLNDRPKTIKALEENLGNTIQDIGMGKDFKTKAPKAMATKAKIDKWDLIKQKSFCTAKETTIRVNRQPTEWEKNFAIYPSHKRLISRIFKELKQIYMKKTTPSKSGQRI

SEQ ID NO: 38217 - protein, 573 aa, Homo sapiens
  DOMAIN (260)..(305): kw TRANSCRIPTASE REVERSE II ORF2 domain identified by eMATRIX, accession number DM01354N, p-value=1.000e-40, raw score of 13.17
  DOMAIN (275)..(473): Reverse transcriptase domain identified by PFam, accession name rvt, E-value=2.4e-08, PFam score of 41.2
  misc_feature (1)...(573): Xaa = X or * as defined in Table 2
MAGYPSEMKLPEELSGSNICCSAVFTVLQPLLLIPRQTGSGVDLRQTPTDLQLRVLTVRRKNNKQKRTSTPKPHLYVTIIKDQRSKKLTQNHSTTWKLNNLLLNDYWVNNEMKAEIKMFFETSENKGTIYQNLWDTFKAVCRGKFIALNAHKRKQERSKIDTLTSQLKELEKQEQTHSKASRRQEITKIRAEQKEIETQKTLQKINESRSCFFEKINKIDRLLARRIKKKREKNQIDAIKNDKGDITADPTEIQSTIREYYKHLYTNKLENLEEMDKFLDTYTLPRLNQEEDESLNRPITGSEIEAIINSLPAKKSPGPDRFTAEFYQRYKEELHINRTKDKNHMTISVDAENAFDKIQQPFMLKTLNKLVLEVLARAIRQEKEIKGIQLGKQEVKLSLFADDVIVYLENPIVSAQNLLKLISNFSKVSGYKINVQKSQAFLYSNNRQTESQIMNELSFTIASKRIKYLGIQLTRDVKDLFKENYKPLLNEIKDDTNKWKNIPCSWVGRINIVKMGILPKVVYRFNAIPIKLPMTFFTELEKTTLKFIWNQKRARIAMTILSXKNKAGGITLP

SEQ ID NO: 38218 - protein, 770 aa, Homo sapiens
  DOMAIN (10)..(65): kw TRANSCRIPTASE REVERSE II ORF2 domain identified by eMATRIX, accession number DM01354Q, p-value=1.000e-40, raw score of 9.23
  DOMAIN (1)..(238): Reverse transcriptase domain identified by PFam, accession name rvt, E-value=2.7e-49, PFam score of 177.2
MNIDAKILNKILANRIQQHIKKLIHHDQVGFIPGMQGWFNIRKSINIVQHINRTNDKNHMIISIDAEKAFDKIQQRFMLKTLNKLGIDGTYLKIIRAIYDKSTANIVLNGQKLEAFPLKTGTRQGCPLSPLLFNIVLEVLARAIRQEKEIKGIQLRKEEIKLSLFADDMIVHLENPIVSAQNLLKLIDNFSKVSGYKINVQKSQAFLYTNNRQTESQIMSELPFTIASERIKYLGIQLTRDVKDLFKENYKPLLNDIKEDTNKWKNTPRSWVGRINIMKMAILPKVIYRFNAIPIKLPMTFFTELEKTTLKFIWNQKGARIAKSILIYRFNAQELEKTTLKFIWNQKGARIAKSILSQKNKAGGITLPDFKLYYKATVIKTAWYWYQNRDIDQWNRTEPSEIMPHIYNHLIFDKPDKNKKWGNDSLFNKWCWENWLAICRKLKLDPFLIPYTKINSRWIKDLNVRPKTIKTLEENLGNTIQDIAMGKDFMSKTPKAMATKAKIDKWDLINLKSFCTAKETTIRVNRQPIEWEKIFAIYSSDKGRISRIYNELKQIYKKKTNNPIKKWAKDMNRHFSKEDIYAAKRHMKKCSSSLAIREMHIKTTMRHHLTSVRMAIIKKLGNDWCWRGCGEIGRLLHCWWDCKLVQPLWKSVWRFLRDLELETPFDPASPLLGIHPKDYRSCCYKDTCTRMFTAALFTIAKTWNQPKCPSMIDWIKKMWHIYTMEYYAAIKKDEFMSFAGTWIKLETIILSKLSQGQKTKHHMFSLIDGN

SEQ ID NO: 38219 - protein, 200 aa, Homo sapiens; identical to SEQ ID NO: 37779
  DOMAIN (123)..(172): kw TRANSCRIPTASE REVERSE II ORF2 domain identified by eMATRIX, accession number DM01354Z, p-value=4.600e-33, raw score of 9.06

SEQ ID NO: 38220 - protein, 328 aa, Homo sapiens
  DOMAIN (143)..(188): kw TRANSCRIPTASE REVERSE II ORF2 domain identified by eMATRIX, accession number DM01354N, p-value=1.000e-40, raw score of 13.17
MFFETNENKHTTYQNLWDAFKAVCRGKFIALNAHKRKQERSKIDTLTSQLKELEKQEQTHSKASRRQEITKIRAELKEIETQKTLQKINESRSWFFERINKIDRPLARLIKKKREKNQIDAIKNDKGDITTDPTEIQTTIREYYKHLCANKLENLEEMDKFLDTYTLPRLNQEEVESLNRPITGSEIVAIINSLPTKKSPGPDGFTAEFYQRNPTYKGCEGTRQGELQITAQGNKRGYKQMEEHSMLMGRKNQYHENGHTAQGIQLTRDVKDPFKENYKPLLNEIKGYKQMEEHSMLMGRKNQYHENGHTAQDALAANQQKPLKDLIL

SEQ ID NO: 38221 - protein, 692 aa, Homo sapiens
  DOMAIN (385)..(410): 7 kw REVERSE TRANSCRIPTASE RNA POLYMERASE domain identified by eMATRIX, accession number DM00895E, p-value=4.931e-10, raw score of 15.72
  DOMAIN (356)..(527): Reverse transcriptase domain identified by PFam, accession name rvt, E-value=3.8e-14, PFam score of 60.4
MGDFNTPLSTLDRPTRQKVNKDIQELNSALHQADLIDIYRTLHPKSTEYTFFLAPHHTYSKIDHILGSKALLSKCKRTEIITNYLSDHSAIKLELRIKKLTQNRSTKWKLNNLLLNDYWVHNEIKAEIKMFFGKNENKDTTYQNLWDTFKAVCRGKFIALNAHKRKQERSKIDTLTSQLNELEKQEQTHSKASRRQEITKIRAEQKEMETQKALQKINEARSWFFEKINKIDRLLARLIKKKREKNQIDTIKNDKGDITTDPTEIQTTIREYYKHLYANKLENPEEMDKFLDTYTLPRLNQEEVESLNRPITGSEIEAIINSLPTKKSPGTDGFTAEFYQRYKEELVPFLLKRFQSIEKEGILPNSFYEASIILIPKHGRDTTKKENFRPIYLMNIDAKILNKILANRIQQHIKKLIHYDQVGFIPGMQGRAIRQEKEIKGIQLGKEEVKLSLFADDMIVYLENPIVSAQNLLKLISNFSKVSGYKINVQKPQAFLYTNNRQTESQIMSELPFTIASKRIKNLGIQLTRDVKDLFKENYKPLLNEIKEDTNKWKNIPCSWVGRINIMKMVILPKGLAPADKLGAVLKERVTFPTQLIKWHAQDAGKGAQCDCGVVICSRVALLTSRHHPILPSDSQNCKEFQVFTKLNANSKKRSAQQKHYKDEVLALLLPLAPAHLAGCHDAQTQSQQQQG

SEQ ID NO: 38222 - protein, 624 aa, Homo sapiens
  DOMAIN (211)..(258): kw TRANSCRIPTASE REVERSE II ORF2 domain identified by eMATRIX, accession number DM01354V, p-value=1.000e-40, raw score of 12.97
  DOMAIN (1)..(224): Reverse transcriptase domain identified by PFam, accession name rvt, E-value=2.6e-30, PFam score of 114.1
MELKTMVQELRDTSTSFSSQFDQVEERVSEIEDQMNEMKTNDKNHMTISIDAEKAFNKIQQPFMLKTLNKLGIDVTYLKIIRDIYGKPTANIILNGQKLGAFPLKTGTRQGCPLPPLLFNVVLEVLARAIRQEKEMKNIQLEKEEVKLSLFADDMIVYLENPIILAPNLLKLISNFSKVSGYKTHVQKSQAFLYTNNRQTESQITSELPFAIASKRIKYLGIQLTRDVKDLFKENYKPQLNEIKEDTNKWKNIPCSWIGRINIVKMAILPKNWKKTTLKFIWDQKRACIAKTILSKKNKAGGITLRDFKLYYKATVTKTAWYWYQNRDIDQWNRIEPSKIIPHIYNHLIFDKSDKNKQWGKDSLFNKWFWENWLAICRKLKLDPFLTPYTKINSRWIKKVNVRPKTIKTLEENLGNTNQATGMGKDFMTKTPKAMATKAKIDKWDLIKLKNFCTAKETTIRVNRHTTEWEKIFAIYSSDKGLISRIYNELKRIYKKTNNPIRKWVKDTNRHFSKEDIYAAKRHMKKYSSSLAIREMQIKTTMRYHLTPVRMAIIQKSGNNRCWRGCGEIEMLLHCWRDRKLVQLLWKTVWRFLKDLELEIPFDPAIPLLDIYPKDYKSCCYKDT

SEQ ID NO: 38223 - protein, 1102 aa, Homo sapiens
  DOMAIN (543)..(589): kw TRANSCRIPTASE REVERSE II ORF2 domain identified by eMATRIX, accession number DM01354O, p-value=1.000e-40, raw score of 8.73
  DOMAIN (576)..(801): Reverse transcriptase domain identified by PFam, accession name rvt, E-value=5.9e-48, PFam score of 172.8
MNAGKGMEKGEPFYTADSEKTLRNVCGESGDAVTQGLRFPESAQRVSHPLLQLRFGGNVSPAAQADHLVLCPQDVSRLLLAELPRFAGAEGLSDNSLLSSLSHCSDSISSDEEELRTLGSSGSESSTPENVGPPFLMDENSWFNKCKRVKQKYQLTLEQKGYLEELLRLRENQLSESVSQNKILLQRIEDSDLAHKLEKEQLEYIIVELQDQLNRPNQLDLFQAFCAEIAGLSQVFQAMGLPQAEGLNTSCAGEAKLLPGHWQNTQAGQCRLCSVHPLTGMARQNSEDKSTHHLNIHRTVLKNNDLRSRQELTAHLTNQWPSPGALDVNAVALDTLLYRKHNKQWYEKSYQSLDQLSAEVSLSQTSLDPGQSQEGDGKQDTLNVMSEAPHHTYSKIDHIVGSKALLSKCKRTETTTNCLSDHSAIKLELRTKKLTQNRSTTWKLNNLLLSDYWVHNEMKAEIKMFFETNENKDPTYQNLWDTFKAVCRGKFIALNAHKRKQERSKIDTLTSQLKELEKQEQTHSKASRRPITGSEIVTIINSLPTKKSPGPDGFTAEFYQRYKEELVPFLLKLFQSIEKERILPNSFYEASIILIPKPGRDTTKKENSRPISLMNIDAKILNKILANRIQQHIKKLIHHDQVGFIPGMQGWFNIRKSINVIQHINRTKDKNHMIISIDAEKAFDKIQQPFMLKTLNKLVLEVLARAIRQEKEIKGIQLGKEEVKLSLFADDMIVYLENPIVSAQNLLKLISNFSKVSGYKINVQNSQAFLYTNNRQTESEIMSELPFTIASKRIKYLGIQLTRDVKDLFKQNYKPLLNEIKEDTNKWKNTPCSWVGRVNIVKMAILPKVIYRFNATPIKLPMTFFTELEKTTLKFMWNQKRARIAKSILSQKNKARGITLPDFKLYYNATVTKTAWYWYQNRDIDQWNRTEPSEIMPHIYNHLIFDKPDKNQQWGKDSLFNKWCWENWLAICRKLKLDPFLTPYTKINSRWIKDLHVRPETIKTLEENLGNTIQDIGMGKDFMSKTPKAMATKAKIDKWDLIKLKSFCTAKETTIRVNRQPTKWEKISATYSSDKGLISRIYNELKQIYKKKTTPSKSGRRT

SEQ ID NO: 38224 - protein, 1026 aa, Homo sapiens; identical to SEQ ID NO: 32690
  DOMAIN (110)..(151): kw TRANSCRIPTASE REVERSE II ORF2 domain identified by eMATRIX, accession number DM01354I, p-value=1.000e-40, raw score of 15.55
  DOMAIN (356)..(550): Reverse transcriptase domain identified by PFam, accession name rvt, E-value=8.6e-35, PFam score of 129.0

SEQ ID NO: 38225 - protein, 454 aa, Homo sapiens; identical to SEQ ID NO: 37286
  DOMAIN (316)..(361): kw TRANSCRIPTASE REVERSE II ORF2 domain identified by eMATRIX, accession number DM01354N, p-value=1.000e-40, raw score of 13.17
  DOMAIN (389)..(453): Intermediate filament proteins domain identified by PFam, accession name filament, E-value=7.5e-09, PFam score of 37.1

SEQ ID NO: 38226 - protein, 1083 aa, Homo sapiens; identical to SEQ ID NO: 36966
  DOMAIN (667)..(692): 7 kw REVERSE TRANSCRIPTASE RNA POLYMERASE domain identified by eMATRIX, accession number DM00895E, p-value=3.333e-11, raw score of 15.72
  DOMAIN (638)..(892): Reverse transcriptase domain identified by PFam, accession name rvt, E-value=1.2e-70, PFam score of 248.1

SEQ ID NO: 38227 - protein, 919 aa, Homo sapiens
  DOMAIN (110)..(151): kw TRANSCRIPTASE REVERSE II ORF2 domain identified by eMATRIX, accession number DM01354I, p-value=1.000e-40, raw score of 15.55
  DOMAIN (280)..(518): Reverse transcriptase domain identified by PFam, accession name rvt, E-value=7.5e-63, PFam score of 222.2
MGDFNTPLSTLDRSTRQEVNKDTQELNSALHQVDLIDIYRTLHPKSTEYTFFSAPHYTYSKIDHIVGSKALLSKCKRTEIITNCLSDHSAIKLELRIKKLTQNHSTTWKLNNLLLNDYWVNNEVKAEIKMFFETNENKDTTYQNLWDTFKAINKIDRPLARLIKKKREKNQIDAIKNDKGDITTNPTEIQTTIREYYKHLYANKLENLEEMDKFLDTYILPRLNQEEVEPLNRPITGSEIEEIINSLPTKKTPGPDGFTAEFYQRYKEELVPILLKLFQSIEKEGILPNSFYEASIILIPKPDRDTTKKENFRPISLMNIDVKILNKILANRIQQHIKKLIHHDQVGFIPGMQGWFNIRKSINVIQHINRTKDKNHMIISIDAEKAFDKIQQPFMLKTLNKLGIDGTYLKIIRAIYDKPTADIILNGQKLEAFSLKTGTRQGCPLSPLLFNIVLEVLARAVRQEKEIKGIRLGKEEVKLSLLADDMIVYLENPIVSAPNLLKLISNFSKRIKYLGIQLTRDVKDLFKKNYKPLLNEIKEDTNKWKNIPCSWVGRINIVKMAILPKVIYRFNAIPIKLPMTFFTELEKTTLKFIWNQKRACIAKSILNQKNKAGGIMLPDFKLYYKATGTKTAWYWYQNRDIDQWNRTQPSEIMPHIYNYLIFDKPDKNKKWGKDSLFNKWCWENWLAICRKLKLDPFLTPYTKINSRWIKDLNVSPKTIKTLEENLGNTIQDIGMGKDVMSKTPKAMATKAKIDKWDLIKLKSFCTAKETTIRVNRQPTEWEKIFATYSSDKGLIFRIYNELKQIYKKKTNNLIKKWAKNMNRHFSKEDIYAAKKHMKKCSSSLAIREMQIKTTMRYHLTPVGMAIIKKSGNNSLSNQMYRIQKMQVQAQIQAYNVITNNNYNNNGIQLRDLTLKIPTE

SEQ ID NO: 38228 - protein, 756 aa, Homo sapiens; identical to SEQ ID NO: 36634
  DOMAIN (253)..(294): kw TRANSCRIPTASE REVERSE II ORF2 domain identified by eMATRIX, accession number DM01354I, p-value=1.000e-40, raw score of 15.55
  DOMAIN (42)..(239): AP endonuclease family 1 domain identified by PFam, accession name AP_endonucleas1, E-value=1.1e-31, PFam score of 118.7
  misc_feature (1)...(756): Xaa = X or * as defined in Table 2

SEQ ID NO: 38229 - protein, 1576 aa, Homo sapiens
  DOMAIN (1385)..(1401): CHYMOTRYPSIN SERINE PROTEASE FAMILY (S1) SIGNATURE domain identified by eMATRIX, accession number PR00722A, p-value=6.087e- 16, raw score of 12.27
  DOMAIN (870)..(1571): Trypsin domain identified by PFam, accession name trypsin, E- value=2.6e-129, PFam score of 409.7
MGDFNTPLSTVDRSMRQKVDKDTQELNSALHQADLIDIYRTLHPKSTEYTFFSAPHHTYSKIDNIIGSKALLSKCKGTEIITNSLSDHSAIKLELRIKKLTQNHSTTEKLNNLLLNDYWVHNEMKAEIKMFSETNENKDTTYQNLWDTFKAVCRGKFIALNAHKRKQERSKIDTLTSQLKELEKLNQEEVESLNRPITGAEIVAIINSLPTKKSPGPDGFTAKFYWRYKEELVPFLLKLFQSIEKEGILPNSCYEASIILIPKPGRDTTKKENFRPISLMNIDAKILNKILANRIQQHIKKLIHHDQVGFIPGMQGWFNICKSINVIQHINRTKDKNHMIISIDAEKAFDKIQQPFMLKTLNKLAQNLLKLISNFSKVSGYKINVQKSQAFLYTNNRQTESQIMSELPFTTALKRIKYLGIQLTRDVKDLFKENYKPLLKEIKEDTNKWKNIPCSWVGRINILKMATLPKVIYRFNAIPIKLLMTFFTELEKTTLKFIWNQKRARIAKSILNQKNKAGGITLPDFKLYYKATVTKTAWYWHQNRDRDQWNRTEPSETMLHIYNYLIFDKPDKNKQWGTDSLFNKWCWENWLAIWRKLKLDPFLTPYTKINSRWIKDLHIRAKTIKTLEENLGNTIQYIGMGKDFMSETPKAMATKAKIDEWDLIKLKSFCTAKETTIRVNRQPTKWEKIFATYSSDKGLISRIYNELKQIYKKKTNNPIKKWAKDMNRHFSKEDIYAAKKHMKKCSSSLAIREMQIKTTMRYHLTPVRMAIIKKSGNNRCWRGCGEIGTLLHCWWDCKLVQPLWKSVWRFLRDLELEIPFDPAIPLLGIYPKDYKSCCYKDTCTRLKCGIRMVNMKSKEPAVGSRFFSRISSWRNSTVTGHPWQVSLKSDEHHFCGGSLIQEDRVVTAAHCLDSLSEKQLKNITVTSGEYSLFQKDKQEQNIPVSKIITHPEYNSREYMSPDIALLYLKHKVKFGNAVQPICLPDSDDKVEPGILCLSSGWGKISKTSEYSNVLQEMELPIMDDRACNTVLKSMNLPPLGRTMLCAGFPDWGMDACQGDSGGPLVCRRGGGIWILAGITSWVAGCAGGSVPVRNNHVKASLGIFSKVSELMDFITQNLFTGLDRGQPLSKVGSRYITKALSSVQEVNGSQRGKGKVCGKILPSPLLAETSEAMVPFVSDTEDSGSGFELTVTAVQKSEAGSGCGSLAILVEEGTNHSAKYPDLYPSNTRCHWFICAPEKHIIKLTFEDFAVKFSPNCIYDAVVIYGDSEEKHKLAKLCGMLTITSIFSSSNMTVIYFKSDGKNRLQGFKARFTILPSESLNKFEPKLPPQNNPVSTVKAILHDVCGIPPFSPQWLSRRIAGGEEACPHCWPWQVGLRFLGDYQCGGAIINPVWILTAAHCVQLKNNPLSWTIIAGDHDRNLKESTEQNSTSAQAKLNDFSYVGTELHLNLNTFLTTLSAYFIIELSLNVSSLDGGLASRLQQIQVHVLEREVCEHTYYSAHPGGITEKMICAGFAASGEKDFCQGDSGGPLVCRHENGPFVLYGIVSWGAGCVQPWKPGVFARVMIFLDWIQSKIN

SEQ ID NO: 38230 - protein, 894 aa, Homo sapiens
  DOMAIN (272)..(317): kw TRANSCRIPTASE REVERSE II ORF2 domain identified by eMATRIX, accession number DM01354N, p-value=1.000e-40, raw score of 13.17
  DOMAIN (203)..(434): Reverse transcriptase domain identified by PFam, accession name rvt, E-value=5.6e-06, PFam score of 15.2
  misc_feature (1)...(894): Xaa = X or * as defined in Table 2
MGDFNTPLSTLDRSTRQKVNKDTQELNSAPHQADLIDIYRTLHPKSTEYTFFSAPHHTYSKTDHILGSKALLSECKRTEIITNYLSDDSAIKLELRIKNLTQNRSTTWKLNNLLLDDYWVHNEMKAEIKMFFETNENKDTTYQNLWDAFKAVCRGKFVALNAHKRKQGRSKIDTLTSQLKELEKQEQTHSKASRRQEITKIRAELKEIETQKTVQKINESRSWFFERINKIDRQLARLIKKKREKNLIDAIKNDKGDITTDPTEIQTTIREYYKHLYANKLENLEEMDKFLDTYTLPRLNQEEVESLNRPITGSEIVAIINSLTTKKSPGPDGFTAEFYQRAIRQEKEIKGIQLGKEEVKLSLFADDMIVYLENPIVSAQKLISNFSKVSGYKINVQKSQAFLYTNNRQTESQIMSELPFTIASKRIKYLGIQLTRDVKDLFKENYKPLLKEIKEDTNKWKNIPCSWVGRINIVKMAILPKVIYRFNAIPIKLPMTFFTELKKTTLNFIWNQKRAHIAKSVLSQKNKAGGITLPDFKLYYKATVTKTAWYWYQNRDTDQWNRTEPSEIMPRIYNYLIFDKPEKNKQWGKDSLFNKWCWKNWLAICRKLKLDPFLTPYTKINSRWIKDLNIRPKTIKTLEENLGITIQDIGMGKDFMSKTPKAMATKAKIDKWDLIKLKSFCTAKETTNRVNRQPTKWEKIFATYSSDKGLISRIYNELKQIYKKKTNNPIKKWAKDMNRHFSKEDIYAAKKHMKKCSSSLAIREMQIKTTMRYHLTLVRMAIIKKSGNNRCWRGRGEIGTLLHCWWDCKLVQSLWKSVWQFLRDLELEIPFDPAIPLLGKLSHKLGKCSIKAXQRLILVLLLVTTSKXRPQKPQLQLMLESLQRCSLNKCSLRS

SEQ ID NO: 38231 - protein, 401 aa, Homo sapiens
  DOMAIN (110)..(151): kw TRANSCRIPTASE REVERSE II ORF2 domain identified by eMATRIX, accession number DM01354I, p-value=1.000e-40, raw score of 15.55
MGDFNTPLSTLDRSTRQKVNKDTQELNSALHQVDLIDIYRTLHPKSTEYTFFSAPHHTYSKIDHMVGSKALLSKCKRTEIITNYLSDHSAIKLELRIKNLTQSRSTTWKLNNLLLNDYWVHNEMKAEIKMFFETNENKDTTYQNLWDTFKAVCRGKFIALNAHKRKQERSKIDTLTSQLKELEKQEQTHSKASRRQEITKIRAELKEIETQKTLQKISESRSWFFERINKIDRPLARLIKKKREKNQIDTIKNDKGDITTDPTEIQTTIREYYKHLYANKLENLEEMDKFLNTYTLPRLNQEDVESLNRPITGAEIVAIINSLPTKKSPGPDGFTAEFYQRYKEELARAAACSTEPVELRARQHPRSRAGRTCGGTGVARSRSPALRTGRARLAVPATQAG

SEQ ID NO: 38232 - protein, 758 aa, Homo sapiens
  DOMAIN (164)..(205): kw TRANSCRIPTASE REVERSE II ORF2 domain identified by eMATRIX, accession number DM01354I, p-value=1.000e-40, raw score of 15.55
  DOMAIN (1)..(150): AP endonuclease family 1 domain identified by PFam, accession name AP_endonucleas1, E-value=9e-10, PFam score of 32.6
MNRDKEGHYIMVKGSVQQEELTIPNIYAPNTGAPILIKQVLSDLQGHLDSHTLIMGDFNTPLSTLDRSTRQKANKDTQELNSALHQADLIDIYRTLHPKSTEYTFFSAPHHTYSKIDHILGSKALLSKCKRTEIITNYLSDHSAIKLELRIKNLTQNRSTTWKLNNLLLNDYWVHNEMKAEIKMFFETNENKDTTYQNLWDAFKAVCRGKFIALNAHKRKQERSKIDTLTSQLKELEKQEQTHSKASRRQEITKIRAELKEIETQKTLQKINESRSWFFERINKIDRPLARLIKKKREKNLIDAIKNDKGDITTDPTEIQTTIREYYKHLYANKLENLEEMDKFLDTYTLPRLNQEEVESLNRPITGSEIVAIINSLPTKKSPGPDGFTAEFYQRHTVSILISYCQGGSLMSQVYWNQQEKPPSSSNAPPGLSVNKAQHRHVCCRGEMLKRVQVHYVRAGESDSASFHCVAQGPRAFGKPLILSKENHLLTVTAIAKLNHKLCEIKSMGVFINTEPLYDSCLEQKHALFASPPATTHSTTMISKAKVIPMLSLTPGSFQTVESSLAPSAGKFQGTETSSLKTLINLCCPKLPSPSPAHLGGLPGGSQERPSRQYLYESARTTVLLGLGCPLKQIQLRSQHSSPLEYLESLPKKDRKKREKIQINKVRDEKGDITTNSAEIQRMVIGYHEQLYANKLENLEEMDKFLDTYDLPRLNHEEIQKLDRPITSNKIEAVKKSLPVKKSLEPDGFTAEFHQTFR

SEQ ID NO: 38233 - protein, 769 aa, Homo sapiens; identical to SEQ ID NO: 36639
  DOMAIN (173)..(218): kw TRANSCRIPTASE REVERSE II ORF2 domain identified by eMATRIX, accession number DM01354N, p-value=1.000e-40, raw score of 13.17
  DOMAIN (257)..(438): Reverse transcriptase domain identified by PFam, accession name rvt, E-value=7.3e-21, PFam score of 82.7

SEQ ID NO: 38234 - protein, 821 aa, Homo sapiens
  DOMAIN (110)..(155): kw TRANSCRIPTASE REVERSE II ORF2 domain identified by eMATRIX, accession number DM01354N, p-value=1.000e-40, raw score of 13.17
  DOMAIN (192)..(468): Reverse transcriptase domain identified by PFam, accession name rvt, E-value=6.3e-82, PFam score of 285.6
  misc_feature (1)...(821): Xaa = X or * as defined in Table 2
RKHXTWKRTSSTSHHKNMPNXLEKQEQTHSKPSRRREITKIRAELKEIETPKTAQKINESRSWFSERINKIDRPLARLRKKKREKNQIDTIKNDEGDITTHPTEIHTIIREYYKHLYANKLENLEEMDKFLDTYTLPRPNQEEVESLNGPIAGSEIQAIINSLPTKKSPGPDGFYQRYKEELVPFRLKLFQSIEKEGILPNSFYEASIILIPKPGRDTTKKENFRPISLLNINAKILNKILANRIQQHIKKLMHHDQVGFIPGMQGWFNIRKSINVIQHINRTKDKNHMIISIDAEKAFDKIQQPFMLKTLNKLGIDGTYHKIIRANYDKPTANIILNGQKLEAFPLKTGTRQGCPLSPLLFNIVLEVLARAIRQEKETEGIQLGKEEVKLSLFADDMIVYLENPIVSAQNLLKLISNFSKVSGYKINVQKSQVFLYTDNRQTESQIISELPFTIASKRIKYLGIQLTRYVKDLFKERYNEIKEDTNKWKNIPCSWVGRINIVKMAILPKVIYRFNAISIQLPMTFFTELEKTTLKFIWNQKRAHIAKSILSKKNKAGGIMLPDFKLYYKATVTKTAWHWYQNRDIDQRNRTEPSEIMPHVYNHLIFGKPDKNKQWGNDSLFNKWCWENWLAICKKLKLDPFLTPYTKINSRWIKDLNVRPKTIKTLEENLGNNIQDIGMGKDFTSKTPKAMATKDKIDKWDLMKLKSFCTAKETTIIVNRQPTEWEKIFAIYSYDKGLISRIYKEFKQIYKKKTNNPIKMWAKDMNRHFSKEDIYAAKRHMKKCSSSLAIREMQIKTTMRYHLTPVRMAIIKKSGNNRYP

SEQ ID NO: 38235 - protein, 1056 aa, Homo sapiens
  DOMAIN (554)..(599): kw TRANSCRIPTASE REVERSE II ORF2 domain identified by eMATRIX, accession number DM01354N, p-value=1.000e-40, raw score of 13.17
  DOMAIN (158)..(378): AP endonuclease family 1 domain identified by PFam, accession name AP_endonucleas1, E-value=3.9e-65, PFam score of 229.8
MGKKQNRKTGNSKKQSASPPPKEHSSLPATEQSWMEKDFDELREEGYRRSNYSELWEDIQTKGKEVENFEKNLEECITRITNTERCLKELMELKTKARDLREECRSLRSRCDQLEERARPKRAPEGRAKHGKEQPVPAAAKSCQNVKTIKTRKKLHQLMSKITRHRLANWIKSQDPSVCYIPETHLTCRDTHRLKIKGWRKIYQANGKQKQAGVAIHISDKTDFKPTKIKRDKEGHYIMVKGSIQQEKLTILNVYAPNTGAPRFIMQVLSDLQRDLDSHTLIMGDFNTPLSTLDRLTRQKVNKDTQELNSALHQVDLIDIYRTLQPKSTEYTLFSAPHHTYSKIDHILGSKALLSKCKRTEIITNYLSDHSAIKLELRIKKLTQIRSTAWKLNNLLLNDYWVHNEMKAEIKMFFKNNENKDATCQNLWDTFKAVCRGKFLALNAHKRKQERSKINTLTSQLKELEKQEQTHSKASRRQEITKIRAELKEIETQKTLQKINESRSWFFERINKIDRPLARLIKKKREKNQIDTIKNDKGDITTDPTEIQTTVREYYKHLYANKLENLEEMDKFLDTYTLPRLNQEEFESLNRPVTGSEIVAIINSLPTKKSPGPDGFTAEFYRRYKEELHINRAKDKNHMIISIDAEKAFDKIQQPFMLKTLNKLGTAGTYFKIIRAIYDKPTANIILNGQKLEAFPLKTGTRQGCPLSPLLFNIVLEVLARAIRQEKEIKGIQLGKEEVKLSLFADDMIVYLEKLIVSAQNLLKLISNFSKVSGYKINVQKSQAFLYTNNRQTESQIMSELPFTIASKRIKYLGIQLTRNVKDLFKENYKPLLKEIKEDTNKWKNIPCSWVGRINIVKMAILPKGIYRFNAIPIKLPKTFFTELEKTTLKFIWNQKRAHITKSILSQKNKAGGITLPAFKLYYKATVTKTAWYWYQNRDIDQWNRTEPSEITPHIYNYLIFDKPERNKQWGKDSLFNKWCWENWLAICRKLKLDPFLTAYTKINSRWIKDLNIRPKTIKTLEENLGITIQDIGMGKDFMSKTPKAMATKDKLTNGI

SEQ ID NO: 38236 - protein, 882 aa, Homo sapiens
  DOMAIN (272)..(317): kw TRANSCRIPTASE REVERSE II ORF2 domain identified by eMATRIX, accession number DM01354N, p-value=1.000e-40, raw score of 13.17
  DOMAIN (287)..(535): Reverse transcriptase domain identified by PFam, accession name rvt, E-value=2.4e-44, PFam score of 160.7
MGDFNTPLSTLDRSTRQKVNKDTQELNSALHQVDLIDIYRILHPKSTEYTFFSAPHHTYSKIDHILGSKALLSKCERTEIITNYLSDHSAIKLELRIKNLTQHCSTSWKLNKLLLNDYWVHNEMKAEIKMFFETNENKDTTYQNLWDAFKAVCRGKFIALNAHKRKQERSKIDTLTSQLKELEKQEQTHSKASRSQQITKIRAELKEIETQKTLQKINESRSLFFERINKIDRLLARLIKKKREKNLIDAIKNDKGDITTDPTEIQTAIREYYKHLYANKLENLEEMDKFLDTYTLPRLNQEEVESLNRPITGSEIVAIINSLPTKKNPGPDGFTAEFYQRFKEELHIKRAKDRNHMIISIDAEKAFDKIQQPFMLKTLNKLGIDGTYFKIIRAIYDKPTANIILNGQKLEAFPLKTGTRQGCPLSPLLFNIVFEVLARAIRQEKEIKGIQLGKEEIKLSLFADDMIVYLENPIVSAQNLLKLISNFSKVSGYKINVQKSQAFLYTNNRQTESQIMSELPFTIASKRIKYLGIQLTRDVKDLFKENYKPLLKEIKEDTNKWKNIPCSWVGRINIVKMAILPKLPMPFFTELEKTTLKFIWNQKRACITKSILSQKNKAEGITLPDFKLYYKATVTKTAWYWYQNRDIDQWNRTEPSEIMPHIYSYLIFDKPEKNKQWGKDSLFNKWCWENWLAIFRKLKLDPFLTPYTKINSRWIKDLNVRPKTIKTLEENLGITIQDIGMGKDFMSKTPKAMATKAKIDKWDLIKLKSFCTAKETTIRVNRQPTKWEKIFATYSSDKGLISRIYNELKEIYKKKTNNPIKKWAKDMNRHFSKEDIYGAKKHMKKCSSSLAIREMQIKTTMRYHLTLVRMAIIKKSGNKRCW

SEQ ID NO: 38237 - protein, 631 aa, Homo sapiens
  DOMAIN (410)..(455): kw TRANSCRIPTASE REVERSE II ORF2 domain identified by eMATRIX, accession number DM01354N, p-value=1.000e-40, raw score of 13.17
  DOMAIN (23)..(235): AP endonuclease family 1 domain identified by PFam, accession name AP_endonucleas1, E-value=6.9e-06, PFam score of -27.1
  misc_feature (1)...(631): Xaa = X or * as defined in Table 2
CCQFSMARRGHLPRSVQVSIPGQSPVPRAAYQDSGRYKEPTADCVGPRQTXCMAPHCHLGGWHMLALSLGKGAGAGGKESTWEPSPGIRMTKTYSTRREQSHPRTIKGQIKQMNLRETCSWTFHKKFLKTVAFQISHPHKNTCLAMAVSANRSMRQKFNKDTQELNSALHQVDLIDIYRTLHPKSTEYTFFSAPHHTYSKIDHILGSKALLSKCKRTEIITNYLSDHSAIKLELRIKNLTQNRSTTWKLNKLLLNDYWVHNEMKAEIKMFFETNENKDTIYQNLWDAFKAVCRGKFIALNAHKRKQERSKIDTLTSQLKELEKQEQTHSKASRRQEITKIRAELKEIETQKTRQKINESSSWFFEGINKIDRPLARLIKKKREKNQIDTIKNYKGDITTDPTEIQTTIREYYKHLYANKLENLEEMDKFLDTYTLPRLNQEEVECLNRPITGAEIVAIINTLPTKKSPGPDGFTAEFYQRCSRWIKDLNVRPKTIKTLEENLGITIQDIGTGKDIMSKTPKAMATKDKIDKWDLIKLKSFCTAKETTIRVNRQPTKWEKIFATYSSDKGLISRIYNELKQIYKKKSNNPIKKWAKDMNRHFSKEDIYAAKKHMKKRSSLAIREMQIKTTMR

SEQ ID NO: 38238 - protein, 1019 aa, Homo sapiens
  DOMAIN (336)..(377): kw TRANSCRIPTASE REVERSE II ORF2 domain identified by eMATRIX, accession number DM01354I, p-value=1.000e-40, raw score of 15.55
  DOMAIN (582)..(857): Reverse transcriptase domain identified by PFam, accession name rvt, E-value=2.2e-88, PFam score of 307.0
MGKKQNRKTGNSKTQSASPPPKERSSSPATEQSWMENDFDELREEGFRRSNYSELREDIQTKGKEVENFEKNLEECITRITNTEKCLKELMELKTKARKLREECRSLRSRCDQLEERVSAMEDEMNEMKREGKFREKRIKRNEQSLQEIWDYVKRPNLRLIGVPESDVENGTKLENTLQDIIQENFPNLARQANVQIQEIQRTPQRYSSRRATPRHIIVRFTKVEMKEKMLRAAREKDRSTRQKVNKDTQELNSALHQADLIDIYRTLHPKSTEYTFFSAPHHTYSKIDHIVGSKALLSKCKRTEIITNYLSDHSAIKLELRIKNLTQSRSTTWKLNNLLLNDYWVHNEMKAEIKMFFETNENKDTTYQNLWDALKAVCRGKFIALNAHKGKQERSEIDTLTSQLKELEKQEQTHSKASRRQEITKIRAELKEIETQKTLQKINESRSWFFERINKIDRPLARLIKKKREKNQIDTIKNDKGDITTDPTEIQTTIREYYKHLYANKLENLEEMDTFLDTYTLPRLNQEEVESLNRPITGSETVAIINSLPTKKSPGPDGFTAEFYQRYKEELVPFLLKLFQSIEKEGILPNSFYEASIILIPKPGRDTTKKENFRPISLMNIDAKILNKILANRIQQHIKKLIHHDQVGFIPGMQGWFNIRKSINVIQHINRAKDKNHMIISIDAEKAFDKIQQPFMLKTLNKLGIDGTYFKIIRAIYDKPTANIILNGQKLEAFPLKTGTRQGCPLSPLLFNIVLEVLARAIRQEKEIKAIQLGKEEVKLSLFADDMIVYLENPIVSAQNLLKLISNFSQLSGYKINVQKSQAFLYTNNRQTESQIMGELPFTIASKRIKYLGIQLTRDVKDLFKENYKPLLKEIKEETNKWKNIPCSWVGRINIVKMAILPKVIYRFNAIPIKLPMTFFTELEKTTLKFIWNQKRARIAKSILSQKNKAGGITLPDFKLYYKATVTKTACGYQKQGADTSEPAGAVRGNLPNFPSPQECRDARSTAMAWLAAAVPKK

SEQ ID NO: 38239 - protein, 610 aa, Homo sapiens
  DOMAIN (400)..(445): kw TRANSCRIPTASE REVERSE II ORF2 domain identified by eMATRIX, accession number DM01354N, p-value=1.000e-40, raw score of 13.17
MTTLDHVIATHQSEWVSFNEEPPFPAHSQVLRAVPGTWKELSTVILDHKEDDYIDFGELVLRDEGQGGTEEHLPGLSSSPDQSESSSGENHVVDGGSQDHSHSEQDDSSEKMGLISEAASPPGSPEQPPPDLASAISNWVQFEDDTPWASTSPPHQETAETALPLTMPCWTCPSFDSLGRCPLTSESSWTTHSEDTSSPSFGCSYTDLQLINAEEQTSGQASGADSTVDPSLRPKDMKPWGSSPQRSVARADRVDLRLEAANRCVGIASTLDPHQKLTGPYARVYTRDSKANLGLENEEGCSYSTRGSFYGYKEGRGLWQCQPLGEPCFEAGWFQLGKPKPPGVMGQIPISLSSGINKIDRQLARLIKKKREKNQIDAIKNDKGDITTDPIEIQTTIREYYKHLYANKLENLEEMDKFLNTYTLPRLNQEEVESLNRPITGAEIVAIINSLPTKKRPGPDGFTAEFYQRCSFVEVGLHCLVIPILQLVRTLERQNLLSDSLDGWAASFALHLDGAAGWAPVSGENDFTTFIGSKGRNIIKSSGDRATGKEQLSLIEFTAAEHICHETQEQITSPLCDASGNSDKCCKQGCQQDVSPSSGSTKDAHWTFLL

SEQ ID NO: 38240 - protein, 1063 aa, Homo sapiens; identical to SEQ ID NO: 34337
  DOMAIN (272)..(317): kw TRANSCRIPTASE REVERSE II ORF2 domain identified by eMATRIX, accession number DM01354N, p-value=1.000e-40, raw score of 13.17
  DOMAIN (212)..(466): Reverse transcriptase domain identified by PFam, accession name rvt, E-value=8.3e-07, PFam score of 27.0

SEQ ID NO: 38241 - protein, 1160 aa, Homo sapiens
  DOMAIN (334)..(380): kw TRANSCRIPTASE REVERSE II ORF2 domain identified by eMATRIX, accession number DM01354O, p-value=1.000e-40, raw score of 8.73
  DOMAIN (368)..(562): Reverse transcriptase domain identified by PFam, accession name rvt, E-value=4.8e-09, PFam score of 43.5
MGTSEVQNGEERAGTSGQGSVEQLSGSSVQLPPGLKLCFEPYFSSCASDCILHASPLSLMAASGSQNPNLWASWLCCKWVQCPERQLGCHLTSSVIYGLRYYPQAKRSELELRDCEGLCNQTSPLSSLDGMGWKAAAEESNSGIRNIWIPIPAFATHKQYNVRQVISPSPPYWSHRGNGNNSLCVTRLSGGLKQPVAGTGRGLEGGSGTRDLMPFLSAAPKEQPPILAPARRSWFFEKINKIDRLLARLIKKKREKNQIDAIKNDKGDITTDPTEIQTIIREYYKHLYANKLENPQEMDKFLNSYTLPRLNQEEAESLNRPITGSEIEAIINSLPTKKSPGPDGFTAKFYQRYKEELVPFLLKLFQLIEKEGILPNSFYEASIILIPKPGRDTTKQKKNFRPISLMNIDAKILNKILANRIQQHIKKLIHHDQVGFIPGMQGWFNIRKSINVIQHINRTKHKNHMIISIDAEKASDKIQQPFMLKTLRKLGIDETQTESQIMSELPFTIASKRIKYLGIQLTRDVKDLFKENYKPLLNEIKEDTNKWKNFPCSWVGRINIVKMAIVPKVIYRFNASPIKLPMTFFTELEKTTLKFIWNQKRACIAKSILSQKNKAGGIMLPDFKLYYKATVTKTAWYWYQNRDIDQWNRTEPSEITPHIYNYLFFDKPDKNKQWGKDSLFNKWCWENWLAICRKLKLDPVLTPYTKINSRWIKDLHVRPKTIKTLEENLGITIQDIGMGKDFMSKTPKAMATKAKIDKWDLIKLKSFCTAKETTIRVNRQPTEWEKIFATYSSDKGLISRIYNELKQIYKKKTNNPIKKWAKDMNRHFSKEDIYADKKHMKKCSSSLIIREMQVKTTMRYHLTPVRMAIIKKSGNNSLFRGHGAKESYVDKDKRGHLHSGVPFQKSPAGFAKAERGSRRSVVAAGLLPSLTSNMSRQTNDNTCTAATVPSYRMHRQYDAVLSCARCLLWPTLTGIMQKREFWEAQFSLAMVTCNNVAGQTPPHTTEPRKKKGVMAKLSGAFTGKSVFSGESSMGEESPAGMRNGTGARVGQEERVGVGKERQLRKKELEVGLPELESPGSEARVVSSCMSPSDAQAYLGHHSPPPAVGHLGTCLATSRYTDSCTFQWFCLLSGYIWSLPTQCEDGEDEDLYDGPLPFNEW

SEQ ID NO: 38242 - protein, 648 aa, Homo sapiens
  DOMAIN (12)..(53): kw TRANSCRIPTASE REVERSE II ORF2 domain identified by eMATRIX, accession number DM01354I, p-value=1.000e-40, raw score of 15.55
  DOMAIN (225)..(452): Reverse transcriptase domain identified by PFam, accession name rvt, E-value=4.9e-35, PFam score of 129.8
NLTQNRSTTWKLNNLLLNDYWVHNKMKAEIKMFFETNENKDTTYQNLWDTFKAVCRGKFIALNAHKRKQERSKIDTLTSQLKELEKQEQTHSKASRRQEITKIRAELKEIETQKTFQKVNESSSWFFERINKIDRPLARLIKKKREKNQIDAIKNDKGYITTDPTEIHTTIREYYKHLYANKLENLEEMDKFVGTYTLPRLNQEEVESLNRPITGSEIVAIINSLPTKKSPGPDGFTAEFYQRYKEELAGRDTTKKENFRPISLMNIDAKILNKILANRIQQHIKKLIHHDQVGFIPGMQGWFNICKSINVIQHINRTKDKNHMIISIDAEKAFDKIQQPFMLKTLNKLVLEVLARAISQEKEIKGIQLGKEEVKLSLFADDMIVYLENPIVSAQNLLKLISNFSKVSGYKINVQKSQAFLYTNNRQTESQIMSELPFTIASKRIKYLGIQLTRDVKDLFKENYKLLSKEIKEDTNKWKNIPCSWVGRINIVKMAILPKVIYRFNAIPIKLPMTFFTELEKATLKFIWNQKRARIAKSILSQKNKAGGITLPDFELYYKTTVTKTAWYSYQNRDIDQWNRTEPSEITPHIYNYLIFDKPEKNKQWGKDSLFNKWCWENWLAICRKLKLDPFLTPYTKINSRWIKDLKR

SEQ ID NO: 38243 - protein, 1599 aa, Homo sapiens
  DOMAIN (272)..(317): kw TRANSCRIPTASE REVERSE II ORF2 domain identified by eMATRIX, accession number DM01354N, p-value=1.000e-40, raw score of 13.17
  DOMAIN (1061)..(1427): Voltage gated chloride channels domain identified by PFam, accession name voltage_CLC, E-value=1.1e-169, PFam score of 576.2
MGDFNTPLSTLDRSTRQKVNKDTQELNSALHQADLIDIYRTLHPKSTEYTFFSAPHHTYSKIDHILGSKALLSKCKRAEIITNYLSDHSAIKLELRIKNLTQSRSTTWKLNNLLLNDYWVNNEMKAEIKMFFETKENKDTTYQNLWDAFKAVCRGKFIALNAHKRKQERSKIDTLTSQLKELEKQEQTHSKASRRQEITKIRAELKEIETQKTLQKINESRSWFFERINKIDRPLARLIKKKREKNQIDTIKNDKGDITTDPTEIQTTIREYYKHLYANKLENLEQMDAFLDTYTLPRLNQEEVESLNRPITGAEIVAIINSLPTKKSPGPDGFTAEFSQRYKEELVPFLLKLFQSIEKEGILPNSFYEASIILIPKPGRDTTKKENFRPISLMNIDAKILNKILANRIQQHIKKLIHHDQVGVIPGMQGWFSIRKSINVIQHINRAKDKNHMIISIDAEKAFDKIQQPFMLKTLNKLAQNLLKLISNFSKVSGYKINVQKSQAFLYTNNRQTESQIMSELPFTIASKRIKYLGIQLTRDVKDLFKENYKPLLKEIKEDTNKWKNIPCSWVGRINIVKMAILPQVIYRFNAIPIKLPMTFFTELEKTTFKFIWNQKRARIAQVQSLSPKEQKPGASTLPDFKLYYKATVTKTAWYWYQNRDIDQWDRTEPSEITPHIYNYVIFDKPEKSKQWGKDSLFNKWCWENWIAICRKLKLDPFLTPYTKINSRWIKDLNVRPKTIKTLEENLGITIQDIGTGKDFMSKTPKAMATKAKIDKRDLIKLNSFCTAKETTIRVNRQPTKWEKIFTTYSSDKGLISRIYNELKQIYKKKTNNPIKKWAKDMNRHFSKEHIYAAKKHMKKCSPSLAIREMQIKTTMRYHLTPVRMAIIKKSGNNRCWRGCGEIGTLLHCWWDCKLVQPLWKSVWRFLRDLELEIPFDPAIPLLGIYPKDYKSCCYKDTCTPLKKHISFHLYQYDTDMIGNAGLVIQQPSILQSEDKSYNGGGIGSSNRIMDFLEEPIPGVGTYDDFNTIDWVREKSRDRDRHREGAFAYIVNYFMYVLWALLFAFLAVSLVKVFAPYACGSGIPEIKTILSGFIIRGYLGKWTLVIKTITLVLAVSSGLSLGKEGPLVHVACCCGNILCHCFNKYRKNEAKRREVLSAAAAAGVSVAFGAPIGGVLFSLEEVSYYFPLKTLWRSFFAALVAAFTLRSINPFGNSRLVLFYVEFHTPWHLFELVPFILLGIFGGLWGALFIRTNIAWCRKRKTTQLGKYPVIEVLVVTAITAILAFPNEYTRMSTSELISELFNDCGLLDSSKLCDYENRFNTSKGGELPDRPAGVGVYSAMWQLALTLILKIVITIFTFGMKIPSGLFIPSMAVGAIAGRLLGVGMEQLAYYHQEWTVFNSWCSQGADCITPGLYAMVGAAACLAKEEFAHKTLAMDVMKPRRNDPLLTVLTQDSMTVEDVETIISETTYSGFPVVVSRESQRLVGFVLRRDLIISIENARKKQDGVVSTSIIYFTEHSPPLPPYTPPTLKLRNILDLSPFTVTDLTPMEIVVDIFRKLGLRQCLVTHNGRLLGIITKKDVLKHIAQMANQDPDSILFN

SEQ ID NO: 38244 - protein, 1048 aa, Homo sapiens
  DOMAIN (110)..(151): kw TRANSCRIPTASE REVERSE II ORF2 domain identified by eMATRIX, accession number DM01354I, p-value=1.000e-40, raw score of 15.55
  DOMAIN (356)..(535): Reverse transcriptase domain identified by PFam, accession name rvt, E-value=7e-24, PFam score of 92.8
MGDFNTPLSTLDRSSRQKVNKDTQELNSTLHHADLIDIYRTLHPKSTEYTFFSAPHHTYSKIDHVVGSKALLSKCKRTEIITNCLSDHSAIKPELRIKKLTQNRSTTWKLNNLLLNDYWVHNKMKAEIKMFFETNENKDTTYQNLWDTFKAVSRGKFIALNAHKRKQKRCKIDTLASQLKEVEKQEQTHSKASRRQEITKIRAELKEIETQKTLQKINESRSWFLERINKIDRPLARLIKKKREKNQIDVIKNDKGDITTDPTEIQTTIREYYKHLYANKLENLEELDKFLDTHTLQRLNQEEVESLNRPITGSEIVAIINSLPTKKSPGPDGSTAEFYQRYKEELLPFLLKLFQSIEKEGILPNSFYEASIILIPKPGRDTAKKENFRPISLMNIDAKILNKILANQIQQHIKKLIIHHDQVGFIPGMQGCLEVLARAIRQEKEIKGIQLGKEEVKLSLFADDMIVYLENPIVSAQNLLKLISNFSKVSGYKINVQKSQAFLYTNNRQTESQIMSEIPFTIVSKRIKYLGIQLTRDMKDLFKENYKPLLNEIKEDTNKWKNIPCSWLGRINMVKMAILPKVIYRFNAILIKLAMTFFTESEKTTLKFIWNQKRACIAKSILSQKNKVIGITLPDFKLYYKAIVNKTAWYWYQNRDIDQWNRTEPSEITPHIYNYLIFDKPEKNKQWGKDSLFNKWCWENWLAICRKLKLDPFLTPYTKINSRWIKDFHVRPKTIKTLEENLGITIQDIGMDKDFMSKTPKAMATKAKIDKWDLIKLKSFCRAKETTIRVNRPPTEWEKIFVTYSSDKGLISRIYNELKQIYKKKTNNPIKKWAKDMNRHFSKEYIYAAKKHVKKRSSSLAIREMQIKSTMRYHLTPVRMVIIKKSGNNRCWRGCGEIGTLLHCWWDCKLVHPLWKSVWRFLRDLELEIPFDPAILLLGIYPKDYKSCCYKDTCTHEKAEIQKSKGIRDYGEIGTRTEDMDSQFRPLSVVRAQIIPFEFPWEGIPLGGPFPRHSCSYPVGLALLYHSSSAAGPVRGHLSLQWNSRMTS

SEQ ID NO: 38245 - protein, 889 aa, Homo sapiens
  DOMAIN (259)..(304): kw TRANSCRIPTASE REVERSE II ORF2 domain identified by eMATRIX, accession number DM01354N, p-value=1.000e-40, raw score of 13.17
  DOMAIN (275)..(473): Reverse transcriptase domain identified by PFam, accession name rvt, E-value=6.2e-11, PFam score of 49.8
MHNTDGNRFLSHWGYRQALSISKPASASLHPSSKTKPLGTQSKTVVAKRNREHGKKERSSSPAMEQSWMENDFDELREEGFRRSNYSELREDIQTKGKEVENFEKNLEECITRITNTEKCLKELMELKTKARELREECRSLRSRCDQLEERRKQERSKIDTLTSQLKELEKQEQTHSKAGRRQEITKIRAELKEIETQKTLQKINESRSWFFERINKIDRPLARLIKKKREKNQIDTIKNDKGNITTDPTEIQTTIREHYKHLYANKLENLEGMDKFLDTYTLPRLNQKEVESLNRPITGSEIVAIINSLPTKKSPGPDGFTAEFYQRYKEELHINRAKDKNHMIISIDAEKAFDKIQQPFMLKTLNKLVLEVLARAIRQEKEIKGIQLGKEEVKLSLFADDMIVYLENPIVSAQNLLKLLSNFSKVSGYKINVQKSQAFLYTNNRQTESQIMSELPFTIASKRIKYLGIQLTRDVKHLFKENYKPLLKEIKEDTNKWKNIPCSWVERINIVKMAILPKVIYRFNAIPIKLPMTFFTELEKTTLKFIWNQKRARIAKSILSQKNKAGGITLPDFKLYYKATVTKTAWYSYQNRDIDQWNRTEPSEILPRIYNYLIFDKPEKNKQWGKDSLFNKWCWENWLAICRKLKLDPFLKPYTKIKSGWIKDLNVRPKTIKTLEENLGITIQDIGMGKDFMSKTPKAMATKAKIDKWDLIKLKSFCTAKETTIRVNRQPTEREKIFATYSSDKGLISRIYKELKQIYKKRTNNLIKKWVKDMNRHFSKEDVYAAKKHMKKCSSSLAIREMQIKTTMRYHLTPVRMAIIKKSGNNRITIVLLPGSLIVRSFHVTLNAILLHPGLTLFSPSAGRRDIPRVAFSYLAFSAQPSHNTPVN

SEQ ID NO: 38246 - protein, 986 aa, Homo sapiens
  DOMAIN (454)..(499): kw TRANSCRIPTASE REVERSE II ORF2 domain identified by eMATRIX, accession number DM01354N, p-value=1.000e-40, raw score of 13.17
  DOMAIN (53)..(278): AP endonuclease family 1 domain identified by PFam, accession name AP_endonucleas1, E-value=1.5e-71, PFam score of 251.1
MNNSIKEKVKLSLTKWEMQTKPNNNTVDLKDAQEVNLTSTDYRKQHVMLPTEINSDDSLLKIGVIRLANWIKSQDPSVCCNQETHLTCRDTHRLKIKGWRKIYQANGKQKKAGVAILVSDKTDFKPTKIKRDKEGHYIMVKGSIQQEELTILNTYAPNTGAPRFIKQVLSDLQRDLDSYTLIMGDFNTPLSTLDRSTRQKVNKDTQELNSALHQVDLIDIYRTLHPKSTEYTFFSAPHHTYSKIDHILGSKALLSKCKRTEIITNYLSDHSAIKLELRIKNLIQKRSTTWKLNKLLLNDYWVHNELKAEIKMFFETNENKDTTYQNLWDAFKAVCRGKFIALNAHKRKQERSKIDTLTLQLKALEKQEQTHSKASRRQEITKIRAELKEIETQKTLQKINESRSWFFERINKIDKPLARLIKKKREKNQIDTIKNDRGDITTDPTEIQTTIREYYKHLYANKLENLEEMDKFLDTYTLPRLNQEEVESLNRPITGSEIVAIINSLPTKKSPGPDGFTAEFYQRYKQELHINRAKDKNHMIISIDAEKAFDKIQQPFMLKTLNKLGIDGTYFKIIRAIYDKPTANIILNGQKLEAFPLKTGTRQGCPLSPVLFNIVLEVLARAIKQEKEIKGIQLGKEEVKLSLFADDMIVYLENPIVSGQNLLKLISNFSKVSGYKINVQKSQAFLYTSNRQTESQIMSELPFTIASKRIKYLGIQLTRDVKDLFKENYKPLLKEIKEDTNKWKNIPCSWAGRINIVKMAILPKVIYRFNAIPIKLPMPFFTEMEKTTLKFIWNQKRARITKSILSQKNKAGGITLPDFKLYYKATVTKTAWYWYQNRDIDQWNRTEPSEIMLHIYNYVIFDKPEKNKQWGKDSLFNKWCWENWLVICRKLKLDRFLTPYTKINSRWLKDLDIRPKTIKTLEENIRITIQDIGMGKDFMSKTPKGMAMKAKIDKWDLIKLKSFCTAKETTIRVNRQPTKWEKIFAT

SEQ ID NO: 38247 - protein, 1405 aa, Homo sapiens
  DOMAIN (283)..(328): kw TRANSCRIPTASE REVERSE II ORF2 domain identified by eMATRIX, accession number DM01354N, p-value=1.000e-40, raw score of 13.17
  DOMAIN (807)..(1081): Reverse transcriptase domain identified by PFam, accession name rvt, E-value=9.5e-68, PFam score of 238.5
  misc_feature (1)...(1405): Xaa = X or * as defined in Table 2
MGDFNTLLSALDRSTRQKVNKDIQELNSALHQADLIDIYRTLHPKSTEYTFFSAPHRTYSKIDHLVGSKALLRKCKRTEIITNCLSDHSAIKLELRIKKLTQNHSTTWQLNNLLLNDYWVHNEMKAEIKMFFETNENKDTTYQNLWYVKDTRISGMLWYVKAVCRGKFIALNAHKRKQERSKIDTLTSQLKELEKQEQTHSKTSRRQEITKIRAELKEIETQKTLQKINECRSWFFEKINKIDRPLARLIKKKREKNQIDAIKNDKGDIITDPTEIQTTIREYYKHLYGNKLENLEEMDKFLDTYTLPRLNQEEVESLNRPITGSEIEAIINSLPTKKSPGPDGFTAEFYQRYKEELRIKYLGIQLTRDVKDLFKENYKPLLNEIKEDTNKWKNIPCSWVGRNQYHENGHTAQGNLXIQCHPHQATNDFLHRIGKNYFKVHMEPKKSPHRQVNPKPKEQSWRHHATXLQTILQGYSNQNSMVLVPKQRYRSMEQNRALRNNAAYLQPSDLXQTXQKQAMGKGFPIXXMVLGKLASHMXKAETGSLPYTLYKNXFKMDXRLKRXTXNHKIPRRRPRQYHSGHRHGQGLHVXNTKSNGNKSQNXQMGSNXTKELLHSKRNYHQSEQATYRMGEIFCNLLFXQRAHIQKVQXTQTNLQEKNKQPHQKVDKGYEQTLLKRRHLCSQKTHEKMLIITGHQRNANQNHNEIPSHTSXNGDHXKVRKQQVLERMWRNRNTFTLLGGLFYYCQGPIFTSSSFTVIRERGXCELRSPCSGNGXSSXRXCCNSDXILPDIQRRIVPILLTLFRKTEKEGTLPNSSYEASITLIPKPGKDTTKKENYRLISLMNTDAKILNKILANRIQQHIKKTIHHDQVGSIPGMEGWFNICKSINVIHHINRIKNKNHMIISIDAEKALDKIQHLFMIKTLSKIGIQGTYLNVIKAIYDKPTANIILNGEKLKAFPLRNETRQGCPLSPLLFNTVLKVLARAVRQEKEIKGIQIGKEEVILSLFADDMIVYLKNPKDSSRKLLELIKGFNKVSRYKINVHKSVALLNTNSNQAENQINNSTPFTIAAKKMKYLGIYLAKEVKDLYKENYKPLLKEIKEDTNKWKNIPCSWVGRINIVKMASLPKNWKKTTLKFIWNQKRTCIAKSILSQKNKAGGITLPDFKLYYKATVTKRAWYWYQNRDIDQWNRTEPSEITPQIYNYLIFDKPEKNKQWGKDSLFNKWCWENWLAICRKLKLDPFLIPYTKINSRWIKVLNVRPKTIKTLEENLGITIQDIDMGKDFMSKTPKGMATKAKIDKWDLIKLKNFCTAKETTIRVNRQPTKWEKIFATYLSDKGLISRIYNELKQIDKKKTTNPIKKWAKDMNRHFSKEDIYAAKKHMKKCSSSLAIREMQIKTTMRYHLTPV
